United States Patent Application Publication US 2007/0214517 A1 - sequence listing, part 34

SEQ ID NO: 40086 - DNA, 1711 bp, Arabidopsis thaliana
  misc_feature (1)..(1711): Ceres Seq. ID no. 13575064
  misc_feature: MA Experiment ID: 20000179 Result: Down-regulated in Transcription
  misc_feature: MA Experiment 20000179 PARAMETER Experiment Name: At_Germinating_Seeds_P Parameter: Age (hr) Value: 6 vs. 0
  misc_feature: MA Experiment 20000179 PARAMETER Experiment Name: At_Germinating_Seeds_P Parameter: Tissue Value: Germinating Seeds
aacaaatttgacgtttttgttcttcgaaattcaaattcacccagaaaaaatctcaatccgcgatggttgaagaatcagcttctgcgtcggaagcttcggtgatacaaaccctaaccgagccggcgacggagattgcgcaaaccctagaacctaacctagcctcaatcgaagccaccgtcgaatcggttgttcagggaggcactgaatcgacttgtaacaacgacgctaataacaacaacgccgctgacagtgctgctactgaggtttgtgatgaggagcgtgagaagacgcttgagttcgctgaggaattgacggagaaaggctctgtgtttttgaaagagaacgatttcgctgaagccgtcgattgcttcagccgtgctctcgaaatcagggttgcacattatggtgaacttgatgctgagtgtataaacgcatactatcgatatggattagctctcctggcaaaggctcaagctgaagctgatccacttgggaacatgcctaagaaagaaggtgaagttcagcaagagtccagcaatggtgaatcgctggctccttctgttgtttcaggtgacccagagagacaagggagttcaagtgggcaagaaggttctggtggtaaagaccaaggagaggatggtgaagattgtcaagatgatgacctatctgatgctgatggtgatgctgatgaagatgagtctgatttggatatggcctggaaaatgctggacattgctagggttattactgacaaacagtctactgagacaatggaaaaagtggatatactctgttcgcttgctgaagtgtccttggaaagagaggacattgagtcttccctgtctgactacaagaatgcattatccatcttagagagactggttgagcccgacagtcgacgcacagctgaattaaacttccgcatctgcatttgtcttgagactggatgtcagcctaaggaagcaataccatattgtcaaaaagctttgttaatatgcaaagctcggatggagaggctcagtaatgaaatcaaaggtgcatctggttcagcaacttcctcaaccgtctctgaaatagatgaaggcatccaacaatcatccaatgttccttacattgataaatctgcttcagacaaagaagttgagatcggagacttagctggtctcgctgaagatctagaaaagaagcttgaggatttaaaacaacaagcagagaacccaaagcaggttcttgctgagctaatgggcatggtatcagctaagccaaatgccagtgacaaggttgttcctgctgctgctgaaatgagctcttctaggatgggaactgtgaacaccaatttcgggaaagatttagagtcgcctacagtctcaaccgctcataccggtgcagcaggaggaggagcagcatcaggtgttactcacttgggtgttgttggaagaggagtgaagagagttttgatgaatacaacctcgattgaatcaagtgcatcaaagaaaccagctctagagttttcagacaaagcagatggcaactcctcttgaaaccggaaaaaggtataaaaattcctgttactagtgaagtatctaacctaagaaaactgagaaaaacatttggtatcttcctcatgaatcttccaagactagattttcaggttcatgttttgtaatggagtccgtacttgctacttttttaaatcgctgagatatttttt

SEQ ID NO: 40087 - protein, 492 aa, Arabidopsis thaliana
  peptide (1)..(492): Ceres Seq. ID no. 13575065
  misc_feature (282)..(315): Pfam Name: TPR Domain Pfam Description: TPR Domain
  misc_feature (59)..(413): Homolog of NCBI NO: 19112105 NR Description: hypothetical coiled-coil protein; possible
  misc_feature (80)..(401): Homolog of NCBI NO: 34880630 NR Description: similar to Nasp protein [Rattus norvegicus]
  misc_feature (60)..(142): Homolog of NCBI NO: 18129310 NR Description: hypothetical protein [Pinus pinaster]
  misc_feature (80)..(369): Homolog of NCBI NO: 30584691 NR Description: Homo sapiens nuclear autoantigenic sperm protein
  misc_feature (80)..(369): Homolog of NCBI NO: 27262630 NR Description: nuclear autoantigenic sperm protein isoform 3
  misc_feature (80)..(401): Homolog of NCBI NO: 13435642 NR Description: Nasp protein [Mus musculus]
  misc_feature (80)..(340): Homolog of NCBI NO: 4104353 NR Description: nuclear autoantigenic sperm protein autosomal
  misc_feature (53)..(492): Homolog of NCBI NO: 38175649 NR Description: tetratricopeptide repeat-containing protein-like
  misc_feature (1)..(379): Homolog of NCBI NO: 25407799 NR Description: hypothetical protein AT4g37210 [imported] -
  misc_feature (1)..(492): Homolog of NCBI NO: 18419996 NR Description: tetratricopeptide repeat (TPR)-containing protein
MVEESASASEASVIQTLTEPATEIAQTLEPNLASIEATVESVVQGGTESTCNNDANNNNAADSAATEVCDEEREKTLEFAEELTEKGSVFLKENDFAEAVDCFSRALEIRVAHYGELDAECINAYYRYGLALLAKAQAEADPLGNMPKKEGEVQQESSNGESLAPSVVSGDPERQGSSSGQEGSGGKDQGEDGEDCQDDDLSDADGDADEDESDLDMAWKMLDIARVITDKQSTETMEKVDILCSLAEVSLEREDIESSLSDYKNALSILERLVEPDSRRTAELNFRICICLETGCQPKEAIPYCQKALLICKARMERLSNEIKGASGSATSSTVSEIDEGIQQSSNVPYIDKSASDKEVEIGDLAGLAEDLEKKLEDLKQQAENPKQVLAELMGMVSAKPNASDKVVPAAAEMSSSRMGTVNTNFGKDLESPTVSTAHTGAAGGGAASGVTHLGVVGRGVKRVLMNTTSIESSASKKPALEFSDKADGNSS

SEQ ID NO: 40088 - protein, 347 aa, Arabidopsis thaliana
  peptide (1)..(347): Ceres Seq. ID no. 13575066
  misc_feature (137)..(170): Pfam Name: TPR Domain Pfam Description: TPR Domain
  misc_feature (1)..(214): Homolog of NCBI NO: 39597341 NR Description: Hypothetical protein CBG02966 [Caenorhabditis
  misc_feature (1)..(268): Homolog of NCBI NO: 19112105 NR Description: hypothetical coiled-coil protein; possible
  misc_feature (1)..(256): Homolog of NCBI NO: 34880630 NR Description: similar to Nasp protein [Rattus norvegicus]
  misc_feature (1)..(224): Homolog of NCBI NO: 30584691 NR Description: Homo sapiens nuclear autoantigenic sperm protein
  misc_feature (1)..(224): Homolog of NCBI NO: 27262630 NR Description: nuclear autoantigenic sperm protein isoform 3
  misc_feature (1)..(256): Homolog of NCBI NO: 13435642 NR Description: Nasp protein [Mus musculus]
  misc_feature (1)..(195): Homolog of NCBI NO: 4104353 NR Description: nuclear autoantigenic sperm protein autosomal
  misc_feature (1)..(347): Homolog of NCBI NO: 38175649 NR Description: tetratricopeptide repeat-containing protein-like
  misc_feature (1)..(234): Homolog of NCBI NO: 25407799 NR Description: hypothetical protein AT4g37210 [imported] -
  misc_feature (1)..(347): Homolog of NCBI NO: 18419996 NR Description: tetratricopeptide repeat (TPR)-containing protein
MPKKEGEVQQESSNGESLAPSVVSGDPERQGSSSGQEGSGGKDQGEDGEDCQDDDLSDADGDADEDESDLDMAWKMLDIARVITDKQSTETMEKVDILCSLAEVSLEREDIESSLSDYKNALSILERLVEPDSRRTAELNFRICICLETGCQPKEAIPYCQKALLICKARMERLSNEIKGASGSATSSTVSEIDEGIQQSSNVPYIDKSASDKEVEIGDLAGLAEDLEKKLEDLKQQAENPKQVLAELMGMVSAKPNASDKVVPAAAEMSSSRMGTVNTNFGKDLESPTVSTAHTGAAGGGAASGVTHLGVVGRGVKRVLMNTTSIESSASKKPALEFSDKADGNSS

SEQ ID NO: 40089 - protein, 276 aa, Arabidopsis thaliana
  peptide (1)..(276): Ceres Seq. ID no. 13575067
  misc_feature (66)..(99): Pfam Name: TPR Domain Pfam Description: TPR Domain
  misc_feature (1)..(143): Homolog of NCBI NO: 39597341 NR Description: Hypothetical protein CBG02966 [Caenorhabditis
  misc_feature (1)..(197): Homolog of NCBI NO: 19112105 NR Description: hypothetical coiled-coil protein; possible
  misc_feature (1)..(185): Homolog of NCBI NO: 34880630 NR Description: similar to Nasp protein [Rattus norvegicus]
  misc_feature (1)..(153): Homolog of NCBI NO: 30584691 NR Description: Homo sapiens nuclear autoantigenic sperm protein
  misc_feature (1)..(153): Homolog of NCBI NO: 27262630 NR Description: nuclear autoantigenic sperm protein isoform 3
  misc_feature (1)..(185): Homolog of NCBI NO: 13435642 NR Description: Nasp protein [Mus musculus]
  misc_feature (1)..(124): Homolog of NCBI NO: 4104353 NR Description: nuclear autoantigenic sperm protein autosomal
  misc_feature (1)..(276): Homolog of NCBI NO: 38175649 NR Description: tetratricopeptide repeat-containing protein-like
  misc_feature (1)..(163): Homolog of NCBI NO: 25407799 NR Description: hypothetical protein AT4g37210 [imported] -
  misc_feature (1)..(276): Homolog of NCBI NO: 18419996 NR Description: tetratricopeptide repeat (TPR)-containing protein
MAWKMLDIARVITDKQSTETMEKVDILCSLAEVSLEREDIESSLSDYKNALSILERLVEPDSRRTAELNFRICICLETGCQPKEAIPYCQKALLICKARMERLSNEIKGASGSATSSTVSEIDEGIQQSSNVPYIDKSASDKEVEIGDLAGLAEDLEKKLEDLKQQAENPKQVLAELMGMVSAKPNASDKVVPAAAEMSSSRMGTVNTNFGKDLESPTVSTAHTGAAGGGAASGVTHLGVVGRGVKRVLMNTTSIESSASKKPALEFSDKADGNSS

SEQ ID NO: 40090 - DNA, 1369 bp, Arabidopsis thaliana; identical to SEQ ID NO: 37557
  misc_feature (1)..(1369): Ceres Seq. ID no. 12489536
  misc_feature: MA Experiment ID: 108461 Result: Down-regulated in Transcription
  misc_feature: MA Experiment 108461 PARAMETER Experiment Name: At_Germinating_Seeds_cDNA_P Parameter: Age (day) Value: 1 vs. 0
  misc_feature: MA Experiment 108461 PARAMETER Experiment Name: At_Germinating_Seeds_cDNA_P Parameter: Tissue Value: Germinating Seeds
  misc_feature: MA Experiment ID: 20000224 Result: Down-regulated in Transcription
  misc_feature: MA Experiment ID: 20001905 Result: Up-regulated in Transcription
  misc_feature: MA Experiment 20001905 PARAMETER Experiment Name: At_Drought_Reproduction_P Parameter: Age (day) Value: 40
  misc_feature: MA Experiment 20001905 PARAMETER Experiment Name: At_Drought_Reproduction_P Parameter: Organism Value: A. thaliana
  misc_feature: MA Experiment 20001905 PARAMETER Experiment Name: At_Drought_Reproduction_P Parameter: Plant Line Value: WS
  misc_feature: MA Experiment 20001905 PARAMETER Experiment Name: At_Drought_Reproduction_P Parameter: Timepoint (day) Value: 10
  misc_feature: MA Experiment 20001905 PARAMETER Experiment Name: At_Drought_Reproduction_P Parameter: Tissue Value: Rosettes
  misc_feature: MA Experiment 20001905 PARAMETER Experiment Name: At_Drought_Reproduction_P Parameter: Treatment Value: Drought vs. No Drought
  misc_feature: MA Experiment ID: 20001911 Result: Up-regulated in Transcription
  misc_feature: MA Experiment 20001911 PARAMETER Experiment Name: At_Drought_Reproduction_P Parameter: Age (day) Value: 40
  misc_feature: MA Experiment 20001911 PARAMETER Experiment Name: At_Drought_Reproduction_P Parameter: Organism Value: A. thaliana
  misc_feature: MA Experiment 20001911 PARAMETER Experiment Name: At_Drought_Reproduction_P Parameter: Plant Line Value: WS
  misc_feature: MA Experiment 20001911 PARAMETER Experiment Name: At_Drought_Reproduction_P Parameter: Timepoint (day) Value: 10
  misc_feature: MA Experiment 20001911 PARAMETER Experiment Name: At_Drought_Reproduction_P Parameter: Tissue Value: Flowers
  misc_feature: MA Experiment 20001911 PARAMETER Experiment Name: At_Drought_Reproduction_P Parameter: Treatment Value: Drought vs. No Drought

SEQ ID NO: 40091 - protein, 383 aa, Arabidopsis thaliana; identical to SEQ ID NO: 37558
  peptide (1)..(383): Ceres Seq. ID no. 12489537
  misc_feature (145)..(215): Pfam Name: RNA recognition motif. (a.k.a. RRM, RBD, or RNP domain) Pfam Description: RNA recognition motif. (a.k.a. RRM, RBD, or RNP
  misc_feature (145)..(215): Pfam Name: RNA recognition motif. (a.k.a. RRM, RBD, or RNP domain) Pfam Description: RNA recognition motif. (a.k.a. RRM, RBD, or RNP
  misc_feature (24)..(333): Homolog of NCBI NO: 15292697 NR Description: putative RNA-binding protein [Arabidopsis
  misc_feature (24)..(266): Homolog of NCBI NO: 38175737 NR Description: putative heterogeneous nuclear ribonucleoprotein
  misc_feature (24)..(269): Homolog of NCBI NO: 18423760 NR Description: heterogeneous nuclear ribonucleoprotein (hnRNP),
  misc_feature (24)..(269): Homolog of NCBI NO: 30696616 NR Description: RNA recognition motif (RRM)-containing protein
  misc_feature (24)..(269): Homolog of NCBI NO: 22531168 NR Description: RNA-binding protein-like [Arabidopsis thaliana]
  misc_feature (24)..(333): Homolog of NCBI NO: 15292697 NR Description: putative RNA-binding protein [Arabidopsis
  misc_feature (24)..(269): Homolog of NCBI NO: 18423760 NR Description: heterogeneous nuclear ribonucleoprotein (hnRNP),
  misc_feature (24)..(269): Homolog of NCBI NO: 22531168 NR Description: RNA-binding protein-like [Arabidopsis thaliana]
  misc_feature (24)..(383): Homolog of NCBI NO: 15217975 NR Description: RRM-containing RNA-binding protein, putative
  misc_feature (24)..(376): Homolog of NCBI NO: 25456498 NR Description: RNA binding protein [imported] - Arabidopsis
  misc_feature (27)..(269): Homolog of NCBI NO: 7487039 NR Description: hypothetical protein T15N24.100 - Arabidopsis
  misc_feature (27)..(269): Homolog of NCBI NO: 18416794 NR Description: heterogeneous nuclear ribonucleoprotein (hnRNP),
  misc_feature (24)..(269): Homolog of NCBI NO: 9758187 NR Description: RNA-binding protein-like [Arabidopsis thaliana]
  misc_feature (24)..(269): Homolog of NCBI NO: 30696616 NR Description: RNA recognition motif (RRM)-containing protein
  misc_feature (24)..(266): Homolog of NCBI NO: 38175737 NR Description: putative heterogeneous nuclear ribonucleoprotein
  misc_feature (24)..(269): Homolog of NCBI NO: 9758187 NR Description: RNA-binding protein-like [Arabidopsis thaliana]
  misc_feature (27)..(269): Homolog of NCBI NO: 18416794 NR Description: heterogeneous nuclear ribonucleoprotein (hnRNP),
  misc_feature (27)..(269): Homolog of NCBI NO: 7487039 NR Description: hypothetical protein T15N24.100 - Arabidopsis
  misc_feature (24)..(376): Homolog of NCBI NO: 25456498 NR Description: RNA binding protein [imported] - Arabidopsis
  misc_feature (24)..(383): Homolog of NCBI NO: 15217975 NR Description: RRM-containing RNA-binding protein, putative

SEQ ID NO: 40092 - protein, 360 aa, Arabidopsis thaliana; identical to SEQ ID NO: 37559
  peptide (1)..(360): Ceres Seq. ID no. 12489538
  misc_feature (122)..(192): Pfam Name: RNA recognition motif. (a.k.a. RRM, RBD, or RNP domain) Pfam Description: RNA recognition motif. (a.k.a. RRM, RBD, or RNP
  misc_feature (122)..(192): Pfam Name: RNA recognition motif. (a.k.a. RRM, RBD, or RNP domain) Pfam Description: RNA recognition motif. (a.k.a. RRM, RBD, or RNP
  misc_feature (1)..(310): Homolog of NCBI NO: 15292697 NR Description: putative RNA-binding protein [Arabidopsis
  misc_feature (1)..(243): Homolog of NCBI NO: 38175737 NR Description: putative heterogeneous nuclear ribonucleoprotein
  misc_feature (1)..(246): Homolog of NCBI NO: 18423760 NR Description: heterogeneous nuclear ribonucleoprotein (hnRNP),
  misc_feature (1)..(246): Homolog of NCBI NO: 22531168 NR Description: RNA-binding protein-like [Arabidopsis thaliana]
  misc_feature (1)..(246): Homolog of NCBI NO: 30696616 NR Description: RNA recognition motif (RRM)-containing protein
  misc_feature (1)..(310): Homolog of NCBI NO: 15292697 NR Description: putative RNA-binding protein [Arabidopsis
  misc_feature (1)..(246): Homolog of NCBI NO: 18423760 NR Description: heterogeneous nuclear ribonucleoprotein (hnRNP),
  misc_feature (1)..(246): Homolog of NCBI NO: 30696616 NR Description: RNA recognition motif (RRM)-containing protein
  misc_feature (1)..(360): Homolog of NCBI NO: 15217975 NR Description: RRM-containing RNA-binding protein, putative
  misc_feature (1)..(353): Homolog of NCBI NO: 25456498 NR Description: RNA binding protein [imported] - Arabidopsis
  misc_feature (4)..(246): Homolog of NCBI NO: 7487039 NR Description: hypothetical protein T15N24.100 - Arabidopsis
  misc_feature (4)..(246): Homolog of NCBI NO: 18416794 NR Description: heterogeneous nuclear ribonucleoprotein (hnRNP),
  misc_feature (1)..(246): Homolog of NCBI NO: 9758187 NR Description: RNA-binding protein-like [Arabidopsis thaliana]
  misc_feature (1)..(246): Homolog of NCBI NO: 22531168 NR Description: RNA-binding protein-like [Arabidopsis thaliana]
  misc_feature (1)..(243): Homolog of NCBI NO: 38175737 NR Description: putative heterogeneous nuclear ribonucleoprotein
  misc_feature (1)..(246): Homolog of NCBI NO: 9758187 NR Description: RNA-binding protein-like [Arabidopsis thaliana]
  misc_feature (4)..(246): Homolog of NCBI NO: 18416794 NR Description: heterogeneous nuclear ribonucleoprotein (hnRNP),
  misc_feature (4)..(246): Homolog of NCBI NO: 7487039 NR Description: hypothetical protein T15N24.100 - Arabidopsis
  misc_feature (1)..(353): Homolog of NCBI NO: 25456498 NR Description: RNA binding protein [imported] - Arabidopsis
  misc_feature (1)..(360): Homolog of NCBI NO: 15217975 NR Description: RRM-containing RNA-binding protein, putative

SEQ ID NO: 40093 - protein, 268 aa, Arabidopsis thaliana; identical to SEQ ID NO: 37560
  peptide (1)..(268): Ceres Seq. ID no. 12489539
  misc_feature (30)..(100): Pfam Name: RNA recognition motif. (a.k.a. RRM, RBD, or RNP domain) Pfam Description: RNA recognition motif. (a.k.a. RRM, RBD, or RNP
  misc_feature (30)..(100): Pfam Name: RNA recognition motif. (a.k.a. RRM, RBD, or RNP domain) Pfam Description: RNA recognition motif. (a.k.a. RRM, RBD, or RNP
  misc_feature (1)..(218): Homolog of NCBI NO: 15292697 NR Description: putative RNA-binding protein [Arabidopsis
  misc_feature (1)..(151): Homolog of NCBI NO: 38175737 NR Description: putative heterogeneous nuclear ribonucleoprotein
  misc_feature (1)..(154): Homolog of NCBI NO: 18423760 NR Description: heterogeneous nuclear ribonucleoprotein (hnRNP),
  misc_feature (1)..(154): Homolog of NCBI NO: 22531168 NR Description: RNA-binding protein-like [Arabidopsis thaliana]
  misc_feature (1)..(154): Homolog of NCBI NO: 30696616 NR Description: RNA recognition motif (RRM)-containing protein
  misc_feature (1)..(218): Homolog of NCBI NO: 15292697 NR Description: putative RNA-binding protein [Arabidopsis
  misc_feature (1)..(154): Homolog of NCBI NO: 18423760 NR Description: heterogeneous nuclear ribonucleoprotein (hnRNP),
  misc_feature (1)..(154): Homolog of NCBI NO: 30696616 NR Description: RNA recognition motif (RRM)-containing protein
  misc_feature (1)..(268): Homolog of NCBI NO: 15217975 NR Description: RRM-containing RNA-binding protein, putative
  misc_feature (1)..(261): Homolog of NCBI NO: 25456498 NR Description: RNA binding protein [imported] - Arabidopsis
  misc_feature (1)..(154): Homolog of NCBI NO: 7487039 NR Description: hypothetical protein T15N24.100 - Arabidopsis
  misc_feature (1)..(154): Homolog of NCBI NO: 18416794 NR Description: heterogeneous nuclear ribonucleoprotein (hnRNP),
  misc_feature (1)..(154): Homolog of NCBI NO: 9758187 NR Description: RNA-binding protein-like [Arabidopsis thaliana]
  misc_feature (1)..(154): Homolog of NCBI NO: 22531168 NR Description: RNA-binding protein-like [Arabidopsis thaliana]
  misc_feature (1)..(151): Homolog of NCBI NO: 38175737 NR Description: putative heterogeneous nuclear ribonucleoprotein
  misc_feature (1)..(154): Homolog of NCBI NO: 9758187 NR Description: RNA-binding protein-like [Arabidopsis thaliana]
  misc_feature (1)..(154): Homolog of NCBI NO: 18416794 NR Description: heterogeneous nuclear ribonucleoprotein (hnRNP),
  misc_feature (1)..(154): Homolog of NCBI NO: 7487039 NR Description: hypothetical protein T15N24.100 - Arabidopsis
  misc_feature (1)..(261): Homolog of NCBI NO: 25456498 NR Description: RNA binding protein [imported] - Arabidopsis
  misc_feature (1)..(268): Homolog of NCBI NO: 15217975 NR Description: RRM-containing RNA-binding protein, putative

SEQ ID NO: 40094 - DNA, 1881 bp, Arabidopsis thaliana
  misc_feature (1)..(1881): Ceres Seq. ID no. 12330774
  misc_feature: MA Experiment ID: 108573 Result: Up-regulated in Transcription
  misc_feature: MA Experiment 108573 PARAMETER Experiment Name: At_Drought_cDNA_P Parameter: Timepoint (hr) Value: 6
  misc_feature: MA Experiment 108573 PARAMETER Experiment Name: At_Drought_cDNA_P Parameter: Tissue Value: Aerial
  misc_feature: MA Experiment 108573 PARAMETER Experiment Name: At_Drought_cDNA_P Parameter: Treatment Value: Drought vs. No Drought
  misc_feature: MA Experiment ID: 20000144 Result: Down-regulated in Transcription
  misc_feature: MA Experiment 20000144 PARAMETER Experiment Name: At_42deg_Heat_cDNA_P Parameter: Temperature (deg C) Value: 42 vs. 22
  misc_feature: MA Experiment 20000144 PARAMETER Experiment Name: At_42deg_Heat_cDNA_P Parameter: Timepoint (hr) Value: 1
  misc_feature: MA Experiment 20000144 PARAMETER Experiment Name: At_42deg_Heat_cDNA_P Parameter: Tissue Value: Aerial
  misc_feature: MA Experiment ID: 20000184 Result: Down-regulated in Transcription
  misc_feature: MA Experiment 20000184 PARAMETER Experiment Name: At_Shoots__P Parameter: Age (day) Value: 7
  misc_feature: MA Experiment 20000184 PARAMETER Experiment Name: At_Shoots__P Parameter: Tissue Value: Shoots vs. Whole Plant
  misc_feature: MA Experiment ID: 20000224 Result: Up-regulated in Transcription
  misc_feature: MA Experiment ID: 20000286 Result: Up-regulated in Transcription
  misc_feature: MA Experiment 20000286 PARAMETER Experiment Name: At_Open_Flower_P Parameter: Age (day) Value: 21
  misc_feature: MA Experiment 20000286 PARAMETER Experiment Name: At_Open_Flower_P Parameter: Plant Line Value: WS
  misc_feature: MA Experiment 20000286 PARAMETER Experiment Name: At_Open_Flower_P Parameter: Tissue Value: Half Open vs. Whole Plant
  misc_feature: MA Experiment ID: 20000794 Result: Up-regulated in Transcription
  misc_feature: MA Experiment 20000794 PARAMETER Experiment Name: At_Petals_P Parameter: Age (day) Value: 23-25 days
  misc_feature: MA Experiment 20000794 PARAMETER Experiment Name: At_Petals_P Parameter: Plant Line Value: WS
  misc_feature: MA Experiment 20000794 PARAMETER Experiment Name: At_Petals_P Parameter: Tissue Value: Petals vs. Whole plant
  misc_feature: MA Experiment ID: 20001247 Result: Up-regulated in Transcription
  misc_feature: MA Experiment 20001247 PARAMETER Experiment Name: At_Far-red-induction_P Parameter: Age (day) Value: 7
  misc_feature: MA Experiment 20001247 PARAMETER Experiment Name: At_Far-red-induction_P Parameter: Light Value: Far-red vs. White
  misc_feature: MA Experiment 20001247 PARAMETER Experiment Name: At_Far-red-induction_P Parameter: Organism Value: A. thaliana
  misc_feature: MA Experiment 20001247 PARAMETER Experiment Name: At_Far-red-induction_P Parameter: Plant Line Value: Columbia
  misc_feature: MA Experiment 20001247 PARAMETER Experiment Name: At_Far-red-induction_P Parameter: Timepoint (hr) Value: 1
  misc_feature: MA Experiment 20001247 PARAMETER Experiment Name: At_Far-red-induction_P Parameter: Tissue Value: Whole Plant
aactgcattagggtttctagaaggaattatattctcatggatcctcataaaaaggttgcactggagactgagttctttacagaatacggtgaagctagccgataccaaatccaagaagttatagggaaaggaagttacggtgttgtggcatctgcaatcgacacacattcaggcgaaaaggttgccattaagaaaatcaatgatgtgtttgagcacgtctctgatgcaacgcggattctaagagagatcaagcttctcaggttgctccgccatcctgatatagtggagataaagcatgtaatgcttcctccttcacgccgtgagttcagagacatttatgttgttttcgagttgatggaatcagatcttcaccaagttatcaaggcgaacgatgatcttacacctgagcactaccagtttttcctctaccagcttcttcgtggtctgaagttcatacacacagctaatgtgtttcatcgtgatttgaagcctaaaaatattctagccaactctgattgcaagttgaagatttgcgactttgggcttgctcgagtgtcctttaatgatgcaccttcggctatattctggactgactatgttgctacaagatggtaccgtgcgccagaactttgtggctctttcttctccaaatatactcctgccattgatatatggagcataggatgcatatttgcagaaatgctcactgggaagccattgtttcctgggaagaatggtgcaccaattggatattatgactgatttgcttggtactcctcctcccgaagctattgcaaggattcgtaatgaaaaggcgaggagatatctcggcaatatgaggagaaaaccgccagttccattcactcacaaatttcctcatgtagacccattggcccttcgcttactgcaccgtcttcttgcatttgatcccaaagaccgtccctcagctgaagaggcactggcagatccttacttctatggtctggcaaacgttgatcgggaaccatctactcaaccgattccgaaactcgagtttgagtttgaaagaaggaagataacaaaagaagatgtgagagaattgatctacagagagatattagagtatcatcctcagatgctgcaagaatatcttcgaggtggagaacagactagcttcatgtacccaagtggtgttgatcgctttaagagacaatttgctcatcttgaggaaaattacggtaagggtgagaaaggctcacctcttcaacgccaacacgcttccttgcctagagagcgagtccctgctcctaagaaagagaatggatcacataatcacgatatcgagaacagatccatagcgtctttagtcacgaccctcgaaagccctccaacgtcacaacacgaggggtcagactacaggaatgggacgagccagacgggttacagcgctcgcagcttgctgaaaagtgccagcatcagtgcatctaaatgcattggcatgaaaccaagaaacaagtccgagtacggggaatcaaacaatgatacggttgatgctctgtctcaaaaggtcgcggctctccacacttgacttgtttcagagattgaggattgaaacttgttgctaacagtagacggctgattctacaagtcttgtacacatctctcagagaagacgaagaagaagtctgatcttgatagagatattgagagacatgactcatgagctatgaacaaaacaacttaaccttcattggtcttcaatttgtccatcaagtcgagttgtattaaaaatggatggagaatataattaaagaagaattgtgttaacccctggatttatgcctgacaagtatttgactttatcagacattataaattatagttaaagtgtgtgttttctcc

SEQ ID NO: 40095 - protein, 277 aa, Arabidopsis thaliana
  peptide (1)..(277): Ceres Seq. ID no. 12330775
  misc_feature (1)..(81): Pfam Name: Protein kinase domain Pfam Description: Protein kinase domain
  misc_feature (1)..(217): Homolog of NCBI NO: 7106542 NR Description: ATMPK8 [Arabidopsis thaliana]
  misc_feature (1)..(276): Homolog of NCBI NO: 8671782 NR Description: T10O22.12 [Arabidopsis thaliana]
  misc_feature (1)..(276): Homolog of NCBI NO: 38174819 NR Description: putative MAP kinase [Hordeum vulgare subsp.
  misc_feature (1)..(277): Homolog of NCBI NO: 6689924 NR Description: MAP kinase homolog [Oryza sativa]
  misc_feature (1)..(277): Homolog of NCBI NO: 5815410 NR Description: blast and wounding induced mitogen-activated
  misc_feature (1)..(276): Homolog of NCBI NO: 25406284 NR Description: probable MAP kinase F25P22.9 [imported] -
  misc_feature (1)..(276): Homolog of NCBI NO: 15220976 NR Description: mitogen-activated protein kinase, putative
  misc_feature (1)..(277): Homolog of NCBI NO: 7106544 NR Description: ATMPK9 [Arabidopsis thaliana]
  misc_feature (1)..(277): Homolog of NCBI NO: 18401750 NR Description: putative MAP kinase
  misc_feature (1)..(277): Homolog of NCBI NO: 9294059 NR Description: MAP kinase [Arabidopsis thaliana]
MVHQLDIMTDLLGTPPPEAIARIRNEKARRYLGNMRRKPPVPFTHKFPHVDPLALRLLHRLLAFDPKDRPSAEEALADPYFYGLANVDREPSTQPIPKLEFEFERRKITKEDVRELIYREILEYHPQMLQEYLRGGEQTSFMYPSGVDRFKRQFAHLEENYGKGEKGSPLQRQHASLPRERVPAPKKENGSHNHDIENRSIASLVTTLESPPTSQHEGSDYRNGTSQTGYSARSLLKSASISASKCIGMKPRNKSEYGESNNDTVDALSQKVAALHT

SEQ ID NO: 40096 - protein, 270 aa, Arabidopsis thaliana
  peptide (1)..(270): Ceres Seq. ID no. 12330776
  misc_feature (1)..(74): Pfam Name: Protein kinase domain Pfam Description: Protein kinase domain
  misc_feature (1)..(210): Homolog of NCBI NO: 7106542 NR Description: ATMPK8 [Arabidopsis thaliana]
  misc_feature (1)..(269): Homolog of NCBI NO: 8671782 NR Description: T10O22.12 [Arabidopsis thaliana]
  misc_feature (1)..(269): Homolog of NCBI NO: 38174819 NR Description: putative MAP kinase [Hordeum vulgare subsp.
  misc_feature (1)..(270): Homolog of NCBI NO: 6689924 NR Description: MAP kinase homolog [Oryza sativa]
  misc_feature (1)..(270): Homolog of NCBI NO: 5815410 NR Description: blast and wounding induced mitogen-activated
  misc_feature (1)..(269): Homolog of NCBI NO: 25406284 NR Description: probable MAP kinase F25P22.9 [imported] -
  misc_feature (1)..(269): Homolog of NCBI NO: 15220976 NR Description: mitogen-activated protein kinase, putative
  misc_feature (1)..(270): Homolog of NCBI NO: 7106544 NR Description: ATMPK9 [Arabidopsis thaliana]
  misc_feature (1)..(270): Homolog of NCBI NO: 18401750 NR Description: putative MAP kinase
  misc_feature (1)..(270): Homolog of NCBI NO: 9294059 NR Description: MAP kinase [Arabidopsis thaliana]
MTDLLGTPPPEAIARIRNEKARRYLGNMRRKPPVPFTHKFPHVDPLALRLLHRLLAFDPKDRPSAEEALADPYFYGLANVDREPSTQPIPKLEFEFERRKITKEDVRELIYREILEYHPQMLQEYLRGGEQTSFMYPSGVDRFKRQFAHLEENYGKGEKGSPLQRQHASLPRERVPAPKKENGSHNHDIENRSIASLVTTLESPPTSQHEGSDYRNGTSQTGYSARSLLKSASISASKCIGMKPRNKSEYGESNNDTVDALSQKVAALHT

SEQ ID NO: 40097 - protein, 253 aa, Arabidopsis thaliana
  peptide (1)..(253): Ceres Seq. ID no. 12330777
  misc_feature (35)..(245): Pfam Name: Protein kinase domain Pfam Description: Protein kinase domain
  misc_feature (3)..(245): Homolog of NCBI NO: 7106542 NR Description: ATMPK8 [Arabidopsis thaliana]
  misc_feature (3)..(245): Homolog of NCBI NO: 8671782 NR Description: T10O22.12 [Arabidopsis thaliana]
  misc_feature (3)..(245): Homolog of NCBI NO: 38174819 NR Description: putative MAP kinase [Hordeum vulgare subsp.
  misc_feature (24)..(245): Homolog of NCBI NO: 6689924 NR Description: MAP kinase homolog [Oryza sativa]
  misc_feature (24)..(245): Homolog of NCBI NO: 5815410 NR Description: blast and wounding induced mitogen-activated
  misc_feature (3)..(245): Homolog of NCBI NO: 25406284 NR Description: probable MAP kinase F25P22.9 [imported] -
  misc_feature (3)..(245): Homolog of NCBI NO: 15220976 NR Description: mitogen-activated protein kinase, putative
  misc_feature (13)..(245): Homolog of NCBI NO: 7106544 NR Description: ATMPK9 [Arabidopsis thaliana]
  misc_feature (13)..(245): Homolog of NCBI NO: 18401750 NR Description: putative MAP kinase
  misc_feature (1)..(245): Homolog of NCBI NO: 9294059 NR Description: MAP kinase [Arabidopsis thaliana]
NCIRVSRRNYILMDPHKKVALETEFFTEYGEASRYQIQEVIGKGSYGVVASAIDTHSGEKVAIKKINDVFEHVSDATRILREIKLLRLLRHPDIVEIKHVMLPPSRREFRDIYVVFELMESDLHQVIKANDDLTPEHYQFFLYQLLRGLKFIHTANVFHRDLKPKNILANSDCKLKICDFGLARVSFNDAPSAIFWTDYVATRWYRAPELCGSFFSKYTPAIDIWSIGCIFAEMLTGKPLFPGKNGAPIGYYD

SEQ ID NO: 40098 - DNA, 1489 bp, Arabidopsis thaliana
  misc_feature (1)..(1489): Ceres Seq. ID no. 13494078
  misc_feature: MA Experiment ID: 108572 Result: Down-regulated in Transcription
  misc_feature: MA Experiment 108572 PARAMETER Experiment Name: At_Drought_cDNA_P Parameter: Timepoint (hr) Value: 1
  misc_feature: MA Experiment 108572 PARAMETER Experiment Name: At_Drought_cDNA_P Parameter: Tissue Value: Aerial
  misc_feature: MA Experiment 108572 PARAMETER Experiment Name: At_Drought_cDNA_P Parameter: Treatment Value: Drought vs. No Drought
  misc_feature: MA Experiment ID: 108576 Result: Up-regulated in Transcription
  misc_feature: MA Experiment 108576 PARAMETER Experiment Name: At_42deg_Heat_cDNA_P Parameter: Temperature (deg C) Value: 42 vs. 22
  misc_feature: MA Experiment 108576 PARAMETER Experiment Name: At_42deg_Heat_cDNA_P Parameter: Timepoint (hr) Value: 1
  misc_feature: MA Experiment 108576 PARAMETER Experiment Name: At_42deg_Heat_cDNA_P Parameter: Tissue Value: Aerial
  misc_feature: MA Experiment ID: 108579 Result: Up-regulated in Transcription
  misc_feature: MA Experiment 108579 PARAMETER Experiment Name: At_4deg_Cold_cDNA_P Parameter: Temperature (deg C) Value: 4 vs. 22
  misc_feature: MA Experiment 108579 PARAMETER Experiment Name: At_4deg_Cold_cDNA_P Parameter: Timepoint (hr) Value: 6
  misc_feature: MA Experiment 108579 PARAMETER Experiment Name: At_4deg_Cold_cDNA_P Parameter: Tissue Value: Aerial
  misc_feature: MA Experiment ID: 20000093 Result: Up-regulated in Transcription
  misc_feature: MA Experiment 20000093 PARAMETER Experiment Name: At_42deg_Heat_cDNA_P Parameter: Temperature (deg C) Value: 42 vs. 22
  misc_feature: MA Experiment 20000093 PARAMETER Experiment Name: At_42deg_Heat_cDNA_P Parameter: Timepoint (hr) Value: 0.5
  misc_feature: MA Experiment 20000093 PARAMETER Experiment Name: At_42deg_Heat_cDNA_P Parameter: Tissue Value: Aerial
  misc_feature: MA Experiment ID: 20000112 Result: Up-regulated in Transcription
  misc_feature: MA Experiment 20000112 PARAMETER Experiment Name: At_42deg_Heat_cDNA_P Parameter: Temperature (deg C) Value: 42 vs. 22
  misc_feature: MA Experiment 20000112 PARAMETER Experiment Name: At_42deg_Heat_cDNA_P Parameter: Timepoint (hr) Value: 2
  misc_feature: MA Experiment 20000112 PARAMETER Experiment Name: At_42deg_Heat_cDNA_P Parameter: Tissue Value: Aerial
  misc_feature: MA Experiment ID: 20000171 Result: Up-regulated in Transcription
  misc_feature: MA Experiment 20000171 PARAMETER Experiment Name: At_42deg_Heat_P Parameter: Age (day) Value: 14
  misc_feature: MA Experiment 20000171 PARAMETER Experiment Name: At_42deg_Heat_P Parameter: Organism Value: A. thaliana
  misc_feature: MA Experiment 20000171 PARAMETER Experiment Name: At_42deg_Heat_P Parameter: Plant Line Value: WS
  misc_feature: MA Experiment 20000171 PARAMETER Experiment Name: At_42deg_Heat_P Parameter: Temperature (deg C) Value: 42 vs. 22
  misc_feature: MA Experiment 20000171 PARAMETER Experiment Name: At_42deg_Heat_P Parameter: Timepoint (hr) Value: 1
  misc_feature: MA Experiment 20000171 PARAMETER Experiment Name: At_42deg_Heat_P Parameter: Tissue Value: Aerial
  misc_feature: MA Experiment ID: 20000213 Result: Up-regulated in Transcription
  misc_feature: MA Experiment 20000213 PARAMETER Experiment Name: At_4deg_Cold_P Parameter: Timepoint (hr) Value: 2
  misc_feature: MA Experiment ID: 20000224 Result: Down-regulated in Transcription
  misc_feature: MA Experiment ID: 20000227 Result: Down-regulated in Transcription
  misc_feature: MA Experiment 20000227 PARAMETER Experiment Name: At_Root-Tips-vs-Tops_P Parameter: Tissue Value: Root Tips vs. Root Tops
  misc_feature: MA Experiment ID: 20000234 Result: Down-regulated in Transcription
  misc_feature: MA Experiment 20000234 PARAMETER Experiment Name: At_Siliques_P Parameter: Age (day) Value: 21
  misc_feature: MA Experiment 20000234 PARAMETER Experiment Name: At_Siliques_P Parameter: Organism Value: A. thaliana
  misc_feature: MA Experiment 20000234 PARAMETER Experiment Name: At_Siliques_P Parameter: Plant Line Value: WS
  misc_feature: MA Experiment 20000234 PARAMETER Experiment Name: At_Siliques_P Parameter: Tissue Value: Less Than 5mm Siliques vs. Whole Plant
  misc_feature: MA Experiment ID: 20000235 Result: Down-regulated in Transcription
  misc_feature: MA Experiment 20000235 PARAMETER Experiment Name: At_Siliques_P Parameter: Age (day) Value: 21
  misc_feature: MA Experiment 20000235 PARAMETER Experiment Name: At_Siliques_P Parameter: Organism Value: A. thaliana
  misc_feature: MA Experiment 20000235 PARAMETER Experiment Name: At_Siliques_P Parameter: Plant Line Value: WS
  misc_feature: MA Experiment 20000235 PARAMETER Experiment Name: At_Siliques_P Parameter: Tissue Value: 5-10mm Siliques vs. Whole Plant
  misc_feature: MA Experiment ID: 20000265 Result: Down-regulated in Transcription
  misc_feature: MA Experiment 20000265 PARAMETER Experiment Name: At_Open_Flower_P Parameter: Age (day) Value: 21
  misc_feature: MA Experiment 20000265 PARAMETER Experiment Name: At_Open_Flower_P Parameter: Plant Line Value: WS
  misc_feature: MA Experiment 20000265 PARAMETER Experiment Name: At_Open_Flower_P Parameter: Tissue Value: Closed Flower vs. Whole Plant
  misc_feature: MA Experiment ID: 20000496 Result: Up-regulated in Transcription
  misc_feature: MA Experiment 20000496 PARAMETER Experiment Name: At_Guard_Cells_P Parameter: Harvest Date Value: 7/19/2002
  misc_feature: MA Experiment 20000496 PARAMETER Experiment Name: At_Guard_Cells_P Parameter: Organism Value: Canola
  misc_feature: MA Experiment 20000496 PARAMETER Experiment Name: At_Guard_Cells_P Parameter: Tissue Value: Guard Cells vs. Leaves
  misc_feature: MA Experiment ID: 20001451 Result: Up-regulated in Transcription
  misc_feature: MA Experiment 20001451 PARAMETER Experiment Name: At_Far-red-induction_P Parameter: Age (day) Value: 7
  misc_feature: MA Experiment 20001451 PARAMETER Experiment Name: At_Far-red-induction_P Parameter: Light Value: Far-red vs. White
  misc_feature: MA Experiment 20001451 PARAMETER Experiment Name: At_Far-red-induction_P Parameter: Organism Value: A. thaliana
  misc_feature: MA Experiment 20001451 PARAMETER Experiment Name: At_Far-red-induction_P Parameter: Plant Line Value: Columbia
  misc_feature: MA Experiment 20001451 PARAMETER Experiment Name: At_Far-red-induction_P Parameter: Timepoint (hr) Value: 24
  misc_feature: MA Experiment 20001451 PARAMETER Experiment Name: At_Far-red-induction_P Parameter: Tissue Value: Whole Plant
  misc_feature: MA Experiment ID: 20001555 Result: Down-regulated in Transcription
  misc_feature: MA Experiment 20001555 PARAMETER Experiment Name: At_Drought_Soil_Dry_P Parameter: Age (day) Value: 24
  misc_feature: MA Experiment 20001555 PARAMETER Experiment Name: At_Drought_Soil_Dry_P Parameter: Organism Value: A. thaliana
  misc_feature: MA Experiment 20001555 PARAMETER Experiment Name: At_Drought_Soil_Dry_P Parameter: Plant Line Value: WS
  misc_feature: MA Experiment 20001555 PARAMETER Experiment Name: At_Drought_Soil_Dry_P Parameter: Post Timepoint (hr) Value: None
  misc_feature: MA Experiment 20001555 PARAMETER Experiment Name: At_Drought_Soil_Dry_P Parameter: Post-Treatment Value: None
  misc_feature: MA Experiment 20001555 PARAMETER Experiment Name: At_Drought_Soil_Dry_P Parameter: Timepoint (day) Value: 10
  misc_feature: MA Experiment 20001555 PARAMETER Experiment Name: At_Drought_Soil_Dry_P Parameter: Treatment Value: Drought vs. No Drought
  misc_feature: MA Experiment ID: 20001556 Result: Down-regulated in Transcription
  misc_feature: MA Experiment 20001556 PARAMETER Experiment Name: At_Drought_Soil_Dry_P Parameter: Age (day) Value: 26
  misc_feature: MA Experiment 20001556 PARAMETER Experiment Name: At_Drought_Soil_Dry_P Parameter: Organism Value: A. thaliana
  misc_feature: MA Experiment 20001556 PARAMETER Experiment Name: At_Drought_Soil_Dry_P Parameter: Plant Line Value: WS
  misc_feature: MA Experiment 20001556 PARAMETER Experiment Name: At_Drought_Soil_Dry_P Parameter: Post Timepoint (hr) Value: None
  misc_feature: MA Experiment 20001556 PARAMETER Experiment Name: At_Drought_Soil_Dry_P Parameter: Post-Treatment Value: None
  misc_feature: MA Experiment 20001556 PARAMETER Experiment Name: At_Drought_Soil_Dry_P Parameter: Timepoint (day) Value: 12
  misc_feature: MA Experiment 20001556 PARAMETER Experiment Name: At_Drought_Soil_Dry_P Parameter: Treatment Value: Drought vs. No Drought
  misc_feature: MA Experiment ID: 20001557 Result: Up-regulated in Transcription
  misc_feature: MA Experiment 20001557 PARAMETER Experiment Name: At_Drought_Soil_Dry_P Parameter: Age (day) Value: 27
  misc_feature: MA Experiment 20001557 PARAMETER Experiment Name: At_Drought_Soil_Dry_P Parameter: Organism Value: A. thaliana
  misc_feature: MA Experiment 20001557 PARAMETER Experiment Name: At_Drought_Soil_Dry_P Parameter: Plant Line Value: WS
  misc_feature: MA Experiment 20001557 PARAMETER Experiment Name: At_Drought_Soil_Dry_P Parameter: Post Timepoint (hr) Value: 3
  misc_feature: MA Experiment 20001557 PARAMETER Experiment Name: At_Drought_Soil_Dry_P Parameter: Post-Treatment Value: Re-Water vs. No Drought
  misc_feature: MA Experiment 20001557 PARAMETER Experiment Name: At_Drought_Soil_Dry_P Parameter: Timepoint (day) Value: 13
  misc_feature: MA Experiment 20001557 PARAMETER Experiment Name: At_Drought_Soil_Dry_P Parameter: Treatment Value: Drought vs. No Drought
  misc_feature: MA Experiment ID: 20001904 Result: Down-regulated in Transcription
  misc_feature: MA Experiment 20001904 PARAMETER Experiment Name: At_Drought_Reproduction_P Parameter: Age (day) Value: 37
  misc_feature: MA Experiment 20001904 PARAMETER Experiment Name: At_Drought_Reproduction_P Parameter: Organism Value: A. thaliana
  misc_feature: MA Experiment 20001904 PARAMETER Experiment Name: At_Drought_Reproduction_P Parameter: Plant Line Value: WS
  misc_feature: MA Experiment 20001904 PARAMETER Experiment Name: At_Drought_Reproduction_P Parameter: Timepoint (day) Value: 7
  misc_feature: MA Experiment 20001904 PARAMETER Experiment Name: At_Drought_Reproduction_P Parameter: Tissue Value: Rosettes
  misc_feature: MA Experiment 20001904 PARAMETER Experiment Name: At_Drought_Reproduction_P Parameter: Treatment Value: Drought vs. No Drought
  misc_feature: MA Experiment ID: 20001905 Result: Down-regulated in Transcription
  misc_feature: MA Experiment 20001905 PARAMETER Experiment Name: At_Drought_Reproduction_P Parameter: Age (day) Value: 40
  misc_feature: MA Experiment 20001905 PARAMETER Experiment Name: At_Drought_Reproduction_P Parameter: Organism Value: A. thaliana
  misc_feature: MA Experiment 20001905 PARAMETER Experiment Name: At_Drought_Reproduction_P Parameter: Plant Line Value: WS
  misc_feature: MA Experiment 20001905 PARAMETER Experiment Name: At_Drought_Reproduction_P Parameter: Timepoint (day) Value: 10
  misc_feature: MA Experiment 20001905 PARAMETER Experiment Name: At_Drought_Reproduction_P Parameter: Tissue Value: Rosettes
  misc_feature: MA Experiment 20001905 PARAMETER Experiment Name: At_Drought_Reproduction_P Parameter: Treatment Value: Drought vs. No Drought
ccccctttttcactctcttcatttattcttcccctcatcatcatcatcatcttcttctttaaccaaaaacacaacttacaagaaaactgttgaatctttgtatttatttacatctcctttgacctttaataagaatctgagtggttggtctctgatttgatgagatgactgttgagctgatgatgagcagctacagcggcggcggaggaggaggtgatggttttcctgcaatcgccgcggcggcgaaaatggaagataccgctttgagagaagctgcttctgcagggattcacggtgtggaggagtttcttaaactgatcggtcaaagtcaacaaccaacggagaagagtcagacggagataaccgcggtgactgacgtcgccgttaacagcttcaagaaggtcatttctctactcggtagatctagaaccggacacgctagattcagacgagctcccgcgtcaacgcaaacgccgtttaagcaaacgccggtggttgaggaggaggtggaggtggaggagaagaagccagaaacaagctccgtgttaacaaaacagaaaacagagcaatatcacggtggtggatctgcgtttagagtttattgtccaacaccaattcatcgtcgtcctcctctatcacacaataacaacaacaatcagaatcaaacaaagaacggttcgtcttcttcatctcctccgatgctcgcaaacggagcaccgtcaacgataaactttgcgccgtcaccaccagtctcagcgacgaactcattcatgtcttctcatagatgtgacaccgatagtactcacatgtcatcaggattcgagttcactaacccatctcagctctctggttcgagaggtaaacctcctttatcatcagcttcgttgaagagaagatgtaattcatctccctcaagccgttgccattgctccaagaaaaggaaatcaagagtaaaaagagtgattagagttccagcagtaagtagcaaaatggctgatataccatcagatgagttttcatggagaaaatatggtcaaaaaccaatcaaaggctctcctcatcctcggggatattacaagtgcagcagtgtaagaggttgtccggcgcgtaagcatgtggagcgtgcactagatgatgcgatgatgctaatcgtgacgtacgaaggagaccacaaccatgctttggttctcgagacgacgacgatgaatcatgacaaaactctttagtttctcgagtttgaggggaactgtctgtgtgtgaccactatccagattagtcaacgacagagtgggcccgcactgcacttttttattcttttctttttgaaaagcttttgctttatctttctttttgattggaggaaatagagggaggggagataaagacgagagaggaacgttgtggatcttgatggaagttgaatcatgtgaatgtccttttctgtttatttatttctaggatattatatatttagtgcactatttttgtc

SEQ ID NO: 40099 - protein, 353 aa, Arabidopsis thaliana
  peptide (1)..(353): Ceres Seq. ID no. 13494079
  misc_feature (280)..(340): Pfam Name: WRKY DNA -binding domain Pfam Description: WRKY DNA -binding domain
  misc_feature (148)..(338): Homolog of NCBI NO: 18400580 NR Description: WRKY family transcription factor [Arabidopsis
  misc_feature (49)..(338): Homolog of NCBI NO: 4894963 NR Description: DNA-binding protein WRKY3 [Avena sativa]
  misc_feature (29)..(344): Homolog of NCBI NO: 18396971 NR Description: WRKY family transcription factor [Arabidopsis
  misc_feature (27)..(340): Homolog of NCBI NO: 4760596 NR Description: DNA-binding protein NtWRKY3 [Nicotiana tabacum]
  misc_feature (1)..(104): Homolog of NCBI NO: 15227812 NR Description: WRKY family transcription factor [Arabidopsis
  misc_feature (177)..(340): Homolog of NCBI NO: 15227812 NR Description: WRKY family transcription factor [Arabidopsis
  misc_feature (27)..(324): Homolog of NCBI NO: 4680251 NR Description: transcription factor
  misc_feature (27)..(349): Homolog of NCBI NO: 7488950 NR Description: DNA-binding protein WRKY3 - parsley
  misc_feature (1)..(339): Homolog of NCBI NO: 10798760 NR Description: WRKY transcription factor Nt-SubD48 [Nicotiana
  misc_feature (1)..(353): Homolog of NCBI NO: 15233752 NR Description: WRKY family transcription factor [Arabidopsis
MTVELMMSSYSGGGGGGDGFPAIAAAAKMEDTALREAASAGIHGVEEFLKLIGQSQQPTEKSQTEITAVTDVAVNSFKKVISLLGRSRTGHARFRRAPASTQTPFKQTPVVEEEVEVEEKKPETSSVLTKQKTEQYHGGGSAFRVYCPTPIHRRPPLSHNNNNNQNQTKNGSSSSSPPMLANGAPSTINFAPSPPVSATNSFMSSHRCDTDSTHMSSGFEFTNPSQLSGSRGKPPLSSASLKRRCNSSPSSRCHCSKKRKSRVKRVIRVPAVSSKMADIPSDEFSWRKYGQKPIKGSPHPRGYYKCSSVRGCPARKHVERALDDAMMLIVTYEGDHNHALVLETTTMNHDKTL

SEQ ID NO: 40100 - protein, 348 aa, Arabidopsis thaliana
  peptide (1)..(348): Ceres Seq. ID no. 13494080
  misc_feature (275)..(335): Pfam Name: WRKY DNA -binding domain Pfam Description: WRKY DNA -binding domain
  misc_feature (143)..(333): Homolog of NCBI NO: 18400580 NR Description: WRKY family transcription factor [Arabidopsis
  misc_feature (44)..(333): Homolog of NCBI NO: 4894963 NR Description: DNA-binding protein WRKY3 [Avena sativa]
  misc_feature (24)..(339): Homolog of NCBI NO: 18396971 NR Description: WRKY family transcription factor [Arabidopsis
  misc_feature (22)..(335): Homolog of NCBI NO: 4760596 NR Description: DNA-binding protein NtWRKY3 [Nicotiana tabacum]
  misc_feature (1)..(99): Homolog of NCBI NO: 15227812 NR Description: WRKY family transcription factor [Arabidopsis
  misc_feature (172)..(335): Homolog of NCBI NO: 15227812 NR Description: WRKY family transcription factor [Arabidopsis
  misc_feature (22)..(319): Homolog of NCBI NO: 4680251 NR Description: transcription factor
  misc_feature (22)..(344): Homolog of NCBI NO: 7488950 NR Description: DNA-binding protein WRKY3 - parsley
  misc_feature (1)..(334): Homolog of NCBI NO: 10798760 NR Description: WRKY transcription factor Nt-SubD48 [Nicotiana
  misc_feature (1)..(348): Homolog of NCBI NO: 15233752 NR Description: WRKY family transcription factor [Arabidopsis
MMSSYSGGGGGGDGFPAIAAAAKMEDTALREAASAGIHGVEEFLKLIGQSQQPTEKSQTEITAVTDVAVNSFKKVISLLGRSRTGHARFRRAPASTQTPFKQTPVVEEEVEVEEKKPETSSVLTKQKTEQYHGGGSAFRVYCPTPIHRRPPLSHNNNNNQNQTKNGSSSSSPPMLANGAPSTINFAPSPPVSATNSFMSSHRCDTDSTHMSSGFEFTNPSQLSGSRGKPPLSSASLKRRCNSSPSSRCHCSKKRKSRVKRVIRVPAVSSKMADIPSDEFSWRKYGQKPIKGSPHPRGYYKCSSVRGCPARKHVERALDDAMMLIVTYEGDHNHALVLETTTMNHDKTL

SEQ ID NO: 40101 - protein, 347 aa, Arabidopsis thaliana
  peptide (1)..(347): Ceres Seq. ID no. 13494081
  misc_feature (274)..(334): Pfam Name: WRKY DNA -binding domain Pfam Description: WRKY DNA -binding domain
  misc_feature (142)..(332): Homolog of NCBI NO: 18400580 NR Description: WRKY family transcription factor [Arabidopsis
  misc_feature (43)..(332): Homolog of NCBI NO: 4894963 NR Description: DNA-binding protein WRKY3 [Avena sativa]
  misc_feature (23)..(338): Homolog of NCBI NO: 18396971 NR Description: WRKY family transcription factor [Arabidopsis
  misc_feature (21)..(334): Homolog of NCBI NO: 4760596 NR Description: DNA-binding protein NtWRKY3 [Nicotiana tabacum]
  misc_feature (1)..(98): Homolog of NCBI NO: 15227812 NR Description: WRKY family transcription factor [Arabidopsis
  misc_feature (171)..(334): Homolog of NCBI NO: 15227812 NR Description: WRKY family transcription factor [Arabidopsis
  misc_feature (21)..(318): Homolog of NCBI NO: 4680251 NR Description: transcription factor
  misc_feature (21)..(343): Homolog of NCBI NO: 7488950 NR Description: DNA-binding protein WRKY3 - parsley
  misc_feature (1)..(333): Homolog of NCBI NO: 10798760 NR Description: WRKY transcription factor Nt-SubD48 [Nicotiana
  misc_feature (1)..(347): Homolog of NCBI NO: 15233752 NR Description: WRKY family transcription factor [Arabidopsis
MSSYSGGGGGGDGFPAIAAAAKMEDTALREAASAGIHGVEEFLKLIGQSQQPTEKSQTEITAVTDVAVNSFKKVISLLGRSRTGHARFRRAPASTQTPFKQTPVVEEEVEVEEKKPETSSVLTKQKTEQYHGGGSAFRVYCPTPIHRRPPLSHNNNNNQNQTKNGSSSSSPPMLANGAPSTINFAPSPPVSATNSFMSSHRCDTDSTHMSSGFEFTNPSQLSGSRGKPPLSSASLKRRCNSSPSSRCHCSKKRKSRVKRVIRVPAVSSKMADIPSDEFSWRKYGQKPIKGSPHPRGYYKCSSVRGCPARKHVERALDDAMMLIVTYEGDHNHALVLETTTMNHDKTL

SEQ ID NO: 40102 - DNA, 1428 bp, Arabidopsis thaliana
  misc_feature (1)..(1428): Ceres Seq. ID no. 13575068
  misc_feature: MA Experiment ID: 108434 Result: Up-regulated in Transcription
  misc_feature: MA Experiment 108434 PARAMETER Experiment Name: At_Root_Tips_cDNA_P Parameter: Tissue Value: Root Tips
  misc_feature: MA Experiment ID: 108461 Result: Down-regulated in Transcription
  misc_feature: MA Experiment 108461 PARAMETER Experiment Name: At_Germinating_Seeds_cDNA_P Parameter: Age (day) Value: 1 vs. 0
  misc_feature: MA Experiment 108461 PARAMETER Experiment Name: At_Germinating_Seeds_cDNA_P Parameter: Tissue Value: Germinating Seeds
  misc_feature: MA Experiment ID: 108462 Result: Down-regulated in Transcription
  misc_feature: MA Experiment 108462 PARAMETER Experiment Name: At_Germinating_Seeds_cDNA_P Parameter: Age (day) Value: 2 vs. 0
  misc_feature: MA Experiment 108462 PARAMETER Experiment Name: At_Germinating_Seeds_cDNA_P Parameter: Tissue Value: Germinating Seeds
  misc_feature: MA Experiment ID: 108463 Result: Down-regulated in Transcription
  misc_feature: MA Experiment 108463 PARAMETER Experiment Name: At_Germinating_Seeds_cDNA_P Parameter: Age (day) Value: 3 vs. 0
  misc_feature: MA Experiment 108463 PARAMETER Experiment Name: At_Germinating_Seeds_cDNA_P Parameter: Tissue Value: Germinating Seeds
  misc_feature: MA Experiment ID: 108464 Result: Down-regulated in Transcription
  misc_feature: MA Experiment 108464 PARAMETER Experiment Name: At_Germinating_Seeds_cDNA_P Parameter: Age (day) Value: 4 vs. 0
  misc_feature: MA Experiment 108464 PARAMETER Experiment Name: At_Germinating_Seeds_cDNA_P Parameter: Tissue Value: Germinating Seeds
  misc_feature: MA Experiment ID: 108572 Result: Down-regulated in Transcription
  misc_feature: MA Experiment 108572 PARAMETER Experiment Name: At_Drought_cDNA_P Parameter: Timepoint (hr) Value: 1
  misc_feature: MA Experiment 108572 PARAMETER Experiment Name: At_Drought_cDNA_P Parameter: Tissue Value: Aerial
  misc_feature: MA Experiment 108572 PARAMETER Experiment Name: At_Drought_cDNA_P Parameter: Treatment Value: Drought vs. No Drought
  misc_feature: MA Experiment ID: 20000180 Result: Down-regulated in Transcription
  misc_feature: MA Experiment 20000180 PARAMETER Experiment Name: At_Germinating_Seeds_P Parameter: Age (hr) Value: 24 vs. 0
  misc_feature: MA Experiment 20000180 PARAMETER Experiment Name: At_Germinating_Seeds_P Parameter: Tissue Value: Germinating Seeds
  misc_feature: MA Experiment ID: 20001557 Result: Up-regulated in Transcription
  misc_feature: MA Experiment 20001557 PARAMETER Experiment Name: At_Drought_Soil_Dry_P Parameter: Age (day) Value: 27
  misc_feature: MA Experiment 20001557 PARAMETER Experiment Name: At_Drought_Soil_Dry_P Parameter: Organism Value: A. thaliana
  misc_feature: MA Experiment 20001557 PARAMETER Experiment Name: At_Drought_Soil_Dry_P Parameter: Plant Line Value: WS
  misc_feature: MA Experiment 20001557 PARAMETER Experiment Name: At_Drought_Soil_Dry_P Parameter: Post Timepoint (hr) Value: 3
  misc_feature: MA Experiment 20001557 PARAMETER Experiment Name: At_Drought_Soil_Dry_P Parameter: Post-Treatment Value: Re-Water vs. No Drought
  misc_feature: MA Experiment 20001557 PARAMETER Experiment Name: At_Drought_Soil_Dry_P Parameter: Timepoint (day) Value: 13
  misc_feature: MA Experiment 20001557 PARAMETER Experiment Name: At_Drought_Soil_Dry_P Parameter: Treatment Value: Drought vs. No Drought
  misc_feature: MA Experiment ID: 20001558 Result: Up-regulated in Transcription
  misc_feature: MA Experiment 20001558 PARAMETER Experiment Name: At_Drought_Soil_Dry_P Parameter: Age (day) Value: 27
  misc_feature: MA Experiment 20001558 PARAMETER Experiment Name: At_Drought_Soil_Dry_P Parameter: Organism Value: A. thaliana
  misc_feature: MA Experiment 20001558 PARAMETER Experiment Name: At_Drought_Soil_Dry_P Parameter: Plant Line Value: WS
  misc_feature: MA Experiment 20001558 PARAMETER Experiment Name: At_Drought_Soil_Dry_P Parameter: Post Timepoint (hr) Value: 6
  misc_feature: MA Experiment 20001558 PARAMETER Experiment Name: At_Drought_Soil_Dry_P Parameter: Post-Treatment Value: Re-Water vs. No Drought
  misc_feature: MA Experiment 20001558 PARAMETER Experiment Name: At_Drought_Soil_Dry_P Parameter: Timepoint (day) Value: 13
  misc_feature: MA Experiment 20001558 PARAMETER Experiment Name: At_Drought_Soil_Dry_P Parameter: Treatment Value: Drought vs. No Drought
ctaaattgctcaattctctcggccacaggtaagcttcttcgacttcactctttgacccaatactactttcctcaccccctgtggtttcctttgttaaacccttcaaatctctttctcaatttgataaaccctagttctgctatagacctagacaaggatggtgactaaagcagaaaaacaattcgccaaaaatttcaacatagacgatctccctgacgtccctgccggacttcctccacatctcaaagcccagcaaactcgtgtcgtctctaaaaacaacgctcctgctcatactgcgagtgccatttactcgggtacctatgtttcttctacggaagaggacgacaatgtgaagctaggaaacttctatgataacttcaaagttgatgtggttagtctcacaaagacagatatggaatttgatatgattggtattgatgcagcgtttgccaatgcattccgaaggatccttatagctgaggttccttcaatggctattgaaaaagtgttgatagcgtacaacacatcggttattatagacgaagttcttgctcacaggatgggtcttattccaattgccgcagatccaagactttttgaatatttatccgaacatgatcaggcgaatgaaaagaacaccattgtattcaaactccatgtgaaatgtccgaaaaatagaccacgtcttaaagttttaacgagtgatttaaaatggttaccaaatggaagtgagcttctgagagaatcggaaaataaaacctcaaagccaaaaacttacacttcattcagttgcagccaagattcattacctgaatttgctaataatcctatcactccatgcgacctcgatatcttgatagcaaaactcgcccctggtcaggaaatcgagctcgaagctcatgcggttaagggcattggtaaaacacatgcaaagtggtctccagtagggactgcttggtatagaatgcatcctgaggtggttctacgtggggaagttgaggatgaacttgctgaacgacttgtaaacgtctgcccacagaatgttttcgacattgaagacatgggaaaaggtaagaaaagggcaacagtagcgcagccacgtaagtgcacattgtgtaaggaatgcgtaagagacgatgatttggtagaccatgtggatcttggcagtgttaagaaccattttatatttaacattgagtccaccggatcactgcctccagaggttctcttcactgaagctgtgaagatattggaagctaaatgtgaagctataaccgacttttgagttctggtttagttcaattttgaattgtctgtctatcaatgtttctcctcctattgataaattaccaacaaacaacattgacatatttatttatacggttgttgttcaatttggattttcattagccttctgagttctgattc

SEQ ID NO: 40103 - protein, 375 aa, Arabidopsis thaliana
  peptide (1)..(375): Ceres Seq. ID no. 13575069
  misc_feature (117)..(261): Pfam Name: RNA polymerase Rpb3/RpoA insert domain Pfam Description: RNA polymerase Rpb3/RpoA insert domain
  misc_feature (29)..(374): Homolog of NCBI NO: 18266895 NR Description: DNA-directed RNA polymerase I 40 kDa polypeptide
  misc_feature (29)..(374): Homolog of NCBI NO: 6677787 NR Description: RNA polymerase 1-1; RNA polymerase 1-1 (40 kDa
  misc_feature (29)..(374): Homolog of NCBI NO: 34874462 NR Description: similar to DNA-directed RNA polymerase I 40 kDa
  misc_feature (45)..(370): Homolog of NCBI NO: 34193909 NR Description: RNA polymerase 1-1 [Danio rerio]
  misc_feature (45)..(374): Homolog of NCBI NO: 14198113 NR Description: Unknown (protein for IMAGE:3448039) [Homo sapiens]
  misc_feature (29)..(374): Homolog of NCBI NO: 3914807 NR Description: DNA-directed RNA polymerase I 40 kDa polypeptide
  misc_feature (1)..(372): Homolog of NCBI NO: 15219773 NR Description: RNA polymerase subunit [Arabidopsis thaliana]
  misc_feature (1)..(375): Homolog of NCBI NO: 21592304 NR Description: RNA polymerase subunit [Arabidopsis thaliana]
  misc_feature (1)..(375): Homolog of NCBI NO: 514322 NR Description: RNA polymerase subunit
  misc_feature (1)..(375): Homolog of NCBI NO: 15219820 NR Description: RNA polymerase subunit [Arabidopsis thaliana]
MVTKAEKQFAKNFNIDDLPDVPAGLPPHLKAQQTRVVSKNNAPAHTASAIYSGTYVSSTEEDDNVKLGNFYDNFKVDVVSLTKTDMEFDMIGIDAAFANAFRRILIAEVPSMAIEKVLIAYNTSVIIDEVLAHRMGLIPIAADPRLFEYLSEHDQANEKNTIVFKLHVKCPKNRPRLKVLTSDLKWLPNGSELLRESENKTSKPKTYTSFSCSQDSLPEFANNPITPCDLDILIAKLAPGQEIELEAHAVKGIGKTHAKWSPVGTAWYRMHPEVVLRGEVEDELAERLVNVCPQNVFDIEDMGKGKKRATVAQPRKCTLCKECVRDDDLVDHVDLGSVKNHFIFNIESTGSLPPEVLFTEAVKILEAKCEAITDF

SEQ ID NO: 40104 - protein, 290 aa, Arabidopsis thaliana
  peptide (1)..(290): Ceres Seq. ID no. 13575070
  misc_feature (32)..(176): Pfam Name: RNA polymerase Rpb3/RpoA insert domain Pfam Description: RNA polymerase Rpb3/RpoA insert domain
  misc_feature (1)..(289): Homolog of NCBI NO: 18266895 NR Description: DNA-directed RNA polymerase I 40 kDa polypeptide
  misc_feature (1)..(289): Homolog of NCBI NO: 6677787 NR Description: RNA polymerase 1-1; RNA polymerase 1-1 (40 kDa
  misc_feature (1)..(289): Homolog of NCBI NO: 34874462 NR Description: similar to DNA-directed RNA polymerase I 40 kDa
  misc_feature (1)..(285): Homolog of NCBI NO: 34193909 NR Description: RNA polymerase 1-1 [Danio rerio]
  misc_feature (1)..(289): Homolog of NCBI NO: 14198113 NR Description: Unknown (protein for IMAGE:3448039) [Homo sapiens]
  misc_feature (1)..(289): Homolog of NCBI NO: 3914807 NR Description: DNA-directed RNA polymerase I 40 kDa polypeptide
  misc_feature (1)..(287): Homolog of NCBI NO: 15219773 NR Description: RNA polymerase subunit [Arabidopsis thaliana]
  misc_feature (1)..(290): Homolog of NCBI NO: 21592304 NR Description: RNA polymerase subunit [Arabidopsis thaliana]
  misc_feature (1)..(290): Homolog of NCBI NO: 514322 NR Description: RNA polymerase subunit
  misc_feature (1)..(290): Homolog of NCBI NO: 15219820 NR Description: RNA polymerase subunit [Arabidopsis thaliana]
MEFDMIGIDAAFANAFRRILIAEVPSMAIEKVLIAYNTSVIIDEVLAHRMGLIPIAADPRLFEYLSEHDQANEKNTIVFKLHVKCPKNRPRLKVLTSDLKWLPNGSELLRESENKTSKPKTYTSFSCSQDSLPEFANNPITPCDLDILIAKLAPGQEIELEAHAVKGIGKTHAKWSPVGTAWYRMHPEVVLRGEVEDELAERLVNVCPQNVFDIEDMGKGKKRATVAQPRKCTLCKECVRDDDLVDHVDLGSVKNHFIFNIESTGSLPPEVLFTEAVKILEAKCEAITDF

SEQ ID NO: 40105 - protein, 286 aa, Arabidopsis thaliana
  peptide (1)..(286): Ceres Seq. ID no. 13575071
  misc_feature (28)..(172): Pfam Name: RNA polymerase Rpb3/RpoA insert domain Pfam Description: RNA polymerase Rpb3/RpoA insert domain
  misc_feature (1)..(285): Homolog of NCBI NO: 18266895 NR Description: DNA-directed RNA polymerase I 40 kDa polypeptide
  misc_feature (1)..(285): Homolog of NCBI NO: 6677787 NR Description: RNA polymerase 1-1; RNA polymerase 1-1 (40 kDa
  misc_feature (1)..(285): Homolog of NCBI NO: 34874462 NR Description: similar to DNA-directed RNA polymerase I 40 kDa
  misc_feature (1)..(281): Homolog of NCBI NO: 34193909 NR Description: RNA polymerase 1-1 [Danio rerio]
  misc_feature (1)..(285): Homolog of NCBI NO: 14198113 NR Description: Unknown (protein for IMAGE:3448039) [Homo sapiens]
  misc_feature (1)..(285): Homolog of NCBI NO: 3914807 NR Description: DNA-directed RNA polymerase I 40 kDa polypeptide
  misc_feature (1)..(283): Homolog of NCBI NO: 15219773 NR Description: RNA polymerase subunit [Arabidopsis thaliana]
  misc_feature (1)..(286): Homolog of NCBI NO: 21592304 NR Description: RNA polymerase subunit [Arabidopsis thaliana]
  misc_feature (1)..(286): Homolog of NCBI NO: 514322 NR Description: RNA polymerase subunit
  misc_feature (1)..(286): Homolog of NCBI NO: 15219820 NR Description: RNA polymerase subunit [Arabidopsis thaliana]
MIGIDAAFANAFRRILIAEVPSMAIEKVLIAYNTSVIIDEVLAHRMGLIPIAADPRLFEYLSEHDQANEKNTIVFKLHVKCPKNRPRLKVLTSDLKWLPNGSELLRESENKTSKPKTYTSFSCSQDSLPEFANNPITPCDLDILIAKLAPGQEIELEAHAVKGIGKTHAKWSPVGTAWYRMHPEVVLRGEVEDELAERLVNVCPQNVFDIEDMGKGKKRATVAQPRKCTLCKECVRDDDLVDHVDLGSVKNHFIFNIESTGSLPPEVLFTEAVKILEAKCEAITDF

SEQ ID NO: 40106 - DNA, 2054 bp, Arabidopsis thaliana
  misc_feature (1)..(2054): Ceres Seq. ID no. 13509092
  misc_feature: MA Experiment ID: 108577 Result: Down-regulated in Transcription
  misc_feature: MA Experiment 108577 PARAMETER Experiment Name: At_42deg_Heat_cDNA_P Parameter: Temperature (deg C) Value: 42 vs. 22
  misc_feature: MA Experiment 108577 PARAMETER Experiment Name: At_42deg_Heat_cDNA_P Parameter: Timepoint (hr) Value: 6
  misc_feature: MA Experiment 108577 PARAMETER Experiment Name: At_42deg_Heat_cDNA_P Parameter: Tissue Value: Aerial
  misc_feature: MA Experiment ID: 20000111 Result: Down-regulated in Transcription
  misc_feature: MA Experiment 20000111 PARAMETER Experiment Name: At_42deg_Heat_cDNA_P Parameter: Temperature (deg C) Value: 42 vs. 22
  misc_feature: MA Experiment 20000111 PARAMETER Experiment Name: At_42deg_Heat_cDNA_P Parameter: Timepoint (hr) Value: 6
  misc_feature: MA Experiment 20000111 PARAMETER Experiment Name: At_42deg_Heat_cDNA_P Parameter: Tissue Value: Aerial
  misc_feature: MA Experiment ID: 20000113 Result: Down-regulated in Transcription
  misc_feature: MA Experiment 20000113 PARAMETER Experiment Name: At_42deg_Heat_cDNA_P Parameter: Temperature (deg C) Value: 42 vs. 22
  misc_feature: MA Experiment 20000113 PARAMETER Experiment Name: At_42deg_Heat_cDNA_P Parameter: Timepoint (hr) Value: 8
  misc_feature: MA Experiment 20000113 PARAMETER Experiment Name: At_42deg_Heat_cDNA_P Parameter: Tissue Value: Aerial
tggttcctctcctctctctctctcttcccgttttcacttttgttcgttctctggcggccgatcccgtcgctcgctaccttttaagatattttttttatctaatgaacctgaaattgtaattaggcatataattggggattatttgctgaaattctcatttctagatcgaaaaaagcgaataattcgttttcatttgattcttgcctaatcttagggtgtctttatttatctaccaaaagaatgtctaattatcgaggagatgatgctgagtacatggaagacgtagatgatgagatggaagatgttgaagatgatatggatgaggagtttcgtggtgatgatcttggtgcttcagattctgacgttgaagaatttgactattcgaacaataaagtagctgataccacggctgagcaagctcggaaagggaaagatatccaggggattccgtgggacagacttaatatttctagagagaaatacagacaaactagattagaacagtataagaattatgaaaatgtccctaattctggagaatcatcagaaaaggtttgcaaggtcacacagaaaggaggactattttatgacttctggcggaattcacgatctattaagtctactatactacatttccagctgagaaatttggtatgggcaacttctaagcacgacgtgtatcttatgtcaaattttctggttacacattattcttctctaacgtctggaaagcatgaagttctcaatgtccgtggtcatgttgcgccatctgagaaacatcctggaagtttacttgaaggatttacgcagactcaagtaagtacacttgcagtaaaagatgactttctggttgctggcgggtttcaaggagaacttatttgcaagcatcttgatagaccgggtgtcagcttttgctctcgtatgacttatgatgataatgctataaccaatgctattgagatctacaacaaacccagtggtgcacttcattttactgcgtcaaataatgactgtggagttagagactttgacatggagagataccagcttgttaagcatttccgttttccttggccagtgaatcacgcatctttgagtcctgatggtaaattactggctattgttggagacaacccggagggccttattgtagaccccaacacaggaaagacgttggaaacactatcaggacacttggacttttcctttgcctctgcgtggcatccggatggagtcactttctctacaggaaaccaagataagacttgtcgtgtatgggacatccgtaacctatctcagtctgttactgtcttgaagggtaacctgggagcaatccggtcaatccgctacacatcagatggaaaatacatggccatggctgaaccggctgactttgtccatgtctatgatgtctcaaacgggtatgaaacagagcaggaaatcgacttctttggggaaatctctggaatatctttcagccctgacacagaggcgctatttattggggtatgggaccgcacttatggtagcctccttgagtttggtcggcgcaggaactattcctaccttgactcgtatctttaagctagaagagaagtatacacaaccctgtccaatgaagaaaagagagctcattcagcaaccagtgaacatgacagaagcaaagcatagatatatggatatctcaaagatgtaaatgatgtgttgtgcaaatgctagttagttagtgtcttttgtttccttctccggctggtgtgttattttccttatgtctggttatgtctggtctcaaaaggttcaagatgtgtacagaaagggctggttcagtggtggcacagactggattaggacttgagggtggctccgcagcgggttctggattcaaagtcgggaggatcattgttgttgtgtttggtggcttgtgatcttttctttttgttccttgtacttgtggttgttgtaggaactcgagtgtttagatcctgttctgagtttagaatttggagatacttaactaaattaaaataaattaataatagtcctttgttcgttat

SEQ ID NO: 40107 - protein, 447 aa, Arabidopsis thaliana
  peptide (1)..(447): Ceres Seq. ID no. 13509093
  misc_feature (69)..(447): Homolog of NCBI NO: 27948448 NR Description: GAMYB-binding protein [Hordeum vulgare subsp.
  misc_feature (1)..(445): Homolog of NCBI NO: 13937195 NR Description: At1g78070/F28K19_28 [Arabidopsis thaliana]
  misc_feature (30)..(447): Homolog of NCBI NO: 9294540 NR Description: WD domain protein-like [Arabidopsis thaliana]
  misc_feature (1)..(447): Homolog of NCBI NO: 25405994 NR Description: protein F20N2.10 [imported] - Arabidopsis
  misc_feature (7)..(447): Homolog of NCBI NO: 30696707 NR Description: WD-40 repeat protein family [Arabidopsis
  misc_feature (1)..(447): Homolog of NCBI NO: 9758639 NR Description: WD-repeat protein-like [Arabidopsis thaliana]
  misc_feature (1)..(447): Homolog of NCBI NO: 21536732 NR Description: WD-repeat protein-like [Arabidopsis thaliana]
  misc_feature (1)..(447): Homolog of NCBI NO: 18423837 NR Description: WD-40 repeat protein family [Arabidopsis thaliana]
  misc_feature (1)..(447): Homolog of NCBI NO: 18405485 NR Description: WD-40 repeat protein family [Arabidopsis
  misc_feature (1)..(447): Homolog of NCBI NO: 18399975 NR Description: WD-40 repeat protein family [Arabidopsis
  misc_feature (69)..(447): Homolog of NCBI NO: 27948448 NR Description: GAMYB-binding protein [Hordeum vulgare subsp.
  misc_feature (1)..(445): Homolog of NCBI NO: 13937195 NR Description: At1g78070/F28K19_28 [Arabidopsis thaliana]
  misc_feature (30)..(447): Homolog of NCBI NO: 9294540 NR Description: WD domain protein-like [Arabidopsis thaliana]
  misc_feature (1)..(447): Homolog of NCBI NO: 25405994 NR Description: protein F20N2.10 [imported] - Arabidopsis
  misc_feature (7)..(447): Homolog of NCBI NO: 30696707 NR Description: WD-40 repeat protein family [Arabidopsis
  misc_feature (1)..(447): Homolog of NCBI NO: 9758639 NR Description: WD-repeat protein-like [Arabidopsis thaliana]
  misc_feature (1)..(447): Homolog of NCBI NO: 21536732 NR Description: WD-repeat protein-like [Arabidopsis thaliana]
  misc_feature (1)..(447): Homolog of NCBI NO: 18423837 NR Description: WD-40 repeat protein family [Arabidopsis thaliana]
  misc_feature (1)..(447): Homolog of NCBI NO: 18405485 NR Description: WD-40 repeat protein family [Arabidopsis
  misc_feature (1)..(447): Homolog of NCBI NO: 18399975 NR Description: WD-40 repeat protein family [Arabidopsis
MSNYRGDDAEYMEDVDDEMEDVEDDMDEEFRGDDLGASDSDVEEFDYSNNKVADTTAEQARKGKDIQGIPWDRLNISREKYRQTRLEQYKNYENVPNSGESSEKVCKVTQKGGLFYDFWRNSRSIKSTILHFQLRNLVWATSKHDVYLMSNFLVTHYSSLTSGKHEVLNVRGHVAPSEKHPGSLLEGFTQTQVSTLAVKDDFLVAGGFQGELICKHLDRPGVSFCSRMTYDDNAITNAIEIYNKPSGALHFTASNNDCGVRDFDMERYQLVKHFRFPWPVNHASLSPDGKLLAIVGDNPEGLIVDPNTGKTLETLSGHLDFSFASAWHPDGVTFSTGNQDKTCRVWDIRNLSQSVTVLKGNLGAIRSIRYTSDGKYMAMAEPADFVHVYDVSNGYETEQEIDFFGEISGISFSPDTEALFIGVWDRTYGSLLEFGRRRNYSYLDSYL

SEQ ID NO: 40108 - protein, 436 aa, Arabidopsis thaliana
  peptide (1)..(436): Ceres Seq. ID no. 13509094
  misc_feature (58)..(436): Homolog of NCBI NO: 27948448 NR Description: GAMYB-binding protein [Hordeum vulgare subsp.
  misc_feature (1)..(434): Homolog of NCBI NO: 13937195 NR Description: At1g78070/F28K19_28 [Arabidopsis thaliana]
  misc_feature (19)..(436): Homolog of NCBI NO: 9294540 NR Description: WD domain protein-like [Arabidopsis thaliana]
  misc_feature (1)..(436): Homolog of NCBI NO: 25405994 NR Description: protein F20N2.10 [imported] - Arabidopsis
  misc_feature (1)..(436): Homolog of NCBI NO: 30696707 NR Description: WD-40 repeat protein family [Arabidopsis
  misc_feature (1)..(436): Homolog of NCBI NO: 9758639 NR Description: WD-repeat protein-like [Arabidopsis thaliana]
  misc_feature (1)..(436): Homolog of NCBI NO: 21536732 NR Description: WD-repeat protein-like [Arabidopsis thaliana]
  misc_feature (1)..(436): Homolog of NCBI NO: 18423837 NR Description: WD-40 repeat protein family [Arabidopsis thaliana]
  misc_feature (1)..(436): Homolog of NCBI NO: 18405485 NR Description: WD-40 repeat protein family [Arabidopsis
  misc_feature (1)..(436): Homolog of NCBI NO: 18399975 NR Description: WD-40 repeat protein family [Arabidopsis
  misc_feature (58)..(436): Homolog of NCBI NO: 27948448 NR Description: GAMYB-binding protein [Hordeum vulgare subsp.
  misc_feature (1)..(434): Homolog of NCBI NO: 13937195 NR Description: At1g78070/F28K19_28 [Arabidopsis thaliana]
  misc_feature (19)..(436): Homolog of NCBI NO: 9294540 NR Description: WD domain protein-like [Arabidopsis thaliana]
  misc_feature (1)..(436): Homolog of NCBI NO: 25405994 NR Description: protein F20N2.10 [imported] - Arabidopsis
  misc_feature (1)..(436): Homolog of NCBI NO: 30696707 NR Description: WD-40 repeat protein family [Arabidopsis
  misc_feature (1)..(436): Homolog of NCBI NO: 9758639 NR Description: WD-repeat protein-like [Arabidopsis thaliana]
  misc_feature (1)..(436): Homolog of NCBI NO: 21536732 NR Description: WD-repeat protein-like [Arabidopsis thaliana]
  misc_feature (1)..(436): Homolog of NCBI NO: 18423837 NR Description: WD-40 repeat protein family [Arabidopsis thaliana]
  misc_feature (1)..(436): Homolog of NCBI NO: 18405485 NR Description: WD-40 repeat protein family [Arabidopsis
  misc_feature (1)..(436): Homolog of NCBI NO: 18399975 NR Description: WD-40 repeat protein family [Arabidopsis
MEDVDDEMEDVEDDMDEEFRGDDLGASDSDVEEFDYSNNKVADTTAEQARKGKDIQGIPWDRLNISREKYRQTRLEQYKNYENVPNSGESSEKVCKVTQKGGLFYDFWRNSRSIKSTILHFQLRNLVWATSKHDVYLMSNFLVTHYSSLTSGKHEVLNVRGHVAPSEKHPGSLLEGFTQTQVSTLAVKDDFLVAGGFQGELICKHLDRPGVSFCSRMTYDDNAITNAIEIYNKPSGALHFTASNNDCGVRDFDMERYQLVKHFRFPWPVNHASLSPDGKLLAIVGDNPEGLIVDPNTGKTLETLSGHLDFSFASAWHPDGVTFSTGNQDKTCRVWDIRNLSQSVTVLKGNLGAIRSIRYTSDGKYMAMAEPADFVHVYDVSNGYETEQEIDFFGEISGISFSPDTEALFIGVWDRTYGSLLEFGRRRNYSYLDSYL

SEQ ID NO: 40109 - protein, 429 aa, Arabidopsis thaliana
  peptide (1)..(429): Ceres Seq. ID no. 13509095
  misc_feature (51)..(429): Homolog of NCBI NO: 27948448 NR Description: GAMYB-binding protein [Hordeum vulgare subsp.
  misc_feature (1)..(427): Homolog of NCBI NO: 13937195 NR Description: At1g78070/F28K19_28 [Arabidopsis thaliana]
  misc_feature (12)..(429): Homolog of NCBI NO: 9294540 NR Description: WD domain protein-like [Arabidopsis thaliana]
  misc_feature (1)..(429): Homolog of NCBI NO: 25405994 NR Description: protein F20N2.10 [imported] - Arabidopsis
  misc_feature (1)..(429): Homolog of NCBI NO: 30696707 NR Description: WD-40 repeat protein family [Arabidopsis
  misc_feature (1)..(429): Homolog of NCBI NO: 9758639 NR Description: WD-repeat protein-like [Arabidopsis thaliana]
  misc_feature (1)..(429): Homolog of NCBI NO: 21536732 NR Description: WD-repeat protein-like [Arabidopsis thaliana]
  misc_feature (1)..(429): Homolog of NCBI NO: 18423837 NR Description: WD-40 repeat protein family [Arabidopsis thaliana]
  misc_feature (1)..(429): Homolog of NCBI NO: 18405485 NR Description: WD-40 repeat protein family [Arabidopsis
  misc_feature (1)..(429): Homolog of NCBI NO: 18399975 NR Description: WD-40 repeat protein family [Arabidopsis
  misc_feature (51)..(429): Homolog of NCBI NO: 27948448 NR Description: GAMYB-binding protein [Hordeum vulgare subsp.
  misc_feature (1)..(427): Homolog of NCBI NO: 13937195 NR Description: At1g78070/F28K19_28 [Arabidopsis thaliana]
  misc_feature (12)..(429): Homolog of NCBI NO: 9294540 NR Description: WD domain protein-like [Arabidopsis thaliana]
  misc_feature (1)..(429): Homolog of NCBI NO: 25405994 NR Description: protein F20N2.10 [imported] - Arabidopsis
  misc_feature (1)..(429): Homolog of NCBI NO: 30696707 NR Description: WD-40 repeat protein family [Arabidopsis
  misc_feature (1)..(429): Homolog of NCBI NO: 9758639 NR Description: WD-repeat protein-like [Arabidopsis thaliana]
  misc_feature (1)..(429): Homolog of NCBI NO: 21536732 NR Description: WD-repeat protein-like [Arabidopsis thaliana]
  misc_feature (1)..(429): Homolog of NCBI NO: 18423837 NR Description: WD-40 repeat protein family [Arabidopsis thaliana]
  misc_feature (1)..(429): Homolog of NCBI NO: 18405485 NR Description: WD-40 repeat protein family [Arabidopsis
  misc_feature (1)..(429): Homolog of NCBI NO: 18399975 NR Description: WD-40 repeat protein family [Arabidopsis
MEDVEDDMDEEFRGDDLGASDSDVEEFDYSNNKVADTTAEQARKGKDIQGIPWDRLNISREKYRQTRLEQYKNYENVPNSGESSEKVCKVTQKGGLFYDFWRNSRSIKSTILHFQLRNLVWATSKHDVYLMSNFLVTHYSSLTSGKHEVLNVRGHVAPSEKHPGSLLEGFTQTQVSTLAVKDDFLVAGGFQGELICKHLDRPGVSFCSRMTYDDNAITNAIEIYNKPSGALHFTASNNDCGVRDFDMERYQLVKHFRFPWPVNHASLSPDGKLLAIVGDNPEGLIVDPNTGKTLETLSGHLDFSFASAWHPDGVTFSTGNQDKTCRVWDIRNLSQSVTVLKGNLGAIRSIRYTSDGKYMAMAEPADFVHVYDVSNGYETEQEIDFFGEISGISFSPDTEALFIGVWDRTYGSLLEFGRRRNYSYLDSYL

SEQ ID NO: 40110 - DNA, 1200 bp, Arabidopsis thaliana
  misc_feature (1)..(1200): Ceres Seq. ID no. 13488977
  misc_feature: MA Experiment ID: 108434 Result: Down-regulated in Transcription
  misc_feature: MA Experiment 108434 PARAMETER Experiment Name: At_Root_Tips_cDNA_P Parameter: Tissue Value: Root Tips
  misc_feature: MA Experiment ID: 108461 Result: Down-regulated in Transcription
  misc_feature: MA Experiment 108461 PARAMETER Experiment Name: At_Germinating_Seeds_cDNA_P Parameter: Age (day) Value: 1 vs. 0
  misc_feature: MA Experiment 108461 PARAMETER Experiment Name: At_Germinating_Seeds_cDNA_P Parameter: Tissue Value: Germinating Seeds
  misc_feature: MA Experiment ID: 108573 Result: Down-regulated in Transcription
  misc_feature: MA Experiment 108573 PARAMETER Experiment Name: At_Drought_cDNA_P Parameter: Timepoint (hr) Value: 6
  misc_feature: MA Experiment 108573 PARAMETER Experiment Name: At_Drought_cDNA_P Parameter: Tissue Value: Aerial
  misc_feature: MA Experiment 108573 PARAMETER Experiment Name: At_Drought_cDNA_P Parameter: Treatment Value: Drought vs. No Drought
  misc_feature: MA Experiment ID: 108574 Result: Up-regulated in Transcription
  misc_feature: MA Experiment 108574 PARAMETER Experiment Name: At_Wounding__cDNA_P Parameter: Timepoint (hr) Value: 1
  misc_feature: MA Experiment 108574 PARAMETER Experiment Name: At_Wounding__cDNA_P Parameter: Tissue Value: Aerial
  misc_feature: MA Experiment 108574 PARAMETER Experiment Name: At_Wounding__cDNA_P Parameter: Treatment Value: Wounding vs. No Wounding
  misc_feature: MA Experiment ID: 108576 Result: Down-regulated in Transcription
  misc_feature: MA Experiment 108576 PARAMETER Experiment Name: At_42deg_Heat_cDNA_P Parameter: Temperature (deg C) Value: 42 vs. 22
  misc_feature: MA Experiment 108576 PARAMETER Experiment Name: At_42deg_Heat_cDNA_P Parameter: Timepoint (hr) Value: 1
  misc_feature: MA Experiment 108576 PARAMETER Experiment Name: At_42deg_Heat_cDNA_P Parameter: Tissue Value: Aerial
  misc_feature: MA Experiment ID: 108577 Result: Down-regulated in Transcription
  misc_feature: MA Experiment 108577 PARAMETER Experiment Name: At_42deg_Heat_cDNA_P Parameter: Temperature (deg C) Value: 42 vs. 22
  misc_feature: MA Experiment 108577 PARAMETER Experiment Name: At_42deg_Heat_cDNA_P Parameter: Timepoint (hr) Value: 6
  misc_feature: MA Experiment 108577 PARAMETER Experiment Name: At_42deg_Heat_cDNA_P Parameter: Tissue Value: Aerial
  misc_feature: MA Experiment ID: 108585 Result: Up-regulated in Transcription
  misc_feature: MA Experiment 108585 PARAMETER Experiment Name: At_5mM_NaNP_cDNA_P Parameter: Timepoint (hr) Value: 6
  misc_feature: MA Experiment 108585 PARAMETER Experiment Name: At_5mM_NaNP_cDNA_P Parameter: Tissue Value: Aerial
  misc_feature: MA Experiment 108585 PARAMETER Experiment Name: At_5mM_NaNP_cDNA_P Parameter: Treatment Value: null
  misc_feature: MA Experiment ID: 20000093 Result: Down-regulated in Transcription
  misc_feature: MA Experiment 20000093 PARAMETER Experiment Name: At_42deg_Heat_cDNA_P Parameter: Temperature (deg C) Value: 42 vs. 22
  misc_feature: MA Experiment 20000093 PARAMETER Experiment Name: At_42deg_Heat_cDNA_P Parameter: Timepoint (hr) Value: 0.5
  misc_feature: MA Experiment 20000093 PARAMETER Experiment Name: At_42deg_Heat_cDNA_P Parameter: Tissue Value: Aerial
  misc_feature: MA Experiment ID: 20000111 Result: Down-regulated in Transcription
  misc_feature: MA Experiment 20000111 PARAMETER Experiment Name: At_42deg_Heat_cDNA_P Parameter: Temperature (deg C) Value: 42 vs. 22
  misc_feature: MA Experiment 20000111 PARAMETER Experiment Name: At_42deg_Heat_cDNA_P Parameter: Timepoint (hr) Value: 6
  misc_feature: MA Experiment 20000111 PARAMETER Experiment Name: At_42deg_Heat_cDNA_P Parameter: Tissue Value: Aerial
  misc_feature: MA Experiment ID: 20000112 Result: Down-regulated in Transcription
  misc_feature: MA Experiment 20000112 PARAMETER Experiment Name: At_42deg_Heat_cDNA_P Parameter: Temperature (deg C) Value: 42 vs. 22
  misc_feature: MA Experiment 20000112 PARAMETER Experiment Name: At_42deg_Heat_cDNA_P Parameter: Timepoint (hr) Value: 2
  misc_feature: MA Experiment 20000112 PARAMETER Experiment Name: At_42deg_Heat_cDNA_P Parameter: Tissue Value: Aerial
  misc_feature: MA Experiment ID: 20000113 Result: Down-regulated in Transcription
  misc_feature: MA Experiment 20000113 PARAMETER Experiment Name: At_42deg_Heat_cDNA_P Parameter: Temperature (deg C) Value: 42 vs. 22
  misc_feature: MA Experiment 20000113 PARAMETER Experiment Name: At_42deg_Heat_cDNA_P Parameter: Timepoint (hr) Value: 8
  misc_feature: MA Experiment 20000113 PARAMETER Experiment Name: At_42deg_Heat_cDNA_P Parameter: Tissue Value: Aerial
  misc_feature: MA Experiment ID: 20000117 Result: Up-regulated in Transcription
  misc_feature: MA Experiment 20000117 PARAMETER Experiment Name: At_100uM_ABA_Mutants_cDNA_P Parameter: Plant Line Value: Columbia
  misc_feature: MA Experiment 20000117 PARAMETER Experiment Name: At_100uM_ABA_Mutants_cDNA_P Parameter: Timepoint (hr) Value: 6
  misc_feature: MA Experiment 20000117 PARAMETER Experiment Name: At_100uM_ABA_Mutants_cDNA_P Parameter: Tissue Value: Aerial
  misc_feature: MA Experiment 20000117 PARAMETER Experiment Name: At_100uM_ABA_Mutants_cDNA_P Parameter: Treatment Value: 100uM ABA vs. No Treatment
  misc_feature: MA Experiment ID: 20000144 Result: Down-regulated in Transcription
  misc_feature: MA Experiment 20000144 PARAMETER Experiment Name: At_42deg_Heat_cDNA_P Parameter: Temperature (deg C) Value: 42 vs. 22
  misc_feature: MA Experiment 20000144 PARAMETER Experiment Name: At_42deg_Heat_cDNA_P Parameter: Timepoint (hr) Value: 1
  misc_feature: MA Experiment 20000144 PARAMETER Experiment Name: At_42deg_Heat_cDNA_P Parameter: Tissue Value: Aerial
  misc_feature: MA Experiment ID: 20000171 Result: Down-regulated in Transcription
  misc_feature: MA Experiment 20000171 PARAMETER Experiment Name: At_42deg_Heat_P Parameter: Age (day) Value: 14
  misc_feature: MA Experiment 20000171 PARAMETER Experiment Name: At_42deg_Heat_P Parameter: Organism Value: A. thaliana
  misc_feature: MA Experiment 20000171 PARAMETER Experiment Name: At_42deg_Heat_P Parameter: Plant Line Value: WS
  misc_feature: MA Experiment 20000171 PARAMETER Experiment Name: At_42deg_Heat_P Parameter: Temperature (deg C) Value: 42 vs. 22
  misc_feature: MA Experiment 20000171 PARAMETER Experiment Name: At_42deg_Heat_P Parameter: Timepoint (hr) Value: 1
  misc_feature: MA Experiment 20000171 PARAMETER Experiment Name: At_42deg_Heat_P Parameter: Tissue Value: Aerial
  misc_feature: MA Experiment ID: 20000173 Result: Down-regulated in Transcription
  misc_feature: MA Experiment 20000173 PARAMETER Experiment Name: At_42deg_Heat_P Parameter: Age (day) Value: 14
  misc_feature: MA Experiment 20000173 PARAMETER Experiment Name: At_42deg_Heat_P Parameter: Organism Value: A. thaliana
  misc_feature: MA Experiment 20000173 PARAMETER Experiment Name: At_42deg_Heat_P Parameter: Plant Line Value: WS
  misc_feature: MA Experiment 20000173 PARAMETER Experiment Name: At_42deg_Heat_P Parameter: Temperature (deg C) Value: 42 vs. 22
  misc_feature: MA Experiment 20000173 PARAMETER Experiment Name: At_42deg_Heat_P Parameter: Timepoint (hr) Value: 6
  misc_feature: MA Experiment 20000173 PARAMETER Experiment Name: At_42deg_Heat_P Parameter: Tissue Value: Aerial
  misc_feature: MA Experiment ID: 20000180 Result: Down-regulated in Transcription
  misc_feature: MA Experiment 20000180 PARAMETER Experiment Name: At_Germinating_Seeds_P Parameter: Age (hr) Value: 24 vs. 0
  misc_feature: MA Experiment 20000180 PARAMETER Experiment Name: At_Germinating_Seeds_P Parameter: Tissue Value: Germinating Seeds
  misc_feature: MA Experiment ID: 20000184 Result: Down-regulated in Transcription
  misc_feature: MA Experiment 20000184 PARAMETER Experiment Name: At_Shoots__P Parameter: Age (day) Value: 7
  misc_feature: MA Experiment 20000184 PARAMETER Experiment Name: At_Shoots__P Parameter: Tissue Value: Shoots vs. Whole Plant
  misc_feature: MA Experiment ID: 20000211 Result: Up-regulated in Transcription
  misc_feature: MA Experiment 20000211 PARAMETER Experiment Name: At_0.001percent_MeJA__P Parameter: Age (day) Value: 14
  misc_feature: MA Experiment 20000211 PARAMETER Experiment Name: At_0.001percent_MeJA__P Parameter: Organism Value: A. thaliana
  misc_feature: MA Experiment 20000211 PARAMETER Experiment Name: At_0.001percent_MeJA__P Parameter: Plant Line Value: WS
  misc_feature: MA Experiment 20000211 PARAMETER Experiment Name: At_0.001percent_MeJA__P Parameter: Timepoint (hr) Value: 1
  misc_feature: MA Experiment 20000211 PARAMETER Experiment Name: At_0.001percent_MeJA__P Parameter: Tissue Value: Aerial
  misc_feature: MA Experiment 20000211 PARAMETER Experiment Name: At_0.001percent_MeJA__P Parameter: Treatment Value: 0.001percent MeJA vs. No Treatment
  misc_feature: MA Experiment ID: 20000224 Result: Up-regulated in Transcription
  misc_feature: MA Experiment ID: 20000264 Result: Up-regulated in Transcription
  misc_feature: MA Experiment 20000264 PARAMETER Experiment Name: At_Open_Flower_P Parameter: Age (day) Value: 21
  misc_feature: MA Experiment 20000264 PARAMETER Experiment Name: At_Open_Flower_P Parameter: Plant Line Value: WS
  misc_feature: MA Experiment 20000264 PARAMETER Experiment Name: At_Open_Flower_P Parameter: Tissue Value: Open Flower vs. Whole Plant
  misc_feature: MA Experiment ID: 20000265 Result: Up-regulated in Transcription
  misc_feature: MA Experiment 20000265 PARAMETER Experiment Name: At_Open_Flower_P Parameter: Age (day) Value: 21
  misc_feature: MA Experiment 20000265 PARAMETER Experiment Name: At_Open_Flower_P Parameter: Plant Line Value: WS
  misc_feature: MA Experiment 20000265 PARAMETER Experiment Name: At_Open_Flower_P Parameter: Tissue Value: Closed Flower vs. Whole Plant
  misc_feature: MA Experiment ID: 20000452 Result: Up-regulated in Transcription
  misc_feature: MA Experiment 20000452 PARAMETER Experiment Name: At_CS6879_Shoots-Roots_P Parameter: Age (day) Value: 14
  misc_feature: MA Experiment 20000452 PARAMETER Experiment Name: At_CS6879_Shoots-Roots_P Parameter: Organism Value: A. thaliana
  misc_feature: MA Experiment 20000452 PARAMETER Experiment Name: At_CS6879_Shoots-Roots_P Parameter: Plant Line Value: CS6879 vs. WS
  misc_feature: MA Experiment 20000452 PARAMETER Experiment Name: At_CS6879_Shoots-Roots_P Parameter: Tissue Value: Shoots
  misc_feature: MA Experiment ID: 20000527 Result: Down-regulated in Transcription
  misc_feature: MA Experiment 20000527 PARAMETER Experiment Name: At_10percent_PEG_P Parameter: Age (day) Value: 20
  misc_feature: MA Experiment 20000527 PARAMETER Experiment Name: At_10percent_PEG_P Parameter: Organism Value: A. thaliana
  misc_feature: MA Experiment 20000527 PARAMETER Experiment Name: At_10percent_PEG_P Parameter: Plant Line Value: WS
  misc_feature: MA Experiment 20000527 PARAMETER Experiment Name: At_10percent_PEG_P Parameter: Timepoint (day) Value: 20
  misc_feature: MA Experiment 20000527 PARAMETER Experiment Name: At_10percent_PEG_P Parameter: Tissue Value: Whole Plant
  misc_feature: MA Experiment 20000527 PARAMETER Experiment Name: At_10percent_PEG_P Parameter: Treatment Value: 10percent PEG vs. No Treatment
  misc_feature: MA Experiment ID: 20000709 Result: Down-regulated in Transcription
  misc_feature: MA Experiment 20000709 PARAMETER Experiment Name: At_15mM_NH4NO3_L-to-H_P Parameter: Age (hr) Value: 14
  misc_feature: MA Experiment 20000709 PARAMETER Experiment Name: At_15mM_NH4NO3_L-to-H_P Parameter: Organism Value: A. thaliana
  misc_feature: MA Experiment 20000709 PARAMETER Experiment Name: At_15mM_NH4NO3_L-to-H_P Parameter: Plant Line Value: WS
  misc_feature: MA Experiment 20000709 PARAMETER Experiment Name: At_15mM_NH4NO3_L-to-H_P Parameter: Timepoint (hr) Value: 4
  misc_feature: MA Experiment 20000709 PARAMETER Experiment Name: At_15mM_NH4NO3_L-to-H_P Parameter: Tissue Value: Aerial
  misc_feature: MA Experiment 20000709 PARAMETER Experiment Name: At_15mM_NH4NO3_L-to-H_P Parameter: Treatment Value: 15mM NH4NO3 vs. 30mM Mannitol
  misc_feature: MA Experiment ID: 20000794 Result: Up-regulated in Transcription
  misc_feature: MA Experiment 20000794 PARAMETER Experiment Name: At_Petals_P Parameter: Age (day) Value: 23-25 days
  misc_feature: MA Experiment 20000794 PARAMETER Experiment Name: At_Petals_P Parameter: Plant Line Value: WS
  misc_feature: MA Experiment 20000794 PARAMETER Experiment Name: At_Petals_P Parameter: Tissue Value: Petals vs. Whole plant
  misc_feature: MA Experiment ID: 20001247 Result: Down-regulated in Transcription
  misc_feature: MA Experiment 20001247 PARAMETER Experiment Name: At_Far-red-induction_P Parameter: Age (day) Value: 7
  misc_feature: MA Experiment 20001247 PARAMETER Experiment Name: At_Far-red-induction_P Parameter: Light Value: Far-red vs. White
  misc_feature: MA Experiment 20001247 PARAMETER Experiment Name: At_Far-red-induction_P Parameter: Organism Value: A. thaliana
  misc_feature: MA Experiment 20001247 PARAMETER Experiment Name: At_Far-red-induction_P Parameter: Plant Line Value: Columbia
  misc_feature: MA Experiment 20001247 PARAMETER Experiment Name: At_Far-red-induction_P Parameter: Timepoint (hr) Value: 1
  misc_feature: MA Experiment 20001247 PARAMETER Experiment Name: At_Far-red-induction_P Parameter: Tissue Value: Whole Plant
  misc_feature: MA Experiment ID: 20001450 Result: Down-regulated in Transcription
  misc_feature: MA Experiment 20001450 PARAMETER Experiment Name: At_Far-red-induction_P Parameter: Age (day) Value: 7
  misc_feature: MA Experiment 20001450 PARAMETER Experiment Name: At_Far-red-induction_P Parameter: Light Value: Far-red vs. White
  misc_feature: MA Experiment 20001450 PARAMETER Experiment Name: At_Far-red-induction_P Parameter: Organism Value: A. thaliana
  misc_feature: MA Experiment 20001450 PARAMETER Experiment Name: At_Far-red-induction_P Parameter: Plant Line Value: Columbia
  misc_feature: MA Experiment 20001450 PARAMETER Experiment Name: At_Far-red-induction_P Parameter: Timepoint (hr) Value: 8
  misc_feature: MA Experiment 20001450 PARAMETER Experiment Name: At_Far-red-induction_P Parameter: Tissue Value: Whole Plant
  misc_feature: MA Experiment ID: 20001905 Result: Down-regulated in Transcription
  misc_feature: MA Experiment 20001905 PARAMETER Experiment Name: At_Drought_Reproduction_P Parameter: Age (day) Value: 40
  misc_feature: MA Experiment 20001905 PARAMETER Experiment Name: At_Drought_Reproduction_P Parameter: Organism Value: A. thaliana
  misc_feature: MA Experiment 20001905 PARAMETER Experiment Name: At_Drought_Reproduction_P Parameter: Plant Line Value: WS
  misc_feature: MA Experiment 20001905 PARAMETER Experiment Name: At_Drought_Reproduction_P Parameter: Timepoint (day) Value: 10
  misc_feature: MA Experiment 20001905 PARAMETER Experiment Name: At_Drought_Reproduction_P Parameter: Tissue Value: Rosettes
  misc_feature: MA Experiment 20001905 PARAMETER Experiment Name: At_Drought_Reproduction_P Parameter: Treatment Value: Drought vs. No Drought
aagaagaggagccaagtaccaaactttttccttcagggttttcctctcaaaatcccaacttggcctctgtttttgctttcttttatgttctcttcttctctaaaaaccatctcatacttccaagaatttctctcacaaagaccaagaactcaaaatgtatcaagattctggattaatgctccgttacatgcaaaactgtcccccagatattcaacaattcgaagacctcttcaaatcatacaaactctccgatgaaatgaacaacacttttgttgagtcatcaaacatatctgagtatgatattggagaagaaagtgatctttttagagctcctgatccaattcttgaagaaccaatcttaaccgttgatccactctctgctgctttgactatgatctcttgtggtgaagacacttcacaaggtctttgtgagcttcctgatcttggttcattgcagagtggtcaacagcttcttgacaaagctttttatgaatgtgagcaagatcttatgatgaaatcagctatggagtctccattctctgatgttttagacatcaagaacatctctgttgtgacgacaatcaatgagaaccaggatatgcaaaagagtgttagctcggggaatttgagctctatggattggtcacatgcacaacaagagactgtaatgattcagaattttcctgatttcgattttggttatggaatgcgaagagcctttagtgaaggcgacatacagaaacttggggcaggtcttgttcaatctccactagataggattattgtgagctgcacttcagaagatcgccgtgagaagctttctcgatacaagaacaagaagagcaggcgaaatttcgggcgtaagattaagtatgcttgcaggaaagctcttgcagatagccaaccgagagtccgaggaaggtttgcgaaaacagaggagaggaaatagaatggttcaagaaaagggctcaaaggaaggagactaagcaaaaggaagaaacatgaagaataaggagataaagcccatctcattagaaactagttttgttttatatatctatgtataaactttaaaatcttataagcatccaattagttttttgtatataaagggtttctctaaataagctttaagtaaagaaattgtagctaaagaaagtttgtattattgtagtttaaagaagtaatgtatcagtgggt

SEQ ID NO: 40111 - protein, 264 aa, Arabidopsis thaliana
  peptide (1)..(264): Ceres Seq. ID no. 13488978
  misc_feature (223)..(262): Pfam Name: CCT motif Pfam Description: CCT motif
  misc_feature (116)..(262): Homolog of NCBI NO: 15222540 NR Description: hypothetical protein [Arabidopsis thaliana]
  misc_feature (200)..(262): Homolog of NCBI NO: 15225838 NR Description: hypothetical protein [Arabidopsis thaliana]
  misc_feature (214)..(262): Homolog of NCBI NO: 26451419 NR Description: unknown protein [Arabidopsis thaliana]
  misc_feature (32)..(262): Homolog of NCBI NO: 15238070 NR Description: hypothetical protein [Arabidopsis thaliana]
  misc_feature (145)..(262): Homolog of NCBI NO: 15238589 NR Description: hypothetical protein [Arabidopsis thaliana]
  misc_feature (35)..(262): Homolog of NCBI NO: 21593708 NR Description: unknown [Arabidopsis thaliana]
  misc_feature (1)..(262): Homolog of NCBI NO: 15234310 NR Description: expressed protein [Arabidopsis thaliana]
  misc_feature (35)..(264): Homolog of NCBI NO: 21536819 NR Description: unknown [Arabidopsis thaliana]
  misc_feature (1)..(264): Homolog of NCBI NO: 8843771 NR Description: gene_id:MYN8.3~pir||T02891~similar to unknown
  misc_feature (1)..(264): Homolog of NCBI NO: 18423511 NR Description: expressed protein [Arabidopsis thaliana]
MYQDSGLMLRYMQNCPPDIQQFEDLFKSYKLSDEMNNTFVESSNISEYDIGEESDLFRAPDPILEEPILTVDPLSAALTMISCGEDTSQGLCELPDLGSLQSGQQLLDKAFYECEQDLMMKSAMESPFSDVLDIKNISVVTTINENQDMQKSVSSGNLSSMDWSHAQQETVMIQNFPDFDFGYGMRRAFSEGDIQKLGAGLVQSPLDRIIVSCTSEDRREKLSRYKNKKSRRNFGRKIKYACRKALADSQPRVRGRFAKTEERK

SEQ ID NO: 40112 - protein, 257 aa, Arabidopsis thaliana
  peptide (1)..(257): Ceres Seq. ID no. 13488979
  misc_feature (216)..(255): Pfam Name: CCT motif Pfam Description: CCT motif
  misc_feature (109)..(255): Homolog of NCBI NO: 15222540 NR Description: hypothetical protein [Arabidopsis thaliana]
  misc_feature (193)..(255): Homolog of NCBI NO: 15225838 NR Description: hypothetical protein [Arabidopsis thaliana]
  misc_feature (207)..(255): Homolog of NCBI NO: 26451419 NR Description: unknown protein [Arabidopsis thaliana]
  misc_feature (25)..(255): Homolog of NCBI NO: 15238070 NR Description: hypothetical protein [Arabidopsis thaliana]
  misc_feature (138)..(255): Homolog of NCBI NO: 15238589 NR Description: hypothetical protein [Arabidopsis thaliana]
  misc_feature (28)..(255): Homolog of NCBI NO: 21593708 NR Description: unknown [Arabidopsis thaliana]
  misc_feature (1)..(255): Homolog of NCBI NO: 15234310 NR Description: expressed protein [Arabidopsis thaliana]
  misc_feature (28)..(257): Homolog of NCBI NO: 21536819 NR Description: unknown [Arabidopsis thaliana]
  misc_feature (1)..(257): Homolog of NCBI NO: 8843771 NR Description: gene_id:MYN8.3~pir||T02891~similar to unknown
  misc_feature (1)..(257): Homolog of NCBI NO: 18423511 NR Description: expressed protein [Arabidopsis thaliana]
MLRYMQNCPPDIQQFEDLFKSYKLSDEMNNTFVESSNISEYDIGEESDLFRAPDPILEEPILTVDPLSAALTMISCGEDTSQGLCELPDLGSLQSGQQLLDKAFYECEQDLMMKSAMESPFSDVLDIKNISVVTTINENQDMQKSVSSGNLSSMDWSHAQQETVMIQNFPDFDFGYGMRRAFSEGDIQKLGAGLVQSPLDRIIVSCTSEDRREKLSRYKNKKSRRNFGRKIKYACRKALADSQPRVRGRFAKTEERK

SEQ ID NO: 40113 - protein, 253 aa, Arabidopsis thaliana
  peptide (1)..(253): Ceres Seq. ID no. 13488980
  misc_feature (212)..(251): Pfam Name: CCT motif Pfam Description: CCT motif
  misc_feature (105)..(251): Homolog of NCBI NO: 15222540 NR Description: hypothetical protein [Arabidopsis thaliana]
  misc_feature (189)..(251): Homolog of NCBI NO: 15225838 NR Description: hypothetical protein [Arabidopsis thaliana]
  misc_feature (203)..(251): Homolog of NCBI NO: 26451419 NR Description: unknown protein [Arabidopsis thaliana]
  misc_feature (21)..(251): Homolog of NCBI NO: 15238070 NR Description: hypothetical protein [Arabidopsis thaliana]
  misc_feature (134)..(251): Homolog of NCBI NO: 15238589 NR Description: hypothetical protein [Arabidopsis thaliana]
  misc_feature (24)..(251): Homolog of NCBI NO: 21593708 NR Description: unknown [Arabidopsis thaliana]
  misc_feature (1)..(251): Homolog of NCBI NO: 15234310 NR Description: expressed protein [Arabidopsis thaliana]
  misc_feature (24)..(253): Homolog of NCBI NO: 21536819 NR Description: unknown [Arabidopsis thaliana]
  misc_feature (1)..(253): Homolog of NCBI NO: 8843771 NR Description: gene_id:MYN8.3~pir||T02891~similar to unknown
  misc_feature (1)..(253): Homolog of NCBI NO: 18423511 NR Description: expressed protein [Arabidopsis thaliana]
MQNCPPDIQQFEDLFKSYKLSDEMNNTFVESSNISEYDIGEESDLFRAPDPILEEPILTVDPLSAALTMISCGEDTSQGLCELPDLGSLQSGQQLLDKAFYECEQDLMMKSAMESPFSDVLDIKNISVVTTINENQDMQKSVSSGNLSSMDWSHAQQETVMIQNFPDFDFGYGMRRAFSEGDIQKLGAGLVQSPLDRIIVSCTSEDRREKLSRYKNKKSRRNFGRKIKYACRKALADSQPRVRGRFAKTEERK

SEQ ID NO: 40114 - DNA, 1248 bp, Arabidopsis thaliana
  misc_feature (1)..(1248): Ceres Seq. ID no. 13575740
  misc_feature: MA Experiment ID: 20000184 Result: Down-regulated in Transcription
  misc_feature: MA Experiment 20000184 PARAMETER Experiment Name: At_Shoots__P Parameter: Age (day) Value: 7
  misc_feature: MA Experiment 20000184 PARAMETER Experiment Name: At_Shoots__P Parameter: Tissue Value: Shoots vs. Whole Plant
  misc_feature: MA Experiment ID: 20000185 Result: Down-regulated in Transcription
  misc_feature: MA Experiment 20000185 PARAMETER Experiment Name: At_Roots__P Parameter: Age (day) Value: 7 vs. 21
  misc_feature: MA Experiment 20000185 PARAMETER Experiment Name: At_Roots__P Parameter: Organism Value: A. thaliana
  misc_feature: MA Experiment 20000185 PARAMETER Experiment Name: At_Roots__P Parameter: Tissue Value: Roots vs. Whole Plant
  misc_feature: MA Experiment ID: 20000227 Result: Up-regulated in Transcription
  misc_feature: MA Experiment 20000227 PARAMETER Experiment Name: At_Root-Tips-vs-Tops_P Parameter: Tissue Value: Root Tips vs. Root Tops
  misc_feature: MA Experiment ID: 20000234 Result: Down-regulated in Transcription
  misc_feature: MA Experiment 20000234 PARAMETER Experiment Name: At_Siliques_P Parameter: Age (day) Value: 21
  misc_feature: MA Experiment 20000234 PARAMETER Experiment Name: At_Siliques_P Parameter: Organism Value: A. thaliana
  misc_feature: MA Experiment 20000234 PARAMETER Experiment Name: At_Siliques_P Parameter: Plant Line Value: WS
  misc_feature: MA Experiment 20000234 PARAMETER Experiment Name: At_Siliques_P Parameter: Tissue Value: Less Than 5mm Siliques vs. Whole Plant
  misc_feature: MA Experiment ID: 20000235 Result: Down-regulated in Transcription
  misc_feature: MA Experiment 20000235 PARAMETER Experiment Name: At_Siliques_P Parameter: Age (day) Value: 21
  misc_feature: MA Experiment 20000235 PARAMETER Experiment Name: At_Siliques_P Parameter: Organism Value: A. thaliana
  misc_feature: MA Experiment 20000235 PARAMETER Experiment Name: At_Siliques_P Parameter: Plant Line Value: WS
  misc_feature: MA Experiment 20000235 PARAMETER Experiment Name: At_Siliques_P Parameter: Tissue Value: 5-10mm Siliques vs. Whole Plant
  misc_feature: MA Experiment ID: 20000264 Result: Down-regulated in Transcription
  misc_feature: MA Experiment 20000264 PARAMETER Experiment Name: At_Open_Flower_P Parameter: Age (day) Value: 21
  misc_feature: MA Experiment 20000264 PARAMETER Experiment Name: At_Open_Flower_P Parameter: Plant Line Value: WS
  misc_feature: MA Experiment 20000264 PARAMETER Experiment Name: At_Open_Flower_P Parameter: Tissue Value: Open Flower vs. Whole Plant
  misc_feature: MA Experiment ID: 20000265 Result: Down-regulated in Transcription
  misc_feature: MA Experiment 20000265 PARAMETER Experiment Name: At_Open_Flower_P Parameter: Age (day) Value: 21
  misc_feature: MA Experiment 20000265 PARAMETER Experiment Name: At_Open_Flower_P Parameter: Plant Line Value: WS
  misc_feature: MA Experiment 20000265 PARAMETER Experiment Name: At_Open_Flower_P Parameter: Tissue Value: Closed Flower vs. Whole Plant
  misc_feature: MA Experiment ID: 20000286 Result: Down-regulated in Transcription
  misc_feature: MA Experiment 20000286 PARAMETER Experiment Name: At_Open_Flower_P Parameter: Age (day) Value: 21
  misc_feature: MA Experiment 20000286 PARAMETER Experiment Name: At_Open_Flower_P Parameter: Plant Line Value: WS
  misc_feature: MA Experiment 20000286 PARAMETER Experiment Name: At_Open_Flower_P Parameter: Tissue Value: Half Open vs. Whole Plant
  misc_feature: MA Experiment ID: 20000438 Result: Down-regulated in Transcription
  misc_feature: MA Experiment 20000438 PARAMETER Experiment Name: At_Shoots__P Parameter: Age (day) Value: 14
  misc_feature: MA Experiment 20000438 PARAMETER Experiment Name: At_Shoots__P Parameter: Tissue Value: Shoots vs. Whole Plant
  misc_feature: MA Experiment ID: 20000439 Result: Down-regulated in Transcription
  misc_feature: MA Experiment 20000439 PARAMETER Experiment Name: At_Roots__P Parameter: Age (day) Value: 14 vs. 21
  misc_feature: MA Experiment 20000439 PARAMETER Experiment Name: At_Roots__P Parameter: Organism Value: A. thaliana
  misc_feature: MA Experiment 20000439 PARAMETER Experiment Name: At_Roots__P Parameter: Tissue Value: Roots vs. Whole Plant
  misc_feature: MA Experiment ID: 20000495 Result: Down-regulated in Transcription
  misc_feature: MA Experiment 20000495 PARAMETER Experiment Name: At_Guard_Cells_P Parameter: Harvest Date Value: 8/2/2002
  misc_feature: MA Experiment 20000495 PARAMETER Experiment Name: At_Guard_Cells_P Parameter: Organism Value: A. thaliana
  misc_feature: MA Experiment 20000495 PARAMETER Experiment Name: At_Guard_Cells_P Parameter: Tissue Value: Guard Cells vs. Leaves
  misc_feature: MA Experiment ID: 20000573 Result: Up-regulated in Transcription
  misc_feature: MA Experiment 20000573 PARAMETER Experiment Name: At_100uM_ABA_Mutants__P Parameter: Organism Value: A. thaliana
  misc_feature: MA Experiment 20000573 PARAMETER Experiment Name: At_100uM_ABA_Mutants__P Parameter: Plant Line Value: CS22 vs. Ler wt
  misc_feature: MA Experiment 20000573 PARAMETER Experiment Name: At_100uM_ABA_Mutants__P Parameter: Timepoint (hr) Value: N/A
  misc_feature: MA Experiment 20000573 PARAMETER Experiment Name: At_100uM_ABA_Mutants__P Parameter: Tissue Value: Whole Plant
  misc_feature: MA Experiment 20000573 PARAMETER Experiment Name: At_100uM_ABA_Mutants__P Parameter: Treatment Value: None
  misc_feature: MA Experiment ID: 20000794 Result: Down-regulated in Transcription
  misc_feature: MA Experiment 20000794 PARAMETER Experiment Name: At_Petals_P Parameter: Age (day) Value: 23-25 days
  misc_feature: MA Experiment 20000794 PARAMETER Experiment Name: At_Petals_P Parameter: Plant Line Value: WS
  misc_feature: MA Experiment 20000794 PARAMETER Experiment Name: At_Petals_P Parameter: Tissue Value: Petals vs. Whole plant
  misc_feature: MA Experiment ID: 20001450 Result: Down-regulated in Transcription
  misc_feature: MA Experiment 20001450 PARAMETER Experiment Name: At_Far-red-induction_P Parameter: Age (day) Value: 7
  misc_feature: MA Experiment 20001450 PARAMETER Experiment Name: At_Far-red-induction_P Parameter: Light Value: Far-red vs. White
  misc_feature: MA Experiment 20001450 PARAMETER Experiment Name: At_Far-red-induction_P Parameter: Organism Value: A. thaliana
  misc_feature: MA Experiment 20001450 PARAMETER Experiment Name: At_Far-red-induction_P Parameter: Plant Line Value: Columbia
  misc_feature: MA Experiment 20001450 PARAMETER Experiment Name: At_Far-red-induction_P Parameter: Timepoint (hr) Value: 8
  misc_feature: MA Experiment 20001450 PARAMETER Experiment Name: At_Far-red-induction_P Parameter: Tissue Value: Whole Plant
accatccatccaacttgtaactctctttctctatttcttctccattctgtttgctctgcaacatcttttagggtttattattgttggtttcttcattttctttctctaaaatatttgcagaggaagagagagagagagagagagatcatgggaatatatggagtgatgacagggaaaaaaggaaagagtgggtttggatctgcttctactgctgaagatgttactcaagccattgatgccagtcatctcactgccatcatcacaggtggaacaagtgggattggattggaggcagctagagtgttagcaatgagaggagctcatgtcatcattgccgcaagaaacccaaaagctgctaatgagtctaaagagatgattcttcagatgaaccctaatgctcgcgtcgactatctccagatcgatgtctcttccatcaaatcagtcagatccttcgttgatcagtttcttgcccttaatgttcctctcaacattctcataaacaatgcaggtgttatgttttgtcctttcaagctcaccgaagatgggattgaatcacaattcgcaacaaaccacattggtcattttctgttgacgaatctgcttctggacaaaatgaaaagtaccgcaaggagaaagtggagtccaaggaaggattgtgaatctgtcatctattgctcatacttatacttactctgaaggtatcaagttccaaggcatcaatgaccctgctggatattcggagagaagggcttatggacagtccaaactctcaaacttggttgcactccaatgcactctctcgtagactacaggaagaaggtgtgaacatcactataaattcggtgcaccctggtcttgtcaccactaatctctttcgctactccggttttagcatgaaggtcttcagggctatgactttcctcttttggaaaaatatacctcagggagcagcaacaacatgctacgttgcacttcatccagatctcgaaggcgtcaccggaaagtatttcggcgactgtaacatcgttgctccgagcaaatttgctaccaacaattctctcgccgataaactttgggatttcagtgtctttctcatcgattctatctctaaataatctatcatcatcaagacaaattcttagacattcaaaatttatttatccttcttgatattgttacattaatgccatatctttttcaccaccacatatttctttatggaataccataatttagaaatcattattc

SEQ ID NO: 40115 - protein, 231 aa, Arabidopsis thaliana
  peptide (1)..(231): Ceres Seq. ID no. 13575741
  misc_feature (58)..(210): Homolog of NCBI NO: 18416145 NR Description: short-chain dehydrogenase/reductase family
  misc_feature (58)..(210): Homolog of NCBI NO: 30686197 NR Description: short-chain dehydrogenase/reductase family
  misc_feature (58)..(210): Homolog of NCBI NO: 23297050 NR Description: unknown protein [Arabidopsis thaliana]
  misc_feature (50)..(177): Homolog of NCBI NO: 11250521 NR Description: hypothetical protein T22P11.130 - Arabidopsis
  misc_feature (50)..(210): Homolog of NCBI NO: 34895876 NR Description: P0009G03.18 [Oryza sativa (japonica
  misc_feature (50)..(210): Homolog of NCBI NO: 20260302 NR Description: putative protein [Arabidopsis thaliana]
  misc_feature (50)..(210): Homolog of NCBI NO: 21554820 NR Description: putativepod-specific dehydrogenase SAC25
  misc_feature (50)..(210): Homolog of NCBI NO: 18413950 NR Description: short-chain dehydrogenase/reductase family
  misc_feature (50)..(210): Homolog of NCBI NO: 629592 NR Description: hypothetical protein - rape
  misc_feature (50)..(210): Homolog of NCBI NO: 15224306 NR Description: short-chain dehydrogenase/reductase family
TIHPTCNSLSLFLLHSVCSATSFRVYYCWFLHFLSLKYLQRKREREREIMGIYGVMTGKKGKSGFGSASTAEDVTQAIDASHLTAIITGGTSGIGLEAARVLAMRGAHVIIAARNPKAANESKEMILQMNPNARVDYLQIDVSSIKSVRSFVDQFLALNVPLNILINNAGVMFCPFKLTEDGIESQFATNHIGHFLLTNLLLDKMKSTARRKWSPRKDCESVIYCSYLYLL

SEQ ID NO: 40116 - protein, 182 aa, Arabidopsis thaliana
  peptide (1)..(182): Ceres Seq. ID no. 13575742
  misc_feature (9)..(161): Homolog of NCBI NO: 18416145 NR Description: short-chain dehydrogenase/reductase family
  misc_feature (9)..(161): Homolog of NCBI NO: 30686197 NR Description: short-chain dehydrogenase/reductase family
  misc_feature (9)..(161): Homolog of NCBI NO: 23297050 NR Description: unknown protein [Arabidopsis thaliana]
  misc_feature (1)..(128): Homolog of NCBI NO: 11250521 NR Description: hypothetical protein T22P11.130 - Arabidopsis
  misc_feature (1)..(161): Homolog of NCBI NO: 34895876 NR Description: P0009G03.18 [Oryza sativa (japonica
  misc_feature (1)..(161): Homolog of NCBI NO: 20260302 NR Description: putative protein [Arabidopsis thaliana]
  misc_feature (1)..(161): Homolog of NCBI NO: 21554820 NR Description: putativepod-specific dehydrogenase SAC25
  misc_feature (1)..(161): Homolog of NCBI NO: 18413950 NR Description: short-chain dehydrogenase/reductase family
  misc_feature (1)..(161): Homolog of NCBI NO: 629592 NR Description: hypothetical protein - rape
  misc_feature (1)..(161): Homolog of NCBI NO: 15224306 NR Description: short-chain dehydrogenase/reductase family
MGIYGVMTGKKGKSGFGSASTAEDVTQAIDASHLTAIITGGTSGIGLEAARVLAMRGAHVIIAARNPKAANESKEMILQMNPNARVDYLQIDVSSIKSVRSFVDQFLALNVPLNILINNAGVMFCPFKLTEDGIESQFATNHIGHFLLTNLLLDKMKSTARRKWSPRKDCESVIYCSYLYLL

SEQ ID NO: 40117 - protein, 176 aa, Arabidopsis thaliana
  peptide (1)..(176): Ceres Seq. ID no. 13575743
  misc_feature (3)..(155): Homolog of NCBI NO: 18416145 NR Description: short-chain dehydrogenase/reductase family
  misc_feature (3)..(155): Homolog of NCBI NO: 30686197 NR Description: short-chain dehydrogenase/reductase family
  misc_feature (3)..(155): Homolog of NCBI NO: 23297050 NR Description: unknown protein [Arabidopsis thaliana]
  misc_feature (1)..(122): Homolog of NCBI NO: 11250521 NR Description: hypothetical protein T22P11.130 - Arabidopsis
  misc_feature (1)..(155): Homolog of NCBI NO: 34895876 NR Description: P0009G03.18 [Oryza sativa (japonica
  misc_feature (1)..(155): Homolog of NCBI NO: 20260302 NR Description: putative protein [Arabidopsis thaliana]
  misc_feature (1)..(155): Homolog of NCBI NO: 21554820 NR Description: putativepod-specific dehydrogenase SAC25
  misc_feature (1)..(155): Homolog of NCBI NO: 18413950 NR Description: short-chain dehydrogenase/reductase family
  misc_feature (1)..(155): Homolog of NCBI NO: 629592 NR Description: hypothetical protein - rape
  misc_feature (1)..(155): Homolog of NCBI NO: 15224306 NR Description: short-chain dehydrogenase/reductase family
MTGKKGKSGFGSASTAEDVTQAIDASHLTAIITGGTSGIGLEAARVLAMRGAHVIIAARNPKAANESKEMILQMNPNARVDYLQIDVSSIKSVRSFVDQFLALNVPLNILINNAGVMFCPFKLTEDGIESQFATNHIGHFLLTNLLLDKMKSTARRKWSPRKDCESVIYCSYLYLL

SEQ ID NO: 40118 - DNA, 1361 bp, Arabidopsis thaliana
  misc_feature (1)..(1361): Ceres Seq. ID no. 13490993
  misc_feature: MA Experiment ID: 108434 Result: Up-regulated in Transcription
  misc_feature: MA Experiment 108434 PARAMETER Experiment Name: At_Root_Tips_cDNA_P Parameter: Tissue Value: Root Tips
  misc_feature: MA Experiment ID: 108576 Result: Up-regulated in Transcription
  misc_feature: MA Experiment 108576 PARAMETER Experiment Name: At_42deg_Heat_cDNA_P Parameter: Temperature (deg C) Value: 42 vs. 22
  misc_feature: MA Experiment 108576 PARAMETER Experiment Name: At_42deg_Heat_cDNA_P Parameter: Timepoint (hr) Value: 1
  misc_feature: MA Experiment 108576 PARAMETER Experiment Name: At_42deg_Heat_cDNA_P Parameter: Tissue Value: Aerial
  misc_feature: MA Experiment ID: 20000093 Result: Up-regulated in Transcription
  misc_feature: MA Experiment 20000093 PARAMETER Experiment Name: At_42deg_Heat_cDNA_P Parameter: Temperature (deg C) Value: 42 vs. 22
  misc_feature: MA Experiment 20000093 PARAMETER Experiment Name: At_42deg_Heat_cDNA_P Parameter: Timepoint (hr) Value: 0.5
  misc_feature: MA Experiment 20000093 PARAMETER Experiment Name: At_42deg_Heat_cDNA_P Parameter: Tissue Value: Aerial
  misc_feature: MA Experiment ID: 20000112 Result: Up-regulated in Transcription
  misc_feature: MA Experiment 20000112 PARAMETER Experiment Name: At_42deg_Heat_cDNA_P Parameter: Temperature (deg C) Value: 42 vs. 22
  misc_feature: MA Experiment 20000112 PARAMETER Experiment Name: At_42deg_Heat_cDNA_P Parameter: Timepoint (hr) Value: 2
  misc_feature: MA Experiment 20000112 PARAMETER Experiment Name: At_42deg_Heat_cDNA_P Parameter: Tissue Value: Aerial
  misc_feature: MA Experiment ID: 20000144 Result: Up-regulated in Transcription
  misc_feature: MA Experiment 20000144 PARAMETER Experiment Name: At_42deg_Heat_cDNA_P Parameter: Temperature (deg C) Value: 42 vs. 22
  misc_feature: MA Experiment 20000144 PARAMETER Experiment Name: At_42deg_Heat_cDNA_P Parameter: Timepoint (hr) Value: 1
  misc_feature: MA Experiment 20000144 PARAMETER Experiment Name: At_42deg_Heat_cDNA_P Parameter: Tissue Value: Aerial
  misc_feature: MA Experiment ID: 20000171 Result: Up-regulated in Transcription
  misc_feature: MA Experiment 20000171 PARAMETER Experiment Name: At_42deg_Heat_P Parameter: Age (day) Value: 14
  misc_feature: MA Experiment 20000171 PARAMETER Experiment Name: At_42deg_Heat_P Parameter: Organism Value: A. thaliana
  misc_feature: MA Experiment 20000171 PARAMETER Experiment Name: At_42deg_Heat_P Parameter: Plant Line Value: WS
  misc_feature: MA Experiment 20000171 PARAMETER Experiment Name: At_42deg_Heat_P Parameter: Temperature (deg C) Value: 42 vs. 22
  misc_feature: MA Experiment 20000171 PARAMETER Experiment Name: At_42deg_Heat_P Parameter: Timepoint (hr) Value: 1
  misc_feature: MA Experiment 20000171 PARAMETER Experiment Name: At_42deg_Heat_P Parameter: Tissue Value: Aerial
  misc_feature: MA Experiment ID: 20000184 Result: Up-regulated in Transcription
  misc_feature: MA Experiment 20000184 PARAMETER Experiment Name: At_Shoots__P Parameter: Age (day) Value: 7
  misc_feature: MA Experiment 20000184 PARAMETER Experiment Name: At_Shoots__P Parameter: Tissue Value: Shoots vs. Whole Plant
tttcatcatcatctcagtctctctcgaagtttcaagttcgcgactatggcagcagcgatgtcttcttcttgttgcgcttcctcgcttcgtttaatcccattcaaacggaccttgttttcttcaatccattatccggccaaaacccttcttctacgaccactaaaaccgtcggaagttccttcctttcgccggacgatcatcactttccagaaaatttcaaccgggattgttcctccaccatcggcttcatcatctccgtcgagctatggagaccttcaaccaatcgaagagcttccaccgaagctacaagagatcgtcaagcttttccaatcggtacaagagccaaaggctaaatacgagcagcttatgttctacgggaagaatctgacacctctcgattctcaattcaagacgagggagaataaagtagaaggatgtgtttctcaggtttgggttagggctttctttgatgaggaacgtaatgttgtgtatgaagctgattctgattcggttctcactaaagggttagctgctctattagtcaagggtttatctggaagacctgtccctgagattttgaggataacacctgatttcgctgttcttctcgggttgcagcagagtctgtctccttctagaaacaatggattacttaatatgcttaagctgatgcagaaaaaggctcttcatttggaagtcaaaggtgaggaagattcaagttctggagagagttcagaatccagctttgtgtctattcctgagactaaggacgaagctaatgttccggaggtggatttggagtctaaacctgatctagttgaggatttgggaacagaaaagattgatgattctgagagtgggtcaaatgttgttgctttagggagtagagggatgaggataagagagaaattggagaaggagctagatcctgttgagttagaagttgaagatgtttcttaccagcacgcaggacatgccgctgttagaggtagtgctggtgatgatggggaaacacatttcaacttgcgaatcgtttcggatgctttccaaggtaaaagcttggtcaagagacataggctgatatatgacttgttgcaagatgagttgaagagcgggttacatgctctctctattgtggcaaagactcctgctgaggtttgagggtgtaacattggaagaagtcaggtcctgattcttttacttcttttggtccatttgctttggatattgttctctggaccttctaataatgttaagagctcgatcaggattgtgttaaatgagagatagatattgaaggatataaataatgttttcgccaatcgccacatgattcaccattttcaaactgatttcccttt

SEQ ID NO: 40119 - protein, 386 aa, Arabidopsis thaliana
  peptide (1)..(386): Ceres Seq. ID no. 13490994
  misc_feature (105)..(229): Pfam Name: Fe-S metabolism associated domain Pfam Description: Fe-S metabolism associated domain
  misc_feature (285)..(385): Homolog of NCBI NO: 18405543 NR Description: expressed protein [Arabidopsis thaliana]
  misc_feature (95)..(233): Homolog of NCBI NO: 23124053 NR Description: hypothetical protein [Nostoc punctiforme]
  misc_feature (95)..(234): Homolog of NCBI NO: 17231005 NR Description: hypothetical protein [Nostoc sp. PCC 7120]
  misc_feature (98)..(233): Homolog of NCBI NO: 16332088 NR Description: hypothetical protein [Synechocystis sp. PCC 6803]
  misc_feature (16)..(386): Homolog of NCBI NO: 28393578 NR Description: unknown protein [Arabidopsis thaliana]
  misc_feature (16)..(386): Homolog of NCBI NO: 15236742 NR Description: expressed protein [Arabidopsis thaliana]
FHHHLSLSRSFKFATMAAAMSSSCCASSLRLIPFKRTLFSSIHYPAKTLLLRPLKPSEVPSFRRTIITFQKISTGIVPPPSASSSPSSYGDLQPIEELPPKLQEIVKLFQSVQEPKAKYEQLMFYGKNLTPLDSQFKTRENKVEGCVSQVWVRAFFDEERNVVYEADSDSVLTKGLAALLVKGLSGRPVPEILRITPDFAVLLGLQQSLSPSRNNGLLNMLKLMQKKALHLEVKGEEDSSSGESSESSFVSIPETKDEANVPEVDLESKPDLVEDLGTEKIDDSESGSNVVALGSRGMRIREKLEKELDPVELEVEDVSYQHAGHAAVRGSAGDDGETHFNLRIVSDAFQGKSLVKRHRLIYDLLQDELKSGLHALSIVAKTPAEV

SEQ ID NO: 40120 - protein, 371 aa, Arabidopsis thaliana
  peptide (1)..(371): Ceres Seq. ID no. 13490995
  misc_feature (90)..(214): Pfam Name: Fe-S metabolism associated domain Pfam Description: Fe-S metabolism associated domain
  misc_feature (270)..(370): Homolog of NCBI NO: 18405543 NR Description: expressed protein [Arabidopsis thaliana]
  misc_feature (80)..(218): Homolog of NCBI NO: 23124053 NR Description: hypothetical protein [Nostoc punctiforme]
  misc_feature (80)..(219): Homolog of NCBI NO: 17231005 NR Description: hypothetical protein [Nostoc sp. PCC 7120]
  misc_feature (83)..(218): Homolog of NCBI NO: 16332088 NR Description: hypothetical protein [Synechocystis sp. PCC 6803]
  misc_feature (1)..(371): Homolog of NCBI NO: 28393578 NR Description: unknown protein [Arabidopsis thaliana]
  misc_feature (1)..(371): Homolog of NCBI NO: 15236742 NR Description: expressed protein [Arabidopsis thaliana]
MAAAMSSSCCASSLRLIPFKRTLFSSIHYPAKTLLLRPLKPSEVPSFRRTIITFQKISTGIVPPPSASSSPSSYGDLQPIEELPPKLQEIVKLFQSVQEPKAKYEQLMFYGKNLTPLDSQFKTRENKVEGCVSQVWVRAFFDEERNVVYEADSDSVLTKGLAALLVKGLSGRPVPEILRITPDFAVLLGLQQSLSPSRNNGLLNMLKLMQKKALHLEVKGEEDSSSGESSESSFVSIPETKDEANVPEVDLESKPDLVEDLGTEKIDDSESGSNVVALGSRGMRIREKLEKELDPVELEVEDVSYQHAGHAAVRGSAGDDGETHFNLRIVSDAFQGKSLVKRHRLIYDLLQDELKSGLHALSIVAKTPAEV

SEQ ID NO: 40121 - protein, 367 aa, Arabidopsis thaliana
  peptide (1)..(367): Ceres Seq. ID no. 13490996
  misc_feature (86)..(210): Pfam Name: Fe-S metabolism associated domain Pfam Description: Fe-S metabolism associated domain
  misc_feature (266)..(366): Homolog of NCBI NO: 18405543 NR Description: expressed protein [Arabidopsis thaliana]
  misc_feature (76)..(214): Homolog of NCBI NO: 23124053 NR Description: hypothetical protein [Nostoc punctiforme]
  misc_feature (76)..(215): Homolog of NCBI NO: 17231005 NR Description: hypothetical protein [Nostoc sp. PCC 7120]
  misc_feature (79)..(214): Homolog of NCBI NO: 16332088 NR Description: hypothetical protein [Synechocystis sp. PCC 6803]
  misc_feature (1)..(367): Homolog of NCBI NO: 28393578 NR Description: unknown protein [Arabidopsis thaliana]
  misc_feature (1)..(367): Homolog of NCBI NO: 15236742 NR Description: expressed protein [Arabidopsis thaliana]
MSSSCCASSLRLIPFKRTLFSSIHYPAKTLLLRPLKPSEVPSFRRTIITFQKISTGIVPPPSASSSPSSYGDLQPIEELPPKLQEIVKLFQSVQEPKAKYEQLMFYGKNLTPLDSQFKTRENKVEGCVSQVWVRAFFDEERNVVYEADSDSVLTKGLAALLVKGLSGRPVPEILRITPDFAVLLGLQQSLSPSRNNGLLNMLKLMQKKALHLEVKGEEDSSSGESSESSFVSIPETKDEANVPEVDLESKPDLVEDLGTEKIDDSESGSNVVALGSRGMRIREKLEKELDPVELEVEDVSYQHAGHAAVRGSAGDDGETHFNLRIVSDAFQGKSLVKRHRLIYDLLQDELKSGLHALSIVAKTPAEV

SEQ ID NO: 40122 - DNA, 870 bp, Arabidopsis thaliana
  misc_feature (1)..(870): Ceres Seq. ID no. 12323255
  misc_feature: MA Experiment ID: 108433 Result: Down-regulated in Transcription
  misc_feature: MA Experiment 108433 PARAMETER Experiment Name: At_rhl_Mutant2_cDNA_P Parameter: Age (day) Value: 7
  misc_feature: MA Experiment 108433 PARAMETER Experiment Name: At_rhl_Mutant2_cDNA_P Parameter: Organism Value: A. thaliana
  misc_feature: MA Experiment 108433 PARAMETER Experiment Name: At_rhl_Mutant2_cDNA_P Parameter: Plant Line Value: rhl Mutant vs. wt landsburg
  misc_feature: MA Experiment 108433 PARAMETER Experiment Name: At_rhl_Mutant2_cDNA_P Parameter: Tissue Value: Roots
  misc_feature: MA Experiment ID: 108434 Result: Up-regulated in Transcription
  misc_feature: MA Experiment 108434 PARAMETER Experiment Name: At_Root_Tips_cDNA_P Parameter: Tissue Value: Root Tips
  misc_feature: MA Experiment ID: 108461 Result: Up-regulated in Transcription
  misc_feature: MA Experiment 108461 PARAMETER Experiment Name: At_Germinating_Seeds_cDNA_P Parameter: Age (day) Value: 1 vs. 0
  misc_feature: MA Experiment 108461 PARAMETER Experiment Name: At_Germinating_Seeds_cDNA_P Parameter: Tissue Value: Germinating Seeds
  misc_feature: MA Experiment ID: 108462 Result: Up-regulated in Transcription
  misc_feature: MA Experiment 108462 PARAMETER Experiment Name: At_Germinating_Seeds_cDNA_P Parameter: Age (day) Value: 2 vs. 0
  misc_feature: MA Experiment 108462 PARAMETER Experiment Name: At_Germinating_Seeds_cDNA_P Parameter: Tissue Value: Germinating Seeds
  misc_feature: MA Experiment ID: 20000180 Result: Up-regulated in Transcription
  misc_feature: MA Experiment 20000180 PARAMETER Experiment Name: At_Germinating_Seeds_P Parameter: Age (hr) Value: 24 vs. 0
  misc_feature: MA Experiment 20000180 PARAMETER Experiment Name: At_Germinating_Seeds_P Parameter: Tissue Value: Germinating Seeds
  misc_feature: MA Experiment ID: 20000234 Result: Up-regulated in Transcription
  misc_feature: MA Experiment 20000234 PARAMETER Experiment Name: At_Siliques_P Parameter: Age (day) Value: 21
  misc_feature: MA Experiment 20000234 PARAMETER Experiment Name: At_Siliques_P Parameter: Organism Value: A. thaliana
  misc_feature: MA Experiment 20000234 PARAMETER Experiment Name: At_Siliques_P Parameter: Plant Line Value: WS
  misc_feature: MA Experiment 20000234 PARAMETER Experiment Name: At_Siliques_P Parameter: Tissue Value: Less Than 5mm Siliques vs. Whole Plant
  misc_feature: MA Experiment ID: 20000264 Result: Up-regulated in Transcription
  misc_feature: MA Experiment 20000264 PARAMETER Experiment Name: At_Open_Flower_P Parameter: Age (day) Value: 21
  misc_feature: MA Experiment 20000264 PARAMETER Experiment Name: At_Open_Flower_P Parameter: Plant Line Value: WS
  misc_feature: MA Experiment 20000264 PARAMETER Experiment Name: At_Open_Flower_P Parameter: Tissue Value: Open Flower vs. Whole Plant
  misc_feature: MA Experiment ID: 20000265 Result: Up-regulated in Transcription
  misc_feature: MA Experiment 20000265 PARAMETER Experiment Name: At_Open_Flower_P Parameter: Age (day) Value: 21
  misc_feature: MA Experiment 20000265 PARAMETER Experiment Name: At_Open_Flower_P Parameter: Plant Line Value: WS
  misc_feature: MA Experiment 20000265 PARAMETER Experiment Name: At_Open_Flower_P Parameter: Tissue Value: Closed Flower vs. Whole Plant
  misc_feature: MA Experiment ID: 20000286 Result: Up-regulated in Transcription
  misc_feature: MA Experiment 20000286 PARAMETER Experiment Name: At_Open_Flower_P Parameter: Age (day) Value: 21
  misc_feature: MA Experiment 20000286 PARAMETER Experiment Name: At_Open_Flower_P Parameter: Plant Line Value: WS
  misc_feature: MA Experiment 20000286 PARAMETER Experiment Name: At_Open_Flower_P Parameter: Tissue Value: Half Open vs. Whole Plant
  misc_feature: MA Experiment ID: 20000445 Result: Down-regulated in Transcription
  misc_feature: MA Experiment 20000445 PARAMETER Experiment Name: At_100uM_NAA__P Parameter: Age (day) Value: 14
  misc_feature: MA Experiment 20000445 PARAMETER Experiment Name: At_100uM_NAA__P Parameter: Organism Value: A. thaliana
  misc_feature: MA Experiment 20000445 PARAMETER Experiment Name: At_100uM_NAA__P Parameter: Plant Line Value: WS
  misc_feature: MA Experiment 20000445 PARAMETER Experiment Name: At_100uM_NAA__P Parameter: Timepoint (hr) Value: 6
  misc_feature: MA Experiment 20000445 PARAMETER Experiment Name: At_100uM_NAA__P Parameter: Tissue Value: Aerial
  misc_feature: MA Experiment 20000445 PARAMETER Experiment Name: At_100uM_NAA__P Parameter: Treatment Value: 100uM NAA vs. No Treatment
  misc_feature: MA Experiment ID: 20000495 Result: Up-regulated in Transcription
  misc_feature: MA Experiment 20000495 PARAMETER Experiment Name: At_Guard_Cells_P Parameter: Harvest Date Value: 8/2/2002
  misc_feature: MA Experiment 20000495 PARAMETER Experiment Name: At_Guard_Cells_P Parameter: Organism Value: A. thaliana
  misc_feature: MA Experiment 20000495 PARAMETER Experiment Name: At_Guard_Cells_P Parameter: Tissue Value: Guard Cells vs. Leaves
  misc_feature: MA Experiment ID: 20001450 Result: Down-regulated in Transcription
  misc_feature: MA Experiment 20001450 PARAMETER Experiment Name: At_Far-red-induction_P Parameter: Age (day) Value: 7
  misc_feature: MA Experiment 20001450 PARAMETER Experiment Name: At_Far-red-induction_P Parameter: Light Value: Far-red vs. White
  misc_feature: MA Experiment 20001450 PARAMETER Experiment Name: At_Far-red-induction_P Parameter: Organism Value: A. thaliana
  misc_feature: MA Experiment 20001450 PARAMETER Experiment Name: At_Far-red-induction_P Parameter: Plant Line Value: Columbia
  misc_feature: MA Experiment 20001450 PARAMETER Experiment Name: At_Far-red-induction_P Parameter: Timepoint (hr) Value: 8
  misc_feature: MA Experiment 20001450 PARAMETER Experiment Name: At_Far-red-induction_P Parameter: Tissue Value: Whole Plant
  misc_feature: MA Experiment ID: 20001557 Result: Down-regulated in Transcription
  misc_feature: MA Experiment 20001557 PARAMETER Experiment Name: At_Drought_Soil_Dry_P Parameter: Age (day) Value: 27
  misc_feature: MA Experiment 20001557 PARAMETER Experiment Name: At_Drought_Soil_Dry_P Parameter: Organism Value: A. thaliana
  misc_feature: MA Experiment 20001557 PARAMETER Experiment Name: At_Drought_Soil_Dry_P Parameter: Plant Line Value: WS
  misc_feature: MA Experiment 20001557 PARAMETER Experiment Name: At_Drought_Soil_Dry_P Parameter: Post Timepoint (hr) Value: 3
  misc_feature: MA Experiment 20001557 PARAMETER Experiment Name: At_Drought_Soil_Dry_P Parameter: Post-Treatment Value: Re-Water vs. No Drought
  misc_feature: MA Experiment 20001557 PARAMETER Experiment Name: At_Drought_Soil_Dry_P Parameter: Timepoint (day) Value: 13
  misc_feature: MA Experiment 20001557 PARAMETER Experiment Name: At_Drought_Soil_Dry_P Parameter: Treatment Value: Drought vs. No Drought
attatttcgtcagaacaacattgaaaagttaccgttaaacactctaagcgctcttcttcatcttcttatacacttctcttccaacaagaatctcaccaagaaacttcttcacttttacaaagttaaaaccatatggcgaacatgaacgctcttcaacaaatgatcttcccagacgagaacgctccaattcatcgcaaaaagtctgtcactgctgcttctgtgaaatccaaagggactgtacttggtcagaagaaacctgtaggagctcgtaaggctctgaatgatattacaaacaagtctgggattcatgcgaaagctgctgcttcttcaaagaacaagcaaattgcttctgctgctgtgaaagatgagattgatatagctggggaaaggtttttacatgatcacagcaaatgcatcaaagaacagcaaaatctttgggatgatcactactctgctgatctcatgctacttcatcatggttccagcatcaaggagaagcatctcaattgggacattgaaaagatggatgctaaggacgatctgacttacgaagaaccagaagagatggcatcgcccaagttttctgattggctgaagaactcgactccatggcgctctccaatccgtcatggctctatgatgccttccactcctctggcttggcggttcgattcatgcgaattcacacttaaagaagactctgacgacctcttctgagtttctgtttcttaatgtcttcaaaattcatccttcagatgaagtagtaatagtagtagtggcgtttatcttttgttcagctcttcatgaatcactctgtgtctatcactttgtaactggtttcaggaaataaagttggtatcttttcaagtg

SEQ ID NO: 40123 - protein, 194 aa, Arabidopsis thaliana
  peptide (1)..(194): Ceres Seq. ID no. 12323256
  misc_feature (1)..(191): Homolog of NCBI NO: 18416846 NR Description: putative protein; protein id: At5g12360.1
  misc_feature (1)..(194): Homolog of NCBI NO: 27808526 NR Description: At3g14190 [Arabidopsis thaliana]
  misc_feature (1)..(194): Homolog of NCBI NO: 18400304 NR Description: expressed protein
  misc_feature (1)..(194): Homolog of NCBI NO: 21536825 NR Description: unknown [Arabidopsis thaliana]
MANMNALQQMIFPDENAPIHRKKSVTAASVKSKGTVLGQKKPVGARKALNDITNKSGIHAKAAASSKNKQIASAAVKDEIDIAGERFLHDHSKCIKEQQNLWDDHYSADLMLLHHGSSIKEKHLNWDIEKMDAKDDLTYEEPEEMASPKFSDWLKNSTPWRSPIRHGSMMPSTPLAWRFDSCEFTLKEDSDDLF

SEQ ID NO: 40124 - protein, 191 aa, Arabidopsis thaliana
  peptide (1)..(191): Ceres Seq. ID no. 12323257
  misc_feature (1)..(188): Homolog of NCBI NO: 18416846 NR Description: putative protein; protein id: At5g12360.1
  misc_feature (1)..(191): Homolog of NCBI NO: 27808526 NR Description: At3g14190 [Arabidopsis thaliana]
  misc_feature (1)..(191): Homolog of NCBI NO: 18400304 NR Description: expressed protein
  misc_feature (1)..(191): Homolog of NCBI NO: 21536825 NR Description: unknown [Arabidopsis thaliana]
MNALQQMIFPDENAPIHRKKSVTAASVKSKGTVLGQKKPVGARKALNDITNKSGIHAKAAASSKNKQIASAAVKDEIDIAGERFLHDHSKCIKEQQNLWDDHYSADLMLLHHGSSIKEKHLNWDIEKMDAKDDLTYEEPEEMASPKFSDWLKNSTPWRSPIRHGSMMPSTPLAWRFDSCEFTLKEDSDDLF

SEQ ID NO: 40125 - protein, 185 aa, Arabidopsis thaliana
  peptide (1)..(185): Ceres Seq. ID no. 12323258
  misc_feature (1)..(182): Homolog of NCBI NO: 18416846 NR Description: putative protein; protein id: At5g12360.1
  misc_feature (1)..(185): Homolog of NCBI NO: 27808526 NR Description: At3g14190 [Arabidopsis thaliana]
  misc_feature (1)..(185): Homolog of NCBI NO: 18400304 NR Description: expressed protein
  misc_feature (1)..(185): Homolog of NCBI NO: 21536825 NR Description: unknown [Arabidopsis thaliana]
MIFPDENAPIHRKKSVTAASVKSKGTVLGQKKPVGARKALNDITNKSGIHAKAAASSKNKQIASAAVKDEIDIAGERFLHDHSKCIKEQQNLWDDHYSADLMLLHHGSSIKEKHLNWDIEKMDAKDDLTYEEPEEMASPKFSDWLKNSTPWRSPIRHGSMMPSTPLAWRFDSCEFTLKEDSDDLF

SEQ ID NO: 40126 - DNA, 1213 bp, Arabidopsis thaliana
  misc_feature (1)..(1213): Ceres Seq. ID no. 12481792
  misc_feature: MA Experiment ID: 20000171 Result: Up-regulated in Transcription
  misc_feature: MA Experiment 20000171 PARAMETER Experiment Name: At_42deg_Heat_P Parameter: Age (day) Value: 14
  misc_feature: MA Experiment 20000171 PARAMETER Experiment Name: At_42deg_Heat_P Parameter: Organism Value: A. thaliana
  misc_feature: MA Experiment 20000171 PARAMETER Experiment Name: At_42deg_Heat_P Parameter: Plant Line Value: WS
  misc_feature: MA Experiment 20000171 PARAMETER Experiment Name: At_42deg_Heat_P Parameter: Temperature (deg C) Value: 42 vs. 22
  misc_feature: MA Experiment 20000171 PARAMETER Experiment Name: At_42deg_Heat_P Parameter: Timepoint (hr) Value: 1
  misc_feature: MA Experiment 20000171 PARAMETER Experiment Name: At_42deg_Heat_P Parameter: Tissue Value: Aerial
  misc_feature: MA Experiment ID: 20000227 Result: Down-regulated in Transcription
  misc_feature: MA Experiment 20000227 PARAMETER Experiment Name: At_Root-Tips-vs-Tops_P Parameter: Tissue Value: Root Tips vs. Root Tops
  misc_feature: MA Experiment ID: 20001905 Result: Down-regulated in Transcription
  misc_feature: MA Experiment 20001905 PARAMETER Experiment Name: At_Drought_Reproduction_P Parameter: Age (day) Value: 40
  misc_feature: MA Experiment 20001905 PARAMETER Experiment Name: At_Drought_Reproduction_P Parameter: Organism Value: A. thaliana
  misc_feature: MA Experiment 20001905 PARAMETER Experiment Name: At_Drought_Reproduction_P Parameter: Plant Line Value: WS
  misc_feature: MA Experiment 20001905 PARAMETER Experiment Name: At_Drought_Reproduction_P Parameter: Timepoint (day) Value: 10
  misc_feature: MA Experiment 20001905 PARAMETER Experiment Name: At_Drought_Reproduction_P Parameter: Tissue Value: Rosettes
  misc_feature: MA Experiment 20001905 PARAMETER Experiment Name: At_Drought_Reproduction_P Parameter: Treatment Value: Drought vs. No Drought
  misc_feature: MA Experiment ID: 20001906 Result: Down-regulated in Transcription
  misc_feature: MA Experiment 20001906 PARAMETER Experiment Name: At_Drought_Reproduction_P Parameter: Age (day) Value: 35
  misc_feature: MA Experiment 20001906 PARAMETER Experiment Name: At_Drought_Reproduction_P Parameter: Organism Value: A. thaliana
  misc_feature: MA Experiment 20001906 PARAMETER Experiment Name: At_Drought_Reproduction_P Parameter: Plant Line Value: WS
  misc_feature: MA Experiment 20001906 PARAMETER Experiment Name: At_Drought_Reproduction_P Parameter: Timepoint (day) Value: 5
  misc_feature: MA Experiment 20001906 PARAMETER Experiment Name: At_Drought_Reproduction_P Parameter: Tissue Value: Siliques
  misc_feature: MA Experiment 20001906 PARAMETER Experiment Name: At_Drought_Reproduction_P Parameter: Treatment Value: Drought vs. No Drought
aaaaaatgtctgtatctgtagcagcagagcatgattacataggtttgtcagagtttccaaccatggaagcaacaacaatgtctgacaaaaccaaaaccagagacaataacaacggtctcaatttcaaggctaccgagttaagactcggtttacccggttctgagtcgccggagcgagtcgactcaagattcttggctctcaacaagagtagctgtcccgtgtcaggtgccaaaagggtgttctccgacgctattaacgactctaacaaatgggtcttctctcctggatccactactgctactggtgatgtcggctcgggttctggtccccgtacctccgtcgttaaagatggaaagtcgacaactttcactaaaccggctgttccggttaaggagaagaagagctctgctacagctccagcttcaaaagcacaagtggtgggatggccaccaataagatcattcaggaagaactcaatggcttcttctcaatctcagaaacctggtaataactcagagactgaagaagcagaagctaagtctggaccagaacaaccttgcttgtatgtcaaagtgagtatggaaggtgctccttacttgaggaaaatcgatctcaagacttacaaaagctaccttgagctctcttctgctcttgagaagatgttcagttgcttcaccattggtcagtttggttctcatggagggtgtggcagagatgggttaaacgagagtcgcttgactgatctcttgcgtggttctgagtatgttgtaacctatgaagataaagacagtgactggatgctggtcggagatgtcccttgggaaatgtttatatgctcctgcaagaagctgagaatcatgaagagctctgaggctatcggcttagctccaagggtgatggagaagtgcagaagcaggaactaggaaaagcccttttatgtgataatatatgatttgaaaaaatatgtttttaagaaattgaatagccattttgttttgaagtattcttgtgtgtttgtgtgctaggagtgatgtttgatctttcttaaaccagcctctactaagctctaataaggcctcttcctcttacttctttctctaatcaatctaatgaaacatatgggtttgtgtatgtgtgtttgccaaggaagacttcataattcatatgtataaaagttttggtagtgtgtaaaccggatgtggttttcattgtt

SEQ ID NO: 40127 - protein, 306 aa, Arabidopsis thaliana
  peptide (1)..(306): Ceres Seq. ID no. 12481793
  misc_feature (39)..(298): Pfam Name: AUX/IAA family Pfam Description: AUX/IAA family
  misc_feature (39)..(298): Pfam Name: AUX/IAA family Pfam Description: AUX/IAA family
  misc_feature (9)..(58): Homolog of NCBI NO: 20269051 NR Description: aux/IAA protein [Populus tremula x Populus
  misc_feature (73)..(306): Homolog of NCBI NO: 20269051 NR Description: aux/IAA protein [Populus tremula x Populus
  misc_feature (9)..(102): Homolog of NCBI NO: 6136832 NR Description: CS-IAA2 [Cucumis sativus]
  misc_feature (73)..(306): Homolog of NCBI NO: 6136832 NR Description: CS-IAA2 [Cucumis sativus]
  misc_feature (73)..(306): Homolog of NCBI NO: 20269051 NR Description: aux/IAA protein [Populus tremula x Populus
  misc_feature (73)..(306): Homolog of NCBI NO: 6136832 NR Description: CS-IAA2 [Cucumis sativus]
  misc_feature (5)..(306): Homolog of NCBI NO: 25989504 NR Description: Aux/IAA protein [Solanum tuberosum]
  misc_feature (2)..(306): Homolog of NCBI NO: 15235556 NR Description: phytochrome-associated protein PAP2
  misc_feature (9)..(306): Homolog of NCBI NO: 16610193 NR Description: IAA9 protein [Nicotiana tabacum]
  misc_feature (9)..(102): Homolog of NCBI NO: 6136832 NR Description: CS-IAA2 [Cucumis sativus]
  misc_feature (9)..(58): Homolog of NCBI NO: 20269051 NR Description: aux/IAA protein [Populus tremula x Populus
  misc_feature (9)..(306): Homolog of NCBI NO: 16610193 NR Description: IAA9 protein [Nicotiana tabacum]
  misc_feature (5)..(306): Homolog of NCBI NO: 25989504 NR Description: Aux/IAA protein [Solanum tuberosum]
  misc_feature (2)..(306): Homolog of NCBI NO: 15235556 NR Description: phytochrome-associated protein PAP2
KMSVSVAAEHDYIGLSEFPTMEATTMSDKTKTRDNNNGLNFKATELRLGLPGSESPERVDSRFLALNKSSCPVSGAKRVFSDAINDSNKWVFSPGSTTATGDVGSGSGPRTSVVKDGKSTTFTKPAVPVKEKKSSATAPASKAQVVGWPPIRSFRKNSMASSQSQKPGNNSETEEAEAKSGPEQPCLYVKVSMEGAPYLRKIDLKTYKSYLELSSALEKMFSCFTIGQFGSHGGCGRDGLNESRLTDLLRGSEYVVTYEDKDSDWMLVGDVPWEMFICSCKKLRIMKSSEAIGLAPRVMEKCRSRN

SEQ ID NO: 40128 - protein, 305 aa, Arabidopsis thaliana
  peptide (1)..(305): Ceres Seq. ID no. 12481794
  misc_feature (38)..(297): Pfam Name: AUX/IAA family Pfam Description: AUX/IAA family
  misc_feature (38)..(297): Pfam Name: AUX/IAA family Pfam Description: AUX/IAA family
  misc_feature (8)..(57): Homolog of NCBI NO: 20269051 NR Description: aux/IAA protein [Populus tremula x Populus
  misc_feature (72)..(305): Homolog of NCBI NO: 20269051 NR Description: aux/IAA protein [Populus tremula x Populus
  misc_feature (8)..(101): Homolog of NCBI NO: 6136832 NR Description: CS-IAA2 [Cucumis sativus]
  misc_feature (72)..(305): Homolog of NCBI NO: 6136832 NR Description: CS-IAA2 [Cucumis sativus]
  misc_feature (72)..(305): Homolog of NCBI NO: 20269051 NR Description: aux/IAA protein [Populus tremula x Populus
  misc_feature (72)..(305): Homolog of NCBI NO: 6136832 NR Description: CS-IAA2 [Cucumis sativus]
  misc_feature (4)..(305): Homolog of NCBI NO: 25989504 NR Description: Aux/IAA protein [Solanum tuberosum]
  misc_feature (1)..(305): Homolog of NCBI NO: 15235556 NR Description: phytochrome-associated protein PAP2
  misc_feature (8)..(305): Homolog of NCBI NO: 16610193 NR Description: IAA9 protein [Nicotiana tabacum]
  misc_feature (8)..(101): Homolog of NCBI NO: 6136832 NR Description: CS-IAA2 [Cucumis sativus]
  misc_feature (8)..(57): Homolog of NCBI NO: 20269051 NR Description: aux/IAA protein [Populus tremula x Populus
  misc_feature (8)..(305): Homolog of NCBI NO: 16610193 NR Description: IAA9 protein [Nicotiana tabacum]
  misc_feature (4)..(305): Homolog of NCBI NO: 25989504 NR Description: Aux/IAA protein [Solanum tuberosum]
  misc_feature (1)..(305): Homolog of NCBI NO: 15235556 NR Description: phytochrome-associated protein PAP2
MSVSVAAEHDYIGLSEFPTMEATTMSDKTKTRDNNNGLNFKATELRLGLPGSESPERVDSRFLALNKSSCPVSGAKRVFSDAINDSNKWVFSPGSTTATGDVGSGSGPRTSVVKDGKSTTFTKPAVPVKEKKSSATAPASKAQVVGWPPIRSFRKNSMASSQSQKPGNNSETEEAEAKSGPEQPCLYVKVSMEGAPYLRKIDLKTYKSYLELSSALEKMFSCFTIGQFGSHGGCGRDGLNESRLTDLLRGSEYVVTYEDKDSDWMLVGDVPWEMFICSCKKLRIMKSSEAIGLAPRVMEKCRSRN

SEQ ID NO: 40129 - protein, 286 aa, Arabidopsis thaliana
  peptide (1)..(286): Ceres Seq. ID no. 12481795
  misc_feature (19)..(278): Pfam Name: AUX/IAA family Pfam Description: AUX/IAA family
  misc_feature (19)..(278): Pfam Name: AUX/IAA family Pfam Description: AUX/IAA family
  misc_feature (1)..(38): Homolog of NCBI NO: 20269051 NR Description: aux/IAA protein [Populus tremula x Populus
  misc_feature (53)..(286): Homolog of NCBI NO: 20269051 NR Description: aux/IAA protein [Populus tremula x Populus
  misc_feature (1)..(82): Homolog of NCBI NO: 6136832 NR Description: CS-IAA2 [Cucumis sativus]
  misc_feature (53)..(286): Homolog of NCBI NO: 6136832 NR Description: CS-IAA2 [Cucumis sativus]
  misc_feature (53)..(286): Homolog of NCBI NO: 20269051 NR Description: aux/IAA protein [Populus tremula x Populus
  misc_feature (53)..(286): Homolog of NCBI NO: 6136832 NR Description: CS-IAA2 [Cucumis sativus]
  misc_feature (1)..(286): Homolog of NCBI NO: 25989504 NR Description: Aux/IAA protein [Solanum tuberosum]
  misc_feature (1)..(286): Homolog of NCBI NO: 15235556 NR Description: phytochrome-associated protein PAP2
  misc_feature (1)..(286): Homolog of NCBI NO: 16610193 NR Description: IAA9 protein [Nicotiana tabacum]
  misc_feature (1)..(82): Homolog of NCBI NO: 6136832 NR Description: CS-IAA2 [Cucumis sativus]
  misc_feature (1)..(38): Homolog of NCBI NO: 20269051 NR Description: aux/IAA protein [Populus tremula x Populus
  misc_feature (1)..(286): Homolog of NCBI NO: 16610193 NR Description: IAA9 protein [Nicotiana tabacum]
  misc_feature (1)..(286): Homolog of NCBI NO: 25989504 NR Description: Aux/IAA protein [Solanum tuberosum]
  misc_feature (1)..(286): Homolog of NCBI NO: 15235556 NR Description: phytochrome-associated protein PAP2
MEATTMSDKTKTRDNNNGLNFKATELRLGLPGSESPERVDSRFLALNKSSCPVSGAKRVFSDAINDSNKWVFSPGSTTATGDVGSGSGPRTSVVKDGKSTTFTKPAVPVKEKKSSATAPASKAQVVGWPPIRSFRKNSMASSQSQKPGNNSETEEAEAKSGPEQPCLYVKVSMEGAPYLRKIDLKTYKSYLELSSALEKMFSCFTIGQFGSHGGCGRDGLNESRLTDLLRGSEYVVTYEDKDSDWMLVGDVPWEMFICSCKKLRIMKSSEAIGLAPRVMEKCRSRN

SEQ ID NO: 40130 - DNA, 854 bp, Arabidopsis thaliana
  misc_feature (1)..(854): Ceres Seq. ID no. 13497569
  misc_feature: MA Experiment ID: 20000069 Result: Up-regulated in Transcription
  misc_feature: MA Experiment 20000069 PARAMETER Experiment Name: At_100uM_ABA_Mutants_cDNA_P Parameter: Plant Line Value: CS23
  misc_feature: MA Experiment 20000069 PARAMETER Experiment Name: At_100uM_ABA_Mutants_cDNA_P Parameter: Timepoint (hr) Value: 6
  misc_feature: MA Experiment 20000069 PARAMETER Experiment Name: At_100uM_ABA_Mutants_cDNA_P Parameter: Tissue Value: Aerial
  misc_feature: MA Experiment 20000069 PARAMETER Experiment Name: At_100uM_ABA_Mutants_cDNA_P Parameter: Treatment Value: 100uM ABA vs. No Treatment
  misc_feature: MA Experiment ID: 20000070 Result: Up-regulated in Transcription
  misc_feature: MA Experiment 20000070 PARAMETER Experiment Name: At_100uM_ABA_Mutants_cDNA_P Parameter: Plant Line Value: CS24
  misc_feature: MA Experiment 20000070 PARAMETER Experiment Name: At_100uM_ABA_Mutants_cDNA_P Parameter: Timepoint (hr) Value: 6
  misc_feature: MA Experiment 20000070 PARAMETER Experiment Name: At_100uM_ABA_Mutants_cDNA_P Parameter: Tissue Value: Aerial
  misc_feature: MA Experiment 20000070 PARAMETER Experiment Name: At_100uM_ABA_Mutants_cDNA_P Parameter: Treatment Value: 100uM ABA vs. No Treatment
  misc_feature: MA Experiment ID: 20000071 Result: Up-regulated in Transcription
  misc_feature: MA Experiment 20000071 PARAMETER Experiment Name: At_100uM_ABA_Mutants_cDNA_P Parameter: Plant Line Value: CS8104
  misc_feature: MA Experiment 20000071 PARAMETER Experiment Name: At_100uM_ABA_Mutants_cDNA_P Parameter: Timepoint (hr) Value: 6
  misc_feature: MA Experiment 20000071 PARAMETER Experiment Name: At_100uM_ABA_Mutants_cDNA_P Parameter: Tissue Value: Aerial
  misc_feature: MA Experiment 20000071 PARAMETER Experiment Name: At_100uM_ABA_Mutants_cDNA_P Parameter: Treatment Value: 100uM ABA vs. No Treatment
  misc_feature: MA Experiment ID: 20000072 Result: Up-regulated in Transcription
  misc_feature: MA Experiment 20000072 PARAMETER Experiment Name: At_100uM_ABA_Mutants_cDNA_P Parameter: Plant Line Value: CS8105
  misc_feature: MA Experiment 20000072 PARAMETER Experiment Name: At_100uM_ABA_Mutants_cDNA_P Parameter: Timepoint (hr) Value: 6
  misc_feature: MA Experiment 20000072 PARAMETER Experiment Name: At_100uM_ABA_Mutants_cDNA_P Parameter: Tissue Value: Aerial
  misc_feature: MA Experiment 20000072 PARAMETER Experiment Name: At_100uM_ABA_Mutants_cDNA_P Parameter: Treatment Value: 100uM ABA vs. No Treatment
  misc_feature: MA Experiment ID: 20000086 Result: Up-regulated in Transcription
  misc_feature: MA Experiment 20000086 PARAMETER Experiment Name: At_100uM_ABA_Mutants_cDNA_P Parameter: Plant Line Value: CS22
  misc_feature: MA Experiment 20000086 PARAMETER Experiment Name: At_100uM_ABA_Mutants_cDNA_P Parameter: Timepoint (hr) Value: 6
  misc_feature: MA Experiment 20000086 PARAMETER Experiment Name: At_100uM_ABA_Mutants_cDNA_P Parameter: Tissue Value: Aerial
  misc_feature: MA Experiment 20000086 PARAMETER Experiment Name: At_100uM_ABA_Mutants_cDNA_P Parameter: Treatment Value: 100uM ABA vs. No Treatment
  misc_feature: MA Experiment ID: 20000087 Result: Up-regulated in Transcription
  misc_feature: MA Experiment 20000087 PARAMETER Experiment Name: At_100uM_ABA_Mutants_cDNA_P Parameter: Plant Line Value: WS
  misc_feature: MA Experiment 20000087 PARAMETER Experiment Name: At_100uM_ABA_Mutants_cDNA_P Parameter: Timepoint (hr) Value: 6
  misc_feature: MA Experiment 20000087 PARAMETER Experiment Name: At_100uM_ABA_Mutants_cDNA_P Parameter: Tissue Value: Aerial
  misc_feature: MA Experiment 20000087 PARAMETER Experiment Name: At_100uM_ABA_Mutants_cDNA_P Parameter: Treatment Value: 100uM ABA vs. No Treatment
  misc_feature: MA Experiment ID: 20000088 Result: Up-regulated in Transcription
  misc_feature: MA Experiment 20000088 PARAMETER Experiment Name: At_100uM_ABA_Mutants_cDNA_P Parameter: Plant Line Value: Landsberg
  misc_feature: MA Experiment 20000088 PARAMETER Experiment Name: At_100uM_ABA_Mutants_cDNA_P Parameter: Timepoint (hr) Value: 6
  misc_feature: MA Experiment 20000088 PARAMETER Experiment Name: At_100uM_ABA_Mutants_cDNA_P Parameter: Tissue Value: Aerial
  misc_feature: MA Experiment 20000088 PARAMETER Experiment Name: At_100uM_ABA_Mutants_cDNA_P Parameter: Treatment Value: 100uM ABA vs. No Treatment
  misc_feature: MA Experiment ID: 20000089 Result: Up-regulated in Transcription
  misc_feature: MA Experiment ID: 20000090 Result: Up-regulated in Transcription
  misc_feature: MA Experiment ID: 20000117 Result: Up-regulated in Transcription
  misc_feature: MA Experiment 20000117 PARAMETER Experiment Name: At_100uM_ABA_Mutants_cDNA_P Parameter: Plant Line Value: Columbia
  misc_feature: MA Experiment 20000117 PARAMETER Experiment Name: At_100uM_ABA_Mutants_cDNA_P Parameter: Timepoint (hr) Value: 6
  misc_feature: MA Experiment 20000117 PARAMETER Experiment Name: At_100uM_ABA_Mutants_cDNA_P Parameter: Tissue Value: Aerial
  misc_feature: MA Experiment 20000117 PARAMETER Experiment Name: At_100uM_ABA_Mutants_cDNA_P Parameter: Treatment Value: 100uM ABA vs. No Treatment
  misc_feature: MA Experiment ID: 20001248 Result: Up-regulated in Transcription
  misc_feature: MA Experiment 20001248 PARAMETER Experiment Name: At_Far-red-induction_P Parameter: Age (day) Value: 7
  misc_feature: MA Experiment 20001248 PARAMETER Experiment Name: At_Far-red-induction_P Parameter: Light Value: Far-red vs. White
  misc_feature: MA Experiment 20001248 PARAMETER Experiment Name: At_Far-red-induction_P Parameter: Organism Value: A. thaliana
  misc_feature: MA Experiment 20001248 PARAMETER Experiment Name: At_Far-red-induction_P Parameter: Plant Line Value: Columbia
  misc_feature: MA Experiment 20001248 PARAMETER Experiment Name: At_Far-red-induction_P Parameter: Timepoint (hr) Value: 4
  misc_feature: MA Experiment 20001248 PARAMETER Experiment Name: At_Far-red-induction_P Parameter: Tissue Value: Whole Plant
tcgattggccaaatcggccctcgagttaattaaattaatccccccccccccccgatcttcttgtctctctctcatttcttgttattatccacgaacgaagaaaaacctagaaaacagttgaagaaagaaaatcacaagagaagccatggccggaattggaccgattactcaggattgggaaccagttgtgatccgcaagagagctcctaacgctgcagctaagcgcgacgagaagactgtcaacgccgctcgtcgaagcggcgccgatattgagaccgttcgaaaattcaatgctggatcgaacaaggctgcatcaagcggcacctccttgaacacaaagaagctagatgatgatactgagaacttatctcatgatcgtgtgcccactgaattgaagaaagccatcatgcaagctagaggggagaagaagctgactcagtcccaacttgcccatctgatcaatgagaagccacaagtgatccaagaatacgagtctgggaaagcaattccgaatcaacagatcctttcaaagctggagagggcacttggtgctaaactccgtggaaagaagtagaagtgtagaacaaagctcttaaaggtaacaacaaaagctgatcgcagtttctctccagtccacatgctttaccatatcctaaaaactatatctatgtatggtttggtttaatggcgtagtagtttgttgcgaggaatctttcatgatgtaagaaaaacaaagctgtttggaaccttttgtcattataaataatctcttctctttctttttcgtcangtctcgtaaactttatctgccacggatgtatgttnttaaagaaattgaagattgaaattggtcc

SEQ ID NO: 40131 - protein, 142 aa, Arabidopsis thaliana
  peptide (1)..(142): Ceres Seq. ID no. 13497570
  misc_feature (87)..(141): Pfam Name: Helix-turn-helix Pfam Description: Helix-turn-helix
  misc_feature (87)..(141): Pfam Name: Helix-turn-helix Pfam Description: Helix-turn-helix
  misc_feature (87)..(141): Pfam Name: Helix-turn-helix Pfam Description: Helix-turn-helix
  misc_feature (10)..(141): Homolog of NCBI NO: 4503453 NR Description: endothelial differentiation-related factor 1
  misc_feature (5)..(141): Homolog of NCBI NO: 19225065 NR Description: ethylene-responsive transciptional
  misc_feature (7)..(141): Homolog of NCBI NO: 21553721 NR Description: ethylene-responsive transcriptional coactivator,
  misc_feature (5)..(141): Homolog of NCBI NO: 15230125 NR Description: ethylene-responsive transcriptional coactivator
  misc_feature (5)..(142): Homolog of NCBI NO: 20086364 NR Description: putative multiprotein bridging factor 1
  misc_feature (10)..(141): Homolog of NCBI NO: 4503453 NR Description: endothelial differentiation-related factor 1
  misc_feature (7)..(141): Homolog of NCBI NO: 21553721 NR Description: ethylene-responsive transcriptional coactivator,
  misc_feature (5)..(142): Homolog of NCBI NO: 20086364 NR Description: putative multiprotein bridging factor 1
  misc_feature (5)..(141): Homolog of NCBI NO: 15230125 NR Description: ethylene-responsive transcriptional coactivator
  misc_feature (7)..(141): Homolog of NCBI NO: 21553721 NR Description: ethylene-responsive transcriptional coactivator,
  misc_feature (5)..(141): Homolog of NCBI NO: 19225065 NR Description: ethylene-responsive transciptional
  misc_feature (10)..(141): Homolog of NCBI NO: 4503453 NR Description: endothelial differentiation-related factor 1
  misc_feature (1)..(142): Homolog of NCBI NO: 15231105 NR Description: transcriptional coactivator - like protein
  misc_feature (1)..(142): Homolog of NCBI NO: 18406032 NR Description: expressed protein [Arabidopsis thaliana]
  misc_feature (1)..(142): Homolog of NCBI NO: 7488897 NR Description: hypothetical protein - castor bean
  misc_feature (1)..(142): Homolog of NCBI NO: 38637102 NR Description: putative ethylene-responsive transcriptional
  misc_feature (7)..(142): Homolog of NCBI NO: 8895787 NR Description: multiprotein bridging factor 1 [Solanum tuberosum]
  misc_feature (1)..(142): Homolog of NCBI NO: 15231105 NR Description: transcriptional coactivator - like protein
  misc_feature (1)..(142): Homolog of NCBI NO: 18406032 NR Description: expressed protein [Arabidopsis thaliana]
  misc_feature (1)..(142): Homolog of NCBI NO: 7488897 NR Description: hypothetical protein - castor bean
  misc_feature (1)..(142): Homolog of NCBI NO: 38637102 NR Description: putative ethylene-responsive transcriptional
  misc_feature (7)..(142): Homolog of NCBI NO: 8895787 NR Description: multiprotein bridging factor 1 [Solanum tuberosum]
  misc_feature (5)..(142): Homolog of NCBI NO: 20086364 NR Description: putative multiprotein bridging factor 1
  misc_feature (5)..(141): Homolog of NCBI NO: 15230125 NR Description: ethylene-responsive transcriptional coactivator
  misc_feature (5)..(141): Homolog of NCBI NO: 19225065 NR Description: ethylene-responsive transciptional
  misc_feature (7)..(142): Homolog of NCBI NO: 8895787 NR Description: multiprotein bridging factor 1 [Solanum tuberosum]
  misc_feature (1)..(142): Homolog of NCBI NO: 38637102 NR Description: putative ethylene-responsive transcriptional
  misc_feature (1)..(142): Homolog of NCBI NO: 7488897 NR Description: hypothetical protein - castor bean
  misc_feature (1)..(142): Homolog of NCBI NO: 18406032 NR Description: expressed protein [Arabidopsis thaliana]
  misc_feature (1)..(142): Homolog of NCBI NO: 15231105 NR Description: transcriptional coactivator - like protein
MAGIGPITQDWEPVVIRKRAPNAAAKRDEKTVNAARRSGADIETVRKFNAGSNKAASSGTSLNTKKLDDDTENLSHDRVPTELKKAIMQARGEKKLTQSQLAHLINEKPQVIQEYESGKAIPNQQILSKLERALGAKLRGKK

SEQ ID NO: 40132 - DNA, 1612 bp, Arabidopsis thaliana; identical to SEQ ID NO: 37971
  misc_feature (1)..(1612): Ceres Seq. ID no. 12329884
  misc_feature: MA Experiment ID: 108462 Result: Up-regulated in Transcription
  misc_feature: MA Experiment 108462 PARAMETER Experiment Name: At_Germinating_Seeds_cDNA_P Parameter: Age (day) Value: 2 vs. 0
  misc_feature: MA Experiment 108462 PARAMETER Experiment Name: At_Germinating_Seeds_cDNA_P Parameter: Tissue Value: Germinating Seeds
  misc_feature: MA Experiment ID: 108464 Result: Up-regulated in Transcription
  misc_feature: MA Experiment 108464 PARAMETER Experiment Name: At_Germinating_Seeds_cDNA_P Parameter: Age (day) Value: 4 vs. 0
  misc_feature: MA Experiment 108464 PARAMETER Experiment Name: At_Germinating_Seeds_cDNA_P Parameter: Tissue Value: Germinating Seeds
  misc_feature: MA Experiment ID: 108573 Result: Up-regulated in Transcription
  misc_feature: MA Experiment 108573 PARAMETER Experiment Name: At_Drought_cDNA_P Parameter: Timepoint (hr) Value: 6
  misc_feature: MA Experiment 108573 PARAMETER Experiment Name: At_Drought_cDNA_P Parameter: Tissue Value: Aerial
  misc_feature: MA Experiment 108573 PARAMETER Experiment Name: At_Drought_cDNA_P Parameter: Treatment Value: Drought vs. No Drought
  misc_feature: MA Experiment ID: 108668 Result: Up-regulated in Transcription
  misc_feature: MA Experiment 108668 PARAMETER Experiment Name: At_2mM_SA_cDNA_P Parameter: Plant Line Value: WS
  misc_feature: MA Experiment 108668 PARAMETER Experiment Name: At_2mM_SA_cDNA_P Parameter: Timepoint (hr) Value: 6
  misc_feature: MA Experiment 108668 PARAMETER Experiment Name: At_2mM_SA_cDNA_P Parameter: Treatment Value: 2mM SA vs. No Treatment
  misc_feature: MA Experiment ID: 20000180 Result: Up-regulated in Transcription
  misc_feature: MA Experiment 20000180 PARAMETER Experiment Name: At_Germinating_Seeds_P Parameter: Age (hr) Value: 24 vs. 0
  misc_feature: MA Experiment 20000180 PARAMETER Experiment Name: At_Germinating_Seeds_P Parameter: Tissue Value: Germinating Seeds
  misc_feature: MA Experiment ID: 20000185 Result: Up-regulated in Transcription
  misc_feature: MA Experiment 20000185 PARAMETER Experiment Name: At_Roots__P Parameter: Age (day) Value: 7 vs. 21
  misc_feature: MA Experiment 20000185 PARAMETER Experiment Name: At_Roots__P Parameter: Organism Value: A. thaliana
  misc_feature: MA Experiment 20000185 PARAMETER Experiment Name: At_Roots__P Parameter: Tissue Value: Roots vs. Whole Plant
  misc_feature: MA Experiment ID: 20001558 Result: Down-regulated in Transcription
  misc_feature: MA Experiment 20001558 PARAMETER Experiment Name: At_Drought_Soil_Dry_P Parameter: Age (day) Value: 27
  misc_feature: MA Experiment 20001558 PARAMETER Experiment Name: At_Drought_Soil_Dry_P Parameter: Organism Value: A. thaliana
  misc_feature: MA Experiment 20001558 PARAMETER Experiment Name: At_Drought_Soil_Dry_P Parameter: Plant Line Value: WS
  misc_feature: MA Experiment 20001558 PARAMETER Experiment Name: At_Drought_Soil_Dry_P Parameter: Post Timepoint (hr) Value: 6
  misc_feature: MA Experiment 20001558 PARAMETER Experiment Name: At_Drought_Soil_Dry_P Parameter: Post-Treatment Value: Re-Water vs. No Drought
  misc_feature: MA Experiment 20001558 PARAMETER Experiment Name: At_Drought_Soil_Dry_P Parameter: Timepoint (day) Value: 13
  misc_feature: MA Experiment 20001558 PARAMETER Experiment Name: At_Drought_Soil_Dry_P Parameter: Treatment Value: Drought vs. No Drought

SEQ ID NO: 40133 - protein, 498 aa, Arabidopsis thaliana; identical to SEQ ID NO: 37972
  peptide (1)..(498): Ceres Seq. ID no. 12329885
  misc_feature (27)..(390): Pfam Name: 3-beta hydroxysteroid dehydrogenase/isomerase family Pfam Description: 3-beta hydroxysteroid dehydrogenase/isomerase
  misc_feature (27)..(390): Pfam Name: 3-beta hydroxysteroid dehydrogenase/isomerase family Pfam Description: 3-beta hydroxysteroid dehydrogenase/isomerase
  misc_feature (33)..(312): Homolog of NCBI NO: 477637 NR Description: cholesterol dehydrogenase (EC 1.1.1.-) - Nocardia
  misc_feature (33)..(398): Homolog of NCBI NO: 15225272 NR Description: 3-beta-hydroxysteroid dehydrogenase; protein id:
  misc_feature (33)..(386): Homolog of NCBI NO: 15608246 NR Description: hypothetical protein Rv1106c [Mycobacterium
  misc_feature (33)..(393): Homolog of NCBI NO: 21553411 NR Description: 3-beta-hydroxysteroid dehydrogenase, putative
  misc_feature (33)..(393): Homolog of NCBI NO: 30694041 NR Description: 3-beta hydroxysteroid dehydrogenase/isomerase
  misc_feature (33)..(312): Homolog of NCBI NO: 477637 NR Description: cholesterol dehydrogenase (EC 1.1.1.-) - Nocardia
  misc_feature (33)..(386): Homolog of NCBI NO: 15608246 NR Description: hypothetical protein Rv1106c [Mycobacterium
  misc_feature (33)..(393): Homolog of NCBI NO: 30694041 NR Description: 3-beta hydroxysteroid dehydrogenase/isomerase
  misc_feature (19)..(498): Homolog of NCBI NO: 15226138 NR Description: putative steroid dehydrogenase
  misc_feature (33)..(402): Homolog of NCBI NO: 21553311 NR Description: NAD(P) dependent steroid dehydrogenase-like [Homo
  misc_feature (31)..(418): Homolog of NCBI NO: 21311981 NR Description: RIKEN cDNA 4632417N05 [Mus musculus]
  misc_feature (31)..(288): Homolog of NCBI NO: 34851797 NR Description: similar to RIKEN cDNA 4632417N05 [Rattus
  misc_feature (33)..(393): Homolog of NCBI NO: 18401656 NR Description: 3-beta-hydroxysteroid dehydrogenase, putative
  misc_feature (33)..(393): Homolog of NCBI NO: 21553411 NR Description: 3-beta-hydroxysteroid dehydrogenase, putative
  misc_feature (33)..(398): Homolog of NCBI NO: 15225272 NR Description: 3-beta-hydroxysteroid dehydrogenase; protein id:
  misc_feature (33)..(393): Homolog of NCBI NO: 18401656 NR Description: 3-beta-hydroxysteroid dehydrogenase, putative
  misc_feature (31)..(288): Homolog of NCBI NO: 34851797 NR Description: similar to RIKEN cDNA 4632417N05 [Rattus
  misc_feature (31)..(418): Homolog of NCBI NO: 21311981 NR Description: RIKEN cDNA 4632417N05 [Mus musculus]
  misc_feature (33)..(402): Homolog of NCBI NO: 21553311 NR Description: NAD(P) dependent steroid dehydrogenase-like [Homo
  misc_feature (19)..(498): Homolog of NCBI NO: 15226138 NR Description: putative steroid dehydrogenase

SEQ ID NO: 40134 - protein, 480 aa, Arabidopsis thaliana; identical to SEQ ID NO: 37973
  peptide (1)..(480): Ceres Seq. ID no. 12329886
  misc_feature (9)..(372): Pfam Name: 3-beta hydroxysteroid dehydrogenase/isomerase family Pfam Description: 3-beta hydroxysteroid dehydrogenase/isomerase
  misc_feature (9)..(372): Pfam Name: 3-beta hydroxysteroid dehydrogenase/isomerase family Pfam Description: 3-beta hydroxysteroid dehydrogenase/isomerase
  misc_feature (15)..(294): Homolog of NCBI NO: 477637 NR Description: cholesterol dehydrogenase (EC 1.1.1.-) - Nocardia
  misc_feature (15)..(380): Homolog of NCBI NO: 15225272 NR Description: 3-beta-hydroxysteroid dehydrogenase; protein id:
  misc_feature (15)..(368): Homolog of NCBI NO: 15608246 NR Description: hypothetical protein Rv1106c [Mycobacterium
  misc_feature (15)..(375): Homolog of NCBI NO: 21553411 NR Description: 3-beta-hydroxysteroid dehydrogenase, putative
  misc_feature (15)..(375): Homolog of NCBI NO: 30694041 NR Description: 3-beta hydroxysteroid dehydrogenase/isomerase
  misc_feature (15)..(294): Homolog of NCBI NO: 477637 NR Description: cholesterol dehydrogenase (EC 1.1.1.-) - Nocardia
  misc_feature (15)..(368): Homolog of NCBI NO: 15608246 NR Description: hypothetical protein Rv1106c [Mycobacterium
  misc_feature (15)..(375): Homolog of NCBI NO: 30694041 NR Description: 3-beta hydroxysteroid dehydrogenase/isomerase
  misc_feature (1)..(480): Homolog of NCBI NO: 15226138 NR Description: putative steroid dehydrogenase
  misc_feature (15)..(384): Homolog of NCBI NO: 21553311 NR Description: NAD(P) dependent steroid dehydrogenase-like [Homo
  misc_feature (13)..(400): Homolog of NCBI NO: 21311981 NR Description: RIKEN cDNA 4632417N05 [Mus musculus]
  misc_feature (13)..(270): Homolog of NCBI NO: 34851797 NR Description: similar to RIKEN cDNA 4632417N05 [Rattus
  misc_feature (15)..(375): Homolog of NCBI NO: 18401656 NR Description: 3-beta-hydroxysteroid dehydrogenase, putative
  misc_feature (15)..(375): Homolog of NCBI NO: 21553411 NR Description: 3-beta-hydroxysteroid dehydrogenase, putative
  misc_feature (15)..(380): Homolog of NCBI NO: 15225272 NR Description: 3-beta-hydroxysteroid dehydrogenase; protein id:
  misc_feature (15)..(375): Homolog of NCBI NO: 18401656 NR Description: 3-beta-hydroxysteroid dehydrogenase, putative
  misc_feature (13)..(270): Homolog of NCBI NO: 34851797 NR Description: similar to RIKEN cDNA 4632417N05 [Rattus
  misc_feature (13)..(400): Homolog of NCBI NO: 21311981 NR Description: RIKEN cDNA 4632417N05 [Mus musculus]
  misc_feature (15)..(384): Homolog of NCBI NO: 21553311 NR Description: NAD(P) dependent steroid dehydrogenase-like [Homo
  misc_feature (1)..(480): Homolog of NCBI NO: 15226138 NR Description: putative steroid dehydrogenase

SEQ ID NO: 40135 - protein, 391 aa, Arabidopsis thaliana; identical to SEQ ID NO: 37974
  peptide (1)..(391): Ceres Seq. ID no. 12329887
  misc_feature (1)..(283): Pfam Name: 3-beta hydroxysteroid dehydrogenase/isomerase family Pfam Description: 3-beta hydroxysteroid dehydrogenase/isomerase
  misc_feature (1)..(283): Pfam Name: 3-beta hydroxysteroid dehydrogenase/isomerase family Pfam Description: 3-beta hydroxysteroid dehydrogenase/isomerase
  misc_feature (1)..(205): Homolog of NCBI NO: 477637 NR Description: cholesterol dehydrogenase (EC 1.1.1.-) - Nocardia
  misc_feature (1)..(291): Homolog of NCBI NO: 15225272 NR Description: 3-beta-hydroxysteroid dehydrogenase; protein id:
  misc_feature (1)..(279): Homolog of NCBI NO: 15608246 NR Description: hypothetical protein Rv1106c [Mycobacterium
  misc_feature (1)..(286): Homolog of NCBI NO: 21553411 NR Description: 3-beta-hydroxysteroid dehydrogenase, putative
  misc_feature (1)..(286): Homolog of NCBI NO: 30694041 NR Description: 3-beta hydroxysteroid dehydrogenase/isomerase
  misc_feature (1)..(205): Homolog of NCBI NO: 477637 NR Description: cholesterol dehydrogenase (EC 1.1.1.-) - Nocardia
  misc_feature (1)..(279): Homolog of NCBI NO: 15608246 NR Description: hypothetical protein Rv1106c [Mycobacterium
  misc_feature (1)..(286): Homolog of NCBI NO: 30694041 NR Description: 3-beta hydroxysteroid dehydrogenase/isomerase
  misc_feature (1)..(391): Homolog of NCBI NO: 15226138 NR Description: putative steroid dehydrogenase
  misc_feature (1)..(295): Homolog of NCBI NO: 21553311 NR Description: NAD(P) dependent steroid dehydrogenase-like [Homo
  misc_feature (1)..(311): Homolog of NCBI NO: 21311981 NR Description: RIKEN cDNA 4632417N05 [Mus musculus]
  misc_feature (1)..(181): Homolog of NCBI NO: 34851797 NR Description: similar to RIKEN cDNA 4632417N05 [Rattus
  misc_feature (1)..(286): Homolog of NCBI NO: 18401656 NR Description: 3-beta-hydroxysteroid dehydrogenase, putative
  misc_feature (1)..(286): Homolog of NCBI NO: 21553411 NR Description: 3-beta-hydroxysteroid dehydrogenase, putative
  misc_feature (1)..(291): Homolog of NCBI NO: 15225272 NR Description: 3-beta-hydroxysteroid dehydrogenase; protein id:
  misc_feature (1)..(286): Homolog of NCBI NO: 18401656 NR Description: 3-beta-hydroxysteroid dehydrogenase, putative
  misc_feature (1)..(181): Homolog of NCBI NO: 34851797 NR Description: similar to RIKEN cDNA 4632417N05 [Rattus
  misc_feature (1)..(311): Homolog of NCBI NO: 21311981 NR Description: RIKEN cDNA 4632417N05 [Mus musculus]
  misc_feature (1)..(295): Homolog of NCBI NO: 21553311 NR Description: NAD(P) dependent steroid dehydrogenase-like [Homo
  misc_feature (1)..(391): Homolog of NCBI NO: 15226138 NR Description: putative steroid dehydrogenase

SEQ ID NO: 40136 - DNA, 1127 bp, Arabidopsis thaliana
  misc_feature (1)..(1127): Ceres Seq. ID no. 13499960
  misc_feature: MA Experiment ID: 108434 Result: Down-regulated in Transcription
  misc_feature: MA Experiment 108434 PARAMETER Experiment Name: At_Root_Tips_cDNA_P Parameter: Tissue Value: Root Tips
  misc_feature: MA Experiment ID: 108561 Result: Up-regulated in Transcription
  misc_feature: MA Experiment 108561 PARAMETER Experiment Name: At_100uM_ABA_cDNA_P Parameter: Timepoint (hr) Value: 6
  misc_feature: MA Experiment 108561 PARAMETER Experiment Name: At_100uM_ABA_cDNA_P Parameter: Tissue Value: Aerial
  misc_feature: MA Experiment 108561 PARAMETER Experiment Name: At_100uM_ABA_cDNA_P Parameter: Treatment Value: 100uM ABA vs. No Treatment
  misc_feature: MA Experiment ID: 20000072 Result: Up-regulated in Transcription
  misc_feature: MA Experiment 20000072 PARAMETER Experiment Name: At_100uM_ABA_Mutants_cDNA_P Parameter: Plant Line Value: CS8105
  misc_feature: MA Experiment 20000072 PARAMETER Experiment Name: At_100uM_ABA_Mutants_cDNA_P Parameter: Timepoint (hr) Value: 6
  misc_feature: MA Experiment 20000072 PARAMETER Experiment Name: At_100uM_ABA_Mutants_cDNA_P Parameter: Tissue Value: Aerial
  misc_feature: MA Experiment 20000072 PARAMETER Experiment Name: At_100uM_ABA_Mutants_cDNA_P Parameter: Treatment Value: 100uM ABA vs. No Treatment
  misc_feature: MA Experiment ID: 20000184 Result: Up-regulated in Transcription
  misc_feature: MA Experiment 20000184 PARAMETER Experiment Name: At_Shoots__P Parameter: Age (day) Value: 7
  misc_feature: MA Experiment 20000184 PARAMETER Experiment Name: At_Shoots__P Parameter: Tissue Value: Shoots vs. Whole Plant
  misc_feature: MA Experiment ID: 20000227 Result: Down-regulated in Transcription
  misc_feature: MA Experiment 20000227 PARAMETER Experiment Name: At_Root-Tips-vs-Tops_P Parameter: Tissue Value: Root Tips vs. Root Tops
  misc_feature: MA Experiment ID: 20000264 Result: Up-regulated in Transcription
  misc_feature: MA Experiment 20000264 PARAMETER Experiment Name: At_Open_Flower_P Parameter: Age (day) Value: 21
  misc_feature: MA Experiment 20000264 PARAMETER Experiment Name: At_Open_Flower_P Parameter: Plant Line Value: WS
  misc_feature: MA Experiment 20000264 PARAMETER Experiment Name: At_Open_Flower_P Parameter: Tissue Value: Open Flower vs. Whole Plant
  misc_feature: MA Experiment ID: 20000265 Result: Up-regulated in Transcription
  misc_feature: MA Experiment 20000265 PARAMETER Experiment Name: At_Open_Flower_P Parameter: Age (day) Value: 21
  misc_feature: MA Experiment 20000265 PARAMETER Experiment Name: At_Open_Flower_P Parameter: Plant Line Value: WS
  misc_feature: MA Experiment 20000265 PARAMETER Experiment Name: At_Open_Flower_P Parameter: Tissue Value: Closed Flower vs. Whole Plant
  misc_feature: MA Experiment ID: 20000286 Result: Up-regulated in Transcription
  misc_feature: MA Experiment 20000286 PARAMETER Experiment Name: At_Open_Flower_P Parameter: Age (day) Value: 21
  misc_feature: MA Experiment 20000286 PARAMETER Experiment Name: At_Open_Flower_P Parameter: Plant Line Value: WS
  misc_feature: MA Experiment 20000286 PARAMETER Experiment Name: At_Open_Flower_P Parameter: Tissue Value: Half Open vs. Whole Plant
  misc_feature: MA Experiment ID: 20000794 Result: Up-regulated in Transcription
  misc_feature: MA Experiment 20000794 PARAMETER Experiment Name: At_Petals_P Parameter: Age (day) Value: 23-25 days
  misc_feature: MA Experiment 20000794 PARAMETER Experiment Name: At_Petals_P Parameter: Plant Line Value: WS
  misc_feature: MA Experiment 20000794 PARAMETER Experiment Name: At_Petals_P Parameter: Tissue Value: Petals vs. Whole plant
  misc_feature: MA Experiment ID: 20001904 Result: Up-regulated in Transcription
  misc_feature: MA Experiment 20001904 PARAMETER Experiment Name: At_Drought_Reproduction_P Parameter: Age (day) Value: 37
  misc_feature: MA Experiment 20001904 PARAMETER Experiment Name: At_Drought_Reproduction_P Parameter: Organism Value: A. thaliana
  misc_feature: MA Experiment 20001904 PARAMETER Experiment Name: At_Drought_Reproduction_P Parameter: Plant Line Value: WS
  misc_feature: MA Experiment 20001904 PARAMETER Experiment Name: At_Drought_Reproduction_P Parameter: Timepoint (day) Value: 7
  misc_feature: MA Experiment 20001904 PARAMETER Experiment Name: At_Drought_Reproduction_P Parameter: Tissue Value: Rosettes
  misc_feature: MA Experiment 20001904 PARAMETER Experiment Name: At_Drought_Reproduction_P Parameter: Treatment Value: Drought vs. No Drought
  misc_feature: MA Experiment ID: 20001910 Result: Up-regulated in Transcription
  misc_feature: MA Experiment 20001910 PARAMETER Experiment Name: At_Drought_Reproduction_P Parameter: Age (day) Value: 37
  misc_feature: MA Experiment 20001910 PARAMETER Experiment Name: At_Drought_Reproduction_P Parameter: Organism Value: A. thaliana
  misc_feature: MA Experiment 20001910 PARAMETER Experiment Name: At_Drought_Reproduction_P Parameter: Plant Line Value: WS
  misc_feature: MA Experiment 20001910 PARAMETER Experiment Name: At_Drought_Reproduction_P Parameter: Timepoint (day) Value: 7
  misc_feature: MA Experiment 20001910 PARAMETER Experiment Name: At_Drought_Reproduction_P Parameter: Tissue Value: Flowers
  misc_feature: MA Experiment 20001910 PARAMETER Experiment Name: At_Drought_Reproduction_P Parameter: Treatment Value: Drought vs. No Drought
ggaattcggcacgaggatgaggtcgtttgtctcgttgatttctcttctccttcttctctcattttcttcatctgttctctcaaccaaaaagtcatcatttcaaaaacttccggtgccaggaaacagaacaggccctgaagctttcgcttttgattccaccggaaaaggatttctacccggagtcaccggcggtaaaatcctcaaatatcttccaaagaaaggttatgtcgactttgcccagatcacaaactcttcgaagtcttcgttgtgcgacggagcacttggaaccactaacgtcgaaaaatgtggtcgaccagccggaatagccttcaacacgaaaacaggtgatctttacgtcgcagatgctgcattgggtctccacgtcatccctcgccgtgggggtttggctaagaagatcgccgacagtgtcggcggcaagccctttttgtttcttgacgggcttgacgtagatcccaataccggcgtcgtctatttcacttccttcagctcaacatttggccctagggatgtgttgaaagcagtggcaacaaaagactcgaccggtaagttcttcaaatacgatccatcaaaaaaggtcgtgactgtattgatggacggtcttagcggctcagccggatgtgccgttagctcagatggttcattcgtgctggttggtcagttcacaaaaagtaacatcaagaggtattggatcaaaggatccaaagctggtacttctgaagacttcaccaactcggtctcgaaccctgacaacatcaagaggatcggttctactggaaacttttgggttgcttcggtcgtgaactcagccaccggaccgacaaacccttcggcggttaaagtcagttctgccggtaaagtgcttcagaccattcccctaaaagacaagtttggggatactttggttagtgaagttaacgatcaaaggacagctttatatcggagctctttttgggcctttcgccggaattccttaagctttaaagtgaacatggtattagtatgggttagaattaaagtgattgaatcgaaataaatatggttacaaagtcttgacggatcaatgtacgctcatgttgattctgttcaaataaatatgaatttttttt

SEQ ID NO: 40137 - protein, 350 aa, Arabidopsis thaliana
  peptide (1)..(350): Ceres Seq. ID no. 13499961
  misc_feature (7)..(319): Pfam Name: Strictosidine synthase Pfam Description: Strictosidine synthase
  misc_feature (10)..(322): Homolog of NCBI NO: 18222 NR Description: strictosidine synthase precursor [Catharanthus
  misc_feature (10)..(324): Homolog of NCBI NO: 267045 NR Description: Strictosidine synthase precursor
  misc_feature (10)..(319): Homolog of NCBI NO: 478818 NR Description: strictosidine synthase (EC 4.3.3.2) - Rauvolfia
  misc_feature (10)..(319): Homolog of NCBI NO: 135005 NR Description: Strictosidine synthase precursor
  misc_feature (6)..(319): Homolog of NCBI NO: 15221105 NR Description: strictosidine synthase family [Arabidopsis
  misc_feature (6)..(319): Homolog of NCBI NO: 1754983 NR Description: strictosidine synthase
  misc_feature (6)..(319): Homolog of NCBI NO: 15221106 NR Description: strictosidine synthase family [Arabidopsis
  misc_feature (6)..(319): Homolog of NCBI NO: 30698979 NR Description: strictosidine synthase family [Arabidopsis
  misc_feature (6)..(319): Homolog of NCBI NO: 21431845 NR Description: Strictosidine synthase 3 precursor (SS-3)
  misc_feature (6)..(350): Homolog of NCBI NO: 1754987 NR Description: strictosidine synthase
EFGTRMRSFVSLISLLLLLSFSSSVLSTKKSSFQKLPVPGNRTGPEAFAFDSTGKGFLPGVTGGKILKYLPKKGYVDFAQITNSSKSSLCDGALGTTNVEKCGRPAGIAFNTKTGDLYVADAALGLHVIPRRGGLAKKIADSVGGKPFLFLDGLDVDPNTGVVYFTSFSSTFGPRDVLKAVATKDSTGKFFKYDPSKKVVTVLMDGLSGSAGCAVSSDGSFVLVGQFTKSNIKRYWIKGSKAGTSEDFTNSVSNPDNIKRIGSTGNFWVASVVNSATGPTNPSAVKVSSAGKVLQTIPLKDKFGDTLVSEVNDQRTALYRSSFWAFRRNSLSFKVNMVLVWVRIKVIESK

SEQ ID NO: 40138 - protein, 345 aa, Arabidopsis thaliana
  peptide (1)..(345): Ceres Seq. ID no. 13499962
  misc_feature (2)..(314): Pfam Name: Strictosidine synthase Pfam Description: Strictosidine synthase
  misc_feature (5)..(317): Homolog of NCBI NO: 18222 NR Description: strictosidine synthase precursor [Catharanthus
  misc_feature (5)..(319): Homolog of NCBI NO: 267045 NR Description: Strictosidine synthase precursor
  misc_feature (5)..(314): Homolog of NCBI NO: 478818 NR Description: strictosidine synthase (EC 4.3.3.2) - Rauvolfia
  misc_feature (5)..(314): Homolog of NCBI NO: 135005 NR Description: Strictosidine synthase precursor
  misc_feature (1)..(314): Homolog of NCBI NO: 15221105 NR Description: strictosidine synthase family [Arabidopsis
  misc_feature (1)..(314): Homolog of NCBI NO: 1754983 NR Description: strictosidine synthase
  misc_feature (1)..(314): Homolog of NCBI NO: 15221106 NR Description: strictosidine synthase family [Arabidopsis
  misc_feature (1)..(314): Homolog of NCBI NO: 30698979 NR Description: strictosidine synthase family [Arabidopsis
  misc_feature (1)..(314): Homolog of NCBI NO: 21431845 NR Description: Strictosidine synthase 3 precursor (SS-3)
  misc_feature (1)..(345): Homolog of NCBI NO: 1754987 NR Description: strictosidine synthase
MRSFVSLISLLLLLSFSSSVLSTKKSSFQKLPVPGNRTGPEAFAFDSTGKGFLPGVTGGKILKYLPKKGYVDFAQITNSSKSSLCDGALGTTNVEKCGRPAGIAFNTKTGDLYVADAALGLHVIPRRGGLAKKIADSVGGKPFLFLDGLDVDPNTGVVYFTSFSSTFGPRDVLKAVATKDSTGKFFKYDPSKKVVTVLMDGLSGSAGCAVSSDGSFVLVGQFTKSNIKRYWIKGSKAGTSEDFTNSVSNPDNIKRIGSTGNFWVASVVNSATGPTNPSAVKVSSAGKVLQTIPLKDKFGDTLVSEVNDQRTALYRSSFWAFRRNSLSFKVNMVLVWVRIKVIESK

SEQ ID NO: 40139 - DNA, 1407 bp, Arabidopsis thaliana
  misc_feature (1)..(1407): Ceres Seq. ID no. 12389097
  misc_feature: MA Experiment ID: 108576 Result: Down-regulated in Transcription
  misc_feature: MA Experiment 108576 PARAMETER Experiment Name: At_42deg_Heat_cDNA_P Parameter: Temperature (deg C) Value: 42 vs. 22
  misc_feature: MA Experiment 108576 PARAMETER Experiment Name: At_42deg_Heat_cDNA_P Parameter: Timepoint (hr) Value: 1
  misc_feature: MA Experiment 108576 PARAMETER Experiment Name: At_42deg_Heat_cDNA_P Parameter: Tissue Value: Aerial
  misc_feature: MA Experiment ID: 108577 Result: Down-regulated in Transcription
  misc_feature: MA Experiment 108577 PARAMETER Experiment Name: At_42deg_Heat_cDNA_P Parameter: Temperature (deg C) Value: 42 vs. 22
  misc_feature: MA Experiment 108577 PARAMETER Experiment Name: At_42deg_Heat_cDNA_P Parameter: Timepoint (hr) Value: 6
  misc_feature: MA Experiment 108577 PARAMETER Experiment Name: At_42deg_Heat_cDNA_P Parameter: Tissue Value: Aerial
  misc_feature: MA Experiment ID: 108595 Result: Down-regulated in Transcription
  misc_feature: MA Experiment 108595 PARAMETER Experiment Name: At_Ler-pi_Ovule_cDNA_P Parameter: Plant Line Value: null
  misc_feature: MA Experiment ID: 20000111 Result: Down-regulated in Transcription
  misc_feature: MA Experiment 20000111 PARAMETER Experiment Name: At_42deg_Heat_cDNA_P Parameter: Temperature (deg C) Value: 42 vs. 22
  misc_feature: MA Experiment 20000111 PARAMETER Experiment Name: At_42deg_Heat_cDNA_P Parameter: Timepoint (hr) Value: 6
  misc_feature: MA Experiment 20000111 PARAMETER Experiment Name: At_42deg_Heat_cDNA_P Parameter: Tissue Value: Aerial
  misc_feature: MA Experiment ID: 20000112 Result: Down-regulated in Transcription
  misc_feature: MA Experiment 20000112 PARAMETER Experiment Name: At_42deg_Heat_cDNA_P Parameter: Temperature (deg C) Value: 42 vs. 22
  misc_feature: MA Experiment 20000112 PARAMETER Experiment Name: At_42deg_Heat_cDNA_P Parameter: Timepoint (hr) Value: 2
  misc_feature: MA Experiment 20000112 PARAMETER Experiment Name: At_42deg_Heat_cDNA_P Parameter: Tissue Value: Aerial
  misc_feature: MA Experiment ID: 20000113 Result: Down-regulated in Transcription
  misc_feature: MA Experiment 20000113 PARAMETER Experiment Name: At_42deg_Heat_cDNA_P Parameter: Temperature (deg C) Value: 42 vs. 22
  misc_feature: MA Experiment 20000113 PARAMETER Experiment Name: At_42deg_Heat_cDNA_P Parameter: Timepoint (hr) Value: 8
  misc_feature: MA Experiment 20000113 PARAMETER Experiment Name: At_42deg_Heat_cDNA_P Parameter: Tissue Value: Aerial
  misc_feature: MA Experiment ID: 20000117 Result: Down-regulated in Transcription
  misc_feature: MA Experiment 20000117 PARAMETER Experiment Name: At_100uM_ABA_Mutants_cDNA_P Parameter: Plant Line Value: Columbia
  misc_feature: MA Experiment 20000117 PARAMETER Experiment Name: At_100uM_ABA_Mutants_cDNA_P Parameter: Timepoint (hr) Value: 6
  misc_feature: MA Experiment 20000117 PARAMETER Experiment Name: At_100uM_ABA_Mutants_cDNA_P Parameter: Tissue Value: Aerial
  misc_feature: MA Experiment 20000117 PARAMETER Experiment Name: At_100uM_ABA_Mutants_cDNA_P Parameter: Treatment Value: 100uM ABA vs. No Treatment
  misc_feature: MA Experiment ID: 20000144 Result: Down-regulated in Transcription
  misc_feature: MA Experiment 20000144 PARAMETER Experiment Name: At_42deg_Heat_cDNA_P Parameter: Temperature (deg C) Value: 42 vs. 22
  misc_feature: MA Experiment 20000144 PARAMETER Experiment Name: At_42deg_Heat_cDNA_P Parameter: Timepoint (hr) Value: 1
  misc_feature: MA Experiment 20000144 PARAMETER Experiment Name: At_42deg_Heat_cDNA_P Parameter: Tissue Value: Aerial
  misc_feature: MA Experiment ID: 20000224 Result: Down-regulated in Transcription
tctttcaattactataatgttgaatttgggtttcatctactaactaagatgaagtttcttgtctctttctgtctccctctttcttaattcctctctacttttcggttaattgctcctcttcagctaactttggggctttaaagtgataggatggctcgcttcagttttccttgttttccaaattttgggggttttaatcagcacaggatgagagaggcacagctaggcggtcacactctgaggtcccatggaatgactgttgcaaggactcacatgcatgattggatcattctcgtgttacttgttattctcgagtgtgtactccttataatccacccattttatcgctttgttggtaaagatatgatgactgatctaagttacccgttaaagagtaacaccgtaccaatttggtctgtcccggtatatgcgatgctgttacctttggtaatcttcatctttatctacttccgtcgaagagatgtttatgatcttcatcacgcggtgctaggtctcttatactctgttctggtgacagcagtacttaccgatgcaataaagaatgcagttggtcgaccacgtcctgacttcttctggcgttgttttccagatggcaaagctctttatgatagccttggagatgttatatgccatggtgataaaagcgtcataagggaaggtcacaaaagctttccaagtggacacacgtcatggtctttttcgggtctcggatttctttcgctttacttatcgggaaagattcaagcatttgacggtaaaggccacgttgcaaagctatgcatagtcatactccctttgctatttgcagctcttgtcggcatttcccgtgttgatgactattggcatcattggcaagacgtctttgcaggaggcttgctaggtcttgcgatctctacaatctgttatcttcaatttttcccgccaccatatcacaccgaaggttggggaccatatgcttacttccaagtgttggaggctgcgagagtgcaaggagcagcgaatggagcagtgcaacagccgccgccccaagttaacaacggtgaagaagaagacggtgggtttatgggtttacatttggtggataatccgactatgaggagagaagaggatgtagaaactggtagaggctgagatgaagaaactctgaagctggtttggttacttgttaggacactttctcttgttcttttgattctttgttggacaactttagtagatttctctaagataactaatagagtcgtttggttttggttttggtttaaatggatgaccggttttatggttccggtattggtggttaaagtttatgtttttcaaaaaagttcactggataaatgtagctttattttcaatattttaaggattgaaatcggatttgaactt

SEQ ID NO: 40140 - protein, 333 aa, Arabidopsis thaliana
  peptide (1)..(333): Ceres Seq. ID no. 12389098
  misc_feature (127)..(267): Pfam Name: PAP2 superfamily Pfam Description: PAP2 superfamily
  misc_feature (1)..(333): Homolog of NCBI NO: 25353094 NR Description: null
  misc_feature (1)..(333): Homolog of NCBI NO: 18379166 NR Description: null
  misc_feature (29)..(299): Homolog of NCBI NO: 34910912 NR Description: putative phosphatidic acid phosphatase beta
  misc_feature (20)..(291): Homolog of NCBI NO: 38637527 NR Description: putative phosphatidic acid phosphatase beta
  misc_feature (21)..(275): Homolog of NCBI NO: 34895654 NR Description: putative phosphatidic acid phosphatase alpha
  misc_feature (20)..(332): Homolog of NCBI NO: 38637528 NR Description: unknown protein [Oryza sativa (japonica
  misc_feature (1)..(333): Homolog of NCBI NO: 15724220 NR Description: null
  misc_feature (1)..(333): Homolog of NCBI NO: 15218051 NR Description: null
  misc_feature (1)..(333): Homolog of NCBI NO: 9621903 NR Description: null
  misc_feature (1)..(333): Homolog of NCBI NO: 6957723 NR Description: null
MARFSFPCFPNFGGFNQHRMREAQLGGHTLRSHGMTVARTHMHDWIILVLLVILECVLLIIHPFYRFVGKDMMTDLSYPLKSNTVPIWSVPVYAMLLPLVIFIFIYFRRRDVYDLHHAVLGLLYSVLVTAVLTDAIKNAVGRPRPDFFWRCFPDGKALYDSLGDVICHGDKSVIREGHKSFPSGHTSWSFSGLGFLSLYLSGKIQAFDGKGHVAKLCIVILPLLFAALVGISRVDDYWHHWQDVFAGGLLGLAISTICYLQFFPPPYHTEGWGPYAYFQVLEAARVQGAANGAVQQPPPQVNNGEEEDGGFMGLHLVDNPTMRREEDVETGRG

SEQ ID NO: 40141 - protein, 314 aa, Arabidopsis thaliana; identical to SEQ ID NO: 27353
  peptide (1)..(314): Ceres Seq. ID no. 12389099
  misc_feature (108)..(248): Pfam Name: PAP2 superfamily Pfam Description: PAP2 superfamily
  misc_feature (1)..(314): Homolog of NCBI NO: 25353094 NR Description: null
  misc_feature (1)..(314): Homolog of NCBI NO: 18379166 NR Description: null
  misc_feature (10)..(280): Homolog of NCBI NO: 34910912 NR Description: putative phosphatidic acid phosphatase beta
  misc_feature (1)..(272): Homolog of NCBI NO: 38637527 NR Description: putative phosphatidic acid phosphatase beta
  misc_feature (2)..(256): Homolog of NCBI NO: 34895654 NR Description: putative phosphatidic acid phosphatase alpha
  misc_feature (1)..(313): Homolog of NCBI NO: 38637528 NR Description: unknown protein [Oryza sativa (japonica
  misc_feature (1)..(314): Homolog of NCBI NO: 15724220 NR Description: null
  misc_feature (1)..(314): Homolog of NCBI NO: 15218051 NR Description: null
  misc_feature (1)..(314): Homolog of NCBI NO: 9621903 NR Description: null
  misc_feature (1)..(314): Homolog of NCBI NO: 6957723 NR Description: null

SEQ ID NO: 40142 - protein, 299 aa, Arabidopsis thaliana; identical to SEQ ID NO: 27354
  peptide (1)..(299): Ceres Seq. ID no. 12389100
  misc_feature (93)..(233): Pfam Name: PAP2 superfamily Pfam Description: PAP2 superfamily
  misc_feature (1)..(299): Homolog of NCBI NO: 25353094 NR Description: null
  misc_feature (1)..(299): Homolog of NCBI NO: 18379166 NR Description: null
  misc_feature (1)..(265): Homolog of NCBI NO: 34910912 NR Description: putative phosphatidic acid phosphatase beta
  misc_feature (1)..(257): Homolog of NCBI NO: 38637527 NR Description: putative phosphatidic acid phosphatase beta
  misc_feature (1)..(241): Homolog of NCBI NO: 34895654 NR Description: putative phosphatidic acid phosphatase alpha
  misc_feature (1)..(298): Homolog of NCBI NO: 38637528 NR Description: unknown protein [Oryza sativa (japonica
  misc_feature (1)..(299): Homolog of NCBI NO: 15724220 NR Description: null
  misc_feature (1)..(299): Homolog of NCBI NO: 15218051 NR Description: null
  misc_feature (1)..(299): Homolog of NCBI NO: 9621903 NR Description: null
  misc_feature (1)..(299): Homolog of NCBI NO: 6957723 NR Description: null

SEQ ID NO: 40143 - DNA, 1166 bp, Arabidopsis thaliana
  misc_feature (1)..(1166): Ceres Seq. ID no. 13645869
  misc_feature: MA Experiment ID: 108595 Result: Down-regulated in Transcription
  misc_feature: MA Experiment 108595 PARAMETER Experiment Name: At_Ler-pi_Ovule_cDNA_P Parameter: Plant Line Value: null
  misc_feature: MA Experiment ID: 20000069 Result: Down-regulated in Transcription
  misc_feature: MA Experiment 20000069 PARAMETER Experiment Name: At_100uM_ABA_Mutants_cDNA_P Parameter: Plant Line Value: CS23
  misc_feature: MA Experiment 20000069 PARAMETER Experiment Name: At_100uM_ABA_Mutants_cDNA_P Parameter: Timepoint (hr) Value: 6
  misc_feature: MA Experiment 20000069 PARAMETER Experiment Name: At_100uM_ABA_Mutants_cDNA_P Parameter: Tissue Value: Aerial
  misc_feature: MA Experiment 20000069 PARAMETER Experiment Name: At_100uM_ABA_Mutants_cDNA_P Parameter: Treatment Value: 100uM ABA vs. No Treatment
  misc_feature: MA Experiment ID: 20000089 Result: Down-regulated in Transcription
  misc_feature: MA Experiment ID: 20000113 Result: Up-regulated in Transcription
  misc_feature: MA Experiment 20000113 PARAMETER Experiment Name: At_42deg_Heat_cDNA_P Parameter: Temperature (deg C) Value: 42 vs. 22
  misc_feature: MA Experiment 20000113 PARAMETER Experiment Name: At_42deg_Heat_cDNA_P Parameter: Timepoint (hr) Value: 8
  misc_feature: MA Experiment 20000113 PARAMETER Experiment Name: At_42deg_Heat_cDNA_P Parameter: Tissue Value: Aerial
  misc_feature: MA Experiment ID: 20000315 Result: Up-regulated in Transcription
  misc_feature: MA Experiment 20000315 PARAMETER Experiment Name: At_14day_Shoots-Roots_Sub_P Parameter: Age (day) Value: 14
  misc_feature: MA Experiment 20000315 PARAMETER Experiment Name: At_14day_Shoots-Roots_Sub_P Parameter: Organism Value: A. thaliana
  misc_feature: MA Experiment 20000315 PARAMETER Experiment Name: At_14day_Shoots-Roots_Sub_P Parameter: Plant Line Value: WS
  misc_feature: MA Experiment 20000315 PARAMETER Experiment Name: At_14day_Shoots-Roots_Sub_P Parameter: Tissue Value: Shoots vs. Whole Plant
acagattcgccgcagctagagagaaaacgaaactaaccggagcatgaagagacgaagatcggcgaagaaatctccggcgatggtgacggttaccgattggaaagggttagattgcggcgaagagacgagaatcgtaaggagattgatgaagttcgaagacttgcctgagtatttgaaggacaacgagtttatacacaaccattatcgatgtcaatggtctctcaaagatacttttctcagtgctttctcttggcacaacgagactctcaacatttggacgcatttaattggatttggtatatttctgtggatgacggtggtgagttgcttggagacgacggagattagtctcgccggcgtttttaacggcatggccggagtgaggatttgcctctcaagcaatcagactctgcttcatgattcgaacgtgacacatcacatctcatgtcttacctcacaaggagaagctattccaaaatggccgtggctcgtgtacttagtcggagcaatgggttgtttaatctgcagctctgtttcacacctccttgcttgtcactcaaaacgtttcaacgtcttcttctggcgtttggactacgcaggaatatcacttatgatcgtcgcttctttctttgcaccaatctactacgcattctcctgccaccctaacttccgtttactctacttatcctcgatctcgatcctcggtctcctcgctatcatcactctcctctctcccgctctctctacgccgcgttttagacctttcagagctaatcttttccttgcaatgggatcatctgctgtgatacctgctacacatgtgctttgcctttactgggatcaccctaatgtcttcatcgccctcggttacgagattgccacggctttgtcgtattttgtgggagcaacgttttatgtcagccgtgtgcctgagagatggaagcctggagcgtttgatatggcgggacatagccatcagattttccatgtgtttgtagttatgggtgctcttgctcattgtgttaccactcttctcatcattgatttttcacgggcttccccttcttgtgggttttagcaagaagatattgtttagtaagcttctgtgatcttgcgtttcgatgtatgtgatcttgatttgctttggacaatccatggctatttcc

SEQ ID NO: 40144 - protein, 344 aa, Arabidopsis thaliana
  peptide (1)..(344): Ceres Seq. ID no. 13645870
  misc_feature (68)..(330): Pfam Name: Uncharacterised protein family (Hly-III / UPF0073) Pfam Description: Uncharacterised protein family (Hly-III /
  misc_feature (68)..(330): Pfam Name: Uncharacterised protein family (Hly-III / UPF0073) Pfam Description: Uncharacterised protein family (Hly-III /
  misc_feature (29)..(101): Homolog of NCBI NO: 15233813 NR Description: expressed protein [Arabidopsis thaliana]
  misc_feature (143)..(325): Homolog of NCBI NO: 15233813 NR Description: expressed protein [Arabidopsis thaliana]
  misc_feature (29)..(101): Homolog of NCBI NO: 15235657 NR Description: expressed protein [Arabidopsis thaliana]
  misc_feature (143)..(325): Homolog of NCBI NO: 15235657 NR Description: expressed protein [Arabidopsis thaliana]
  misc_feature (115)..(344): Homolog of NCBI NO: 30688829 NR Description: expressed protein [Arabidopsis thaliana]
  misc_feature (29)..(101): Homolog of NCBI NO: 15233813 NR Description: expressed protein [Arabidopsis thaliana]
  misc_feature (29)..(101): Homolog of NCBI NO: 15235657 NR Description: expressed protein [Arabidopsis thaliana]
  misc_feature (115)..(344): Homolog of NCBI NO: 30688829 NR Description: expressed protein [Arabidopsis thaliana]
  misc_feature (1)..(344): Homolog of NCBI NO: 18400468 NR Description: expressed protein [Arabidopsis thaliana]
  misc_feature (13)..(344): Homolog of NCBI NO: 13272399 NR Description: hypothetical protein [Arabidopsis thaliana]
  misc_feature (1)..(341): Homolog of NCBI NO: 25407688 NR Description: hypothetical protein AT4g30850 [imported] -
  misc_feature (162)..(344): Homolog of NCBI NO: 25309925 NR Description: hypothetical protein At2g24150 [imported] -
  misc_feature (115)..(344): Homolog of NCBI NO: 18377749 NR Description: unknown protein [Arabidopsis thaliana]
  misc_feature (143)..(325): Homolog of NCBI NO: 15235657 NR Description: expressed protein [Arabidopsis thaliana]
  misc_feature (143)..(325): Homolog of NCBI NO: 15233813 NR Description: expressed protein [Arabidopsis thaliana]
  misc_feature (115)..(344): Homolog of NCBI NO: 18377749 NR Description: unknown protein [Arabidopsis thaliana]
  misc_feature (162)..(344): Homolog of NCBI NO: 25309925 NR Description: hypothetical protein At2g24150 [imported] -
  misc_feature (1)..(341): Homolog of NCBI NO: 25407688 NR Description: hypothetical protein AT4g30850 [imported] -
  misc_feature (13)..(344): Homolog of NCBI NO: 13272399 NR Description: hypothetical protein [Arabidopsis thaliana]
  misc_feature (1)..(344): Homolog of NCBI NO: 18400468 NR Description: expressed protein [Arabidopsis thaliana]
MKRRRSAKKSPAMVTVTDWKGLDCGEETRIVRRLMKFEDLPEYLKDNEFIHNHYRCQWSLKDTFLSAFSWHNETLNIWTHLIGFGIFLWMTVVSCLETTEISLAGVFNGMAGVRICLSSNQTLLHDSNVTHHISCLTSQGEAIPKWPWLVYLVGAMGCLICSSVSHLLACHSKRFNVFFWRLDYAGISLMIVASFFAPIYYAFSCHPNFRLLYLSSISILGLLAIITLLSPALSTPRFRPFRANLFLAMGSSAVIPATHVLCLYWDHPNVFIALGYEIATALSYFVGATFYVSRVPERWKPGAFDMAGHSHQIFHVFVVMGALAHCVTTLLIIDFSRASPSCGF

SEQ ID NO: 40145 - protein, 332 aa, Arabidopsis thaliana
  peptide (1)..(332): Ceres Seq. ID no. 13645871
  misc_feature (56)..(318): Pfam Name: Uncharacterised protein family (Hly-III / UPF0073) Pfam Description: Uncharacterised protein family (Hly-III /
  misc_feature (56)..(318): Pfam Name: Uncharacterised protein family (Hly-III / UPF0073) Pfam Description: Uncharacterised protein family (Hly-III /
  misc_feature (17)..(89): Homolog of NCBI NO: 15233813 NR Description: expressed protein [Arabidopsis thaliana]
  misc_feature (131)..(313): Homolog of NCBI NO: 15233813 NR Description: expressed protein [Arabidopsis thaliana]
  misc_feature (17)..(89): Homolog of NCBI NO: 15235657 NR Description: expressed protein [Arabidopsis thaliana]
  misc_feature (131)..(313): Homolog of NCBI NO: 15235657 NR Description: expressed protein [Arabidopsis thaliana]
  misc_feature (103)..(332): Homolog of NCBI NO: 30688829 NR Description: expressed protein [Arabidopsis thaliana]
  misc_feature (17)..(89): Homolog of NCBI NO: 15233813 NR Description: expressed protein [Arabidopsis thaliana]
  misc_feature (17)..(89): Homolog of NCBI NO: 15235657 NR Description: expressed protein [Arabidopsis thaliana]
  misc_feature (103)..(332): Homolog of NCBI NO: 30688829 NR Description: expressed protein [Arabidopsis thaliana]
  misc_feature (1)..(332): Homolog of NCBI NO: 18400468 NR Description: expressed protein [Arabidopsis thaliana]
  misc_feature (1)..(332): Homolog of NCBI NO: 13272399 NR Description: hypothetical protein [Arabidopsis thaliana]
  misc_feature (1)..(329): Homolog of NCBI NO: 25407688 NR Description: hypothetical protein AT4g30850 [imported] -
  misc_feature (150)..(332): Homolog of NCBI NO: 25309925 NR Description: hypothetical protein At2g24150 [imported] -
  misc_feature (103)..(332): Homolog of NCBI NO: 18377749 NR Description: unknown protein [Arabidopsis thaliana]
  misc_feature (131)..(313): Homolog of NCBI NO: 15235657 NR Description: expressed protein [Arabidopsis thaliana]
  misc_feature (131)..(313): Homolog of NCBI NO: 15233813 NR Description: expressed protein [Arabidopsis thaliana]
  misc_feature (103)..(332): Homolog of NCBI NO: 18377749 NR Description: unknown protein [Arabidopsis thaliana]
  misc_feature (150)..(332): Homolog of NCBI NO: 25309925 NR Description: hypothetical protein At2g24150 [imported] -
  misc_feature (1)..(329): Homolog of NCBI NO: 25407688 NR Description: hypothetical protein AT4g30850 [imported] -
  misc_feature (1)..(332): Homolog of NCBI NO: 13272399 NR Description: hypothetical protein [Arabidopsis thaliana]
  misc_feature (1)..(332): Homolog of NCBI NO: 18400468 NR Description: expressed protein [Arabidopsis thaliana]
MVTVTDWKGLDCGEETRIVRRLMKFEDLPEYLKDNEFIHNHYRCQWSLKDTFLSAFSWHNETLNIWTHLIGFGIFLWMTVVSCLETTEISLAGVFNGMAGVRICLSSNQTLLHDSNVTHHISCLTSQGEAIPKWPWLVYLVGAMGCLICSSVSHLLACHSKRFNVFFWRLDYAGISLMIVASFFAPIYYAFSCHPNFRLLYLSSISILGLLAIITLLSPALSTPRFRPFRANLFLAMGSSAVIPATHVLCLYWDHPNVFIALGYEIATALSYFVGATFYVSRVPERWKPGAFDMAGHSHQIFHVFVVMGALAHCVTTLLIIDFSRASPSCGF

SEQ ID NO: 40146 - protein, 310 aa, Arabidopsis thaliana
  peptide (1)..(310): Ceres Seq. ID no. 13645872
  misc_feature (34)..(296): Pfam Name: Uncharacterised protein family (Hly-III / UPF0073) Pfam Description: Uncharacterised protein family (Hly-III /
  misc_feature (34)..(296): Pfam Name: Uncharacterised protein family (Hly-III / UPF0073) Pfam Description: Uncharacterised protein family (Hly-III /
  misc_feature (1)..(67): Homolog of NCBI NO: 15233813 NR Description: expressed protein [Arabidopsis thaliana]
  misc_feature (109)..(291): Homolog of NCBI NO: 15233813 NR Description: expressed protein [Arabidopsis thaliana]
  misc_feature (1)..(67): Homolog of NCBI NO: 15235657 NR Description: expressed protein [Arabidopsis thaliana]
  misc_feature (109)..(291): Homolog of NCBI NO: 15235657 NR Description: expressed protein [Arabidopsis thaliana]
  misc_feature (81)..(310): Homolog of NCBI NO: 30688829 NR Description: expressed protein [Arabidopsis thaliana]
  misc_feature (1)..(67): Homolog of NCBI NO: 15233813 NR Description: expressed protein [Arabidopsis thaliana]
  misc_feature (1)..(67): Homolog of NCBI NO: 15235657 NR Description: expressed protein [Arabidopsis thaliana]
  misc_feature (81)..(310): Homolog of NCBI NO: 30688829 NR Description: expressed protein [Arabidopsis thaliana]
  misc_feature (1)..(310): Homolog of NCBI NO: 18400468 NR Description: expressed protein [Arabidopsis thaliana]
  misc_feature (1)..(310): Homolog of NCBI NO: 13272399 NR Description: hypothetical protein [Arabidopsis thaliana]
  misc_feature (1)..(307): Homolog of NCBI NO: 25407688 NR Description: hypothetical protein AT4g30850 [imported] -
  misc_feature (128)..(310): Homolog of NCBI NO: 25309925 NR Description: hypothetical protein At2g24150 [imported] -
  misc_feature (81)..(310): Homolog of NCBI NO: 18377749 NR Description: unknown protein [Arabidopsis thaliana]
  misc_feature (109)..(291): Homolog of NCBI NO: 15235657 NR Description: expressed protein [Arabidopsis thaliana]
  misc_feature (109)..(291): Homolog of NCBI NO: 15233813 NR Description: expressed protein [Arabidopsis thaliana]
  misc_feature (81)..(310): Homolog of NCBI NO: 18377749 NR Description: unknown protein [Arabidopsis thaliana]
  misc_feature (128)..(310): Homolog of NCBI NO: 25309925 NR Description: hypothetical protein At2g24150 [imported] -
  misc_feature (1)..(307): Homolog of NCBI NO: 25407688 NR Description: hypothetical protein AT4g30850 [imported] -
  misc_feature (1)..(310): Homolog of NCBI NO: 13272399 NR Description: hypothetical protein [Arabidopsis thaliana]
  misc_feature (1)..(310): Homolog of NCBI NO: 18400468 NR Description: expressed protein [Arabidopsis thaliana]
MKFEDLPEYLKDNEFIHNHYRCQWSLKDTFLSAFSWHNETLNIWTHLIGFGIFLWMTVVSCLETTEISLAGVFNGMAGVRICLSSNQTLLHDSNVTHHISCLTSQGEAIPKWPWLVYLVGAMGCLICSSVSHLLACHSKRFNVFFWRLDYAGISLMIVASFFAPIYYAFSCHPNFRLLYLSSISILGLLAIITLLSPALSTPRFRPFRANLFLAMGSSAVIPATHVLCLYWDHPNVFIALGYEIATALSYFVGATFYVSRVPERWKPGAFDMAGHSHQIFHVFVVMGALAHCVTTLLIIDFSRASPSCGF

SEQ ID NO: 40147 - DNA, 1407 bp, Arabidopsis thaliana
  misc_feature (1)..(1407): Ceres Seq. ID no. 13488586
  misc_feature: MA Experiment ID: 108434 Result: Up-regulated in Transcription
  misc_feature: MA Experiment 108434 PARAMETER Experiment Name: At_Root_Tips_cDNA_P Parameter: Tissue Value: Root Tips
  misc_feature: MA Experiment ID: 108461 Result: Up-regulated in Transcription
  misc_feature: MA Experiment 108461 PARAMETER Experiment Name: At_Germinating_Seeds_cDNA_P Parameter: Age (day) Value: 1 vs. 0
  misc_feature: MA Experiment 108461 PARAMETER Experiment Name: At_Germinating_Seeds_cDNA_P Parameter: Tissue Value: Germinating Seeds
  misc_feature: MA Experiment ID: 20000179 Result: Up-regulated in Transcription
  misc_feature: MA Experiment 20000179 PARAMETER Experiment Name: At_Germinating_Seeds_P Parameter: Age (hr) Value: 6 vs. 0
  misc_feature: MA Experiment 20000179 PARAMETER Experiment Name: At_Germinating_Seeds_P Parameter: Tissue Value: Germinating Seeds
  misc_feature: MA Experiment ID: 20000180 Result: Up-regulated in Transcription
  misc_feature: MA Experiment 20000180 PARAMETER Experiment Name: At_Germinating_Seeds_P Parameter: Age (hr) Value: 24 vs. 0
  misc_feature: MA Experiment 20000180 PARAMETER Experiment Name: At_Germinating_Seeds_P Parameter: Tissue Value: Germinating Seeds
  misc_feature: MA Experiment ID: 20000184 Result: Down-regulated in Transcription
  misc_feature: MA Experiment 20000184 PARAMETER Experiment Name: At_Shoots__P Parameter: Age (day) Value: 7
  misc_feature: MA Experiment 20000184 PARAMETER Experiment Name: At_Shoots__P Parameter: Tissue Value: Shoots vs. Whole Plant
  misc_feature: MA Experiment ID: 20000185 Result: Up-regulated in Transcription
  misc_feature: MA Experiment 20000185 PARAMETER Experiment Name: At_Roots__P Parameter: Age (day) Value: 7 vs. 21
  misc_feature: MA Experiment 20000185 PARAMETER Experiment Name: At_Roots__P Parameter: Organism Value: A. thaliana
  misc_feature: MA Experiment 20000185 PARAMETER Experiment Name: At_Roots__P Parameter: Tissue Value: Roots vs. Whole Plant
  misc_feature: MA Experiment ID: 20000224 Result: Up-regulated in Transcription
  misc_feature: MA Experiment ID: 20000227 Result: Up-regulated in Transcription
  misc_feature: MA Experiment 20000227 PARAMETER Experiment Name: At_Root-Tips-vs-Tops_P Parameter: Tissue Value: Root Tips vs. Root Tops
  misc_feature: MA Experiment ID: 20000234 Result: Up-regulated in Transcription
  misc_feature: MA Experiment 20000234 PARAMETER Experiment Name: At_Siliques_P Parameter: Age (day) Value: 21
  misc_feature: MA Experiment 20000234 PARAMETER Experiment Name: At_Siliques_P Parameter: Organism Value: A. thaliana
  misc_feature: MA Experiment 20000234 PARAMETER Experiment Name: At_Siliques_P Parameter: Plant Line Value: WS
  misc_feature: MA Experiment 20000234 PARAMETER Experiment Name: At_Siliques_P Parameter: Tissue Value: Less Than 5mm Siliques vs. Whole Plant
  misc_feature: MA Experiment ID: 20000235 Result: Up-regulated in Transcription
  misc_feature: MA Experiment 20000235 PARAMETER Experiment Name: At_Siliques_P Parameter: Age (day) Value: 21
  misc_feature: MA Experiment 20000235 PARAMETER Experiment Name: At_Siliques_P Parameter: Organism Value: A. thaliana
  misc_feature: MA Experiment 20000235 PARAMETER Experiment Name: At_Siliques_P Parameter: Plant Line Value: WS
  misc_feature: MA Experiment 20000235 PARAMETER Experiment Name: At_Siliques_P Parameter: Tissue Value: 5-10mm Siliques vs. Whole Plant
  misc_feature: MA Experiment ID: 20000264 Result: Up-regulated in Transcription
  misc_feature: MA Experiment 20000264 PARAMETER Experiment Name: At_Open_Flower_P Parameter: Age (day) Value: 21
  misc_feature: MA Experiment 20000264 PARAMETER Experiment Name: At_Open_Flower_P Parameter: Plant Line Value: WS
  misc_feature: MA Experiment 20000264 PARAMETER Experiment Name: At_Open_Flower_P Parameter: Tissue Value: Open Flower vs. Whole Plant
  misc_feature: MA Experiment ID: 20000265 Result: Up-regulated in Transcription
  misc_feature: MA Experiment 20000265 PARAMETER Experiment Name: At_Open_Flower_P Parameter: Age (day) Value: 21
  misc_feature: MA Experiment 20000265 PARAMETER Experiment Name: At_Open_Flower_P Parameter: Plant Line Value: WS
  misc_feature: MA Experiment 20000265 PARAMETER Experiment Name: At_Open_Flower_P Parameter: Tissue Value: Closed Flower vs. Whole Plant
  misc_feature: MA Experiment ID: 20000286 Result: Up-regulated in Transcription
  misc_feature: MA Experiment 20000286 PARAMETER Experiment Name: At_Open_Flower_P Parameter: Age (day) Value: 21
  misc_feature: MA Experiment 20000286 PARAMETER Experiment Name: At_Open_Flower_P Parameter: Plant Line Value: WS
  misc_feature: MA Experiment 20000286 PARAMETER Experiment Name: At_Open_Flower_P Parameter: Tissue Value: Half Open vs. Whole Plant
  misc_feature: MA Experiment ID: 20001560 Result: Up-regulated in Transcription
  misc_feature: MA Experiment 20001560 PARAMETER Experiment Name: At_Drought_Soil_Dry_P Parameter: Age (day) Value: 28
  misc_feature: MA Experiment 20001560 PARAMETER Experiment Name: At_Drought_Soil_Dry_P Parameter: Organism Value: A. thaliana
  misc_feature: MA Experiment 20001560 PARAMETER Experiment Name: At_Drought_Soil_Dry_P Parameter: Plant Line Value: WS
  misc_feature: MA Experiment 20001560 PARAMETER Experiment Name: At_Drought_Soil_Dry_P Parameter: Post Timepoint (hr) Value: None
  misc_feature: MA Experiment 20001560 PARAMETER Experiment Name: At_Drought_Soil_Dry_P Parameter: Post-Treatment Value: None
  misc_feature: MA Experiment 20001560 PARAMETER Experiment Name: At_Drought_Soil_Dry_P Parameter: Timepoint (day) Value: 14
  misc_feature: MA Experiment 20001560 PARAMETER Experiment Name: At_Drought_Soil_Dry_P Parameter: Treatment Value: Drought vs. No Drought
  misc_feature: MA Experiment ID: 20001904 Result: Up-regulated in Transcription
  misc_feature: MA Experiment 20001904 PARAMETER Experiment Name: At_Drought_Reproduction_P Parameter: Age (day) Value: 37
  misc_feature: MA Experiment 20001904 PARAMETER Experiment Name: At_Drought_Reproduction_P Parameter: Organism Value: A. thaliana
  misc_feature: MA Experiment 20001904 PARAMETER Experiment Name: At_Drought_Reproduction_P Parameter: Plant Line Value: WS
  misc_feature: MA Experiment 20001904 PARAMETER Experiment Name: At_Drought_Reproduction_P Parameter: Timepoint (day) Value: 7
  misc_feature: MA Experiment 20001904 PARAMETER Experiment Name: At_Drought_Reproduction_P Parameter: Tissue Value: Rosettes
  misc_feature: MA Experiment 20001904 PARAMETER Experiment Name: At_Drought_Reproduction_P Parameter: Treatment Value: Drought vs. No Drought
  misc_feature: MA Experiment ID: 20001905 Result: Up-regulated in Transcription
  misc_feature: MA Experiment 20001905 PARAMETER Experiment Name: At_Drought_Reproduction_P Parameter: Age (day) Value: 40
  misc_feature: MA Experiment 20001905 PARAMETER Experiment Name: At_Drought_Reproduction_P Parameter: Organism Value: A. thaliana
  misc_feature: MA Experiment 20001905 PARAMETER Experiment Name: At_Drought_Reproduction_P Parameter: Plant Line Value: WS
  misc_feature: MA Experiment 20001905 PARAMETER Experiment Name: At_Drought_Reproduction_P Parameter: Timepoint (day) Value: 10
  misc_feature: MA Experiment 20001905 PARAMETER Experiment Name: At_Drought_Reproduction_P Parameter: Tissue Value: Rosettes
  misc_feature: MA Experiment 20001905 PARAMETER Experiment Name: At_Drought_Reproduction_P Parameter: Treatment Value: Drought vs. No Drought
gcactttttcttctttgtctatctctctctctctctatctctaacctttgcttctccgtccttttctctgcttcagttttctcttcctaacaagcaaaacccgaaacagatcgaaccatttttttcctttagaaattaaacaacaaaaatcatttttttgtttgttttcggtttcacctaaccaaattgattctcttacctttttatatcacattgcatctgggtttccattagaaacaacaacaaacgaaaaaagaggcttctttcgtttcagagaggggttcaaaaatggcgacgaacattgggatgatggatagtgcttactttgttggaaggaatgagattctgagttggatcaatgaccgccttcatctcaatctctctcgtatcgaagaggctgcatcaggtgctgtgcaatgtcaaatgttggacatgacttttccaggagttgtgccaatgcacaaggttaactttgaagcaaagaacgagtacgaaatgatacaaaactacaaggtcatgcaagaagtcttcaccaaattgaaaattacaaagccattggaagtcaacaggcttgtcaaaggccgaccactagacaatttggagtttcttcaatggttgaaacgtttttgcgattcaataaatggcggcattatgaacgagaattataatccagtagaacgaagatcaagaggtgggagagagaaaagcgtaaagggatctagtaagatctcaaagtcattgcaaacaaacaatatgcatcatcctcctgtggctacttccaacaaaccagctggtcccaagcaagcaaaatcacatggaattggaggtgggagcaactcatcagccgaagtgcaagctctgtcaaaggaggtagaagatctcaaggtctcggttgatctcttggaaaaagaaagagatttttacttctctaagctccgggatatagagatactatgtcagactcctgaactcgatgatcttccgatagtggtagcggttaagaagatattatacgcaaccgatgcaaatgaatctgtgctagaagaagctcaagagtgcctaaaccagtctctagggcttgagggttatgaagaagaaggaaaagaggaggaagaagaagaagaagaagaagaagaagaagcagcagctgctgcagagacccaaacttaaagttgtgacaaataaaagtagagggcaacaatgatccattgccttgtcttagaagatagaatcacttggagaggatgtttgcacaatattcaatttaccctaaccggttttttggttttacagtgaactgaaccgaatttattccttcctaaacttgaaagattatctgatggattttcattgtatcacaaaaatgattttattaaatgttccccaataagtaaaattaaaaattac

SEQ ID NO: 40148 - protein, 293 aa, Arabidopsis thaliana
  peptide (1)..(293): Ceres Seq. ID no. 13488587
  misc_feature (204)..(251): Pfam Name: EB1-like C-terminal motif Pfam Description: EB1-like C-terminal motif
  misc_feature (1)..(245): Homolog of NCBI NO: 12751131 NR Description: EBF3-S [Homo sapiens]
  misc_feature (14)..(253): Homolog of NCBI NO: 7106301 NR Description: microtubule-associated protein, RP/EB family,
  misc_feature (1)..(253): Homolog of NCBI NO: 30851559 NR Description: Unknown (protein for IMAGE:5715929) [Mus musculus]
  misc_feature (3)..(270): Homolog of NCBI NO: 29124955 NR Description: microtubule-associated protein EB1 [Chlamydomonas
  misc_feature (1)..(281): Homolog of NCBI NO: 15240262 NR Description: expressed protein [Arabidopsis thaliana]
  misc_feature (2)..(285): Homolog of NCBI NO: 37535740 NR Description: putative microtubule-associated protein
  misc_feature (2)..(261): Homolog of NCBI NO: 38344911 NR Description: OSJNBb0079B02.14 [Oryza sativa (japonica
  misc_feature (1)..(182): Homolog of NCBI NO: 26450360 NR Description: putative microtubule-associated protein EB1
  misc_feature (1)..(282): Homolog of NCBI NO: 32815913 NR Description: At3g47690 [Arabidopsis thaliana]
  misc_feature (1)..(293): Homolog of NCBI NO: 15241860 NR Description: microtubule-associated protein EB1-related
MATNIGMMDSAYFVGRNEILSWINDRLHLNLSRIEEAASGAVQCQMLDMTFPGVVPMHKVNFEAKNEYEMIQNYKVMQEVFTKLKITKPLEVNRLVKGRPLDNLEFLQWLKRFCDSINGGIMNENYNPVERRSRGGREKSVKGSSKISKSLQTNNMHHPPVATSNKPAGPKQAKSHGIGGGSNSSAEVQALSKEVEDLKVSVDLLEKERDFYFSKLRDIEILCQTPELDDLPIVVAVKKILYATDANESVLEEAQECLNQSLGLEGYEEEGKEEEEEEEEEEEEAAAAAETQT

SEQ ID NO: 40149 - protein, 287 aa, Arabidopsis thaliana
  peptide (1)..(287): Ceres Seq. ID no. 13488588
  misc_feature (198)..(245): Pfam Name: EB1-like C-terminal motif Pfam Description: EB1-like C-terminal motif
  misc_feature (1)..(239): Homolog of NCBI NO: 12751131 NR Description: EBF3-S [Homo sapiens]
  misc_feature (8)..(247): Homolog of NCBI NO: 7106301 NR Description: microtubule-associated protein, RP/EB family,
  misc_feature (1)..(247): Homolog of NCBI NO: 30851559 NR Description: Unknown (protein for IMAGE:5715929) [Mus musculus]
  misc_feature (1)..(264): Homolog of NCBI NO: 29124955 NR Description: microtubule-associated protein EB1 [Chlamydomonas
  misc_feature (1)..(275): Homolog of NCBI NO: 15240262 NR Description: expressed protein [Arabidopsis thaliana]
  misc_feature (1)..(279): Homolog of NCBI NO: 37535740 NR Description: putative microtubule-associated protein
  misc_feature (1)..(255): Homolog of NCBI NO: 38344911 NR Description: OSJNBb0079B02.14 [Oryza sativa (japonica
  misc_feature (1)..(176): Homolog of NCBI NO: 26450360 NR Description: putative microtubule-associated protein EB1
  misc_feature (1)..(276): Homolog of NCBI NO: 32815913 NR Description: At3g47690 [Arabidopsis thaliana]
  misc_feature (1)..(287): Homolog of NCBI NO: 15241860 NR Description: microtubule-associated protein EB1-related
MMDSAYFVGRNEILSWINDRLHLNLSRIEEAASGAVQCQMLDMTFPGVVPMHKVNFEAKNEYEMIQNYKVMQEVFTKLKITKPLEVNRLVKGRPLDNLEFLQWLKRFCDSINGGIMNENYNPVERRSRGGREKSVKGSSKISKSLQTNNMHHPPVATSNKPAGPKQAKSHGIGGGSNSSAEVQALSKEVEDLKVSVDLLEKERDFYFSKLRDIEILCQTPELDDLPIVVAVKKILYATDANESVLEEAQECLNQSLGLEGYEEEGKEEEEEEEEEEEEAAAAAETQT

SEQ ID NO: 40150 - protein, 286 aa, Arabidopsis thaliana
  peptide (1)..(286): Ceres Seq. ID no. 13488589
  misc_feature (197)..(244): Pfam Name: EB1-like C-terminal motif Pfam Description: EB1-like C-terminal motif
  misc_feature (1)..(238): Homolog of NCBI NO: 12751131 NR Description: EBF3-S [Homo sapiens]
  misc_feature (7)..(246): Homolog of NCBI NO: 7106301 NR Description: microtubule-associated protein, RP/EB family,
  misc_feature (1)..(246): Homolog of NCBI NO: 30851559 NR Description: Unknown (protein for IMAGE:5715929) [Mus musculus]
  misc_feature (1)..(263): Homolog of NCBI NO: 29124955 NR Description: microtubule-associated protein EB1 [Chlamydomonas
  misc_feature (1)..(274): Homolog of NCBI NO: 15240262 NR Description: expressed protein [Arabidopsis thaliana]
  misc_feature (1)..(278): Homolog of NCBI NO: 37535740 NR Description: putative microtubule-associated protein
  misc_feature (1)..(254): Homolog of NCBI NO: 38344911 NR Description: OSJNBb0079B02.14 [Oryza sativa (japonica
  misc_feature (1)..(175): Homolog of NCBI NO: 26450360 NR Description: putative microtubule-associated protein EB1
  misc_feature (1)..(275): Homolog of NCBI NO: 32815913 NR Description: At3g47690 [Arabidopsis thaliana]
  misc_feature (1)..(286): Homolog of NCBI NO: 15241860 NR Description: microtubule-associated protein EB1-related
MDSAYFVGRNEILSWINDRLHLNLSRIEEAASGAVQCQMLDMTFPGVVPMHKVNFEAKNEYEMIQNYKVMQEVFTKLKITKPLEVNRLVKGRPLDNLEFLQWLKRFCDSINGGIMNENYNPVERRSRGGREKSVKGSSKISKSLQTNNMHHPPVATSNKPAGPKQAKSHGIGGGSNSSAEVQALSKEVEDLKVSVDLLEKERDFYFSKLRDIEILCQTPELDDLPIVVAVKKILYATDANESVLEEAQECLNQSLGLEGYEEEGKEEEEEEEEEEEEAAAAAETQT

SEQ ID NO: 40151 - DNA, 1181 bp, Arabidopsis thaliana
  misc_feature (1)..(1181): Ceres Seq. ID no. 12395326
  misc_feature: MA Experiment ID: 108461 Result: Up-regulated in Transcription
  misc_feature: MA Experiment 108461 PARAMETER Experiment Name: At_Germinating_Seeds_cDNA_P Parameter: Age (day) Value: 1 vs. 0
  misc_feature: MA Experiment 108461 PARAMETER Experiment Name: At_Germinating_Seeds_cDNA_P Parameter: Tissue Value: Germinating Seeds
  misc_feature: MA Experiment ID: 108462 Result: Up-regulated in Transcription
  misc_feature: MA Experiment 108462 PARAMETER Experiment Name: At_Germinating_Seeds_cDNA_P Parameter: Age (day) Value: 2 vs. 0
  misc_feature: MA Experiment 108462 PARAMETER Experiment Name: At_Germinating_Seeds_cDNA_P Parameter: Tissue Value: Germinating Seeds
  misc_feature: MA Experiment ID: 108463 Result: Up-regulated in Transcription
  misc_feature: MA Experiment 108463 PARAMETER Experiment Name: At_Germinating_Seeds_cDNA_P Parameter: Age (day) Value: 3 vs. 0
  misc_feature: MA Experiment 108463 PARAMETER Experiment Name: At_Germinating_Seeds_cDNA_P Parameter: Tissue Value: Germinating Seeds
  misc_feature: MA Experiment ID: 108464 Result: Up-regulated in Transcription
  misc_feature: MA Experiment 108464 PARAMETER Experiment Name: At_Germinating_Seeds_cDNA_P Parameter: Age (day) Value: 4 vs. 0
  misc_feature: MA Experiment 108464 PARAMETER Experiment Name: At_Germinating_Seeds_cDNA_P Parameter: Tissue Value: Germinating Seeds
  misc_feature: MA Experiment ID: 20000069 Result: Down-regulated in Transcription
  misc_feature: MA Experiment 20000069 PARAMETER Experiment Name: At_100uM_ABA_Mutants_cDNA_P Parameter: Plant Line Value: CS23
  misc_feature: MA Experiment 20000069 PARAMETER Experiment Name: At_100uM_ABA_Mutants_cDNA_P Parameter: Timepoint (hr) Value: 6
  misc_feature: MA Experiment 20000069 PARAMETER Experiment Name: At_100uM_ABA_Mutants_cDNA_P Parameter: Tissue Value: Aerial
  misc_feature: MA Experiment 20000069 PARAMETER Experiment Name: At_100uM_ABA_Mutants_cDNA_P Parameter: Treatment Value: 100uM ABA vs. No Treatment
  misc_feature: MA Experiment ID: 20000087 Result: Down-regulated in Transcription
  misc_feature: MA Experiment 20000087 PARAMETER Experiment Name: At_100uM_ABA_Mutants_cDNA_P Parameter: Plant Line Value: WS
  misc_feature: MA Experiment 20000087 PARAMETER Experiment Name: At_100uM_ABA_Mutants_cDNA_P Parameter: Timepoint (hr) Value: 6
  misc_feature: MA Experiment 20000087 PARAMETER Experiment Name: At_100uM_ABA_Mutants_cDNA_P Parameter: Tissue Value: Aerial
  misc_feature: MA Experiment 20000087 PARAMETER Experiment Name: At_100uM_ABA_Mutants_cDNA_P Parameter: Treatment Value: 100uM ABA vs. No Treatment
  misc_feature: MA Experiment ID: 20000180 Result: Up-regulated in Transcription
  misc_feature: MA Experiment 20000180 PARAMETER Experiment Name: At_Germinating_Seeds_P Parameter: Age (hr) Value: 24 vs. 0
  misc_feature: MA Experiment 20000180 PARAMETER Experiment Name: At_Germinating_Seeds_P Parameter: Tissue Value: Germinating Seeds
  misc_feature: MA Experiment ID: 20000224 Result: Up-regulated in Transcription
  misc_feature: MA Experiment ID: 20000234 Result: Up-regulated in Transcription
  misc_feature: MA Experiment 20000234 PARAMETER Experiment Name: At_Siliques_P Parameter: Age (day) Value: 21
  misc_feature: MA Experiment 20000234 PARAMETER Experiment Name: At_Siliques_P Parameter: Organism Value: A. thaliana
  misc_feature: MA Experiment 20000234 PARAMETER Experiment Name: At_Siliques_P Parameter: Plant Line Value: WS
  misc_feature: MA Experiment 20000234 PARAMETER Experiment Name: At_Siliques_P Parameter: Tissue Value: Less Than 5mm Siliques vs. Whole Plant
  misc_feature: MA Experiment ID: 20000235 Result: Up-regulated in Transcription
  misc_feature: MA Experiment 20000235 PARAMETER Experiment Name: At_Siliques_P Parameter: Age (day) Value: 21
  misc_feature: MA Experiment 20000235 PARAMETER Experiment Name: At_Siliques_P Parameter: Organism Value: A. thaliana
  misc_feature: MA Experiment 20000235 PARAMETER Experiment Name: At_Siliques_P Parameter: Plant Line Value: WS
  misc_feature: MA Experiment 20000235 PARAMETER Experiment Name: At_Siliques_P Parameter: Tissue Value: 5-10mm Siliques vs. Whole Plant
  misc_feature: MA Experiment ID: 20000527 Result: Up-regulated in Transcription
  misc_feature: MA Experiment 20000527 PARAMETER Experiment Name: At_10percent_PEG_P Parameter: Age (day) Value: 20
  misc_feature: MA Experiment 20000527 PARAMETER Experiment Name: At_10percent_PEG_P Parameter: Organism Value: A. thaliana
  misc_feature: MA Experiment 20000527 PARAMETER Experiment Name: At_10percent_PEG_P Parameter: Plant Line Value: WS
  misc_feature: MA Experiment 20000527 PARAMETER Experiment Name: At_10percent_PEG_P Parameter: Timepoint (day) Value: 20
  misc_feature: MA Experiment 20000527 PARAMETER Experiment Name: At_10percent_PEG_P Parameter: Tissue Value: Whole Plant
  misc_feature: MA Experiment 20000527 PARAMETER Experiment Name: At_10percent_PEG_P Parameter: Treatment Value: 10percent PEG vs. No Treatment
tttttacaaatcagacaaaacccaacaattaatgaaacaatgtcaaaaacggctaattttctcagcctgagatccaatcctctacctccgattttctcctccaccggaaactctcctttcctccgagcttcctcggctctgaatcttccgacaactgcttcgaaacctttccacagttggattcgtgcttcttcacgtcgccggttggttctcggtggttttggcggcgcttctttgtggatgaacaacaatatgtccggtaaatttggcggtaaatctttcattgcttccgctaggcagaccaatccttctcccgtcgaacaggcgttgaataaggtggattggccagagactttccctttcaaagaagaagatttccagagatacgatgagtcgtctgattcaacattctacgaagctccaaggtttgtgacacacattgatgatccagctatagctgcattgacaaagtattactccaaggttttgcctcagagcgatactccaggagtgagcatactcgatatgtgtagcagttgggtcagtcattatccaccggggtataggcaagaacgaatagttggaatgggtatgaatgaagaagagcttaagcgaaatccggttctcaccgagtacatagtccaagacttaaatctcaattcaaatctgccttttgaagacaattctttccaagttataaccaatgtggtaagtgtggattatcttacaaagccgcttgaagtgttcaaggaaatgaacagaatccttaagcccggaggactcgctctaatgagcttctcgaaccgttgcttctttactaaagcaatctcgatatggacatcaactggcgacgcagatcatgctctcattgttggatcatactttcactacgccggaggatttgaagctcctcaggccgttgatatatctccaaatccagggcgttcagatcctatgtacgttgtttactctagaaaactccccatggtttaaacctgagatccaagcacatcatgtatacacatagtagagaccgaggaaactaattcttcgattaagacaagggaacttctgaaatcttgtttataaagaatgtgccactctctcaacactaataacaatgtcatataaagaatctgaagccagattcgcaaatttgacgataatacttttcttcgagg

SEQ ID NO: 40152 - protein, 330 aa, Arabidopsis thaliana
  peptide (1)..(330): Ceres Seq. ID no. 12395327
  misc_feature (128)..(326): Homolog of NCBI NO: 37519856 NR Description: hypothetical protein glr0287 [Gloeobacter
  misc_feature (128)..(307): Homolog of NCBI NO: 23129867 NR Description: hypothetical protein [Nostoc punctiforme]
  misc_feature (100)..(311): Homolog of NCBI NO: 15232158 NR Description: hypothetical protein; protein id: At3g01660.1
  misc_feature (128)..(326): Homolog of NCBI NO: 22298320 NR Description: ORF_ID:tlr0778~hypothetical protein
  misc_feature (122)..(326): Homolog of NCBI NO: 17232182 NR Description: hypothetical protein [Nostoc sp. PCC 7120]
  misc_feature (124)..(327): Homolog of NCBI NO: 22970815 NR Description: hypothetical protein [Chloroflexus aurantiacus]
  misc_feature (64)..(326): Homolog of NCBI NO: 34910520 NR Description: B1142C05.17 [Oryza sativa (japonica
  misc_feature (81)..(330): Homolog of NCBI NO: 14030675 NR Description: AT4g29590/T16L4_100 [Arabidopsis thaliana]
  misc_feature (14)..(330): Homolog of NCBI NO: 21536833 NR Description: unknown [Arabidopsis thaliana]
  misc_feature (14)..(330): Homolog of NCBI NO: 15233624 NR Description: putative protein; protein id: At4g29590.1
FLQIRQNPTINETMSKTANFLSLRSNPLPPIFSSTGNSPFLRASSALNLPTTASKPFHSWIRASSRRRLVLGGFGGASLWMNNNMSGKFGGKSFIASARQTNPSPVEQALNKVDWPETFPFKEEDFQRYDESSDSTFYEAPRFVTHIDDPAIAALTKYYSKVLPQSDTPGVSILDMCSSWVSHYPPGYRQERIVGMGMNEEELKRNPVLTEYIVQDLNLNSNLPFEDNSFQVITNVVSVDYLTKPLEVFKEMNRILKPGGLALMSFSNRCFFTKAISIWTSTGDADHALIVGSYFHYAGGFEAPQAVDISPNPGRSDPMYVVYSRKLPMV

SEQ ID NO: 40153 - protein, 317 aa, Arabidopsis thaliana
  peptide (1)..(317): Ceres Seq. ID no. 12395328
  misc_feature (115)..(313): Homolog of NCBI NO: 37519856 NR Description: hypothetical protein glr0287 [Gloeobacter
  misc_feature (115)..(294): Homolog of NCBI NO: 23129867 NR Description: hypothetical protein [Nostoc punctiforme]
  misc_feature (87)..(298): Homolog of NCBI NO: 15232158 NR Description: hypothetical protein; protein id: At3g01660.1
  misc_feature (115)..(313): Homolog of NCBI NO: 22298320 NR Description: ORF_ID:tlr0778~hypothetical protein
  misc_feature (109)..(313): Homolog of NCBI NO: 17232182 NR Description: hypothetical protein [Nostoc sp. PCC 7120]
  misc_feature (111)..(314): Homolog of NCBI NO: 22970815 NR Description: hypothetical protein [Chloroflexus aurantiacus]
  misc_feature (51)..(313): Homolog of NCBI NO: 34910520 NR Description: B1142C05.17 [Oryza sativa (japonica
  misc_feature (68)..(317): Homolog of NCBI NO: 14030675 NR Description: AT4g29590/T16L4_100 [Arabidopsis thaliana]
  misc_feature (1)..(317): Homolog of NCBI NO: 21536833 NR Description: unknown [Arabidopsis thaliana]
  misc_feature (1)..(317): Homolog of NCBI NO: 15233624 NR Description: putative protein; protein id: At4g29590.1
MSKTANFLSLRSNPLPPIFSSTGNSPFLRASSALNLPTTASKPFHSWIRASSRRRLVLGGFGGASLWMNNNMSGKFGGKSFIASARQTNPSPVEQALNKVDWPETFPFKEEDFQRYDESSDSTFYEAPRFVTHIDDPAIAALTKYYSKVLPQSDTPGVSILDMCSSWVSHYPPGYRQERIVGMGMNEEELKRNPVLTEYIVQDLNLNSNLPFEDNSFQVITNVVSVDYLTKPLEVFKEMNRILKPGGLALMSFSNRCFFTKAISIWTSTGDADHALIVGSYFHYAGGFEAPQAVDISPNPGRSDPMYVVYSRKLPMV

SEQ ID NO: 40154 - protein, 250 aa, Arabidopsis thaliana
  peptide (1)..(250): Ceres Seq. ID no. 12395329
  misc_feature (48)..(246): Homolog of NCBI NO: 37519856 NR Description: hypothetical protein glr0287 [Gloeobacter
  misc_feature (48)..(227): Homolog of NCBI NO: 23129867 NR Description: hypothetical protein [Nostoc punctiforme]
  misc_feature (20)..(231): Homolog of NCBI NO: 15232158 NR Description: hypothetical protein; protein id: At3g01660.1
  misc_feature (48)..(246): Homolog of NCBI NO: 22298320 NR Description: ORF_ID:tlr0778~hypothetical protein
  misc_feature (42)..(246): Homolog of NCBI NO: 17232182 NR Description: hypothetical protein [Nostoc sp. PCC 7120]
  misc_feature (44)..(247): Homolog of NCBI NO: 22970815 NR Description: hypothetical protein [Chloroflexus aurantiacus]
  misc_feature (1)..(246): Homolog of NCBI NO: 34910520 NR Description: B1142C05.17 [Oryza sativa (japonica
  misc_feature (1)..(250): Homolog of NCBI NO: 14030675 NR Description: AT4g29590/T16L4_100 [Arabidopsis thaliana]
  misc_feature (1)..(250): Homolog of NCBI NO: 21536833 NR Description: unknown [Arabidopsis thaliana]
  misc_feature (1)..(250): Homolog of NCBI NO: 15233624 NR Description: putative protein; protein id: At4g29590.1
MNNNMSGKFGGKSFIASARQTNPSPVEQALNKVDWPETFPFKEEDFQRYDESSDSTFYEAPRFVTHIDDPAIAALTKYYSKVLPQSDTPGVSILDMCSSWVSHYPPGYRQERIVGMGMNEEELKRNPVLTEYIVQDLNLNSNLPFEDNSFQVITNVVSVDYLTKPLEVFKEMNRILKPGGLALMSFSNRCFFTKAISIWTSTGDADHALIVGSYFHYAGGFEAPQAVDISPNPGRSDPMYVVYSRKLPMV

SEQ ID NO: 40155 - DNA, 1302 bp, Arabidopsis thaliana
  misc_feature (1)..(1302): Ceres Seq. ID no. 13575072
  misc_feature: MA Experiment ID: 108434 Result: Up-regulated in Transcription
  misc_feature: MA Experiment 108434 PARAMETER Experiment Name: At_Root_Tips_cDNA_P Parameter: Tissue Value: Root Tips
  misc_feature: MA Experiment ID: 108573 Result: Up-regulated in Transcription
  misc_feature: MA Experiment 108573 PARAMETER Experiment Name: At_Drought_cDNA_P Parameter: Timepoint (hr) Value: 6
  misc_feature: MA Experiment 108573 PARAMETER Experiment Name: At_Drought_cDNA_P Parameter: Tissue Value: Aerial
  misc_feature: MA Experiment 108573 PARAMETER Experiment Name: At_Drought_cDNA_P Parameter: Treatment Value: Drought vs. No Drought
  misc_feature: MA Experiment ID: 108594 Result: Down-regulated in Transcription
  misc_feature: MA Experiment 108594 PARAMETER Experiment Name: At_Ler-rhl_Root_cDNA_P Parameter: Plant Line Value: null
  misc_feature: MA Experiment ID: 108595 Result: Down-regulated in Transcription
  misc_feature: MA Experiment 108595 PARAMETER Experiment Name: At_Ler-pi_Ovule_cDNA_P Parameter: Plant Line Value: null
  misc_feature: MA Experiment ID: 20000087 Result: Down-regulated in Transcription
  misc_feature: MA Experiment 20000087 PARAMETER Experiment Name: At_100uM_ABA_Mutants_cDNA_P Parameter: Plant Line Value: WS
  misc_feature: MA Experiment 20000087 PARAMETER Experiment Name: At_100uM_ABA_Mutants_cDNA_P Parameter: Timepoint (hr) Value: 6
  misc_feature: MA Experiment 20000087 PARAMETER Experiment Name: At_100uM_ABA_Mutants_cDNA_P Parameter: Tissue Value: Aerial
  misc_feature: MA Experiment 20000087 PARAMETER Experiment Name: At_100uM_ABA_Mutants_cDNA_P Parameter: Treatment Value: 100uM ABA vs. No Treatment
  misc_feature: MA Experiment ID: 20000224 Result: Down-regulated in Transcription
atccggagacatccattttctctggtagctgtttacttcttcttcttcttcttcttcttcttcctcctcctctgttcgtcaatcgccgatctcgttgcttcattttccttgagatcgattggtacaagtgttcatccaatggttggaggaggagttatccggcagcttcttagaaggaaacttcattcccaatcagtcgcaactccggtattgtcatggttgtcttcgaagaaagcgaatgaagatgctgggtctgctggtttaagagcatttgctctcatgggtgctggtattaccggattattgagtttttctactgttgcatctgctgatgaggctgaacatggtctggagtgtcctaactacccttggccacatgagggcattctcagctcatatgaccatgcttcgatccgtcgtggtcaccaagtttatcagcaagtttgtgcgtcttgccattcgatgtctctgatctcataccgagacttggtgggtgttgcctacacagaggaagaggcgaaggccatggcagctgaaatcgaggttgttgatggaccaaatgatgagggtgagatgttcacccgacctggtaaactcagtgatcggcttcctgaaccatactcaaatgaatcggctgctaggttcgccaatggaggagcgtatccaccggatctaagtcttgtaactaaggcacgtcacaatggccaaaattatgtctttgctctgttgactggttatcgtgatcctcctgctggaatttcgatcagagaggggctacactacaatccttatttccctggtggagcaatcgctatgccaaaaatgctcaacgatgaagctgtggaatatgaagatggaactcctgcaacagaagcacagatgggtaaagatgttgtatccttcttgtcctgggcagctgaaccagagatggaagagaggaaattgatggggttcaaatggatattcttactgtctttggctctgcttcaagctgcgtattacaggagactgaaatggtcagtactcaaatcccgtaagcttgttctcgacgttgttaactaatcccgtgaagatcaccttttctctgggtaataatcattaatcttgaaagggataaatggtgaatcccactttttgtctcaaaagacatgtttctttgtttattgtttagaaagtctaatgaggcaaagaagtaaagcttttttaacctcaagtcacacatgattttgagattatattatttctttttggtttgttgtctcctaaaccggactcggtttgtcttaataaaaatgtggtttt

SEQ ID NO: 40156 - protein, 353 aa, Arabidopsis thaliana
  peptide (1)..(353): Ceres Seq. ID no. 13575073
  misc_feature (118)..(343): Pfam Name: Cytochrome C1 family Pfam Description: Cytochrome C1 family
  misc_feature (37)..(353): Homolog of NCBI NO: 12005507 NR Description: cytochrome c1 [Chlamydomonas reinhardtii]
  misc_feature (94)..(353): Homolog of NCBI NO: 82264 NR Description: ubiquinol-cytochrome-c reductase (EC 1.10.2.2)
  misc_feature (83)..(353): Homolog of NCBI NO: 117765 NR Description: Cytochrome c1, heme protein, mitochondrial
  misc_feature (83)..(353): Homolog of NCBI NO: 7547401 NR Description: cytochrome c1 precursor [Solanum tuberosum]
  misc_feature (83)..(353): Homolog of NCBI NO: 82263 NR Description: ubiquinol-cytochrome-c reductase (EC 1.10.2.2)
  misc_feature (47)..(353): Homolog of NCBI NO: 15809956 NR Description: AT3g27240/K17E12_6 [Arabidopsis thaliana]
  misc_feature (47)..(353): Homolog of NCBI NO: 21593678 NR Description: cytochrome c, putative [Arabidopsis thaliana]
  misc_feature (47)..(353): Homolog of NCBI NO: 15232125 NR Description: cytochrome c -related [Arabidopsis thaliana]
  misc_feature (47)..(353): Homolog of NCBI NO: 15215624 NR Description: AT5g40810/MHK7_4 [Arabidopsis thaliana]
  misc_feature (47)..(353): Homolog of NCBI NO: 15237497 NR Description: cytochrome c1 precursor [Arabidopsis thaliana]
IRRHPFSLVAVYFFFFFFFFFLLLCSSIADLVASFSLRSIGTSVHPMVGGGVIRQLLRRKLHSQSVATPVLSWLSSKKANEDAGSAGLRAFALMGAGITGLLSFSTVASADEAEHGLECPNYPWPHEGILSSYDHASIRRGHQVYQQVCASCHSMSLISYRDLVGVAYTEEEAKAMAAEIEVVDGPNDEGEMFTRPGKLSDRLPEPYSNESAARFANGGAYPPDLSLVTKARHNGQNYVFALLTGYRDPPAGISIREGLHYNPYFPGGAIAMPKMLNDEAVEYEDGTPATEAQMGKDVVSFLSWAAEPEMEERKLMGFKWIFLLSLALLQAAYYRRLKWSVLKSRKLVLDVVN

SEQ ID NO: 40157 - protein, 307 aa, Arabidopsis thaliana
  peptide (1)..(307): Ceres Seq. ID no. 13575074
  misc_feature (72)..(297): Pfam Name: Cytochrome C1 family Pfam Description: Cytochrome C1 family
  misc_feature (1)..(307): Homolog of NCBI NO: 12005507 NR Description: cytochrome c1 [Chlamydomonas reinhardtii]
  misc_feature (48)..(307): Homolog of NCBI NO: 82264 NR Description: ubiquinol-cytochrome-c reductase (EC 1.10.2.2)
  misc_feature (37)..(307): Homolog of NCBI NO: 117765 NR Description: Cytochrome c1, heme protein, mitochondrial
  misc_feature (37)..(307): Homolog of NCBI NO: 7547401 NR Description: cytochrome c1 precursor [Solanum tuberosum]
  misc_feature (37)..(307): Homolog of NCBI NO: 82263 NR Description: ubiquinol-cytochrome-c reductase (EC 1.10.2.2)
  misc_feature (1)..(307): Homolog of NCBI NO: 15809956 NR Description: AT3g27240/K17E12_6 [Arabidopsis thaliana]
  misc_feature (1)..(307): Homolog of NCBI NO: 21593678 NR Description: cytochrome c, putative [Arabidopsis thaliana]
  misc_feature (1)..(307): Homolog of NCBI NO: 15232125 NR Description: cytochrome c -related [Arabidopsis thaliana]
  misc_feature (1)..(307): Homolog of NCBI NO: 15215624 NR Description: AT5g40810/MHK7_4 [Arabidopsis thaliana]
  misc_feature (1)..(307): Homolog of NCBI NO: 15237497 NR Description: cytochrome c1 precursor [Arabidopsis thaliana]
MVGGGVIRQLLRRKLHSQSVATPVLSWLSSKKANEDAGSAGLRAFALMGAGITGLLSFSTVASADEAEHGLECPNYPWPHEGILSSYDHASIRRGHQVYQQVCASCHSMSLISYRDLVGVAYTEEEAKAMAAEIEVVDGPNDEGEMFTRPGKLSDRLPEPYSNESAARFANGGAYPPDLSLVTKARHNGQNYVFALLTGYRDPPAGISIREGLHYNPYFPGGAIAMPKMLNDEAVEYEDGTPATEAQMGKDVVSFLSWAAEPEMEERKLMGFKWIFLLSLALLQAAYYRRLKWSVLKSRKLVLDVVN

SEQ ID NO: 40158 - protein, 260 aa, Arabidopsis thaliana; identical to SEQ ID NO: 23964
  peptide (1)..(260): Ceres Seq. ID no. 13575075
  misc_feature (25)..(250): Pfam Name: Cytochrome C1 family Pfam Description: Cytochrome C1 family
  misc_feature (1)..(260): Homolog of NCBI NO: 12005507 NR Description: cytochrome c1 [Chlamydomonas reinhardtii]
  misc_feature (1)..(260): Homolog of NCBI NO: 82264 NR Description: ubiquinol-cytochrome-c reductase (EC 1.10.2.2)
  misc_feature (1)..(260): Homolog of NCBI NO: 117765 NR Description: Cytochrome c1, heme protein, mitochondrial
  misc_feature (1)..(260): Homolog of NCBI NO: 7547401 NR Description: cytochrome c1 precursor [Solanum tuberosum]
  misc_feature (1)..(260): Homolog of NCBI NO: 82263 NR Description: ubiquinol-cytochrome-c reductase (EC 1.10.2.2)
  misc_feature (1)..(260): Homolog of NCBI NO: 15809956 NR Description: AT3g27240/K17E12_6 [Arabidopsis thaliana]
  misc_feature (1)..(260): Homolog of NCBI NO: 21593678 NR Description: cytochrome c, putative [Arabidopsis thaliana]
  misc_feature (1)..(260): Homolog of NCBI NO: 15232125 NR Description: cytochrome c -related [Arabidopsis thaliana]
  misc_feature (1)..(260): Homolog of NCBI NO: 15215624 NR Description: AT5g40810/MHK7_4 [Arabidopsis thaliana]
  misc_feature (1)..(260): Homolog of NCBI NO: 15237497 NR Description: cytochrome c1 precursor [Arabidopsis thaliana]

SEQ ID NO: 40159 - DNA, 2150 bp, Arabidopsis thaliana
  misc_feature (1)..(2150): Ceres Seq. ID no. 13489476
  misc_feature: MA Experiment ID: 108434 Result: Up-regulated in Transcription
  misc_feature: MA Experiment 108434 PARAMETER Experiment Name: At_Root_Tips_cDNA_P Parameter: Tissue Value: Root Tips
  misc_feature: MA Experiment ID: 108462 Result: Down-regulated in Transcription
  misc_feature: MA Experiment 108462 PARAMETER Experiment Name: At_Germinating_Seeds_cDNA_P Parameter: Age (day) Value: 2 vs. 0
  misc_feature: MA Experiment 108462 PARAMETER Experiment Name: At_Germinating_Seeds_cDNA_P Parameter: Tissue Value: Germinating Seeds
  misc_feature: MA Experiment ID: 108463 Result: Down-regulated in Transcription
  misc_feature: MA Experiment 108463 PARAMETER Experiment Name: At_Germinating_Seeds_cDNA_P Parameter: Age (day) Value: 3 vs. 0
  misc_feature: MA Experiment 108463 PARAMETER Experiment Name: At_Germinating_Seeds_cDNA_P Parameter: Tissue Value: Germinating Seeds
  misc_feature: MA Experiment ID: 108464 Result: Down-regulated in Transcription
  misc_feature: MA Experiment 108464 PARAMETER Experiment Name: At_Germinating_Seeds_cDNA_P Parameter: Age (day) Value: 4 vs. 0
  misc_feature: MA Experiment 108464 PARAMETER Experiment Name: At_Germinating_Seeds_cDNA_P Parameter: Tissue Value: Germinating Seeds
  misc_feature: MA Experiment ID: 20000180 Result: Down-regulated in Transcription
  misc_feature: MA Experiment 20000180 PARAMETER Experiment Name: At_Germinating_Seeds_P Parameter: Age (hr) Value: 24 vs. 0
  misc_feature: MA Experiment 20000180 PARAMETER Experiment Name: At_Germinating_Seeds_P Parameter: Tissue Value: Germinating Seeds
  misc_feature: MA Experiment ID: 20000224 Result: Up-regulated in Transcription
  misc_feature: MA Experiment ID: 20000227 Result: Up-regulated in Transcription
  misc_feature: MA Experiment 20000227 PARAMETER Experiment Name: At_Root-Tips-vs-Tops_P Parameter: Tissue Value: Root Tips vs. Root Tops
  misc_feature: MA Experiment ID: 20001557 Result: Up-regulated in Transcription
  misc_feature: MA Experiment 20001557 PARAMETER Experiment Name: At_Drought_Soil_Dry_P Parameter: Age (day) Value: 27
  misc_feature: MA Experiment 20001557 PARAMETER Experiment Name: At_Drought_Soil_Dry_P Parameter: Organism Value: A. thaliana
  misc_feature: MA Experiment 20001557 PARAMETER Experiment Name: At_Drought_Soil_Dry_P Parameter: Plant Line Value: WS
  misc_feature: MA Experiment 20001557 PARAMETER Experiment Name: At_Drought_Soil_Dry_P Parameter: Post Timepoint (hr) Value: 3
  misc_feature: MA Experiment 20001557 PARAMETER Experiment Name: At_Drought_Soil_Dry_P Parameter: Post-Treatment Value: Re-Water vs. No Drought
  misc_feature: MA Experiment 20001557 PARAMETER Experiment Name: At_Drought_Soil_Dry_P Parameter: Timepoint (day) Value: 13
  misc_feature: MA Experiment 20001557 PARAMETER Experiment Name: At_Drought_Soil_Dry_P Parameter: Treatment Value: Drought vs. No Drought
  misc_feature: MA Experiment ID: 20001558 Result: Up-regulated in Transcription
  misc_feature: MA Experiment 20001558 PARAMETER Experiment Name: At_Drought_Soil_Dry_P Parameter: Age (day) Value: 27
  misc_feature: MA Experiment 20001558 PARAMETER Experiment Name: At_Drought_Soil_Dry_P Parameter: Organism Value: A. thaliana
  misc_feature: MA Experiment 20001558 PARAMETER Experiment Name: At_Drought_Soil_Dry_P Parameter: Plant Line Value: WS
  misc_feature: MA Experiment 20001558 PARAMETER Experiment Name: At_Drought_Soil_Dry_P Parameter: Post Timepoint (hr) Value: 6
  misc_feature: MA Experiment 20001558 PARAMETER Experiment Name: At_Drought_Soil_Dry_P Parameter: Post-Treatment Value: Re-Water vs. No Drought
  misc_feature: MA Experiment 20001558 PARAMETER Experiment Name: At_Drought_Soil_Dry_P Parameter: Timepoint (day) Value: 13
  misc_feature: MA Experiment 20001558 PARAMETER Experiment Name: At_Drought_Soil_Dry_P Parameter: Treatment Value: Drought vs. No Drought
agacttaacatttcatatagagaaacttgaaacaacaatctgagcaaagagcgttttatcttgttaattttggaatctccattacgatggaaggtgcggctgatcaaactacgaaagcgttatctgaattagccatggattcttctaccaccttgaatgctgctgagtctagcgctggtgatggagctggacctcggagtaaaaatgctttgaagaaggaacagaaaatgaagcagaaagaggaagagaagagacgaaaggacgaagagaaagctgaaaaggctaaacaagcacctaaagcaagctcccagaaggcagtggcagcagatgatgaagagatggatgcaacgcaatactatgagaacagattgaaatatcttgcggctgagaaggctaaaggggagaatccatatcctcacaagttcgctgtgtcaatgtcgattcctaaatacattgagacgtatggtagtttgaacaatggagatcatgttgaaaacgctgaggagtctttagctgggcggataatgagcaagcgatcttcctcttccaagctcttcttctatgatctacacggtgatgatttcaaggtccaagtcatggctgatgcaagtaagtcaggattggatgaagctgagttcttaaagctccattcgaatgctaagcgtggtgatattgttggagtcattgggtttccaggaaaaactaagaggggagaattgagtatctttccccgatcatttattcttctgtcccattgcctccacatgatgccgagaaaggctgataatgttaatgcaaagaaacctgaaatctgggttccaggtcaaacgagaaatcctgaagcatatgttctgaaagaccaggaatcaagatatcgtcagcgtcatcttgatatgattttgaacgtggaggttcgtcagatattcaggactagagctaaaatcatctcctatgtccgcagattcctcgacaacaaaaatttcttggaggtcgagacacctatgatgaacatgattgctggtggagcagctgctagaccttttgtgacacatcacaatgatctagatatgaggctgtacatgcgaatcgcacctgaactctatctcaagcaacttattgttggtggcttggaacgtgtttacgagataggaaagcaattcagaaacgagggtatagacctgacccacaatccggagttcaccacttgcgagttctatatggcttttgcagactacaatgacctgatggaaatgactgaggttatgttgagtggcatggttaaggaattaacaggtggttataaaatcaagtataatgctaatgggtatgacaaggatccaattgaaatcgactttactccaccattcaggaggattgagatgataggagagttagagaaggttgctaagctcaatataccaaaagacttggctagcgaagaagctaacaagtatctgattgatgcatgtgcgaggtttgatgtcaaatgccctcctcctcagacaacagctcgtctgttagataaacttgttggagaatttctggaaccgacatgtgtgaacccaactttcatcatcaaccagcccgagatcatgagtcctttggctaaatggcacagatcgaagagtggattgacagagagattcgagctgttcatcaacaaacatgaactctgcaatgcctacacggagctaaacgatcctgtggtacagcgccagcgttttgctgatcagctcaaggatcgacagtctggagacgatgaagcgatggctttagatgaaacattttgtaatgctttagaatatgggttggctcctacaggtggctggggattaggaatagacagactctctatgcttttgaccgactcactgaacatcaaggaggttcttttcttcccggcaatgaggccaccacaggaggagtcagcagccgctcaagctcctttaacagaagagaagaaataaggagtctacacaagttttctgactaagcttagtcaattcgctattatgcactctgttctcaagttacttgtaattgcagaccatatttttcaaaaaacaaataccaattaattattatcaaaaacctttgtaagacttttttgcaattagtagtgatttcacttatattgaagggcctttttt

SEQ ID NO: 40160 - protein, 626 aa, Arabidopsis thaliana
  peptide (1)..(626): Ceres Seq. ID no. 13489477
  misc_feature (258)..(609): Pfam Name: tRNA synthetases class II (D, K and N) Pfam Description: tRNA synthetases class II (D, K and N)
  misc_feature (39)..(229): Homolog of NCBI NO: 20072717 NR Description: Kars protein [Mus musculus]
  misc_feature (256)..(623): Homolog of NCBI NO: 23270695 NR Description: Kars protein [Mus musculus]
  misc_feature (256)..(623): Homolog of NCBI NO: 20072717 NR Description: Kars protein [Mus musculus]
  misc_feature (22)..(229): Homolog of NCBI NO: 26355297 NR Description: unnamed protein product [Mus musculus]
  misc_feature (256)..(623): Homolog of NCBI NO: 26355297 NR Description: unnamed protein product [Mus musculus]
  misc_feature (22)..(229): Homolog of NCBI NO: 16716381 NR Description: lysyl-tRNA synthetase
  misc_feature (256)..(623): Homolog of NCBI NO: 16716381 NR Description: lysyl-tRNA synthetase
  misc_feature (22)..(229): Homolog of NCBI NO: 26354188 NR Description: unnamed protein product [Mus musculus]
  misc_feature (256)..(623): Homolog of NCBI NO: 26354188 NR Description: unnamed protein product [Mus musculus]
  misc_feature (36)..(608): Homolog of NCBI NO: 2501025 NR Description: Lysyl-tRNA synthetase (Lysine--tRNA ligase)
MEGAADQTTKALSELAMDSSTTLNAAESSAGDGAGPRSKNALKKEQKMKQKEEEKRRKDEEKAEKAKQAPKASSQKAVAADDEEMDATQYYENRLKYLAAEKAKGENPYPHKFAVSMSIPKYIETYGSLNNGDHVENAEESLAGRIMSKRSSSSKLFFYDLHGDDFKVQVMADASKSGLDEAEFLKLHSNAKRGDIVGVIGFPGKTKRGELSIFPRSFILLSHCLHMMPRKADNVNAKKPEIWVPGQTRNPEAYVLKDQESRYRQRHLDMILNVEVRQIFRTRAKIISYVRRFLDNKNFLEVETPMMNMIAGGAAARPFVTHHNDLDMRLYMRIAPELYLKQLIVGGLERVYEIGKQFRNEGIDLTHNPEFTTCEFYMAFADYNDLMEMTEVMLSGMVKELTGGYKIKYNANGYDKDPIEIDFTPPFRRIEMIGELEKVAKLNIPKDLASEEANKYLIDACARFDVKCPPPQTTARLLDKLVGEFLEPTCVNPTFIINQPEIMSPLAKWHRSKSGLTERFELFINKHELCNAYTELNDPVVQRQRFADQLKDRQSGDDEAMALDETFCNALEYGLAPTGGWGLGIDRLSMLLTDSLNIKEVLFFPAMRPPQEESAAAQAPLTEEKK

SEQ ID NO: 40161 - protein, 610 aa, Arabidopsis thaliana
  peptide (1)..(610): Ceres Seq. ID no. 13489478
  misc_feature (242)..(593): Pfam Name: tRNA synthetases class II (D, K and N) Pfam Description: tRNA synthetases class II (D, K and N)
  misc_feature (23)..(213): Homolog of NCBI NO: 20072717 NR Description: Kars protein [Mus musculus]
  misc_feature (240)..(607): Homolog of NCBI NO: 23270695 NR Description: Kars protein [Mus musculus]
  misc_feature (240)..(607): Homolog of NCBI NO: 20072717 NR Description: Kars protein [Mus musculus]
  misc_feature (6)..(213): Homolog of NCBI NO: 26355297 NR Description: unnamed protein product [Mus musculus]
  misc_feature (240)..(607): Homolog of NCBI NO: 26355297 NR Description: unnamed protein product [Mus musculus]
  misc_feature (6)..(213): Homolog of NCBI NO: 16716381 NR Description: lysyl-tRNA synthetase
  misc_feature (240)..(607): Homolog of NCBI NO: 16716381 NR Description: lysyl-tRNA synthetase
  misc_feature (6)..(213): Homolog of NCBI NO: 26354188 NR Description: unnamed protein product [Mus musculus]
  misc_feature (240)..(607): Homolog of NCBI NO: 26354188 NR Description: unnamed protein product [Mus musculus]
  misc_feature (20)..(592): Homolog of NCBI NO: 2501025 NR Description: Lysyl-tRNA synthetase (Lysine--tRNA ligase)
MDSSTTLNAAESSAGDGAGPRSKNALKKEQKMKQKEEEKRRKDEEKAEKAKQAPKASSQKAVAADDEEMDATQYYENRLKYLAAEKAKGENPYPHKFAVSMSIPKYIETYGSLNNGDHVENAEESLAGRIMSKRSSSSKLFFYDLHGDDFKVQVMADASKSGLDEAEFLKLHSNAKRGDIVGVIGFPGKTKRGELSIFPRSFILLSHCLHMMPRKADNVNAKKPEIWVPGQTRNPEAYVLKDQESRYRQRHLDMILNVEVRQIFRTRAKIISYVRRFLDNKNFLEVETPMMNMIAGGAAARPFVTHHNDLDMRLYMRIAPELYLKQLIVGGLERVYEIGKQFRNEGIDLTHNPEFTTCEFYMAFADYNDLMEMTEVMLSGMVKELTGGYKIKYNANGYDKDPIEIDFTPPFRRIEMIGELEKVAKLNIPKDLASEEANKYLIDACARFDVKCPPPQTTARLLDKLVGEFLEPTCVNPTFIINQPEIMSPLAKWHRSKSGLTERFELFINKHELCNAYTELNDPVVQRQRFADQLKDRQSGDDEAMALDETFCNALEYGLAPTGGWGLGIDRLSMLLTDSLNIKEVLFFPAMRPPQEESAAAQAPLTEEKK

SEQ ID NO: 40162 - protein, 579 aa, Arabidopsis thaliana
  peptide (1)..(579): Ceres Seq. ID no. 13489479
  misc_feature (211)..(562): Pfam Name: tRNA synthetases class II (D, K and N) Pfam Description: tRNA synthetases class II (D, K and N)
  misc_feature (1)..(182): Homolog of NCBI NO: 20072717 NR Description: Kars protein [Mus musculus]
  misc_feature (209)..(576): Homolog of NCBI NO: 23270695 NR Description: Kars protein [Mus musculus]
  misc_feature (209)..(576): Homolog of NCBI NO: 20072717 NR Description: Kars protein [Mus musculus]
  misc_feature (1)..(182): Homolog of NCBI NO: 26355297 NR Description: unnamed protein product [Mus musculus]
  misc_feature (209)..(576): Homolog of NCBI NO: 26355297 NR Description: unnamed protein product [Mus musculus]
  misc_feature (1)..(182): Homolog of NCBI NO: 16716381 NR Description: lysyl-tRNA synthetase
  misc_feature (209)..(576): Homolog of NCBI NO: 16716381 NR Description: lysyl-tRNA synthetase
  misc_feature (1)..(182): Homolog of NCBI NO: 26354188 NR Description: unnamed protein product [Mus musculus]
  misc_feature (209)..(576): Homolog of NCBI NO: 26354188 NR Description: unnamed protein product [Mus musculus]
  misc_feature (1)..(561): Homolog of NCBI NO: 2501025 NR Description: Lysyl-tRNA synthetase (Lysine--tRNA ligase)
MKQKEEEKRRKDEEKAEKAKQAPKASSQKAVAADDEEMDATQYYENRLKYLAAEKAKGENPYPHKFAVSMSIPKYIETYGSLNNGDHVENAEESLAGRIMSKRSSSSKLFFYDLHGDDFKVQVMADASKSGLDEAEFLKLHSNAKRGDIVGVIGFPGKTKRGELSIFPRSFILLSHCLHMMPRKADNVNAKKPEIWVPGQTRNPEAYVLKDQESRYRQRHLDMILNVEVRQIFRTRAKIISYVRRFLDNKNFLEVETPMMNMIAGGAAARPFVTHHNDLDMRLYMRIAPELYLKQLIVGGLERVYEIGKQFRNEGIDLTHNPEFTTCEFYMAFADYNDLMEMTEVMLSGMVKELTGGYKIKYNANGYDKDPIEIDFTPPFRRIEMIGELEKVAKLNIPKDLASEEANKYLIDACARFDVKCPPPQTTARLLDKLVGEFLEPTCVNPTFIINQPEIMSPLAKWHRSKSGLTERFELFINKHELCNAYTELNDPVVQRQRFADQLKDRQSGDDEAMALDETFCNALEYGLAPTGGWGLGIDRLSMLLTDSLNIKEVLFFPAMRPPQEESAAAQAPLTEEKK

SEQ ID NO: 40163 - DNA, 1467 bp, Arabidopsis thaliana
  misc_feature (1)..(1467): Ceres Seq. ID no. 12395585
  misc_feature: MA Experiment ID: 108473 Result: Up-regulated in Transcription
  misc_feature: MA Experiment 108473 PARAMETER Experiment Name: At_Drought_Flowers_cDNA_P Parameter: Timepoint (hr) Value: 7 d
  misc_feature: MA Experiment 108473 PARAMETER Experiment Name: At_Drought_Flowers_cDNA_P Parameter: Tissue Value: Flower
  misc_feature: MA Experiment 108473 PARAMETER Experiment Name: At_Drought_Flowers_cDNA_P Parameter: Treatment Value: Drought vs. No Drought
  misc_feature: MA Experiment ID: 108488 Result: Down-regulated in Transcription
  misc_feature: MA Experiment ID: 108501 Result: Up-regulated in Transcription
  misc_feature: MA Experiment 108501 PARAMETER Experiment Name: At_ap2_floral_buds_cDNA_P Parameter: Plant Line Value: ap2 (Ler.)
  misc_feature: MA Experiment 108501 PARAMETER Experiment Name: At_ap2_floral_buds_cDNA_P Parameter: Tissue Value: Closed Flower
  misc_feature: MA Experiment ID: 108561 Result: Up-regulated in Transcription
  misc_feature: MA Experiment 108561 PARAMETER Experiment Name: At_100uM_ABA_cDNA_P Parameter: Timepoint (hr) Value: 6
  misc_feature: MA Experiment 108561 PARAMETER Experiment Name: At_100uM_ABA_cDNA_P Parameter: Tissue Value: Aerial
  misc_feature: MA Experiment 108561 PARAMETER Experiment Name: At_100uM_ABA_cDNA_P Parameter: Treatment Value: 100uM ABA vs. No Treatment
  misc_feature: MA Experiment ID: 108572 Result: Up-regulated in Transcription
  misc_feature: MA Experiment 108572 PARAMETER Experiment Name: At_Drought_cDNA_P Parameter: Timepoint (hr) Value: 1
  misc_feature: MA Experiment 108572 PARAMETER Experiment Name: At_Drought_cDNA_P Parameter: Tissue Value: Aerial
  misc_feature: MA Experiment 108572 PARAMETER Experiment Name: At_Drought_cDNA_P Parameter: Treatment Value: Drought vs. No Drought
  misc_feature: MA Experiment ID: 108573 Result: Up-regulated in Transcription
  misc_feature: MA Experiment 108573 PARAMETER Experiment Name: At_Drought_cDNA_P Parameter: Timepoint (hr) Value: 6
  misc_feature: MA Experiment 108573 PARAMETER Experiment Name: At_Drought_cDNA_P Parameter: Tissue Value: Aerial
  misc_feature: MA Experiment 108573 PARAMETER Experiment Name: At_Drought_cDNA_P Parameter: Treatment Value: Drought vs. No Drought
  misc_feature: MA Experiment ID: 108605 Result: Up-regulated in Transcription
  misc_feature: MA Experiment 108605 PARAMETER Experiment Name: At_100uM_ABA_cDNA_P Parameter: Timepoint (hr) Value: 6
  misc_feature: MA Experiment 108605 PARAMETER Experiment Name: At_100uM_ABA_cDNA_P Parameter: Tissue Value: Aerial
  misc_feature: MA Experiment 108605 PARAMETER Experiment Name: At_100uM_ABA_cDNA_P Parameter: Treatment Value: 100uM ABA vs. No Treatment
  misc_feature: MA Experiment ID: 108607 Result: Up-regulated in Transcription
  misc_feature: MA Experiment 108607 PARAMETER Experiment Name: At_100uM_ABA_cDNA_P Parameter: Timepoint (hr) Value: 4
  misc_feature: MA Experiment 108607 PARAMETER Experiment Name: At_100uM_ABA_cDNA_P Parameter: Tissue Value: Aerial
  misc_feature: MA Experiment 108607 PARAMETER Experiment Name: At_100uM_ABA_cDNA_P Parameter: Treatment Value: 100uM ABA vs. No Treatment
  misc_feature: MA Experiment ID: 108608 Result: Up-regulated in Transcription
  misc_feature: MA Experiment 108608 PARAMETER Experiment Name: At_100uM_ABA_cDNA_P Parameter: Timepoint (hr) Value: 1
  misc_feature: MA Experiment 108608 PARAMETER Experiment Name: At_100uM_ABA_cDNA_P Parameter: Tissue Value: Aerial
  misc_feature: MA Experiment 108608 PARAMETER Experiment Name: At_100uM_ABA_cDNA_P Parameter: Treatment Value: 100uM ABA vs. No Treatment
  misc_feature: MA Experiment ID: 108609 Result: Up-regulated in Transcription
  misc_feature: MA Experiment 108609 PARAMETER Experiment Name: At_100uM_ABA_cDNA_P Parameter: Timepoint (hr) Value: 24
  misc_feature: MA Experiment 108609 PARAMETER Experiment Name: At_100uM_ABA_cDNA_P Parameter: Tissue Value: Aerial
  misc_feature: MA Experiment 108609 PARAMETER Experiment Name: At_100uM_ABA_cDNA_P Parameter: Treatment Value: 100uM ABA vs. No Treatment
  misc_feature: MA Experiment ID: 20000086 Result: Up-regulated in Transcription
  misc_feature: MA Experiment 20000086 PARAMETER Experiment Name: At_100uM_ABA_Mutants_cDNA_P Parameter: Plant Line Value: CS22
  misc_feature: MA Experiment 20000086 PARAMETER Experiment Name: At_100uM_ABA_Mutants_cDNA_P Parameter: Timepoint (hr) Value: 6
  misc_feature: MA Experiment 20000086 PARAMETER Experiment Name: At_100uM_ABA_Mutants_cDNA_P Parameter: Tissue Value: Aerial
  misc_feature: MA Experiment 20000086 PARAMETER Experiment Name: At_100uM_ABA_Mutants_cDNA_P Parameter: Treatment Value: 100uM ABA vs. No Treatment
  misc_feature: MA Experiment ID: 20000087 Result: Up-regulated in Transcription
  misc_feature: MA Experiment 20000087 PARAMETER Experiment Name: At_100uM_ABA_Mutants_cDNA_P Parameter: Plant Line Value: WS
  misc_feature: MA Experiment 20000087 PARAMETER Experiment Name: At_100uM_ABA_Mutants_cDNA_P Parameter: Timepoint (hr) Value: 6
  misc_feature: MA Experiment 20000087 PARAMETER Experiment Name: At_100uM_ABA_Mutants_cDNA_P Parameter: Tissue Value: Aerial
  misc_feature: MA Experiment 20000087 PARAMETER Experiment Name: At_100uM_ABA_Mutants_cDNA_P Parameter: Treatment Value: 100uM ABA vs. No Treatment
  misc_feature: MA Experiment ID: 20000088 Result: Up-regulated in Transcription
  misc_feature: MA Experiment 20000088 PARAMETER Experiment Name: At_100uM_ABA_Mutants_cDNA_P Parameter: Plant Line Value: Landsberg
  misc_feature: MA Experiment 20000088 PARAMETER Experiment Name: At_100uM_ABA_Mutants_cDNA_P Parameter: Timepoint (hr) Value: 6
  misc_feature: MA Experiment 20000088 PARAMETER Experiment Name: At_100uM_ABA_Mutants_cDNA_P Parameter: Tissue Value: Aerial
  misc_feature: MA Experiment 20000088 PARAMETER Experiment Name: At_100uM_ABA_Mutants_cDNA_P Parameter: Treatment Value: 100uM ABA vs. No Treatment
  misc_feature: MA Experiment ID: 20000113 Result: Down-regulated in Transcription
  misc_feature: MA Experiment 20000113 PARAMETER Experiment Name: At_42deg_Heat_cDNA_P Parameter: Temperature (deg C) Value: 42 vs. 22
  misc_feature: MA Experiment 20000113 PARAMETER Experiment Name: At_42deg_Heat_cDNA_P Parameter: Timepoint (hr) Value: 8
  misc_feature: MA Experiment 20000113 PARAMETER Experiment Name: At_42deg_Heat_cDNA_P Parameter: Tissue Value: Aerial
  misc_feature: MA Experiment ID: 20000117 Result: Up-regulated in Transcription
  misc_feature: MA Experiment 20000117 PARAMETER Experiment Name: At_100uM_ABA_Mutants_cDNA_P Parameter: Plant Line Value: Columbia
  misc_feature: MA Experiment 20000117 PARAMETER Experiment Name: At_100uM_ABA_Mutants_cDNA_P Parameter: Timepoint (hr) Value: 6
  misc_feature: MA Experiment 20000117 PARAMETER Experiment Name: At_100uM_ABA_Mutants_cDNA_P Parameter: Tissue Value: Aerial
  misc_feature: MA Experiment 20000117 PARAMETER Experiment Name: At_100uM_ABA_Mutants_cDNA_P Parameter: Treatment Value: 100uM ABA vs. No Treatment
  misc_feature: MA Experiment ID: 20000144 Result: Up-regulated in Transcription
  misc_feature: MA Experiment 20000144 PARAMETER Experiment Name: At_42deg_Heat_cDNA_P Parameter: Temperature (deg C) Value: 42 vs. 22
  misc_feature: MA Experiment 20000144 PARAMETER Experiment Name: At_42deg_Heat_cDNA_P Parameter: Timepoint (hr) Value: 1
  misc_feature: MA Experiment 20000144 PARAMETER Experiment Name: At_42deg_Heat_cDNA_P Parameter: Tissue Value: Aerial
  misc_feature: MA Experiment ID: 20000264 Result: Up-regulated in Transcription
  misc_feature: MA Experiment 20000264 PARAMETER Experiment Name: At_Open_Flower_P Parameter: Age (day) Value: 21
  misc_feature: MA Experiment 20000264 PARAMETER Experiment Name: At_Open_Flower_P Parameter: Plant Line Value: WS
  misc_feature: MA Experiment 20000264 PARAMETER Experiment Name: At_Open_Flower_P Parameter: Tissue Value: Open Flower vs. Whole Plant
  misc_feature: MA Experiment ID: 20000265 Result: Up-regulated in Transcription
  misc_feature: MA Experiment 20000265 PARAMETER Experiment Name: At_Open_Flower_P Parameter: Age (day) Value: 21
  misc_feature: MA Experiment 20000265 PARAMETER Experiment Name: At_Open_Flower_P Parameter: Plant Line Value: WS
  misc_feature: MA Experiment 20000265 PARAMETER Experiment Name: At_Open_Flower_P Parameter: Tissue Value: Closed Flower vs. Whole Plant
  misc_feature: MA Experiment ID: 20000286 Result: Up-regulated in Transcription
  misc_feature: MA Experiment 20000286 PARAMETER Experiment Name: At_Open_Flower_P Parameter: Age (day) Value: 21
  misc_feature: MA Experiment 20000286 PARAMETER Experiment Name: At_Open_Flower_P Parameter: Plant Line Value: WS
  misc_feature: MA Experiment 20000286 PARAMETER Experiment Name: At_Open_Flower_P Parameter: Tissue Value: Half Open vs. Whole Plant
  misc_feature: MA Experiment ID: 20000794 Result: Up-regulated in Transcription
  misc_feature: MA Experiment 20000794 PARAMETER Experiment Name: At_Petals_P Parameter: Age (day) Value: 23-25 days
  misc_feature: MA Experiment 20000794 PARAMETER Experiment Name: At_Petals_P Parameter: Plant Line Value: WS
  misc_feature: MA Experiment 20000794 PARAMETER Experiment Name: At_Petals_P Parameter: Tissue Value: Petals vs. Whole plant
  misc_feature: MA Experiment ID: 20001556 Result: Up-regulated in Transcription
  misc_feature: MA Experiment 20001556 PARAMETER Experiment Name: At_Drought_Soil_Dry_P Parameter: Age (day) Value: 26
  misc_feature: MA Experiment 20001556 PARAMETER Experiment Name: At_Drought_Soil_Dry_P Parameter: Organism Value: A. thaliana
  misc_feature: MA Experiment 20001556 PARAMETER Experiment Name: At_Drought_Soil_Dry_P Parameter: Plant Line Value: WS
  misc_feature: MA Experiment 20001556 PARAMETER Experiment Name: At_Drought_Soil_Dry_P Parameter: Post Timepoint (hr) Value: None
  misc_feature: MA Experiment 20001556 PARAMETER Experiment Name: At_Drought_Soil_Dry_P Parameter: Post-Treatment Value: None
  misc_feature: MA Experiment 20001556 PARAMETER Experiment Name: At_Drought_Soil_Dry_P Parameter: Timepoint (day) Value: 12
  misc_feature: MA Experiment 20001556 PARAMETER Experiment Name: At_Drought_Soil_Dry_P Parameter: Treatment Value: Drought vs. No Drought
  misc_feature: MA Experiment ID: 20001904 Result: Up-regulated in Transcription
  misc_feature: MA Experiment 20001904 PARAMETER Experiment Name: At_Drought_Reproduction_P Parameter: Age (day) Value: 37
  misc_feature: MA Experiment 20001904 PARAMETER Experiment Name: At_Drought_Reproduction_P Parameter: Organism Value: A. thaliana
  misc_feature: MA Experiment 20001904 PARAMETER Experiment Name: At_Drought_Reproduction_P Parameter: Plant Line Value: WS
  misc_feature: MA Experiment 20001904 PARAMETER Experiment Name: At_Drought_Reproduction_P Parameter: Timepoint (day) Value: 7
  misc_feature: MA Experiment 20001904 PARAMETER Experiment Name: At_Drought_Reproduction_P Parameter: Tissue Value: Rosettes
  misc_feature: MA Experiment 20001904 PARAMETER Experiment Name: At_Drought_Reproduction_P Parameter: Treatment Value: Drought vs. No Drought
  misc_feature: MA Experiment ID: 20001905 Result: Up-regulated in Transcription
  misc_feature: MA Experiment 20001905 PARAMETER Experiment Name: At_Drought_Reproduction_P Parameter: Age (day) Value: 40
  misc_feature: MA Experiment 20001905 PARAMETER Experiment Name: At_Drought_Reproduction_P Parameter: Organism Value: A. thaliana
  misc_feature: MA Experiment 20001905 PARAMETER Experiment Name: At_Drought_Reproduction_P Parameter: Plant Line Value: WS
  misc_feature: MA Experiment 20001905 PARAMETER Experiment Name: At_Drought_Reproduction_P Parameter: Timepoint (day) Value: 10
  misc_feature: MA Experiment 20001905 PARAMETER Experiment Name: At_Drought_Reproduction_P Parameter: Tissue Value: Rosettes
  misc_feature: MA Experiment 20001905 PARAMETER Experiment Name: At_Drought_Reproduction_P Parameter: Treatment Value: Drought vs. No Drought
  misc_feature: MA Experiment ID: 20001906 Result: Up-regulated in Transcription
  misc_feature: MA Experiment 20001906 PARAMETER Experiment Name: At_Drought_Reproduction_P Parameter: Age (day) Value: 35
  misc_feature: MA Experiment 20001906 PARAMETER Experiment Name: At_Drought_Reproduction_P Parameter: Organism Value: A. thaliana
  misc_feature: MA Experiment 20001906 PARAMETER Experiment Name: At_Drought_Reproduction_P Parameter: Plant Line Value: WS
  misc_feature: MA Experiment 20001906 PARAMETER Experiment Name: At_Drought_Reproduction_P Parameter: Timepoint (day) Value: 5
  misc_feature: MA Experiment 20001906 PARAMETER Experiment Name: At_Drought_Reproduction_P Parameter: Tissue Value: Siliques
  misc_feature: MA Experiment 20001906 PARAMETER Experiment Name: At_Drought_Reproduction_P Parameter: Treatment Value: Drought vs. No Drought
  misc_feature: MA Experiment ID: 20001910 Result: Up-regulated in Transcription
  misc_feature: MA Experiment 20001910 PARAMETER Experiment Name: At_Drought_Reproduction_P Parameter: Age (day) Value: 37
  misc_feature: MA Experiment 20001910 PARAMETER Experiment Name: At_Drought_Reproduction_P Parameter: Organism Value: A. thaliana
  misc_feature: MA Experiment 20001910 PARAMETER Experiment Name: At_Drought_Reproduction_P Parameter: Plant Line Value: WS
  misc_feature: MA Experiment 20001910 PARAMETER Experiment Name: At_Drought_Reproduction_P Parameter: Timepoint (day) Value: 7
  misc_feature: MA Experiment 20001910 PARAMETER Experiment Name: At_Drought_Reproduction_P Parameter: Tissue Value: Flowers
  misc_feature: MA Experiment 20001910 PARAMETER Experiment Name: At_Drought_Reproduction_P Parameter: Treatment Value: Drought vs. No Drought
  misc_feature: MA Experiment ID: 20001911 Result: Up-regulated in Transcription
  misc_feature: MA Experiment 20001911 PARAMETER Experiment Name: At_Drought_Reproduction_P Parameter: Age (day) Value: 40
  misc_feature: MA Experiment 20001911 PARAMETER Experiment Name: At_Drought_Reproduction_P Parameter: Organism Value: A. thaliana
  misc_feature: MA Experiment 20001911 PARAMETER Experiment Name: At_Drought_Reproduction_P Parameter: Plant Line Value: WS
  misc_feature: MA Experiment 20001911 PARAMETER Experiment Name: At_Drought_Reproduction_P Parameter: Timepoint (day) Value: 10
  misc_feature: MA Experiment 20001911 PARAMETER Experiment Name: At_Drought_Reproduction_P Parameter: Tissue Value: Flowers
  misc_feature: MA Experiment 20001911 PARAMETER Experiment Name: At_Drought_Reproduction_P Parameter: Treatment Value: Drought vs. No Drought
atcaatagttcaatactaagaaaccggcctatatatatatttgtggtcactaatttctccaaaaaccagttgccttccgtaaaaagatggaacctcagagaaaacactcgacagccctccacacgtgtcatccctgccggcgaaccattccatacagaatctacgccgtatttcacacgtgtggcatcatagctctcatgtatcaccatgtacactcaattgtcaacgcaaacaacactctaataacatgtcttcttctcctctccgatattgttctcgccttcatgtgggcaaccacaacttccctccggttaaacccgattcatcggaccgagtaccctgaaaaatatgctgctaaaccggaggactttccaaagctggacgtttttatatgcacggctgatccgtacaaggagcctccgatgatggtggttaacaccgctttatcggtgatggcttacgagtatccgtctcataagatctcagtgtacgtatcggacgatggaggatcttccttgactttgtttgctcttatggaggctgccaagttctctaagcattggttgcccttttgcaagaataacaatgttcaagatcgctctcctgaagtttatttttcttcaaagtcacattcttcgagtgatgaagctgaaaatcttaagatgatgtacgaagacatgaagagtagagtcgaacatgtggtcgagagcggaaaagttgagactgcgtttatcgcatgcgatcaatttagttgtgtgttcgatctgtggacagataaattcactcgtcatgaccatcctaccattattatggtgctacaacataacgaaacagagatgatgccaaaccttatatatgtttcaagagaaaagagtaaagtttcaccacatcatttcaaagccggtgctcttaatactttgttacgtgtatctgccgtgatgacaaactcaccaatcattctaacactagattgtgacatgtactcaaacaatcctacaacaccacttcatgctctgtgctatttgtcagaccctaaaatcaattttgatttaggatttgtgcaatttcctcaaaaatttcaaggagtaaacaaaaatgatatttatgcatccgagctcaaacgcccatttgacatcaacacggttgggtttgatggacttatgggaccagttcatatgggaactgggtgtttcttcaatcgacgggcgttttatgggcctccgactactttgattttgcctgagatagaaacatttgggccaaatcggattgccgataagcccattaaagcccaagatattttggcgttggcacacgatgtagcaggatgtaactacgagtgcaacaccaattggggatccaaggtaagattaaaatgaactttagctttcttttatgtatgttgattttttggttatgtttacagattttgtttcttttacatcaactagtcttctcaaaatccat

SEQ ID NO: 40164 - protein, 430 aa, Arabidopsis thaliana
  peptide (1)..(430): Ceres Seq. ID no. 12395586
  misc_feature (10)..(427): Pfam Name: Cellulose synthase Pfam Description: Cellulose synthase
  misc_feature (1)..(243): Homolog of NCBI NO: 15233653 NR Description: putative protein; protein id: At4g24010.1
  misc_feature (279)..(427): Homolog of NCBI NO: 15233649 NR Description: cellulose synthase catalytic subunit - like
  misc_feature (1)..(243): Homolog of NCBI NO: 15233649 NR Description: cellulose synthase catalytic subunit - like
  misc_feature (1)..(426): Homolog of NCBI NO: 2262116 NR Description: cellulose synthase isolog [Arabidopsis thaliana]
  misc_feature (278)..(427): Homolog of NCBI NO: 7487588 NR Description: hypothetical protein T32A16.170 - Arabidopsis
  misc_feature (1)..(243): Homolog of NCBI NO: 7487588 NR Description: hypothetical protein T32A16.170 - Arabidopsis
  misc_feature (1)..(430): Homolog of NCBI NO: 21536834 NR Description: unknown [Arabidopsis thaliana]
  misc_feature (1)..(427): Homolog of NCBI NO: 2262115 NR Description: cellulose synthase isolog [Arabidopsis thaliana]
  misc_feature (1)..(427): Homolog of NCBI NO: 30686386 NR Description: cellulose synthase - related [Arabidopsis
  misc_feature (1)..(430): Homolog of NCBI NO: 17380774 NR Description: unknown protein [Arabidopsis thaliana]
MEPQRKHSTALHTCHPCRRTIPYRIYAVFHTCGIIALMYHHVHSIVNANNTLITCLLLLSDIVLAFMWATTTSLRLNPIHRTEYPEKYAAKPEDFPKLDVFICTADPYKEPPMMVVNTALSVMAYEYPSHKISVYVSDDGGSSLTLFALMEAAKFSKHWLPFCKNNNVQDRSPEVYFSSKSHSSSDEAENLKMMYEDMKSRVEHVVESGKVETAFIACDQFSCVFDLWTDKFTRHDHPTIIMVLQHNETEMMPNLIYVSREKSKVSPHHFKAGALNTLLRVSAVMTNSPIILTLDCDMYSNNPTTPLHALCYLSDPKINFDLGFVQFPQKFQGVNKNDIYASELKRPFDINTVGFDGLMGPVHMGTGCFFNRRAFYGPPTTLILPEIETFGPNRIADKPIKAQDILALAHDVAGCNYECNTNWGSKVRLK

SEQ ID NO: 40165 - protein, 393 aa, Arabidopsis thaliana
  peptide (1)..(393): Ceres Seq. ID no. 12395587
  misc_feature (1)..(390): Pfam Name: Cellulose synthase Pfam Description: Cellulose synthase
  misc_feature (1)..(206): Homolog of NCBI NO: 15233653 NR Description: putative protein; protein id: At4g24010.1
  misc_feature (242)..(390): Homolog of NCBI NO: 15233649 NR Description: cellulose synthase catalytic subunit - like
  misc_feature (1)..(206): Homolog of NCBI NO: 15233649 NR Description: cellulose synthase catalytic subunit - like
  misc_feature (1)..(389): Homolog of NCBI NO: 2262116 NR Description: cellulose synthase isolog [Arabidopsis thaliana]
  misc_feature (241)..(390): Homolog of NCBI NO: 7487588 NR Description: hypothetical protein T32A16.170 - Arabidopsis
  misc_feature (1)..(206): Homolog of NCBI NO: 7487588 NR Description: hypothetical protein T32A16.170 - Arabidopsis
  misc_feature (1)..(393): Homolog of NCBI NO: 21536834 NR Description: unknown [Arabidopsis thaliana]
  misc_feature (1)..(390): Homolog of NCBI NO: 2262115 NR Description: cellulose synthase isolog [Arabidopsis thaliana]
  misc_feature (1)..(390): Homolog of NCBI NO: 30686386 NR Description: cellulose synthase - related [Arabidopsis
  misc_feature (1)..(393): Homolog of NCBI NO: 17380774 NR Description: unknown protein [Arabidopsis thaliana]
MYHHVHSIVNANNTLITCLLLLSDIVLAFMWATTTSLRLNPIHRTEYPEKYAAKPEDFPKLDVFICTADPYKEPPMMVVNTALSVMAYEYPSHKISVYVSDDGGSSLTLFALMEAAKFSKHWLPFCKNNNVQDRSPEVYFSSKSHSSSDEAENLKMMYEDMKSRVEHVVESGKVETAFIACDQFSCVFDLWTDKFTRHDHPTIIMVLQHNETEMMPNLIYVSREKSKVSPHHFKAGALNTLLRVSAVMTNSPIILTLDCDMYSNNPTTPLHALCYLSDPKINFDLGFVQFPQKFQGVNKNDIYASELKRPFDINTVGFDGLMGPVHMGTGCFFNRRAFYGPPTTLILPEIETFGPNRIADKPIKAQDILALAHDVAGCNYECNTNWGSKVRLK

SEQ ID NO: 40166 - protein, 364 aa, Arabidopsis thaliana
  peptide (1)..(364): Ceres Seq. ID no. 12395588
  misc_feature (1)..(361): Pfam Name: Cellulose synthase Pfam Description: Cellulose synthase
  misc_feature (1)..(177): Homolog of NCBI NO: 15233653 NR Description: putative protein; protein id: At4g24010.1
  misc_feature (213)..(361): Homolog of NCBI NO: 15233649 NR Description: cellulose synthase catalytic subunit - like
  misc_feature (1)..(177): Homolog of NCBI NO: 15233649 NR Description: cellulose synthase catalytic subunit - like
  misc_feature (1)..(360): Homolog of NCBI NO: 2262116 NR Description: cellulose synthase isolog [Arabidopsis thaliana]
  misc_feature (212)..(361): Homolog of NCBI NO: 7487588 NR Description: hypothetical protein T32A16.170 - Arabidopsis
  misc_feature (1)..(177): Homolog of NCBI NO: 7487588 NR Description: hypothetical protein T32A16.170 - Arabidopsis
  misc_feature (1)..(364): Homolog of NCBI NO: 21536834 NR Description: unknown [Arabidopsis thaliana]
  misc_feature (1)..(361): Homolog of NCBI NO: 2262115 NR Description: cellulose synthase isolog [Arabidopsis thaliana]
  misc_feature (1)..(361): Homolog of NCBI NO: 30686386 NR Description: cellulose synthase - related [Arabidopsis
  misc_feature (1)..(364): Homolog of NCBI NO: 17380774 NR Description: unknown protein [Arabidopsis thaliana]
MWATTTSLRLNPIHRTEYPEKYAAKPEDFPKLDVFICTADPYKEPPMMVVNTALSVMAYEYPSHKISVYVSDDGGSSLTLFALMEAAKFSKHWLPFCKNNNVQDRSPEVYFSSKSHSSSDEAENLKMMYEDMKSRVEHVVESGKVETAFIACDQFSCVFDLWTDKFTRHDHPTIIMVLQHNETEMMPNLIYVSREKSKVSPHHFKAGALNTLLRVSAVMTNSPIILTLDCDMYSNNPTTPLHALCYLSDPKINFDLGFVQFPQKFQGVNKNDIYASELKRPFDINTVGFDGLMGPVHMGTGCFFNRRAFYGPPTTLILPEIETFGPNRIADKPIKAQDILALAHDVAGCNYECNTNWGSKVRLK

SEQ ID NO: 40167 - DNA, 670 bp, Arabidopsis thaliana
  misc_feature (1)..(670): Ceres Seq. ID no. 12422360
  misc_feature: MA Experiment ID: 108434 Result: Down-regulated in Transcription
  misc_feature: MA Experiment 108434 PARAMETER Experiment Name: At_Root_Tips_cDNA_P Parameter: Tissue Value: Root Tips
  misc_feature: MA Experiment ID: 108461 Result: Up-regulated in Transcription
  misc_feature: MA Experiment 108461 PARAMETER Experiment Name: At_Germinating_Seeds_cDNA_P Parameter: Age (day) Value: 1 vs. 0
  misc_feature: MA Experiment 108461 PARAMETER Experiment Name: At_Germinating_Seeds_cDNA_P Parameter: Tissue Value: Germinating Seeds
  misc_feature: MA Experiment ID: 108462 Result: Up-regulated in Transcription
  misc_feature: MA Experiment 108462 PARAMETER Experiment Name: At_Germinating_Seeds_cDNA_P Parameter: Age (day) Value: 2 vs. 0
  misc_feature: MA Experiment 108462 PARAMETER Experiment Name: At_Germinating_Seeds_cDNA_P Parameter: Tissue Value: Germinating Seeds
  misc_feature: MA Experiment ID: 108463 Result: Up-regulated in Transcription
  misc_feature: MA Experiment 108463 PARAMETER Experiment Name: At_Germinating_Seeds_cDNA_P Parameter: Age (day) Value: 3 vs. 0
  misc_feature: MA Experiment 108463 PARAMETER Experiment Name: At_Germinating_Seeds_cDNA_P Parameter: Tissue Value: Germinating Seeds
  misc_feature: MA Experiment ID: 108464 Result: Up-regulated in Transcription
  misc_feature: MA Experiment 108464 PARAMETER Experiment Name: At_Germinating_Seeds_cDNA_P Parameter: Age (day) Value: 4 vs. 0
  misc_feature: MA Experiment 108464 PARAMETER Experiment Name: At_Germinating_Seeds_cDNA_P Parameter: Tissue Value: Germinating Seeds
  misc_feature: MA Experiment ID: 108489 Result: Up-regulated in Transcription
  misc_feature: MA Experiment ID: 108573 Result: Up-regulated in Transcription
  misc_feature: MA Experiment 108573 PARAMETER Experiment Name: At_Drought_cDNA_P Parameter: Timepoint (hr) Value: 6
  misc_feature: MA Experiment 108573 PARAMETER Experiment Name: At_Drought_cDNA_P Parameter: Tissue Value: Aerial
  misc_feature: MA Experiment 108573 PARAMETER Experiment Name: At_Drought_cDNA_P Parameter: Treatment Value: Drought vs. No Drought
  misc_feature: MA Experiment ID: 108605 Result: Up-regulated in Transcription
  misc_feature: MA Experiment 108605 PARAMETER Experiment Name: At_100uM_ABA_cDNA_P Parameter: Timepoint (hr) Value: 6
  misc_feature: MA Experiment 108605 PARAMETER Experiment Name: At_100uM_ABA_cDNA_P Parameter: Tissue Value: Aerial
  misc_feature: MA Experiment 108605 PARAMETER Experiment Name: At_100uM_ABA_cDNA_P Parameter: Treatment Value: 100uM ABA vs. No Treatment
  misc_feature: MA Experiment ID: 108607 Result: Up-regulated in Transcription
  misc_feature: MA Experiment 108607 PARAMETER Experiment Name: At_100uM_ABA_cDNA_P Parameter: Timepoint (hr) Value: 4
  misc_feature: MA Experiment 108607 PARAMETER Experiment Name: At_100uM_ABA_cDNA_P Parameter: Tissue Value: Aerial
  misc_feature: MA Experiment 108607 PARAMETER Experiment Name: At_100uM_ABA_cDNA_P Parameter: Treatment Value: 100uM ABA vs. No Treatment
  misc_feature: MA Experiment ID: 108668 Result: Up-regulated in Transcription
  misc_feature: MA Experiment 108668 PARAMETER Experiment Name: At_2mM_SA_cDNA_P Parameter: Plant Line Value: WS
  misc_feature: MA Experiment 108668 PARAMETER Experiment Name: At_2mM_SA_cDNA_P Parameter: Timepoint (hr) Value: 6
  misc_feature: MA Experiment 108668 PARAMETER Experiment Name: At_2mM_SA_cDNA_P Parameter: Treatment Value: 2mM SA vs. No Treatment
  misc_feature: MA Experiment ID: 20000069 Result: Up-regulated in Transcription
  misc_feature: MA Experiment 20000069 PARAMETER Experiment Name: At_100uM_ABA_Mutants_cDNA_P Parameter: Plant Line Value: CS23
  misc_feature: MA Experiment 20000069 PARAMETER Experiment Name: At_100uM_ABA_Mutants_cDNA_P Parameter: Timepoint (hr) Value: 6
  misc_feature: MA Experiment 20000069 PARAMETER Experiment Name: At_100uM_ABA_Mutants_cDNA_P Parameter: Tissue Value: Aerial
  misc_feature: MA Experiment 20000069 PARAMETER Experiment Name: At_100uM_ABA_Mutants_cDNA_P Parameter: Treatment Value: 100uM ABA vs. No Treatment
  misc_feature: MA Experiment ID: 20000070 Result: Up-regulated in Transcription
  misc_feature: MA Experiment 20000070 PARAMETER Experiment Name: At_100uM_ABA_Mutants_cDNA_P Parameter: Plant Line Value: CS24
  misc_feature: MA Experiment 20000070 PARAMETER Experiment Name: At_100uM_ABA_Mutants_cDNA_P Parameter: Timepoint (hr) Value: 6
  misc_feature: MA Experiment 20000070 PARAMETER Experiment Name: At_100uM_ABA_Mutants_cDNA_P Parameter: Tissue Value: Aerial
  misc_feature: MA Experiment 20000070 PARAMETER Experiment Name: At_100uM_ABA_Mutants_cDNA_P Parameter: Treatment Value: 100uM ABA vs. No Treatment
  misc_feature: MA Experiment ID: 20000072 Result: Up-regulated in Transcription
  misc_feature: MA Experiment 20000072 PARAMETER Experiment Name: At_100uM_ABA_Mutants_cDNA_P Parameter: Plant Line Value: CS8105
  misc_feature: MA Experiment 20000072 PARAMETER Experiment Name: At_100uM_ABA_Mutants_cDNA_P Parameter: Timepoint (hr) Value: 6
  misc_feature: MA Experiment 20000072 PARAMETER Experiment Name: At_100uM_ABA_Mutants_cDNA_P Parameter: Tissue Value: Aerial
  misc_feature: MA Experiment 20000072 PARAMETER Experiment Name: At_100uM_ABA_Mutants_cDNA_P Parameter: Treatment Value: 100uM ABA vs. No Treatment
  misc_feature: MA Experiment ID: 20000086 Result: Up-regulated in Transcription
  misc_feature: MA Experiment 20000086 PARAMETER Experiment Name: At_100uM_ABA_Mutants_cDNA_P Parameter: Plant Line Value: CS22
  misc_feature: MA Experiment 20000086 PARAMETER Experiment Name: At_100uM_ABA_Mutants_cDNA_P Parameter: Timepoint (hr) Value: 6
  misc_feature: MA Experiment 20000086 PARAMETER Experiment Name: At_100uM_ABA_Mutants_cDNA_P Parameter: Tissue Value: Aerial
  misc_feature: MA Experiment 20000086 PARAMETER Experiment Name: At_100uM_ABA_Mutants_cDNA_P Parameter: Treatment Value: 100uM ABA vs. No Treatment
  misc_feature: MA Experiment ID: 20000087 Result: Up-regulated in Transcription
  misc_feature: MA Experiment 20000087 PARAMETER Experiment Name: At_100uM_ABA_Mutants_cDNA_P Parameter: Plant Line Value: WS
  misc_feature: MA Experiment 20000087 PARAMETER Experiment Name: At_100uM_ABA_Mutants_cDNA_P Parameter: Timepoint (hr) Value: 6
  misc_feature: MA Experiment 20000087 PARAMETER Experiment Name: At_100uM_ABA_Mutants_cDNA_P Parameter: Tissue Value: Aerial
  misc_feature: MA Experiment 20000087 PARAMETER Experiment Name: At_100uM_ABA_Mutants_cDNA_P Parameter: Treatment Value: 100uM ABA vs. No Treatment
  misc_feature: MA Experiment ID: 20000088 Result: Up-regulated in Transcription
  misc_feature: MA Experiment 20000088 PARAMETER Experiment Name: At_100uM_ABA_Mutants_cDNA_P Parameter: Plant Line Value: Landsberg
  misc_feature: MA Experiment 20000088 PARAMETER Experiment Name: At_100uM_ABA_Mutants_cDNA_P Parameter: Timepoint (hr) Value: 6
  misc_feature: MA Experiment 20000088 PARAMETER Experiment Name: At_100uM_ABA_Mutants_cDNA_P Parameter: Tissue Value: Aerial
  misc_feature: MA Experiment 20000088 PARAMETER Experiment Name: At_100uM_ABA_Mutants_cDNA_P Parameter: Treatment Value: 100uM ABA vs. No Treatment
  misc_feature: MA Experiment ID: 20000117 Result: Up-regulated in Transcription
  misc_feature: MA Experiment 20000117 PARAMETER Experiment Name: At_100uM_ABA_Mutants_cDNA_P Parameter: Plant Line Value: Columbia
  misc_feature: MA Experiment 20000117 PARAMETER Experiment Name: At_100uM_ABA_Mutants_cDNA_P Parameter: Timepoint (hr) Value: 6
  misc_feature: MA Experiment 20000117 PARAMETER Experiment Name: At_100uM_ABA_Mutants_cDNA_P Parameter: Tissue Value: Aerial
  misc_feature: MA Experiment 20000117 PARAMETER Experiment Name: At_100uM_ABA_Mutants_cDNA_P Parameter: Treatment Value: 100uM ABA vs. No Treatment
  misc_feature: MA Experiment ID: 20000169 Result: Up-regulated in Transcription
  misc_feature: MA Experiment 20000169 PARAMETER Experiment Name: At_100uM_ABA_P Parameter: Age (day) Value: 14
  misc_feature: MA Experiment 20000169 PARAMETER Experiment Name: At_100uM_ABA_P Parameter: Organism Value: A. thaliana
  misc_feature: MA Experiment 20000169 PARAMETER Experiment Name: At_100uM_ABA_P Parameter: Plant Line Value: WS
  misc_feature: MA Experiment 20000169 PARAMETER Experiment Name: At_100uM_ABA_P Parameter: Timepoint (hr) Value: 6
  misc_feature: MA Experiment 20000169 PARAMETER Experiment Name: At_100uM_ABA_P Parameter: Tissue Value: Aerial
  misc_feature: MA Experiment 20000169 PARAMETER Experiment Name: At_100uM_ABA_P Parameter: Treatment Value: 100uM ABA vs. No Treatment
  misc_feature: MA Experiment ID: 20000180 Result: Up-regulated in Transcription
  misc_feature: MA Experiment 20000180 PARAMETER Experiment Name: At_Germinating_Seeds_P Parameter: Age (hr) Value: 24 vs. 0
  misc_feature: MA Experiment 20000180 PARAMETER Experiment Name: At_Germinating_Seeds_P Parameter: Tissue Value: Germinating Seeds
  misc_feature: MA Experiment ID: 20000184 Result: Up-regulated in Transcription
  misc_feature: MA Experiment 20000184 PARAMETER Experiment Name: At_Shoots__P Parameter: Age (day) Value: 7
  misc_feature: MA Experiment 20000184 PARAMETER Experiment Name: At_Shoots__P Parameter: Tissue Value: Shoots vs. Whole Plant
  misc_feature: MA Experiment ID: 20000185 Result: Up-regulated in Transcription
  misc_feature: MA Experiment 20000185 PARAMETER Experiment Name: At_Roots__P Parameter: Age (day) Value: 7 vs. 21
  misc_feature: MA Experiment 20000185 PARAMETER Experiment Name: At_Roots__P Parameter: Organism Value: A. thaliana
  misc_feature: MA Experiment 20000185 PARAMETER Experiment Name: At_Roots__P Parameter: Tissue Value: Roots vs. Whole Plant
  misc_feature: MA Experiment ID: 20000227 Result: Up-regulated in Transcription
  misc_feature: MA Experiment 20000227 PARAMETER Experiment Name: At_Root-Tips-vs-Tops_P Parameter: Tissue Value: Root Tips vs. Root Tops
  misc_feature: MA Experiment ID: 20000269 Result: Up-regulated in Transcription
  misc_feature: MA Experiment 20000269 PARAMETER Experiment Name: At_1mM_KNO3_L-vs-H_Roots_P Parameter: Age (day) Value: 7,10,12
  misc_feature: MA Experiment 20000269 PARAMETER Experiment Name: At_1mM_KNO3_L-vs-H_Roots_P Parameter: Organism Value: A. thaliana
  misc_feature: MA Experiment 20000269 PARAMETER Experiment Name: At_1mM_KNO3_L-vs-H_Roots_P Parameter: Plant Line Value: WS
  misc_feature: MA Experiment 20000269 PARAMETER Experiment Name: At_1mM_KNO3_L-vs-H_Roots_P Parameter: Timepoint (day) Value: 7,10,12
  misc_feature: MA Experiment 20000269 PARAMETER Experiment Name: At_1mM_KNO3_L-vs-H_Roots_P Parameter: Tissue Value: Roots
  misc_feature: MA Experiment 20000269 PARAMETER Experiment Name: At_1mM_KNO3_L-vs-H_Roots_P Parameter: Treatment Value: 1mM KNO3 vs. 50mM KNO3
  misc_feature: MA Experiment ID: 20000436 Result: Up-regulated in Transcription
  misc_feature: MA Experiment 20000436 PARAMETER Experiment Name: At_Drought_P Parameter: Age (day) Value: 7
  misc_feature: MA Experiment 20000436 PARAMETER Experiment Name: At_Drought_P Parameter: Organism Value: A. thaliana
  misc_feature: MA Experiment 20000436 PARAMETER Experiment Name: At_Drought_P Parameter: Plant Line Value: WS
  misc_feature: MA Experiment 20000436 PARAMETER Experiment Name: At_Drought_P Parameter: Timepoint (hr) Value: 12
  misc_feature: MA Experiment 20000436 PARAMETER Experiment Name: At_Drought_P Parameter: Tissue Value: Whole Plant
  misc_feature: MA Experiment 20000436 PARAMETER Experiment Name: At_Drought_P Parameter: Treatment Value: Drought vs. No Drought
  misc_feature: MA Experiment ID: 20001457 Result: Down-regulated in Transcription
  misc_feature: MA Experiment 20001457 PARAMETER Experiment Name: At_50mM_NH4NO3_L-to-H_P Parameter: Age (day) Value: Undefined
  misc_feature: MA Experiment 20001457 PARAMETER Experiment Name: At_50mM_NH4NO3_L-to-H_P Parameter: Organism Value: Undefined
  misc_feature: MA Experiment 20001457 PARAMETER Experiment Name: At_50mM_NH4NO3_L-to-H_P Parameter: Plant Line Value: Undefined
  misc_feature: MA Experiment 20001457 PARAMETER Experiment Name: At_50mM_NH4NO3_L-to-H_P Parameter: Timepoint (hr) Value: 0.5
  misc_feature: MA Experiment 20001457 PARAMETER Experiment Name: At_50mM_NH4NO3_L-to-H_P Parameter: Tissue Value: Siliques
  misc_feature: MA Experiment 20001457 PARAMETER Experiment Name: At_50mM_NH4NO3_L-to-H_P Parameter: Treatment Value: 50mM NH4NO3 vs. 100mM Manitol
  misc_feature: MA Experiment ID: 20001556 Result: Up-regulated in Transcription
  misc_feature: MA Experiment 20001556 PARAMETER Experiment Name: At_Drought_Soil_Dry_P Parameter: Age (day) Value: 26
  misc_feature: MA Experiment 20001556 PARAMETER Experiment Name: At_Drought_Soil_Dry_P Parameter: Organism Value: A. thaliana
  misc_feature: MA Experiment 20001556 PARAMETER Experiment Name: At_Drought_Soil_Dry_P Parameter: Plant Line Value: WS
  misc_feature: MA Experiment 20001556 PARAMETER Experiment Name: At_Drought_Soil_Dry_P Parameter: Post Timepoint (hr) Value: None
  misc_feature: MA Experiment 20001556 PARAMETER Experiment Name: At_Drought_Soil_Dry_P Parameter: Post-Treatment Value: None
  misc_feature: MA Experiment 20001556 PARAMETER Experiment Name: At_Drought_Soil_Dry_P Parameter: Timepoint (day) Value: 12
  misc_feature: MA Experiment 20001556 PARAMETER Experiment Name: At_Drought_Soil_Dry_P Parameter: Treatment Value: Drought vs. No Drought
  misc_feature: MA Experiment ID: 20001904 Result: Up-regulated in Transcription
  misc_feature: MA Experiment 20001904 PARAMETER Experiment Name: At_Drought_Reproduction_P Parameter: Age (day) Value: 37
  misc_feature: MA Experiment 20001904 PARAMETER Experiment Name: At_Drought_Reproduction_P Parameter: Organism Value: A. thaliana
  misc_feature: MA Experiment 20001904 PARAMETER Experiment Name: At_Drought_Reproduction_P Parameter: Plant Line Value: WS
  misc_feature: MA Experiment 20001904 PARAMETER Experiment Name: At_Drought_Reproduction_P Parameter: Timepoint (day) Value: 7
  misc_feature: MA Experiment 20001904 PARAMETER Experiment Name: At_Drought_Reproduction_P Parameter: Tissue Value: Rosettes
  misc_feature: MA Experiment 20001904 PARAMETER Experiment Name: At_Drought_Reproduction_P Parameter: Treatment Value: Drought vs. No Drought
acaaacaacgaacatggctaaacgttttctgcttcttcttcctcttttgtcatctattcttcttcttgccgtgtccgttacagcttactccacaacaacgccgtatcaaggctacaagccggagaaattcacccacctccacttctacttccatgacgtcatcaccggtgacaaacctaccgccatcaaagtcgccgaagcccgccgaacaaactccctcaacgtcaattttggcgtgatcatgatcgcagatgatcctttgaccgaaggaccagacccgagctcaaagtaagtgggaagagctcaggggatgtacgcatcaacagccatgaaggacatagtcttcacaatggtctttaactatgttttcacggcaggagagtttaatggaagcaccatcgcggtgtatggacggaatgatatattttcgaaggtgagagagttgccgattattgtaggaactggtgctttcaggtttgctagaggctatgcactgcccaagacttataagattgttggtctagatgccgtggtcgagtataatgtcttcatttggcattaatcatttgcatattgtctaatgtctttccgaaataaattgtttcactctggtttcctcatattgtttttggttcttttatatatatatatatataacaattgttctgtt

SEQ ID NO: 40168 - protein, 96 aa, Arabidopsis thaliana
  peptide (1)..(96): Ceres Seq. ID no. 12422361
  misc_feature (19)..(96): Pfam Name: Dirigent-like protein Pfam Description: Dirigent-like protein
  misc_feature (79)..(96): Homolog of NCBI NO: 15230941 NR Description: disease resistance response protein-related
  misc_feature (79)..(96): Homolog of NCBI NO: 26450265 NR Description: unknown protein [Arabidopsis thaliana]
  misc_feature (11)..(96): Homolog of NCBI NO: 25412014 NR Description: probable disease resistance response protein
  misc_feature (15)..(96): Homolog of NCBI NO: 15226465 NR Description: disease resistance response protein-related
  misc_feature (11)..(96): Homolog of NCBI NO: 30681257 NR Description: disease resistance response protein-related/
  misc_feature (15)..(96): Homolog of NCBI NO: 15217886 NR Description: disease resistance response protein-related/
  misc_feature (5)..(96): Homolog of NCBI NO: 15218836 NR Description: disease resistance response protein-related/
  misc_feature (5)..(96): Homolog of NCBI NO: 15219966 NR Description: disease resistance response protein-related
  misc_feature (5)..(96): Homolog of NCBI NO: 15238980 NR Description: disease resistance response protein-related
  misc_feature (5)..(96): Homolog of NCBI NO: 15238982 NR Description: disease resistance response protein-related
QTTNMAKRFLLLLPLLSSILLLAVSVTAYSTTTPYQGYKPEKFTHLHFYFHDVITGDKPTAIKVAEARRTNSLNVNFGVIMIADDPLTEGPDPSSK

SEQ ID NO: 40169 - protein, 92 aa, Arabidopsis thaliana
  peptide (1)..(92): Ceres Seq. ID no. 12422362
  misc_feature (15)..(92): Pfam Name: Dirigent-like protein Pfam Description: Dirigent-like protein
  misc_feature (75)..(92): Homolog of NCBI NO: 15230941 NR Description: disease resistance response protein-related
  misc_feature (75)..(92): Homolog of NCBI NO: 26450265 NR Description: unknown protein [Arabidopsis thaliana]
  misc_feature (7)..(92): Homolog of NCBI NO: 25412014 NR Description: probable disease resistance response protein
  misc_feature (11)..(92): Homolog of NCBI NO: 15226465 NR Description: disease resistance response protein-related
  misc_feature (7)..(92): Homolog of NCBI NO: 30681257 NR Description: disease resistance response protein-related/
  misc_feature (11)..(92): Homolog of NCBI NO: 15217886 NR Description: disease resistance response protein-related/
  misc_feature (1)..(92): Homolog of NCBI NO: 15218836 NR Description: disease resistance response protein-related/
  misc_feature (1)..(92): Homolog of NCBI NO: 15219966 NR Description: disease resistance response protein-related
  misc_feature (1)..(92): Homolog of NCBI NO: 15238980 NR Description: disease resistance response protein-related
  misc_feature (1)..(92): Homolog of NCBI NO: 15238982 NR Description: disease resistance response protein-related
MAKRFLLLLPLLSSILLLAVSVTAYSTTTPYQGYKPEKFTHLHFYFHDVITGDKPTAIKVAEARRTNSLNVNFGVIMIADDPLTEGPDPSSK

SEQ ID NO: 40170 - protein, 83 aa, Arabidopsis thaliana
  peptide (1)..(83): Ceres Seq. ID no. 12422363
  misc_feature (1)..(83): Pfam Name: Dirigent-like protein Pfam Description: Dirigent-like protein
  misc_feature (1)..(83): Homolog of NCBI NO: 15230941 NR Description: disease resistance response protein-related
  misc_feature (1)..(83): Homolog of NCBI NO: 26450265 NR Description: unknown protein [Arabidopsis thaliana]
  misc_feature (1)..(78): Homolog of NCBI NO: 25412014 NR Description: probable disease resistance response protein
  misc_feature (1)..(83): Homolog of NCBI NO: 15226465 NR Description: disease resistance response protein-related
  misc_feature (1)..(83): Homolog of NCBI NO: 30681257 NR Description: disease resistance response protein-related/
  misc_feature (1)..(83): Homolog of NCBI NO: 15217886 NR Description: disease resistance response protein-related/
  misc_feature (1)..(83): Homolog of NCBI NO: 15218836 NR Description: disease resistance response protein-related/
  misc_feature (1)..(83): Homolog of NCBI NO: 15219966 NR Description: disease resistance response protein-related
  misc_feature (1)..(83): Homolog of NCBI NO: 15238980 NR Description: disease resistance response protein-related
  misc_feature (1)..(83): Homolog of NCBI NO: 15238982 NR Description: disease resistance response protein-related
MYASTAMKDIVFTMVFNYVFTAGEFNGSTIAVYGRNDIFSKVRELPIIVGTGAFRFARGYALPKTYKIVGLDAVVEYNVFIWH

SEQ ID NO: 40171 - DNA, 1033 bp, Arabidopsis thaliana
  misc_feature (1)..(1033): Ceres Seq. ID no. 12326197
  misc_feature: MA Experiment ID: 108434 Result: Down-regulated in Transcription
  misc_feature: MA Experiment 108434 PARAMETER Experiment Name: At_Root_Tips_cDNA_P Parameter: Tissue Value: Root Tips
  misc_feature: MA Experiment ID: 108435 Result: Down-regulated in Transcription
  misc_feature: MA Experiment 108435 PARAMETER Experiment Name: At_stm_Mutants_cDNA_P Parameter: Plant Line Value: wt Landsburg vs stm
  misc_feature: MA Experiment 108435 PARAMETER Experiment Name: At_stm_Mutants_cDNA_P Parameter: Tissue Value: Shoot Apical Meristem Region
  misc_feature: MA Experiment ID: 108461 Result: Up-regulated in Transcription
  misc_feature: MA Experiment 108461 PARAMETER Experiment Name: At_Germinating_Seeds_cDNA_P Parameter: Age (day) Value: 1 vs. 0
  misc_feature: MA Experiment 108461 PARAMETER Experiment Name: At_Germinating_Seeds_cDNA_P Parameter: Tissue Value: Germinating Seeds
  misc_feature: MA Experiment ID: 108462 Result: Up-regulated in Transcription
  misc_feature: MA Experiment 108462 PARAMETER Experiment Name: At_Germinating_Seeds_cDNA_P Parameter: Age (day) Value: 2 vs. 0
  misc_feature: MA Experiment 108462 PARAMETER Experiment Name: At_Germinating_Seeds_cDNA_P Parameter: Tissue Value: Germinating Seeds
  misc_feature: MA Experiment ID: 108463 Result: Up-regulated in Transcription
  misc_feature: MA Experiment 108463 PARAMETER Experiment Name: At_Germinating_Seeds_cDNA_P Parameter: Age (day) Value: 3 vs. 0
  misc_feature: MA Experiment 108463 PARAMETER Experiment Name: At_Germinating_Seeds_cDNA_P Parameter: Tissue Value: Germinating Seeds
  misc_feature: MA Experiment ID: 108464 Result: Up-regulated in Transcription
  misc_feature: MA Experiment 108464 PARAMETER Experiment Name: At_Germinating_Seeds_cDNA_P Parameter: Age (day) Value: 4 vs. 0
  misc_feature: MA Experiment 108464 PARAMETER Experiment Name: At_Germinating_Seeds_cDNA_P Parameter: Tissue Value: Germinating Seeds
  misc_feature: MA Experiment ID: 108488 Result: Up-regulated in Transcription
  misc_feature: MA Experiment ID: 108489 Result: Down-regulated in Transcription
  misc_feature: MA Experiment ID: 108595 Result: Down-regulated in Transcription
  misc_feature: MA Experiment 108595 PARAMETER Experiment Name: At_Ler-pi_Ovule_cDNA_P Parameter: Plant Line Value: null
  misc_feature: MA Experiment ID: 20000072 Result: Down-regulated in Transcription
  misc_feature: MA Experiment 20000072 PARAMETER Experiment Name: At_100uM_ABA_Mutants_cDNA_P Parameter: Plant Line Value: CS8105
  misc_feature: MA Experiment 20000072 PARAMETER Experiment Name: At_100uM_ABA_Mutants_cDNA_P Parameter: Timepoint (hr) Value: 6
  misc_feature: MA Experiment 20000072 PARAMETER Experiment Name: At_100uM_ABA_Mutants_cDNA_P Parameter: Tissue Value: Aerial
  misc_feature: MA Experiment 20000072 PARAMETER Experiment Name: At_100uM_ABA_Mutants_cDNA_P Parameter: Treatment Value: 100uM ABA vs. No Treatment
  misc_feature: MA Experiment ID: 20000086 Result: Down-regulated in Transcription
  misc_feature: MA Experiment 20000086 PARAMETER Experiment Name: At_100uM_ABA_Mutants_cDNA_P Parameter: Plant Line Value: CS22
  misc_feature: MA Experiment 20000086 PARAMETER Experiment Name: At_100uM_ABA_Mutants_cDNA_P Parameter: Timepoint (hr) Value: 6
  misc_feature: MA Experiment 20000086 PARAMETER Experiment Name: At_100uM_ABA_Mutants_cDNA_P Parameter: Tissue Value: Aerial
  misc_feature: MA Experiment 20000086 PARAMETER Experiment Name: At_100uM_ABA_Mutants_cDNA_P Parameter: Treatment Value: 100uM ABA vs. No Treatment
  misc_feature: MA Experiment ID: 20000087 Result: Down-regulated in Transcription
  misc_feature: MA Experiment 20000087 PARAMETER Experiment Name: At_100uM_ABA_Mutants_cDNA_P Parameter: Plant Line Value: WS
  misc_feature: MA Experiment 20000087 PARAMETER Experiment Name: At_100uM_ABA_Mutants_cDNA_P Parameter: Timepoint (hr) Value: 6
  misc_feature: MA Experiment 20000087 PARAMETER Experiment Name: At_100uM_ABA_Mutants_cDNA_P Parameter: Tissue Value: Aerial
  misc_feature: MA Experiment 20000087 PARAMETER Experiment Name: At_100uM_ABA_Mutants_cDNA_P Parameter: Treatment Value: 100uM ABA vs. No Treatment
  misc_feature: MA Experiment ID: 20000088 Result: Down-regulated in Transcription
  misc_feature: MA Experiment 20000088 PARAMETER Experiment Name: At_100uM_ABA_Mutants_cDNA_P Parameter: Plant Line Value: Landsberg
  misc_feature: MA Experiment 20000088 PARAMETER Experiment Name: At_100uM_ABA_Mutants_cDNA_P Parameter: Timepoint (hr) Value: 6
  misc_feature: MA Experiment 20000088 PARAMETER Experiment Name: At_100uM_ABA_Mutants_cDNA_P Parameter: Tissue Value: Aerial
  misc_feature: MA Experiment 20000088 PARAMETER Experiment Name: At_100uM_ABA_Mutants_cDNA_P Parameter: Treatment Value: 100uM ABA vs. No Treatment
  misc_feature: MA Experiment ID: 20000090 Result: Down-regulated in Transcription
  misc_feature: MA Experiment ID: 20000180 Result: Up-regulated in Transcription
  misc_feature: MA Experiment 20000180 PARAMETER Experiment Name: At_Germinating_Seeds_P Parameter: Age (hr) Value: 24 vs. 0
  misc_feature: MA Experiment 20000180 PARAMETER Experiment Name: At_Germinating_Seeds_P Parameter: Tissue Value: Germinating Seeds
  misc_feature: MA Experiment ID: 20000185 Result: Down-regulated in Transcription
  misc_feature: MA Experiment 20000185 PARAMETER Experiment Name: At_Roots__P Parameter: Age (day) Value: 7 vs. 21
  misc_feature: MA Experiment 20000185 PARAMETER Experiment Name: At_Roots__P Parameter: Organism Value: A. thaliana
  misc_feature: MA Experiment 20000185 PARAMETER Experiment Name: At_Roots__P Parameter: Tissue Value: Roots vs. Whole Plant
  misc_feature: MA Experiment ID: 20000264 Result: Down-regulated in Transcription
  misc_feature: MA Experiment 20000264 PARAMETER Experiment Name: At_Open_Flower_P Parameter: Age (day) Value: 21
  misc_feature: MA Experiment 20000264 PARAMETER Experiment Name: At_Open_Flower_P Parameter: Plant Line Value: WS
  misc_feature: MA Experiment 20000264 PARAMETER Experiment Name: At_Open_Flower_P Parameter: Tissue Value: Open Flower vs. Whole Plant
  misc_feature: MA Experiment ID: 20000265 Result: Down-regulated in Transcription
  misc_feature: MA Experiment 20000265 PARAMETER Experiment Name: At_Open_Flower_P Parameter: Age (day) Value: 21
  misc_feature: MA Experiment 20000265 PARAMETER Experiment Name: At_Open_Flower_P Parameter: Plant Line Value: WS
  misc_feature: MA Experiment 20000265 PARAMETER Experiment Name: At_Open_Flower_P Parameter: Tissue Value: Closed Flower vs. Whole Plant
  misc_feature: MA Experiment ID: 20000437 Result: Down-regulated in Transcription
  misc_feature: MA Experiment 20000437 PARAMETER Experiment Name: At_Drought_P Parameter: Age (day) Value: 8
  misc_feature: MA Experiment 20000437 PARAMETER Experiment Name: At_Drought_P Parameter: Organism Value: A. thaliana
  misc_feature: MA Experiment 20000437 PARAMETER Experiment Name: At_Drought_P Parameter: Plant Line Value: WS
  misc_feature: MA Experiment 20000437 PARAMETER Experiment Name: At_Drought_P Parameter: Timepoint (hr) Value: 24
  misc_feature: MA Experiment 20000437 PARAMETER Experiment Name: At_Drought_P Parameter: Tissue Value: Whole Plant
  misc_feature: MA Experiment 20000437 PARAMETER Experiment Name: At_Drought_P Parameter: Treatment Value: Drought vs. No Drought
  misc_feature: MA Experiment ID: 20000438 Result: Up-regulated in Transcription
  misc_feature: MA Experiment 20000438 PARAMETER Experiment Name: At_Shoots__P Parameter: Age (day) Value: 14
  misc_feature: MA Experiment 20000438 PARAMETER Experiment Name: At_Shoots__P Parameter: Tissue Value: Shoots vs. Whole Plant
  misc_feature: MA Experiment ID: 20000439 Result: Down-regulated in Transcription
  misc_feature: MA Experiment 20000439 PARAMETER Experiment Name: At_Roots__P Parameter: Age (day) Value: 14 vs. 21
  misc_feature: MA Experiment 20000439 PARAMETER Experiment Name: At_Roots__P Parameter: Organism Value: A. thaliana
  misc_feature: MA Experiment 20000439 PARAMETER Experiment Name: At_Roots__P Parameter: Tissue Value: Roots vs. Whole Plant
  misc_feature: MA Experiment ID: 20000794 Result: Down-regulated in Transcription
  misc_feature: MA Experiment 20000794 PARAMETER Experiment Name: At_Petals_P Parameter: Age (day) Value: 23-25 days
  misc_feature: MA Experiment 20000794 PARAMETER Experiment Name: At_Petals_P Parameter: Plant Line Value: WS
  misc_feature: MA Experiment 20000794 PARAMETER Experiment Name: At_Petals_P Parameter: Tissue Value: Petals vs. Whole plant
  misc_feature: MA Experiment ID: 20001450 Result: Down-regulated in Transcription
  misc_feature: MA Experiment 20001450 PARAMETER Experiment Name: At_Far-red-induction_P Parameter: Age (day) Value: 7
  misc_feature: MA Experiment 20001450 PARAMETER Experiment Name: At_Far-red-induction_P Parameter: Light Value: Far-red vs. White
  misc_feature: MA Experiment 20001450 PARAMETER Experiment Name: At_Far-red-induction_P Parameter: Organism Value: A. thaliana
  misc_feature: MA Experiment 20001450 PARAMETER Experiment Name: At_Far-red-induction_P Parameter: Plant Line Value: Columbia
  misc_feature: MA Experiment 20001450 PARAMETER Experiment Name: At_Far-red-induction_P Parameter: Timepoint (hr) Value: 8
  misc_feature: MA Experiment 20001450 PARAMETER Experiment Name: At_Far-red-induction_P Parameter: Tissue Value: Whole Plant
  misc_feature: MA Experiment ID: 20001555 Result: Down-regulated in Transcription
  misc_feature: MA Experiment 20001555 PARAMETER Experiment Name: At_Drought_Soil_Dry_P Parameter: Age (day) Value: 24
  misc_feature: MA Experiment 20001555 PARAMETER Experiment Name: At_Drought_Soil_Dry_P Parameter: Organism Value: A. thaliana
  misc_feature: MA Experiment 20001555 PARAMETER Experiment Name: At_Drought_Soil_Dry_P Parameter: Plant Line Value: WS
  misc_feature: MA Experiment 20001555 PARAMETER Experiment Name: At_Drought_Soil_Dry_P Parameter: Post Timepoint (hr) Value: None
  misc_feature: MA Experiment 20001555 PARAMETER Experiment Name: At_Drought_Soil_Dry_P Parameter: Post-Treatment Value: None
  misc_feature: MA Experiment 20001555 PARAMETER Experiment Name: At_Drought_Soil_Dry_P Parameter: Timepoint (day) Value: 10
  misc_feature: MA Experiment 20001555 PARAMETER Experiment Name: At_Drought_Soil_Dry_P Parameter: Treatment Value: Drought vs. No Drought
  misc_feature: MA Experiment ID: 20001556 Result: Down-regulated in Transcription
  misc_feature: MA Experiment 20001556 PARAMETER Experiment Name: At_Drought_Soil_Dry_P Parameter: Age (day) Value: 26
  misc_feature: MA Experiment 20001556 PARAMETER Experiment Name: At_Drought_Soil_Dry_P Parameter: Organism Value: A. thaliana
  misc_feature: MA Experiment 20001556 PARAMETER Experiment Name: At_Drought_Soil_Dry_P Parameter: Plant Line Value: WS
  misc_feature: MA Experiment 20001556 PARAMETER Experiment Name: At_Drought_Soil_Dry_P Parameter: Post Timepoint (hr) Value: None
  misc_feature: MA Experiment 20001556 PARAMETER Experiment Name: At_Drought_Soil_Dry_P Parameter: Post-Treatment Value: None
  misc_feature: MA Experiment 20001556 PARAMETER Experiment Name: At_Drought_Soil_Dry_P Parameter: Timepoint (day) Value: 12
  misc_feature: MA Experiment 20001556 PARAMETER Experiment Name: At_Drought_Soil_Dry_P Parameter: Treatment Value: Drought vs. No Drought
  misc_feature: MA Experiment ID: 20001557 Result: Down-regulated in Transcription
  misc_feature: MA Experiment 20001557 PARAMETER Experiment Name: At_Drought_Soil_Dry_P Parameter: Age (day) Value: 27
  misc_feature: MA Experiment 20001557 PARAMETER Experiment Name: At_Drought_Soil_Dry_P Parameter: Organism Value: A. thaliana
  misc_feature: MA Experiment 20001557 PARAMETER Experiment Name: At_Drought_Soil_Dry_P Parameter: Plant Line Value: WS
  misc_feature: MA Experiment 20001557 PARAMETER Experiment Name: At_Drought_Soil_Dry_P Parameter: Post Timepoint (hr) Value: 3
  misc_feature: MA Experiment 20001557 PARAMETER Experiment Name: At_Drought_Soil_Dry_P Parameter: Post-Treatment Value: Re-Water vs. No Drought
  misc_feature: MA Experiment 20001557 PARAMETER Experiment Name: At_Drought_Soil_Dry_P Parameter: Timepoint (day) Value: 13
  misc_feature: MA Experiment 20001557 PARAMETER Experiment Name: At_Drought_Soil_Dry_P Parameter: Treatment Value: Drought vs. No Drought
  misc_feature: MA Experiment ID: 20001559 Result: Down-regulated in Transcription
  misc_feature: MA Experiment 20001559 PARAMETER Experiment Name: At_Drought_Soil_Dry_P Parameter: Age (day) Value: 28
  misc_feature: MA Experiment 20001559 PARAMETER Experiment Name: At_Drought_Soil_Dry_P Parameter: Organism Value: A. thaliana
  misc_feature: MA Experiment 20001559 PARAMETER Experiment Name: At_Drought_Soil_Dry_P Parameter: Plant Line Value: WS
  misc_feature: MA Experiment 20001559 PARAMETER Experiment Name: At_Drought_Soil_Dry_P Parameter: Post Timepoint (hr) Value: 29
  misc_feature: MA Experiment 20001559 PARAMETER Experiment Name: At_Drought_Soil_Dry_P Parameter: Post-Treatment Value: Re-Water vs. No Drought
  misc_feature: MA Experiment 20001559 PARAMETER Experiment Name: At_Drought_Soil_Dry_P Parameter: Timepoint (day) Value: 14
  misc_feature: MA Experiment 20001559 PARAMETER Experiment Name: At_Drought_Soil_Dry_P Parameter: Treatment Value: Drought vs. No Drought
  misc_feature: MA Experiment ID: 20001757 Result: Up-regulated in Transcription
  misc_feature: MA Experiment 20001757 PARAMETER Experiment Name: At_50mM_NH4NO3_L-to-H_P Parameter: Timepoint (hr) Value: 6
  misc_feature: MA Experiment 20001757 PARAMETER Experiment Name: At_50mM_NH4NO3_L-to-H_P Parameter: Tissue Value: Leaf
  misc_feature: MA Experiment 20001757 PARAMETER Experiment Name: At_50mM_NH4NO3_L-to-H_P Parameter: Treatment Value: 50mM NH4NO3 vs 100mM Mannitol
  misc_feature: MA Experiment ID: 20001904 Result: Down-regulated in Transcription
  misc_feature: MA Experiment 20001904 PARAMETER Experiment Name: At_Drought_Reproduction_P Parameter: Age (day) Value: 37
  misc_feature: MA Experiment 20001904 PARAMETER Experiment Name: At_Drought_Reproduction_P Parameter: Organism Value: A. thaliana
  misc_feature: MA Experiment 20001904 PARAMETER Experiment Name: At_Drought_Reproduction_P Parameter: Plant Line Value: WS
  misc_feature: MA Experiment 20001904 PARAMETER Experiment Name: At_Drought_Reproduction_P Parameter: Timepoint (day) Value: 7
  misc_feature: MA Experiment 20001904 PARAMETER Experiment Name: At_Drought_Reproduction_P Parameter: Tissue Value: Rosettes
  misc_feature: MA Experiment 20001904 PARAMETER Experiment Name: At_Drought_Reproduction_P Parameter: Treatment Value: Drought vs. No Drought
  misc_feature: MA Experiment ID: 20001905 Result: Down-regulated in Transcription
  misc_feature: MA Experiment 20001905 PARAMETER Experiment Name: At_Drought_Reproduction_P Parameter: Age (day) Value: 40
  misc_feature: MA Experiment 20001905 PARAMETER Experiment Name: At_Drought_Reproduction_P Parameter: Organism Value: A. thaliana
  misc_feature: MA Experiment 20001905 PARAMETER Experiment Name: At_Drought_Reproduction_P Parameter: Plant Line Value: WS
  misc_feature: MA Experiment 20001905 PARAMETER Experiment Name: At_Drought_Reproduction_P Parameter: Timepoint (day) Value: 10
  misc_feature: MA Experiment 20001905 PARAMETER Experiment Name: At_Drought_Reproduction_P Parameter: Tissue Value: Rosettes
  misc_feature: MA Experiment 20001905 PARAMETER Experiment Name: At_Drought_Reproduction_P Parameter: Treatment Value: Drought vs. No Drought
  misc_feature: MA Experiment ID: 20001906 Result: Down-regulated in Transcription
  misc_feature: MA Experiment 20001906 PARAMETER Experiment Name: At_Drought_Reproduction_P Parameter: Age (day) Value: 35
  misc_feature: MA Experiment 20001906 PARAMETER Experiment Name: At_Drought_Reproduction_P Parameter: Organism Value: A. thaliana
  misc_feature: MA Experiment 20001906 PARAMETER Experiment Name: At_Drought_Reproduction_P Parameter: Plant Line Value: WS
  misc_feature: MA Experiment 20001906 PARAMETER Experiment Name: At_Drought_Reproduction_P Parameter: Timepoint (day) Value: 5
  misc_feature: MA Experiment 20001906 PARAMETER Experiment Name: At_Drought_Reproduction_P Parameter: Tissue Value: Siliques
  misc_feature: MA Experiment 20001906 PARAMETER Experiment Name: At_Drought_Reproduction_P Parameter: Treatment Value: Drought vs. No Drought
  misc_feature: MA Experiment ID: 20001908 Result: Down-regulated in Transcription
  misc_feature: MA Experiment 20001908 PARAMETER Experiment Name: At_Drought_Reproduction_P Parameter: Age (day) Value: 40
  misc_feature: MA Experiment 20001908 PARAMETER Experiment Name: At_Drought_Reproduction_P Parameter: Organism Value: A. thaliana
  misc_feature: MA Experiment 20001908 PARAMETER Experiment Name: At_Drought_Reproduction_P Parameter: Plant Line Value: WS
  misc_feature: MA Experiment 20001908 PARAMETER Experiment Name: At_Drought_Reproduction_P Parameter: Timepoint (day) Value: 10
  misc_feature: MA Experiment 20001908 PARAMETER Experiment Name: At_Drought_Reproduction_P Parameter: Tissue Value: Siliques
  misc_feature: MA Experiment 20001908 PARAMETER Experiment Name: At_Drought_Reproduction_P Parameter: Treatment Value: Drought vs. No Drought
aatctcctctctttgattctttctgctccgaaaaacagagagagagaacaacaaccaaacactcatttctccacatcttgagagaaaaaaacagagcaagtatattagagatctcatggcgatggcggtctccggagctgtcctcagtgggcttggttcttcgttcctcaccggaggcaagagaggtgccaccgcattggcaagcggcgtaggcactggagctcagagagttggcaggaaaactcttattgtcgctgctgcggctgctcagcctaagaaatcttggatccctgccgttaaaggtggtggcaacttccttgaccctgaatggctcgatggctcgctaccaggagatttcgggttcgacccattgggtttggggaaagacccggcttttctgaaatggtacagagaggctgagctgatccatggccgatgggcgatggcagcggttcttgggatcttcgtcggccaggcctggagcggtgtggcatggtttgaagctggagcccagccagacgcgatcgctcccttctcgttcgggtcgcttcttggaacccaattgcttctcatgggttgggtggagagcaaacgatgggtcgatttcttcaacccggattctcaatcggttgagtgggcaacgccatggtcgaagaccgccgagaatttcgcgaactataccggcgatcagggataccccggtgggagattcttcgatccgttgggtctcgccgggaaaaaccgcgacggtgtttatgagccggactttgagaagctggagaggctgaaattggcagagattaagcactcgaggctcgcaatggttgccatgttgatcttttactttgaggccgggcaggggaaaacgcctctcggtgctcttggtttgtgagaaaacggcatgatgtttttgattctgtagatacaatttctcttccaaaaacctaatgtttctcttcttcaatgtgacatttgggaaaagatcatcaaaccattgctttaaatgtaaaatgaaatcatgaggcttgttcgt

SEQ ID NO: 40172 - protein, 258 aa, Arabidopsis thaliana
  peptide (1)..(258): Ceres Seq. ID no. 12326198
  misc_feature (68)..(247): Pfam Name: Chlorophyll A-B binding protein Pfam Description: Chlorophyll A-B binding protein
  misc_feature (39)..(256): Homolog of NCBI NO: 5902596 NR Description: light harvesting complex a protein [Volvox
  misc_feature (6)..(245): Homolog of NCBI NO: 115766 NR Description: Chlorophyll A-B binding protein, chloroplast
  misc_feature (32)..(258): Homolog of NCBI NO: 7443235 NR Description: chlorophyll a/b-binding apoprotein CP24 precursor
  misc_feature (1)..(258): Homolog of NCBI NO: 21740892 NR Description: OSJNBa0036B21.6 [Oryza sativa (japonica
  misc_feature (6)..(258): Homolog of NCBI NO: 115833 NR Description: Chlorophyll A-B binding protein CP24 10A,
  misc_feature (1)..(258): Homolog of NCBI NO: 115834 NR Description: Chlorophyll A-B binding protein CP24 10B,
  misc_feature (1)..(258): Homolog of NCBI NO: 543939 NR Description: Chlorophyll A-B binding protein CP24, chloroplast
  misc_feature (1)..(258): Homolog of NCBI NO: 8954298 NR Description: chlorophyll a/b-binding protein CP24 precursor
  misc_feature (1)..(258): Homolog of NCBI NO: 25299024 NR Description: chlorophyll a/b-binding protein Lhcb6
  misc_feature (1)..(258): Homolog of NCBI NO: 15218330 NR Description: chlorophyll binding protein, putative
MAMAVSGAVLSGLGSSFLTGGKRGATALASGVGTGAQRVGRKTLIVAAAAAQPKKSWIPAVKGGGNFLDPEWLDGSLPGDFGFDPLGLGKDPAFLKWYREAELIHGRWAMAAVLGIFVGQAWSGVAWFEAGAQPDAIAPFSFGSLLGTQLLLMGWVESKRWVDFFNPDSQSVEWATPWSKTAENFANYTGDQGYPGGRFFDPLGLAGKNRDGVYEPDFEKLERLKLAEIKHSRLAMVAMLIFYFEAGQGKTPLGALGL

SEQ ID NO: 40173 - protein, 256 aa, Arabidopsis thaliana
  peptide (1)..(256): Ceres Seq. ID no. 12326199
  misc_feature (66)..(245): Pfam Name: Chlorophyll A-B binding protein Pfam Description: Chlorophyll A-B binding protein
  misc_feature (37)..(254): Homolog of NCBI NO: 5902596 NR Description: light harvesting complex a protein [Volvox
  misc_feature (4)..(243): Homolog of NCBI NO: 115766 NR Description: Chlorophyll A-B binding protein, chloroplast
  misc_feature (30)..(256): Homolog of NCBI NO: 7443235 NR Description: chlorophyll a/b-binding apoprotein CP24 precursor
  misc_feature (1)..(256): Homolog of NCBI NO: 21740892 NR Description: OSJNBa0036B21.6 [Oryza sativa (japonica
  misc_feature (4)..(256): Homolog of NCBI NO: 115833 NR Description: Chlorophyll A-B binding protein CP24 10A,
  misc_feature (1)..(256): Homolog of NCBI NO: 115834 NR Description: Chlorophyll A-B binding protein CP24 10B,
  misc_feature (1)..(256): Homolog of NCBI NO: 543939 NR Description: Chlorophyll A-B binding protein CP24, chloroplast
  misc_feature (1)..(256): Homolog of NCBI NO: 8954298 NR Description: chlorophyll a/b-binding protein CP24 precursor
  misc_feature (1)..(256): Homolog of NCBI NO: 25299024 NR Description: chlorophyll a/b-binding protein Lhcb6
  misc_feature (1)..(256): Homolog of NCBI NO: 15218330 NR Description: chlorophyll binding protein, putative
MAVSGAVLSGLGSSFLTGGKRGATALASGVGTGAQRVGRKTLIVAAAAAQPKKSWIPAVKGGGNFLDPEWLDGSLPGDFGFDPLGLGKDPAFLKWYREAELIHGRWAMAAVLGIFVGQAWSGVAWFEAGAQPDAIAPFSFGSLLGTQLLLMGWVESKRWVDFFNPDSQSVEWATPWSKTAENFANYTGDQGYPGGRFFDPLGLAGKNRDGVYEPDFEKLERLKLAEIKHSRLAMVAMLIFYFEAGQGKTPLGALGL

SEQ ID NO: 40174 - protein, 149 aa, Arabidopsis thaliana
  peptide (1)..(149): Ceres Seq. ID no. 12326200
  misc_feature (1)..(138): Pfam Name: Chlorophyll A-B binding protein Pfam Description: Chlorophyll A-B binding protein
  misc_feature (1)..(147): Homolog of NCBI NO: 5902596 NR Description: light harvesting complex a protein [Volvox
  misc_feature (1)..(136): Homolog of NCBI NO: 115766 NR Description: Chlorophyll A-B binding protein, chloroplast
  misc_feature (1)..(149): Homolog of NCBI NO: 7443235 NR Description: chlorophyll a/b-binding apoprotein CP24 precursor
  misc_feature (1)..(149): Homolog of NCBI NO: 21740892 NR Description: OSJNBa0036B21.6 [Oryza sativa (japonica
  misc_feature (1)..(149): Homolog of NCBI NO: 115833 NR Description: Chlorophyll A-B binding protein CP24 10A,
  misc_feature (1)..(149): Homolog of NCBI NO: 115834 NR Description: Chlorophyll A-B binding protein CP24 10B,
  misc_feature (1)..(149): Homolog of NCBI NO: 543939 NR Description: Chlorophyll A-B binding protein CP24, chloroplast
  misc_feature (1)..(149): Homolog of NCBI NO: 8954298 NR Description: chlorophyll a/b-binding protein CP24 precursor
  misc_feature (1)..(149): Homolog of NCBI NO: 25299024 NR Description: chlorophyll a/b-binding protein Lhcb6
  misc_feature (1)..(149): Homolog of NCBI NO: 15218330 NR Description: chlorophyll binding protein, putative
MAAVLGIFVGQAWSGVAWFEAGAQPDAIAPFSFGSLLGTQLLLMGWVESKRWVDFFNPDSQSVEWATPWSKTAENFANYTGDQGYPGGRFFDPLGLAGKNRDGVYEPDFEKLERLKLAEIKHSRLAMVAMLIFYFEAGQGKTPLGALGL

SEQ ID NO: 40175 - DNA, 936 bp, Arabidopsis thaliana
  misc_feature (1)..(936): Ceres Seq. ID no. 13494708
  misc_feature: MA Experiment ID: 108569 Result: Down-regulated in Transcription
  misc_feature: MA Experiment 108569 PARAMETER Experiment Name: At_0.001%_MeJA__cDNA_P Parameter: Timepoint (hr) Value: 6
  misc_feature: MA Experiment 108569 PARAMETER Experiment Name: At_0.001%_MeJA__cDNA_P Parameter: Tissue Value: Aerial
  misc_feature: MA Experiment 108569 PARAMETER Experiment Name: At_0.001%_MeJA__cDNA_P Parameter: Treatment Value: 0.001% MeJA vs. No Treatment
  misc_feature: MA Experiment ID: 108576 Result: Up-regulated in Transcription
  misc_feature: MA Experiment 108576 PARAMETER Experiment Name: At_42deg_Heat_cDNA_P Parameter: Temperature (deg C) Value: 42 vs. 22
  misc_feature: MA Experiment 108576 PARAMETER Experiment Name: At_42deg_Heat_cDNA_P Parameter: Timepoint (hr) Value: 1
  misc_feature: MA Experiment 108576 PARAMETER Experiment Name: At_42deg_Heat_cDNA_P Parameter: Tissue Value: Aerial
  misc_feature: MA Experiment ID: 20000087 Result: Down-regulated in Transcription
  misc_feature: MA Experiment 20000087 PARAMETER Experiment Name: At_100uM_ABA_Mutants_cDNA_P Parameter: Plant Line Value: WS
  misc_feature: MA Experiment 20000087 PARAMETER Experiment Name: At_100uM_ABA_Mutants_cDNA_P Parameter: Timepoint (hr) Value: 6
  misc_feature: MA Experiment 20000087 PARAMETER Experiment Name: At_100uM_ABA_Mutants_cDNA_P Parameter: Tissue Value: Aerial
  misc_feature: MA Experiment 20000087 PARAMETER Experiment Name: At_100uM_ABA_Mutants_cDNA_P Parameter: Treatment Value: 100uM ABA vs. No Treatment
  misc_feature: MA Experiment ID: 20000329 Result: Down-regulated in Transcription
  misc_feature: MA Experiment 20000329 PARAMETER Experiment Name: At_4deg_Cold_Sub_P Parameter: Age (day) Value: 14
  misc_feature: MA Experiment 20000329 PARAMETER Experiment Name: At_4deg_Cold_Sub_P Parameter: Organism Value: A. thaliana
  misc_feature: MA Experiment 20000329 PARAMETER Experiment Name: At_4deg_Cold_Sub_P Parameter: Plant Line Value: WS
  misc_feature: MA Experiment 20000329 PARAMETER Experiment Name: At_4deg_Cold_Sub_P Parameter: Temperature (deg C) Value: 4 vs. 22
  misc_feature: MA Experiment 20000329 PARAMETER Experiment Name: At_4deg_Cold_Sub_P Parameter: Timepoint (hr) Value: 6
  misc_feature: MA Experiment 20000329 PARAMETER Experiment Name: At_4deg_Cold_Sub_P Parameter: Tissue Value: Aerial
atgaccgacgaacccataaaagaccaccagttcgacaacggcggcgacgaggctgagataacagacgcggcgaagaggtcccttccgattaaaagtcgcaagcattcaacgatggcttccatcacgaattatgtccgatacatggctcacaagctcgagtactctctcactctcagccttaagaaacatactagagagaagctcagtgaccgggaactctttggtgtagtcatgaagaatctattctatggaagaataagctacttacactcggacaaaggaaaagagatggccccaaccatgggaacaaatgaaagcacgctacttgtccgtaagctaccagttgttgatacaaggtacattttcgtaggggatgctgttgtcttgaaggacccgaatgaaacaaataagtatatagtcagaagactagcagctttagagggatctgaaatggtatcaagtgatgagaaagatgagccttttgttctcgaaaaggatcagtgctgggtcgttgctgagaatcaagagatgaaatctaaagaagcatatgatagtcgaacatttggtccaatttcaatggcggacatagtgggaagagctatatattgtctgaggacagcagtggatcatggtccagtaagcaacagtgaatttgccatggacgaggattccccaatcctggcggtagaacttgacgtggatgaattggctaaaggccacaaggcgtcataatgaagaacctttcttgtaccacattttcattcactgtgtcgatgtttcacttataaactccaatttagttgtcattggaggtgtttgtggcaaatgttggcccgttggtacttaagcttaatacgtcggatgctgttgagtgttgacttgaggaaaaggttcttcatgagcttcatcctctctataataaacaaccatttctat

SEQ ID NO: 40176 - protein, 243 aa, Arabidopsis thaliana
  peptide (1)..(243): Ceres Seq. ID no. 13494709
  misc_feature (38)..(241): Homolog of NCBI NO: 38344766 NR Description: OSJNBa0068L06.9 [Oryza sativa (japonica
  misc_feature (38)..(216): Homolog of NCBI NO: 25408133 NR Description: hypothetical protein At2g31140 [imported] -
  misc_feature (38)..(242): Homolog of NCBI NO: 30684839 NR Description: expressed protein [Arabidopsis thaliana]
  misc_feature (38)..(243): Homolog of NCBI NO: 25406903 NR Description: hypothetical protein [imported] - Arabidopsis
  misc_feature (38)..(243): Homolog of NCBI NO: 15221421 NR Description: expressed protein [Arabidopsis thaliana]
MTDEPIKDHQFDNGGDEAEITDAAKRSLPIKSRKHSTMASITNYVRYMAHKLEYSLTLSLKKHTREKLSDRELFGVVMKNLFYGRISYLHSDKGKEMAPTMGTNESTLLVRKLPVVDTRYIFVGDAVVLKDPNETNKYIVRRLAALEGSEMVSSDEKDEPFVLEKDQCWVVAENQEMKSKEAYDSRTFGPISMADIVGRAIYCLRTAVDHGPVSNSEFAMDEDSPILAVELDVDELAKGHKAS

SEQ ID NO: 40177 - protein, 206 aa, Arabidopsis thaliana
  peptide (1)..(206): Ceres Seq. ID no. 13494710
  misc_feature (1)..(204): Homolog of NCBI NO: 38344766 NR Description: OSJNBa0068L06.9 [Oryza sativa (japonica
  misc_feature (1)..(179): Homolog of NCBI NO: 25408133 NR Description: hypothetical protein At2g31140 [imported] -
  misc_feature (1)..(205): Homolog of NCBI NO: 30684839 NR Description: expressed protein [Arabidopsis thaliana]
  misc_feature (1)..(206): Homolog of NCBI NO: 25406903 NR Description: hypothetical protein [imported] - Arabidopsis
  misc_feature (1)..(206): Homolog of NCBI NO: 15221421 NR Description: expressed protein [Arabidopsis thaliana]
MASITNYVRYMAHKLEYSLTLSLKKHTREKLSDRELFGVVMKNLFYGRISYLHSDKGKEMAPTMGTNESTLLVRKLPVVDTRYIFVGDAVVLKDPNETNKYIVRRLAALEGSEMVSSDEKDEPFVLEKDQCWVVAENQEMKSKEAYDSRTFGPISMADIVGRAIYCLRTAVDHGPVSNSEFAMDEDSPILAVELDVDELAKGHKAS

SEQ ID NO: 40178 - protein, 196 aa, Arabidopsis thaliana
  peptide (1)..(196): Ceres Seq. ID no. 13494711
  misc_feature (1)..(194): Homolog of NCBI NO: 38344766 NR Description: OSJNBa0068L06.9 [Oryza sativa (japonica
  misc_feature (1)..(169): Homolog of NCBI NO: 25408133 NR Description: hypothetical protein At2g31140 [imported] -
  misc_feature (1)..(195): Homolog of NCBI NO: 30684839 NR Description: expressed protein [Arabidopsis thaliana]
  misc_feature (1)..(196): Homolog of NCBI NO: 25406903 NR Description: hypothetical protein [imported] - Arabidopsis
  misc_feature (1)..(196): Homolog of NCBI NO: 15221421 NR Description: expressed protein [Arabidopsis thaliana]
MAHKLEYSLTLSLKKHTREKLSDRELFGVVMKNLFYGRISYLHSDKGKEMAPTMGTNESTLLVRKLPVVDTRYIFVGDAVVLKDPNETNKYIVRRLAALEGSEMVSSDEKDEPFVLEKDQCWVVAENQEMKSKEAYDSRTFGPISMADIVGRAIYCLRTAVDHGPVSNSEFAMDEDSPILAVELDVDELAKGHKAS

SEQ ID NO: 40179 - DNA, 1411 bp, Arabidopsis thaliana
  misc_feature (1)..(1411): Ceres Seq. ID no. 13497337
  misc_feature: MA Experiment ID: 108434 Result: Up-regulated in Transcription
  misc_feature: MA Experiment 108434 PARAMETER Experiment Name: At_Root_Tips_cDNA_P Parameter: Tissue Value: Root Tips
  misc_feature: MA Experiment ID: 20000173 Result: Down-regulated in Transcription
  misc_feature: MA Experiment 20000173 PARAMETER Experiment Name: At_42deg_Heat_P Parameter: Age (day) Value: 14
  misc_feature: MA Experiment 20000173 PARAMETER Experiment Name: At_42deg_Heat_P Parameter: Organism Value: A. thaliana
  misc_feature: MA Experiment 20000173 PARAMETER Experiment Name: At_42deg_Heat_P Parameter: Plant Line Value: WS
  misc_feature: MA Experiment 20000173 PARAMETER Experiment Name: At_42deg_Heat_P Parameter: Temperature (deg C) Value: 42 vs. 22
  misc_feature: MA Experiment 20000173 PARAMETER Experiment Name: At_42deg_Heat_P Parameter: Timepoint (hr) Value: 6
  misc_feature: MA Experiment 20000173 PARAMETER Experiment Name: At_42deg_Heat_P Parameter: Tissue Value: Aerial
  misc_feature: MA Experiment ID: 20000185 Result: Up-regulated in Transcription
  misc_feature: MA Experiment 20000185 PARAMETER Experiment Name: At_Roots__P Parameter: Age (day) Value: 7 vs. 21
  misc_feature: MA Experiment 20000185 PARAMETER Experiment Name: At_Roots__P Parameter: Organism Value: A. thaliana
  misc_feature: MA Experiment 20000185 PARAMETER Experiment Name: At_Roots__P Parameter: Tissue Value: Roots vs. Whole Plant
  misc_feature: MA Experiment ID: 20000227 Result: Up-regulated in Transcription
  misc_feature: MA Experiment 20000227 PARAMETER Experiment Name: At_Root-Tips-vs-Tops_P Parameter: Tissue Value: Root Tips vs. Root Tops
  misc_feature: MA Experiment ID: 20000234 Result: Up-regulated in Transcription
  misc_feature: MA Experiment 20000234 PARAMETER Experiment Name: At_Siliques_P Parameter: Age (day) Value: 21
  misc_feature: MA Experiment 20000234 PARAMETER Experiment Name: At_Siliques_P Parameter: Organism Value: A. thaliana
  misc_feature: MA Experiment 20000234 PARAMETER Experiment Name: At_Siliques_P Parameter: Plant Line Value: WS
  misc_feature: MA Experiment 20000234 PARAMETER Experiment Name: At_Siliques_P Parameter: Tissue Value: Less Than 5mm Siliques vs. Whole Plant
  misc_feature: MA Experiment ID: 20000235 Result: Up-regulated in Transcription
  misc_feature: MA Experiment 20000235 PARAMETER Experiment Name: At_Siliques_P Parameter: Age (day) Value: 21
  misc_feature: MA Experiment 20000235 PARAMETER Experiment Name: At_Siliques_P Parameter: Organism Value: A. thaliana
  misc_feature: MA Experiment 20000235 PARAMETER Experiment Name: At_Siliques_P Parameter: Plant Line Value: WS
  misc_feature: MA Experiment 20000235 PARAMETER Experiment Name: At_Siliques_P Parameter: Tissue Value: 5-10mm Siliques vs. Whole Plant
  misc_feature: MA Experiment ID: 20000265 Result: Up-regulated in Transcription
  misc_feature: MA Experiment 20000265 PARAMETER Experiment Name: At_Open_Flower_P Parameter: Age (day) Value: 21
  misc_feature: MA Experiment 20000265 PARAMETER Experiment Name: At_Open_Flower_P Parameter: Plant Line Value: WS
  misc_feature: MA Experiment 20000265 PARAMETER Experiment Name: At_Open_Flower_P Parameter: Tissue Value: Closed Flower vs. Whole Plant
  misc_feature: MA Experiment ID: 20000794 Result: Up-regulated in Transcription
  misc_feature: MA Experiment 20000794 PARAMETER Experiment Name: At_Petals_P Parameter: Age (day) Value: 23-25 days
  misc_feature: MA Experiment 20000794 PARAMETER Experiment Name: At_Petals_P Parameter: Plant Line Value: WS
  misc_feature: MA Experiment 20000794 PARAMETER Experiment Name: At_Petals_P Parameter: Tissue Value: Petals vs. Whole plant
actaccatcgtcgtctccgcgagttcttctctgcgtttaagccatagataacaaaccaaactaaaaaaaaaaagtttctccttttatcattccttctcttcccttgtataggtgtgatcctcttcaaggggatttctctggcgggtcatacattcgcaccgatcaaagtcggattggtctttcttaacgcaatcttgacccgattcaaaaaatttctgggtttgttagtgaatagataagaagataaatgggagctccgttagtgtgccacgggcattctcgtcccgtcgtcgatgtggcttatagtccggtgactccagatgggttctttctcattagcgccagcaaagattcgaatccgatgttgaggaatggagagactggtgactggattgggacttttgaaggacataagggagcagtttggagttgcagccttgataaaaatgctattcgtgctgcctcagcttctgctgatttcactgcgaaaatatggaatgcattgacaggagatgaattgcactcctttgaacacaagcacattgttcgtgcatgtgccttttctgaggacactcaccgtttactcactggtggaatggagaaaatacttcggatattcgatttgaatcggccagacgcacctccaaaagaagtcgggaattcccctggttcaattagaactgtcgaatggcttcatagtgataatacaatcttaagctcttgcacagataccggtgacattaggttatgggacataagaagtgacaagattgttcatacattagaaacaaagtccccagttactagtgctgaagtaagtcaggatgggcgatacatcactactgctgatggatctagtgttaagttttgggacgctaaaaattttggattgctgaagagctatgacatgccttgcaatgttgaatcggcatcgttggaaccgaaacacggtaacactttcattgctggaggagaagatatgtgggtgcacaggtttgatttccagactggagaagagattgggtgtaacaagggtcatcacgggccagtgcactgcgtgaggtatgcgccaggaggggagtcatacacctcaggctcagaagacggaacggtcagaatatgggtggtgggttcggtaaaccatcctgaggagagcaatctaagcggccacgtgaagcttgtggcagaggaggttgtgcgtaaagctgaaagtctccgtatcagtgagaaagccgcagaagctaaatgaaacaccatcgttagcttatgatatcacatagattcatagttgtttttgcatcattataagatgtgacaaaggggttttgccttttaaaagtctctcagaccgaataaaacgaaataatcttcaactatacttgagtgaatagtgaatctaatccaaattttg

SEQ ID NO: 40180 - protein, 333 aa, Arabidopsis thaliana
  peptide (1)..(333): Ceres Seq. ID no. 13497338
  misc_feature (4)..(295): Homolog of NCBI NO: 6755682 NR Description: serine/threonine kinase receptor associated
  misc_feature (4)..(295): Homolog of NCBI NO: 20149592 NR Description: unr-interacting protein [Homo sapiens]
  misc_feature (4)..(295): Homolog of NCBI NO: 12643951 NR Description: UNR-interacting protein (WD-40 repeat protein
  misc_feature (4)..(292): Homolog of NCBI NO: 12667270 NR Description: serine-threonine kinase receptor-associated
  misc_feature (4)..(295): Homolog of NCBI NO: 4519417 NR Description: WD-40 repeat protein [Homo sapiens]
  misc_feature (4)..(292): Homolog of NCBI NO: 29437263 NR Description: Similar to serine/threonine kinase receptor
  misc_feature (4)..(258): Homolog of NCBI NO: 15219076 NR Description: unknown protein; protein id: At1g52730.1
  misc_feature (4)..(333): Homolog of NCBI NO: 30695318 NR Description: transducin / WD-40 repeat protein family
  misc_feature (1)..(333): Homolog of NCBI NO: 18400838 NR Description: transducin / WD-40 repeat protein family
  misc_feature (1)..(333): Homolog of NCBI NO: 18394249 NR Description: transducin / WD-40 repeat protein family
MGAPLVCHGHSRPVVDVAYSPVTPDGFFLISASKDSNPMLRNGETGDWIGTFEGHKGAVWSCSLDKNAIRAASASADFTAKIWNALTGDELHSFEHKHIVRACAFSEDTHRLLTGGMEKILRIFDLNRPDAPPKEVGNSPGSIRTVEWLHSDNTILSSCTDTGDIRLWDIRSDKIVHTLETKSPVTSAEVSQDGRYITTADGSSVKFWDAKNFGLLKSYDMPCNVESASLEPKHGNTFIAGGEDMWVHRFDFQTGEEIGCNKGHHGPVHCVRYAPGGESYTSGSEDGTVRIWVVGSVNHPEESNLSGHVKLVAEEVVRKAESLRISEKAAEAK

SEQ ID NO: 40181 - protein, 295 aa, Arabidopsis thaliana
  peptide (1)..(295): Ceres Seq. ID no. 13497339
  misc_feature (1)..(257): Homolog of NCBI NO: 6755682 NR Description: serine/threonine kinase receptor associated
  misc_feature (1)..(257): Homolog of NCBI NO: 20149592 NR Description: unr-interacting protein [Homo sapiens]
  misc_feature (1)..(257): Homolog of NCBI NO: 12643951 NR Description: UNR-interacting protein (WD-40 repeat protein
  misc_feature (1)..(254): Homolog of NCBI NO: 12667270 NR Description: serine-threonine kinase receptor-associated
  misc_feature (1)..(257): Homolog of NCBI NO: 4519417 NR Description: WD-40 repeat protein [Homo sapiens]
  misc_feature (1)..(254): Homolog of NCBI NO: 29437263 NR Description: Similar to serine/threonine kinase receptor
  misc_feature (1)..(220): Homolog of NCBI NO: 15219076 NR Description: unknown protein; protein id: At1g52730.1
  misc_feature (1)..(295): Homolog of NCBI NO: 30695318 NR Description: transducin / WD-40 repeat protein family
  misc_feature (1)..(295): Homolog of NCBI NO: 18400838 NR Description: transducin / WD-40 repeat protein family
  misc_feature (1)..(295): Homolog of NCBI NO: 18394249 NR Description: transducin / WD-40 repeat protein family
MLRNGETGDWIGTFEGHKGAVWSCSLDKNAIRAASASADFTAKIWNALTGDELHSFEHKHIVRACAFSEDTHRLLTGGMEKILRIFDLNRPDAPPKEVGNSPGSIRTVEWLHSDNTILSSCTDTGDIRLWDIRSDKIVHTLETKSPVTSAEVSQDGRYITTADGSSVKFWDAKNFGLLKSYDMPCNVESASLEPKHGNTFIAGGEDMWVHRFDFQTGEEIGCNKGHHGPVHCVRYAPGGESYTSGSEDGTVRIWVVGSVNHPEESNLSGHVKLVAEEVVRKAESLRISEKAAEAK

SEQ ID NO: 40182 - protein, 217 aa, Arabidopsis thaliana
  peptide (1)..(217): Ceres Seq. ID no. 13497340
  misc_feature (1)..(179): Homolog of NCBI NO: 6755682 NR Description: serine/threonine kinase receptor associated
  misc_feature (1)..(179): Homolog of NCBI NO: 20149592 NR Description: unr-interacting protein [Homo sapiens]
  misc_feature (1)..(179): Homolog of NCBI NO: 12643951 NR Description: UNR-interacting protein (WD-40 repeat protein
  misc_feature (1)..(176): Homolog of NCBI NO: 12667270 NR Description: serine-threonine kinase receptor-associated
  misc_feature (1)..(179): Homolog of NCBI NO: 4519417 NR Description: WD-40 repeat protein [Homo sapiens]
  misc_feature (1)..(176): Homolog of NCBI NO: 29437263 NR Description: Similar to serine/threonine kinase receptor
  misc_feature (1)..(142): Homolog of NCBI NO: 15219076 NR Description: unknown protein; protein id: At1g52730.1
  misc_feature (1)..(217): Homolog of NCBI NO: 30695318 NR Description: transducin / WD-40 repeat protein family
  misc_feature (1)..(217): Homolog of NCBI NO: 18400838 NR Description: transducin / WD-40 repeat protein family
  misc_feature (1)..(217): Homolog of NCBI NO: 18394249 NR Description: transducin / WD-40 repeat protein family
MEKILRIFDLNRPDAPPKEVGNSPGSIRTVEWLHSDNTILSSCTDTGDIRLWDIRSDKIVHTLETKSPVTSAEVSQDGRYITTADGSSVKFWDAKNFGLLKSYDMPCNVESASLEPKHGNTFIAGGEDMWVHRFDFQTGEEIGCNKGHHGPVHCVRYAPGGESYTSGSEDGTVRIWVVGSVNHPEESNLSGHVKLVAEEVVRKAESLRISEKAAEAK

SEQ ID NO: 40183 - DNA, 1835 bp, Arabidopsis thaliana
  misc_feature (1)..(1835): Ceres Seq. ID no. 13487232
  misc_feature: MA Experiment ID: 20000166 Result: Up-regulated in Transcription
  misc_feature: MA Experiment 20000166 PARAMETER Experiment Name: At_100uM_ABA_P Parameter: Age (day) Value: 14
  misc_feature: MA Experiment 20000166 PARAMETER Experiment Name: At_100uM_ABA_P Parameter: Organism Value: A. thaliana
  misc_feature: MA Experiment 20000166 PARAMETER Experiment Name: At_100uM_ABA_P Parameter: Plant Line Value: WS
  misc_feature: MA Experiment 20000166 PARAMETER Experiment Name: At_100uM_ABA_P Parameter: Timepoint (hr) Value: 1
  misc_feature: MA Experiment 20000166 PARAMETER Experiment Name: At_100uM_ABA_P Parameter: Tissue Value: Aerial
  misc_feature: MA Experiment 20000166 PARAMETER Experiment Name: At_100uM_ABA_P Parameter: Treatment Value: 100uM ABA vs. No Treatment
  misc_feature: MA Experiment ID: 20000169 Result: Up-regulated in Transcription
  misc_feature: MA Experiment 20000169 PARAMETER Experiment Name: At_100uM_ABA_P Parameter: Age (day) Value: 14
  misc_feature: MA Experiment 20000169 PARAMETER Experiment Name: At_100uM_ABA_P Parameter: Organism Value: A. thaliana
  misc_feature: MA Experiment 20000169 PARAMETER Experiment Name: At_100uM_ABA_P Parameter: Plant Line Value: WS
  misc_feature: MA Experiment 20000169 PARAMETER Experiment Name: At_100uM_ABA_P Parameter: Timepoint (hr) Value: 6
  misc_feature: MA Experiment 20000169 PARAMETER Experiment Name: At_100uM_ABA_P Parameter: Tissue Value: Aerial
  misc_feature: MA Experiment 20000169 PARAMETER Experiment Name: At_100uM_ABA_P Parameter: Treatment Value: 100uM ABA vs. No Treatment
  misc_feature: MA Experiment ID: 20000180 Result: Up-regulated in Transcription
  misc_feature: MA Experiment 20000180 PARAMETER Experiment Name: At_Germinating_Seeds_P Parameter: Age (hr) Value: 24 vs. 0
  misc_feature: MA Experiment 20000180 PARAMETER Experiment Name: At_Germinating_Seeds_P Parameter: Tissue Value: Germinating Seeds
  misc_feature: MA Experiment ID: 20000182 Result: Up-regulated in Transcription
  misc_feature: MA Experiment 20000182 PARAMETER Experiment Name: At_2mM_SA_P Parameter: Age (day) Value: 14
  misc_feature: MA Experiment 20000182 PARAMETER Experiment Name: At_2mM_SA_P Parameter: Organism Value: A. thaliana
  misc_feature: MA Experiment 20000182 PARAMETER Experiment Name: At_2mM_SA_P Parameter: Plant Line Value: WS
  misc_feature: MA Experiment 20000182 PARAMETER Experiment Name: At_2mM_SA_P Parameter: Timepoint (hr) Value: 6
  misc_feature: MA Experiment 20000182 PARAMETER Experiment Name: At_2mM_SA_P Parameter: Tissue Value: Aerial
  misc_feature: MA Experiment 20000182 PARAMETER Experiment Name: At_2mM_SA_P Parameter: Treatment Value: 2mM SA vs. No Treatment
  misc_feature: MA Experiment ID: 20000184 Result: Down-regulated in Transcription
  misc_feature: MA Experiment 20000184 PARAMETER Experiment Name: At_Shoots__P Parameter: Age (day) Value: 7
  misc_feature: MA Experiment 20000184 PARAMETER Experiment Name: At_Shoots__P Parameter: Tissue Value: Shoots vs. Whole Plant
  misc_feature: MA Experiment ID: 20000211 Result: Up-regulated in Transcription
  misc_feature: MA Experiment 20000211 PARAMETER Experiment Name: At_0.001percent_MeJA__P Parameter: Age (day) Value: 14
  misc_feature: MA Experiment 20000211 PARAMETER Experiment Name: At_0.001percent_MeJA__P Parameter: Organism Value: A. thaliana
  misc_feature: MA Experiment 20000211 PARAMETER Experiment Name: At_0.001percent_MeJA__P Parameter: Plant Line Value: WS
  misc_feature: MA Experiment 20000211 PARAMETER Experiment Name: At_0.001percent_MeJA__P Parameter: Timepoint (hr) Value: 1
  misc_feature: MA Experiment 20000211 PARAMETER Experiment Name: At_0.001percent_MeJA__P Parameter: Tissue Value: Aerial
  misc_feature: MA Experiment 20000211 PARAMETER Experiment Name: At_0.001percent_MeJA__P Parameter: Treatment Value: 0.001percent MeJA vs. No Treatment
  misc_feature: MA Experiment ID: 20000234 Result: Down-regulated in Transcription
  misc_feature: MA Experiment 20000234 PARAMETER Experiment Name: At_Siliques_P Parameter: Age (day) Value: 21
  misc_feature: MA Experiment 20000234 PARAMETER Experiment Name: At_Siliques_P Parameter: Organism Value: A. thaliana
  misc_feature: MA Experiment 20000234 PARAMETER Experiment Name: At_Siliques_P Parameter: Plant Line Value: WS
  misc_feature: MA Experiment 20000234 PARAMETER Experiment Name: At_Siliques_P Parameter: Tissue Value: Less Than 5mm Siliques vs. Whole Plant
  misc_feature: MA Experiment ID: 20000235 Result: Down-regulated in Transcription
  misc_feature: MA Experiment 20000235 PARAMETER Experiment Name: At_Siliques_P Parameter: Age (day) Value: 21
  misc_feature: MA Experiment 20000235 PARAMETER Experiment Name: At_Siliques_P Parameter: Organism Value: A. thaliana
  misc_feature: MA Experiment 20000235 PARAMETER Experiment Name: At_Siliques_P Parameter: Plant Line Value: WS
  misc_feature: MA Experiment 20000235 PARAMETER Experiment Name: At_Siliques_P Parameter: Tissue Value: 5-10mm Siliques vs. Whole Plant
  misc_feature: MA Experiment ID: 20000436 Result: Up-regulated in Transcription
  misc_feature: MA Experiment 20000436 PARAMETER Experiment Name: At_Drought_P Parameter: Age (day) Value: 7
  misc_feature: MA Experiment 20000436 PARAMETER Experiment Name: At_Drought_P Parameter: Organism Value: A. thaliana
  misc_feature: MA Experiment 20000436 PARAMETER Experiment Name: At_Drought_P Parameter: Plant Line Value: WS
  misc_feature: MA Experiment 20000436 PARAMETER Experiment Name: At_Drought_P Parameter: Timepoint (hr) Value: 12
  misc_feature: MA Experiment 20000436 PARAMETER Experiment Name: At_Drought_P Parameter: Tissue Value: Whole Plant
  misc_feature: MA Experiment 20000436 PARAMETER Experiment Name: At_Drought_P Parameter: Treatment Value: Drought vs. No Drought
  misc_feature: MA Experiment ID: 20000437 Result: Up-regulated in Transcription
  misc_feature: MA Experiment 20000437 PARAMETER Experiment Name: At_Drought_P Parameter: Age (day) Value: 8
  misc_feature: MA Experiment 20000437 PARAMETER Experiment Name: At_Drought_P Parameter: Organism Value: A. thaliana
  misc_feature: MA Experiment 20000437 PARAMETER Experiment Name: At_Drought_P Parameter: Plant Line Value: WS
  misc_feature: MA Experiment 20000437 PARAMETER Experiment Name: At_Drought_P Parameter: Timepoint (hr) Value: 24
  misc_feature: MA Experiment 20000437 PARAMETER Experiment Name: At_Drought_P Parameter: Tissue Value: Whole Plant
  misc_feature: MA Experiment 20000437 PARAMETER Experiment Name: At_Drought_P Parameter: Treatment Value: Drought vs. No Drought
  misc_feature: MA Experiment ID: 20000438 Result: Down-regulated in Transcription
  misc_feature: MA Experiment 20000438 PARAMETER Experiment Name: At_Shoots__P Parameter: Age (day) Value: 14
  misc_feature: MA Experiment 20000438 PARAMETER Experiment Name: At_Shoots__P Parameter: Tissue Value: Shoots vs. Whole Plant
  misc_feature: MA Experiment ID: 20000453 Result: Up-regulated in Transcription
  misc_feature: MA Experiment 20000453 PARAMETER Experiment Name: At_100uM_ABA_P Parameter: Age (day) Value: 15
  misc_feature: MA Experiment 20000453 PARAMETER Experiment Name: At_100uM_ABA_P Parameter: Organism Value: A. thaliana
  misc_feature: MA Experiment 20000453 PARAMETER Experiment Name: At_100uM_ABA_P Parameter: Plant Line Value: WS
  misc_feature: MA Experiment 20000453 PARAMETER Experiment Name: At_100uM_ABA_P Parameter: Timepoint (hr) Value: 24
  misc_feature: MA Experiment 20000453 PARAMETER Experiment Name: At_100uM_ABA_P Parameter: Tissue Value: Aerial
  misc_feature: MA Experiment 20000453 PARAMETER Experiment Name: At_100uM_ABA_P Parameter: Treatment Value: 100uM ABA vs. No Treatment
  misc_feature: MA Experiment ID: 20000495 Result: Down-regulated in Transcription
  misc_feature: MA Experiment 20000495 PARAMETER Experiment Name: At_Guard_Cells_P Parameter: Harvest Date Value: 8/2/2002
  misc_feature: MA Experiment 20000495 PARAMETER Experiment Name: At_Guard_Cells_P Parameter: Organism Value: A. thaliana
  misc_feature: MA Experiment 20000495 PARAMETER Experiment Name: At_Guard_Cells_P Parameter: Tissue Value: Guard Cells vs. Leaves
  misc_feature: MA Experiment ID: 20001247 Result: Up-regulated in Transcription
  misc_feature: MA Experiment 20001247 PARAMETER Experiment Name: At_Far-red-induction_P Parameter: Age (day) Value: 7
  misc_feature: MA Experiment 20001247 PARAMETER Experiment Name: At_Far-red-induction_P Parameter: Light Value: Far-red vs. White
  misc_feature: MA Experiment 20001247 PARAMETER Experiment Name: At_Far-red-induction_P Parameter: Organism Value: A. thaliana
  misc_feature: MA Experiment 20001247 PARAMETER Experiment Name: At_Far-red-induction_P Parameter: Plant Line Value: Columbia
  misc_feature: MA Experiment 20001247 PARAMETER Experiment Name: At_Far-red-induction_P Parameter: Timepoint (hr) Value: 1
  misc_feature: MA Experiment 20001247 PARAMETER Experiment Name: At_Far-red-induction_P Parameter: Tissue Value: Whole Plant
  misc_feature: MA Experiment ID: 20001248 Result: Up-regulated in Transcription
  misc_feature: MA Experiment 20001248 PARAMETER Experiment Name: At_Far-red-induction_P Parameter: Age (day) Value: 7
  misc_feature: MA Experiment 20001248 PARAMETER Experiment Name: At_Far-red-induction_P Parameter: Light Value: Far-red vs. White
  misc_feature: MA Experiment 20001248 PARAMETER Experiment Name: At_Far-red-induction_P Parameter: Organism Value: A. thaliana
  misc_feature: MA Experiment 20001248 PARAMETER Experiment Name: At_Far-red-induction_P Parameter: Plant Line Value: Columbia
  misc_feature: MA Experiment 20001248 PARAMETER Experiment Name: At_Far-red-induction_P Parameter: Timepoint (hr) Value: 4
  misc_feature: MA Experiment 20001248 PARAMETER Experiment Name: At_Far-red-induction_P Parameter: Tissue Value: Whole Plant
  misc_feature: MA Experiment ID: 20001450 Result: Up-regulated in Transcription
  misc_feature: MA Experiment 20001450 PARAMETER Experiment Name: At_Far-red-induction_P Parameter: Age (day) Value: 7
  misc_feature: MA Experiment 20001450 PARAMETER Experiment Name: At_Far-red-induction_P Parameter: Light Value: Far-red vs. White
  misc_feature: MA Experiment 20001450 PARAMETER Experiment Name: At_Far-red-induction_P Parameter: Organism Value: A. thaliana
  misc_feature: MA Experiment 20001450 PARAMETER Experiment Name: At_Far-red-induction_P Parameter: Plant Line Value: Columbia
  misc_feature: MA Experiment 20001450 PARAMETER Experiment Name: At_Far-red-induction_P Parameter: Timepoint (hr) Value: 8
  misc_feature: MA Experiment 20001450 PARAMETER Experiment Name: At_Far-red-induction_P Parameter: Tissue Value: Whole Plant
  misc_feature: MA Experiment ID: 20001451 Result: Up-regulated in Transcription
  misc_feature: MA Experiment 20001451 PARAMETER Experiment Name: At_Far-red-induction_P Parameter: Age (day) Value: 7
  misc_feature: MA Experiment 20001451 PARAMETER Experiment Name: At_Far-red-induction_P Parameter: Light Value: Far-red vs. White
  misc_feature: MA Experiment 20001451 PARAMETER Experiment Name: At_Far-red-induction_P Parameter: Organism Value: A. thaliana
  misc_feature: MA Experiment 20001451 PARAMETER Experiment Name: At_Far-red-induction_P Parameter: Plant Line Value: Columbia
  misc_feature: MA Experiment 20001451 PARAMETER Experiment Name: At_Far-red-induction_P Parameter: Timepoint (hr) Value: 24
  misc_feature: MA Experiment 20001451 PARAMETER Experiment Name: At_Far-red-induction_P Parameter: Tissue Value: Whole Plant
  misc_feature: MA Experiment ID: 20001905 Result: Up-regulated in Transcription
  misc_feature: MA Experiment 20001905 PARAMETER Experiment Name: At_Drought_Reproduction_P Parameter: Age (day) Value: 40
  misc_feature: MA Experiment 20001905 PARAMETER Experiment Name: At_Drought_Reproduction_P Parameter: Organism Value: A. thaliana
  misc_feature: MA Experiment 20001905 PARAMETER Experiment Name: At_Drought_Reproduction_P Parameter: Plant Line Value: WS
  misc_feature: MA Experiment 20001905 PARAMETER Experiment Name: At_Drought_Reproduction_P Parameter: Timepoint (day) Value: 10
  misc_feature: MA Experiment 20001905 PARAMETER Experiment Name: At_Drought_Reproduction_P Parameter: Tissue Value: Rosettes
  misc_feature: MA Experiment 20001905 PARAMETER Experiment Name: At_Drought_Reproduction_P Parameter: Treatment Value: Drought vs. No Drought
  misc_feature: MA Experiment ID: 20001906 Result: Down-regulated in Transcription
  misc_feature: MA Experiment 20001906 PARAMETER Experiment Name: At_Drought_Reproduction_P Parameter: Age (day) Value: 35
  misc_feature: MA Experiment 20001906 PARAMETER Experiment Name: At_Drought_Reproduction_P Parameter: Organism Value: A. thaliana
  misc_feature: MA Experiment 20001906 PARAMETER Experiment Name: At_Drought_Reproduction_P Parameter: Plant Line Value: WS
  misc_feature: MA Experiment 20001906 PARAMETER Experiment Name: At_Drought_Reproduction_P Parameter: Timepoint (day) Value: 5
  misc_feature: MA Experiment 20001906 PARAMETER Experiment Name: At_Drought_Reproduction_P Parameter: Tissue Value: Siliques
  misc_feature: MA Experiment 20001906 PARAMETER Experiment Name: At_Drought_Reproduction_P Parameter: Treatment Value: Drought vs. No Drought
  misc_feature: MA Experiment ID: 20001908 Result: Down-regulated in Transcription
  misc_feature: MA Experiment 20001908 PARAMETER Experiment Name: At_Drought_Reproduction_P Parameter: Age (day) Value: 40
  misc_feature: MA Experiment 20001908 PARAMETER Experiment Name: At_Drought_Reproduction_P Parameter: Organism Value: A. thaliana
  misc_feature: MA Experiment 20001908 PARAMETER Experiment Name: At_Drought_Reproduction_P Parameter: Plant Line Value: WS
  misc_feature: MA Experiment 20001908 PARAMETER Experiment Name: At_Drought_Reproduction_P Parameter: Timepoint (day) Value: 10
  misc_feature: MA Experiment 20001908 PARAMETER Experiment Name: At_Drought_Reproduction_P Parameter: Tissue Value: Siliques
  misc_feature: MA Experiment 20001908 PARAMETER Experiment Name: At_Drought_Reproduction_P Parameter: Treatment Value: Drought vs. No Drought
aatccattattattctatcgaacttatctttttaaaagcttccgcgttacgccatcacttctccaccatttaaatacctaaaccactttctttcaaatttcttattccataaaaagtaaattcacaacaaaaccaaaaaaaaaaaagagaagaagaattagcttacgtgttcatcacatctgcattacgcgcaaacgaaacagattcaaattctccggcgaagttttcttattcatcaatcaatctctggattcatcaatcatgccagagatcgagattgccgccggcagcggcgacaacaacgacgccttattcggtaaatatgagctcggaaagcttctcggatgcggcgcattcgccaaagtcttccacgcacgtgatcgtcgtaccggccaaagcgtcgccgtgaaaatcctcaacaagaaaaaactcctcacaaatccagctctagccaacaacatcaaacgcgagatctcaatcatgagaagattatctcatccaaacatcgtcaagctccacgaagtaatggcgacaaaatcaaagatcttcttcgcaatggagtttgttaaaggaggagaactattcaacaaaatctcaaaacatggacgtcttagcgaagatttaagccggagatatttccagcaactgatctccgccgttggttattgccacgctcgcggtgtttaccaccgcgatctcaaaccagagaatctattaatagacgaaaacggaaacttaaaagtttccgatttcggtctaagcgcgttaacggatcagatccgacccgatgggttgttacataccttgtgtggtactccggcgtacgttgcgccggagattctatctaaaaaaggatatgaaggtgctaaagttgatgtatggtcttgtggaatcgtcttgttcgttctcgtcgccggttatttaccgtttaacgatccgaatgtgatgaatatgtataagaagatttataaaggagagtatcgttttcctcgttggatgtctccagatctgaaacgattcgtttctcgtcttttagatattaatcctgagactagaatcaccattgatgagattttgaaagatccttggtttgttagaggaggttttaaacagatcaagttccacgatgacgagatcgaagatcagaaagtggaatcgtcactagaagctgtgaagagtttaaacgcgtttgatttgatttcttactcgtcgggattggatttgtcgggattgtttgctggttgtagtaattcgagtggtgaatcggagaggtttttatcggaaaagtcgccggagatgttggcggaggaagtggaggggtttgcgagagaggagaatctgaggatgaagaagaagaaggaggaagagtatgggtttgagatggaggggcaaaatgggaaatttggtatcgggatttgtatttcgcggttgaatgatttgcttgtggtggtggaggcacggcggagaggtggtgatggtgattgttataaggagatgtggaatggtaaactcagggttcaacttattcgcgtttgcgatcagacgtcgtcaacaaacgcggctatttaaaagaacgctatgaagttttctaccgtgctttcaattttaaaacgccaatcgcgtttcgttggttggatttggtttctactacttttgtttcggaattaaaaacagagaaaaaataataaaaattaatgtatgtatttaaatactgtaccaaattgtaggtatctattttgtgctttttgatcaatgtgttactatgtacaacaacaagtctaaaattgcatttgtagatacttcactcttttgtataatgtagaaaatgttcttct

SEQ ID NO: 40184 - protein, 435 aa, Arabidopsis thaliana
  peptide (1)..(435): Ceres Seq. ID no. 13487233
  misc_feature (21)..(277): Pfam Name: Protein kinase domain Pfam Description: Protein kinase domain
  misc_feature (21)..(277): Pfam Name: Protein kinase domain Pfam Description: Protein kinase domain
  misc_feature (289)..(421): Homolog of NCBI NO: 15218854 NR Description: CBL-interacting protein kinase 18 [Arabidopsis
  misc_feature (289)..(421): Homolog of NCBI NO: 27549573 NR Description: calcineurin B-like-interacting protein kinase
  misc_feature (12)..(292): Homolog of NCBI NO: 27549573 NR Description: calcineurin B-like-interacting protein kinase
  misc_feature (1)..(300): Homolog of NCBI NO: 15218854 NR Description: CBL-interacting protein kinase 18 [Arabidopsis
  misc_feature (292)..(421): Homolog of NCBI NO: 15233981 NR Description: CBL-interacting protein kinase 12 [Arabidopsis
  misc_feature (289)..(421): Homolog of NCBI NO: 15218854 NR Description: CBL-interacting protein kinase 18 [Arabidopsis
  misc_feature (12)..(292): Homolog of NCBI NO: 27549573 NR Description: calcineurin B-like-interacting protein kinase
  misc_feature (292)..(421): Homolog of NCBI NO: 15233981 NR Description: CBL-interacting protein kinase 12 [Arabidopsis
  misc_feature (1)..(435): Homolog of NCBI NO: 15227739 NR Description: CBL-interacting protein kinase 11 [Arabidopsis
  misc_feature (1)..(371): Homolog of NCBI NO: 16226430 NR Description: At2g30360/T9D9.17 [Arabidopsis thaliana]
  misc_feature (17)..(422): Homolog of NCBI NO: 30013673 NR Description: Avr9/Cf-9 rapidly elicited protein 216 [Nicotiana
  misc_feature (17)..(428): Homolog of NCBI NO: 15241067 NR Description: CBL-interacting protein kinase 14 [Arabidopsis
  misc_feature (17)..(306): Homolog of NCBI NO: 15233981 NR Description: CBL-interacting protein kinase 12 [Arabidopsis
  misc_feature (1)..(300): Homolog of NCBI NO: 15218854 NR Description: CBL-interacting protein kinase 18 [Arabidopsis
  misc_feature (289)..(421): Homolog of NCBI NO: 27549573 NR Description: calcineurin B-like-interacting protein kinase
  misc_feature (17)..(306): Homolog of NCBI NO: 15233981 NR Description: CBL-interacting protein kinase 12 [Arabidopsis
  misc_feature (17)..(428): Homolog of NCBI NO: 15241067 NR Description: CBL-interacting protein kinase 14 [Arabidopsis
  misc_feature (17)..(422): Homolog of NCBI NO: 30013673 NR Description: Avr9/Cf-9 rapidly elicited protein 216 [Nicotiana
  misc_feature (1)..(371): Homolog of NCBI NO: 16226430 NR Description: At2g30360/T9D9.17 [Arabidopsis thaliana]
  misc_feature (1)..(435): Homolog of NCBI NO: 15227739 NR Description: CBL-interacting protein kinase 11 [Arabidopsis
MPEIEIAAGSGDNNDALFGKYELGKLLGCGAFAKVFHARDRRTGQSVAVKILNKKKLLTNPALANNIKREISIMRRLSHPNIVKLHEVMATKSKIFFAMEFVKGGELFNKISKHGRLSEDLSRRYFQQLISAVGYCHARGVYHRDLKPENLLIDENGNLKVSDFGLSALTDQIRPDGLLHTLCGTPAYVAPEILSKKGYEGAKVDVWSCGIVLFVLVAGYLPFNDPNVMNMYKKIYKGEYRFPRWMSPDLKRFVSRLLDINPETRITIDEILKDPWFVRGGFKQIKFHDDEIEDQKVESSLEAVKSLNAFDLISYSSGLDLSGLFAGCSNSSGESERFLSEKSPEMLAEEVEGFAREENLRMKKKKEEEYGFEMEGQNGKFGIGICISRLNDLLVVVEARRRGGDGDCYKEMWNGKLRVQLIRVCDQTSSTNAAI

SEQ ID NO: 40185 - protein, 362 aa, Arabidopsis thaliana
  peptide (1)..(362): Ceres Seq. ID no. 13487234
  misc_feature (1)..(204): Pfam Name: Protein kinase domain Pfam Description: Protein kinase domain
  misc_feature (1)..(204): Pfam Name: Protein kinase domain Pfam Description: Protein kinase domain
  misc_feature (216)..(348): Homolog of NCBI NO: 15218854 NR Description: CBL-interacting protein kinase 18 [Arabidopsis
  misc_feature (216)..(348): Homolog of NCBI NO: 27549573 NR Description: calcineurin B-like-interacting protein kinase
  misc_feature (1)..(219): Homolog of NCBI NO: 27549573 NR Description: calcineurin B-like-interacting protein kinase
  misc_feature (1)..(227): Homolog of NCBI NO: 15218854 NR Description: CBL-interacting protein kinase 18 [Arabidopsis
  misc_feature (219)..(348): Homolog of NCBI NO: 15233981 NR Description: CBL-interacting protein kinase 12 [Arabidopsis
  misc_feature (216)..(348): Homolog of NCBI NO: 15218854 NR Description: CBL-interacting protein kinase 18 [Arabidopsis
  misc_feature (1)..(219): Homolog of NCBI NO: 27549573 NR Description: calcineurin B-like-interacting protein kinase
  misc_feature (219)..(348): Homolog of NCBI NO: 15233981 NR Description: CBL-interacting protein kinase 12 [Arabidopsis
  misc_feature (1)..(362): Homolog of NCBI NO: 15227739 NR Description: CBL-interacting protein kinase 11 [Arabidopsis
  misc_feature (1)..(298): Homolog of NCBI NO: 16226430 NR Description: At2g30360/T9D9.17 [Arabidopsis thaliana]
  misc_feature (1)..(349): Homolog of NCBI NO: 30013673 NR Description: Avr9/Cf-9 rapidly elicited protein 216 [Nicotiana
  misc_feature (1)..(355): Homolog of NCBI NO: 15241067 NR Description: CBL-interacting protein kinase 14 [Arabidopsis
  misc_feature (1)..(233): Homolog of NCBI NO: 15233981 NR Description: CBL-interacting protein kinase 12 [Arabidopsis
  misc_feature (1)..(227): Homolog of NCBI NO: 15218854 NR Description: CBL-interacting protein kinase 18 [Arabidopsis
  misc_feature (216)..(348): Homolog of NCBI NO: 27549573 NR Description: calcineurin B-like-interacting protein kinase
  misc_feature (1)..(233): Homolog of NCBI NO: 15233981 NR Description: CBL-interacting protein kinase 12 [Arabidopsis
  misc_feature (1)..(355): Homolog of NCBI NO: 15241067 NR Description: CBL-interacting protein kinase 14 [Arabidopsis
  misc_feature (1)..(349): Homolog of NCBI NO: 30013673 NR Description: Avr9/Cf-9 rapidly elicited protein 216 [Nicotiana
  misc_feature (1)..(298): Homolog of NCBI NO: 16226430 NR Description: At2g30360/T9D9.17 [Arabidopsis thaliana]
  misc_feature (1)..(362): Homolog of NCBI NO: 15227739 NR Description: CBL-interacting protein kinase 11 [Arabidopsis
MRRLSHPNIVKLHEVMATKSKIFFAMEFVKGGELFNKISKHGRLSEDLSRRYFQQLISAVGYCHARGVYHRDLKPENLLIDENGNLKVSDFGLSALTDQIRPDGLLHTLCGTPAYVAPEILSKKGYEGAKVDVWSCGIVLFVLVAGYLPFNDPNVMNMYKKIYKGEYRFPRWMSPDLKRFVSRLLDINPETRITIDEILKDPWFVRGGFKQIKFHDDEIEDQKVESSLEAVKSLNAFDLISYSSGLDLSGLFAGCSNSSGESERFLSEKSPEMLAEEVEGFAREENLRMKKKKEEEYGFEMEGQNGKFGIGICISRLNDLLVVVEARRRGGDGDCYKEMWNGKLRVQLIRVCDQTSSTNAAI

SEQ ID NO: 40186 - protein, 347 aa, Arabidopsis thaliana
  peptide (1)..(347): Ceres Seq. ID no. 13487235
  misc_feature (1)..(189): Pfam Name: Protein kinase domain Pfam Description: Protein kinase domain
  misc_feature (1)..(189): Pfam Name: Protein kinase domain Pfam Description: Protein kinase domain
  misc_feature (201)..(333): Homolog of NCBI NO: 15218854 NR Description: CBL-interacting protein kinase 18 [Arabidopsis
  misc_feature (201)..(333): Homolog of NCBI NO: 27549573 NR Description: calcineurin B-like-interacting protein kinase
  misc_feature (1)..(204): Homolog of NCBI NO: 27549573 NR Description: calcineurin B-like-interacting protein kinase
  misc_feature (1)..(212): Homolog of NCBI NO: 15218854 NR Description: CBL-interacting protein kinase 18 [Arabidopsis
  misc_feature (204)..(333): Homolog of NCBI NO: 15233981 NR Description: CBL-interacting protein kinase 12 [Arabidopsis
  misc_feature (201)..(333): Homolog of NCBI NO: 15218854 NR Description: CBL-interacting protein kinase 18 [Arabidopsis
  misc_feature (1)..(204): Homolog of NCBI NO: 27549573 NR Description: calcineurin B-like-interacting protein kinase
  misc_feature (204)..(333): Homolog of NCBI NO: 15233981 NR Description: CBL-interacting protein kinase 12 [Arabidopsis
  misc_feature (1)..(347): Homolog of NCBI NO: 15227739 NR Description: CBL-interacting protein kinase 11 [Arabidopsis
  misc_feature (1)..(283): Homolog of NCBI NO: 16226430 NR Description: At2g30360/T9D9.17 [Arabidopsis thaliana]
  misc_feature (1)..(334): Homolog of NCBI NO: 30013673 NR Description: Avr9/Cf-9 rapidly elicited protein 216 [Nicotiana
  misc_feature (1)..(340): Homolog of NCBI NO: 15241067 NR Description: CBL-interacting protein kinase 14 [Arabidopsis
  misc_feature (1)..(218): Homolog of NCBI NO: 15233981 NR Description: CBL-interacting protein kinase 12 [Arabidopsis
  misc_feature (1)..(212): Homolog of NCBI NO: 15218854 NR Description: CBL-interacting protein kinase 18 [Arabidopsis
  misc_feature (201)..(333): Homolog of NCBI NO: 27549573 NR Description: calcineurin B-like-interacting protein kinase
  misc_feature (1)..(218): Homolog of NCBI NO: 15233981 NR Description: CBL-interacting protein kinase 12 [Arabidopsis
  misc_feature (1)..(340): Homolog of NCBI NO: 15241067 NR Description: CBL-interacting protein kinase 14 [Arabidopsis
  misc_feature (1)..(334): Homolog of NCBI NO: 30013673 NR Description: Avr9/Cf-9 rapidly elicited protein 216 [Nicotiana
  misc_feature (1)..(283): Homolog of NCBI NO: 16226430 NR Description: At2g30360/T9D9.17 [Arabidopsis thaliana]
  misc_feature (1)..(347): Homolog of NCBI NO: 15227739 NR Description: CBL-interacting protein kinase 11 [Arabidopsis
MATKSKIFFAMEFVKGGELFNKISKHGRLSEDLSRRYFQQLISAVGYCHARGVYHRDLKPENLLIDENGNLKVSDFGLSALTDQIRPDGLLHTLCGTPAYVAPEILSKKGYEGAKVDVWSCGIVLFVLVAGYLPFNDPNVMNMYKKIYKGEYRFPRWMSPDLKRFVSRLLDINPETRITIDEILKDPWFVRGGFKQIKFHDDEIEDQKVESSLEAVKSLNAFDLISYSSGLDLSGLFAGCSNSSGESERFLSEKSPEMLAEEVEGFAREENLRMKKKKEEEYGFEMEGQNGKFGIGICISRLNDLLVVVEARRRGGDGDCYKEMWNGKLRVQLIRVCDQTSSTNAAI

SEQ ID NO: 40187 - DNA, 1052 bp, Arabidopsis thaliana
  misc_feature (1)..(1052): Ceres Seq. ID no. 12371451
  misc_feature: MA Experiment ID: 108434 Result: Up-regulated in Transcription
  misc_feature: MA Experiment 108434 PARAMETER Experiment Name: At_Root_Tips_cDNA_P Parameter: Tissue Value: Root Tips
  misc_feature: MA Experiment ID: 108462 Result: Down-regulated in Transcription
  misc_feature: MA Experiment 108462 PARAMETER Experiment Name: At_Germinating_Seeds_cDNA_P Parameter: Age (day) Value: 2 vs. 0
  misc_feature: MA Experiment 108462 PARAMETER Experiment Name: At_Germinating_Seeds_cDNA_P Parameter: Tissue Value: Germinating Seeds
  misc_feature: MA Experiment ID: 108463 Result: Down-regulated in Transcription
  misc_feature: MA Experiment 108463 PARAMETER Experiment Name: At_Germinating_Seeds_cDNA_P Parameter: Age (day) Value: 3 vs. 0
  misc_feature: MA Experiment 108463 PARAMETER Experiment Name: At_Germinating_Seeds_cDNA_P Parameter: Tissue Value: Germinating Seeds
  misc_feature: MA Experiment ID: 108573 Result: Down-regulated in Transcription
  misc_feature: MA Experiment 108573 PARAMETER Experiment Name: At_Drought_cDNA_P Parameter: Timepoint (hr) Value: 6
  misc_feature: MA Experiment 108573 PARAMETER Experiment Name: At_Drought_cDNA_P Parameter: Tissue Value: Aerial
  misc_feature: MA Experiment 108573 PARAMETER Experiment Name: At_Drought_cDNA_P Parameter: Treatment Value: Drought vs. No Drought
  misc_feature: MA Experiment ID: 108577 Result: Up-regulated in Transcription
  misc_feature: MA Experiment 108577 PARAMETER Experiment Name: At_42deg_Heat_cDNA_P Parameter: Temperature (deg C) Value: 42 vs. 22
  misc_feature: MA Experiment 108577 PARAMETER Experiment Name: At_42deg_Heat_cDNA_P Parameter: Timepoint (hr) Value: 6
  misc_feature: MA Experiment 108577 PARAMETER Experiment Name: At_42deg_Heat_cDNA_P Parameter: Tissue Value: Aerial
  misc_feature: MA Experiment ID: 20000173 Result: Up-regulated in Transcription
  misc_feature: MA Experiment 20000173 PARAMETER Experiment Name: At_42deg_Heat_P Parameter: Age (day) Value: 14
  misc_feature: MA Experiment 20000173 PARAMETER Experiment Name: At_42deg_Heat_P Parameter: Organism Value: A. thaliana
  misc_feature: MA Experiment 20000173 PARAMETER Experiment Name: At_42deg_Heat_P Parameter: Plant Line Value: WS
  misc_feature: MA Experiment 20000173 PARAMETER Experiment Name: At_42deg_Heat_P Parameter: Temperature (deg C) Value: 42 vs. 22
  misc_feature: MA Experiment 20000173 PARAMETER Experiment Name: At_42deg_Heat_P Parameter: Timepoint (hr) Value: 6
  misc_feature: MA Experiment 20000173 PARAMETER Experiment Name: At_42deg_Heat_P Parameter: Tissue Value: Aerial
  misc_feature: MA Experiment ID: 20000180 Result: Down-regulated in Transcription
  misc_feature: MA Experiment 20000180 PARAMETER Experiment Name: At_Germinating_Seeds_P Parameter: Age (hr) Value: 24 vs. 0
  misc_feature: MA Experiment 20000180 PARAMETER Experiment Name: At_Germinating_Seeds_P Parameter: Tissue Value: Germinating Seeds
  misc_feature: MA Experiment ID: 20000227 Result: Up-regulated in Transcription
  misc_feature: MA Experiment 20000227 PARAMETER Experiment Name: At_Root-Tips-vs-Tops_P Parameter: Tissue Value: Root Tips vs. Root Tops
  misc_feature: MA Experiment ID: 20000495 Result: Up-regulated in Transcription
  misc_feature: MA Experiment 20000495 PARAMETER Experiment Name: At_Guard_Cells_P Parameter: Harvest Date Value: 8/2/2002
  misc_feature: MA Experiment 20000495 PARAMETER Experiment Name: At_Guard_Cells_P Parameter: Organism Value: A. thaliana
  misc_feature: MA Experiment 20000495 PARAMETER Experiment Name: At_Guard_Cells_P Parameter: Tissue Value: Guard Cells vs. Leaves
  misc_feature: MA Experiment ID: 20000794 Result: Down-regulated in Transcription
  misc_feature: MA Experiment 20000794 PARAMETER Experiment Name: At_Petals_P Parameter: Age (day) Value: 23-25 days
  misc_feature: MA Experiment 20000794 PARAMETER Experiment Name: At_Petals_P Parameter: Plant Line Value: WS
  misc_feature: MA Experiment 20000794 PARAMETER Experiment Name: At_Petals_P Parameter: Tissue Value: Petals vs. Whole plant
  misc_feature: MA Experiment ID: 20001557 Result: Up-regulated in Transcription
  misc_feature: MA Experiment 20001557 PARAMETER Experiment Name: At_Drought_Soil_Dry_P Parameter: Age (day) Value: 27
  misc_feature: MA Experiment 20001557 PARAMETER Experiment Name: At_Drought_Soil_Dry_P Parameter: Organism Value: A. thaliana
  misc_feature: MA Experiment 20001557 PARAMETER Experiment Name: At_Drought_Soil_Dry_P Parameter: Plant Line Value: WS
  misc_feature: MA Experiment 20001557 PARAMETER Experiment Name: At_Drought_Soil_Dry_P Parameter: Post Timepoint (hr) Value: 3
  misc_feature: MA Experiment 20001557 PARAMETER Experiment Name: At_Drought_Soil_Dry_P Parameter: Post-Treatment Value: Re-Water vs. No Drought
  misc_feature: MA Experiment 20001557 PARAMETER Experiment Name: At_Drought_Soil_Dry_P Parameter: Timepoint (day) Value: 13
  misc_feature: MA Experiment 20001557 PARAMETER Experiment Name: At_Drought_Soil_Dry_P Parameter: Treatment Value: Drought vs. No Drought
  misc_feature: MA Experiment ID: 20001558 Result: Up-regulated in Transcription
  misc_feature: MA Experiment 20001558 PARAMETER Experiment Name: At_Drought_Soil_Dry_P Parameter: Age (day) Value: 27
  misc_feature: MA Experiment 20001558 PARAMETER Experiment Name: At_Drought_Soil_Dry_P Parameter: Organism Value: A. thaliana
  misc_feature: MA Experiment 20001558 PARAMETER Experiment Name: At_Drought_Soil_Dry_P Parameter: Plant Line Value: WS
  misc_feature: MA Experiment 20001558 PARAMETER Experiment Name: At_Drought_Soil_Dry_P Parameter: Post Timepoint (hr) Value: 6
  misc_feature: MA Experiment 20001558 PARAMETER Experiment Name: At_Drought_Soil_Dry_P Parameter: Post-Treatment Value: Re-Water vs. No Drought
  misc_feature: MA Experiment 20001558 PARAMETER Experiment Name: At_Drought_Soil_Dry_P Parameter: Timepoint (day) Value: 13
  misc_feature: MA Experiment 20001558 PARAMETER Experiment Name: At_Drought_Soil_Dry_P Parameter: Treatment Value: Drought vs. No Drought
cctagtccaaaaatttctcatactataaaaagatttttttttttgcttcgctccctctttttcacttcgttaacggccccgcctccactctatcctaccgccgacgtccgtgatcgccgaaatgactgaagcagagtccaagactgttgttcctgagtcagtgttgaagaagagaaagagggaggaagaatgggcacttgccaagaaacaggagcttgaggctgccaaaaagcagaatgctgagaagaggaaactcatatttaaccgggctaaacagtactccaaggagtaccaggagaaagaaagggaattaatccagctgaagcgtgaggcaaaattgaaaggaggcttttatgttgacccagaagctaaactgcttttcattatccgtatccgtggtatcaatgccattgacccaaagacaaagaagattttgcaacttttgcgtttaagacagattttcaatggtgtgttcttgaaggtcaacaaggcaaccattaacatgcttcgccgtgttgaaccctatgtaacctatggatacccgaacttaaaaagtgtgaaggaattgatttacaaacgaggttttggaaagcttaaccaccagaggactgccttaacagacaattctattgtagatcaggggctaggaaagcatggcatcatctgcgttgaggatctgatccatgagatcatgacggttgggccacatttcaaggaagccaataactttttgtggccattccagttgaaggctccattgggagggatgaagaagaagaggaaccattacgtggaaggaggagatgctggaaaccgcgagaacttcatcaacgagctcgttaggagaatgaactgaagcgtaagcgttattgctctgaaactccctaggaaacgttttgctataggtggaaaacttctgttcgcttgcttgtgttgccattgaggcgaagtaaacatttacggtgaaagactttgatattttataagtttgaaattgtaagaacacatcatttatttccttccacattacatcgtcacttgcattgcatttt

SEQ ID NO: 40188 - protein, 244 aa, Arabidopsis thaliana
  peptide (1)..(244): Ceres Seq. ID no. 12371452
  misc_feature (84)..(136): Pfam Name: Ribosomal protein L30p/L7e Pfam Description: Ribosomal protein L30p/L7e
  misc_feature (1)..(244): Homolog of NCBI NO: 307388 NR Description: ribosomal protein L7
  misc_feature (10)..(243): Homolog of NCBI NO: 28630259 NR Description: ribosomal protein L7 [Branchiostoma lanceolatum]
  misc_feature (3)..(244): Homolog of NCBI NO: 38637548 NR Description: putative 60S ribosomal protein L7
  misc_feature (1)..(244): Homolog of NCBI NO: 38346542 NR Description: OSJNBa0035M09.3 [Oryza sativa (japonica
  misc_feature (5)..(244): Homolog of NCBI NO: 445613 NR Description: ribosomal protein L7
  misc_feature (4)..(244): Homolog of NCBI NO: 27311547 NR Description: Unknown protein [Arabidopsis thaliana]
  misc_feature (4)..(244): Homolog of NCBI NO: 30689617 NR Description: 60S ribosomal protein L7 (RPL7C) [Arabidopsis
  misc_feature (1)..(244): Homolog of NCBI NO: 30689623 NR Description: 60S ribosomal protein L7 (RPL7C) [Arabidopsis
  misc_feature (5)..(244): Homolog of NCBI NO: 15226212 NR Description: putative ribosomal protein L7
  misc_feature (1)..(244): Homolog of NCBI NO: 15231288 NR Description: ribosomal protein, putative
MTEAESKTVVPESVLKKRKREEEWALAKKQELEAAKKQNAEKRKLIFNRAKQYSKEYQEKERELIQLKREAKLKGGFYVDPEAKLLFIIRIRGINAIDPKTKKILQLLRLRQIFNGVFLKVNKATINMLRRVEPYVTYGYPNLKSVKELIYKRGFGKLNHQRTALTDNSIVDQGLGKHGIICVEDLIHEIMTVGPHFKEANNFLWPFQLKAPLGGMKKKRNHYVEGGDAGNRENFINELVRRMN

SEQ ID NO: 40189 - DNA, 1258 bp, Arabidopsis thaliana
  misc_feature (1)..(1258): Ceres Seq. ID no. 12482357
  misc_feature: MA Experiment ID: 20000328 Result: Up-regulated in Transcription
  misc_feature: MA Experiment 20000328 PARAMETER Experiment Name: At_42deg_Heat_Sub_P Parameter: Age (day) Value: 14
  misc_feature: MA Experiment 20000328 PARAMETER Experiment Name: At_42deg_Heat_Sub_P Parameter: Organism Value: A. thaliana
  misc_feature: MA Experiment 20000328 PARAMETER Experiment Name: At_42deg_Heat_Sub_P Parameter: Plant Line Value: WS
  misc_feature: MA Experiment 20000328 PARAMETER Experiment Name: At_42deg_Heat_Sub_P Parameter: Temperature (deg C) Value: 42 vs. 22
  misc_feature: MA Experiment 20000328 PARAMETER Experiment Name: At_42deg_Heat_Sub_P Parameter: Timepoint (hr) Value: 6
  misc_feature: MA Experiment 20000328 PARAMETER Experiment Name: At_42deg_Heat_Sub_P Parameter: Tissue Value: Aerial
aattcgcacgattactcacctactcgagagtggtttagcttttttgtaccgtacatcttcttcccagaaacatggctgaggcttctgatttgttggaatggcctaagaaggataaccgtcgttttctccatgttgtctaccgcgttggtgatcttgatcgcaccattgagttttacactgaggtctttggtatgaagctgttgaggaaaagagatatccctgaggagaagtattctaatgcttttcttggttttggacctgaaacatctaactttgttgtggagctcacatataactatggtgttagctcatatgatattggaactggctttgggcattttgccatttcaactcaagatgtttccaaactggttgagaacgtccgtgccaagggtggaaatgtgactagggaacctggtccagtcaaaggtggaggcagtgtcattgcgtttgtgaaggaccctgatggctacacttttgagctcatccagagaggtccaactcctgaacctttctgccaagtcatgcttcgtgttggtgatctcgaccgtgccatcaaattctatgaaaaggccctcgggatgagactcttgagaaagattgagagacctgagtacaagtacaccataggcatgatggggtatgctgaagaatacgagtcgatagttttggagctgacctataactacgacgtgactgagtacacaaagggcaatgcatatgcacagattgcaataggcacagatgatgtgtacaaaagcggtgaagttattaagatagtcaaccaagagctaggaggaaagatcactagagaagccggacctcttcctggactcggcaccaagattgtctcattccttgatccagatggctggaaaacggttttggtggacaacaaagattttctcaaggaactggaatgagaagagcgatgaatgaaggtcgagatcacaaaaccataataataaaaatgtgatcataaaataaaaggaagacttagagtttgatctaaaataagaagatgtggtttagtttgtgtcgtgctatgtgtgtgtgctcgtttcttttgtctttgagcttaaaagttaaaactctagtctatatggacctgaataaaaatatttccaccaccttgaggttttggtgtttgcggttatggacggtttattgaatgtaatattttcgtaccaaatcggtttactagatttgagacggatcatatggctcttcttggaaaaagagacggtttaaatcggtt

SEQ ID NO: 40190 - protein, 283 aa, Arabidopsis thaliana; identical to SEQ ID NO: 22714
  peptide (1)..(283): Ceres Seq. ID no. 12482358
  misc_feature (1)..(283): Homolog of NCBI NO: 11281993 NR Description: lactoylglutathione lyase (EC 4.4.1.5)
  misc_feature (1)..(283): Homolog of NCBI NO: 7619802 NR Description: putative glyoxalase I [Triticum aestivum]
  misc_feature (7)..(283): Homolog of NCBI NO: 16580747 NR Description: glyoxalase I [Oryza sativa (japonica
  misc_feature (7)..(283): Homolog of NCBI NO: 4126809 NR Description: glyoxalase I [Oryza sativa (japonica
  misc_feature (1)..(219): Homolog of NCBI NO: 30682449 NR Description: glyoxalase I, putative (lactoylglutathione lyase)
  misc_feature (1)..(283): Homolog of NCBI NO: 2213425 NR Description: hypothetical protein [Citrus x paradisi]
  misc_feature (28)..(283): Homolog of NCBI NO: 7488556 NR Description: hypothetical protein - wild cabbage (fragment)
  misc_feature (1)..(283): Homolog of NCBI NO: 2494843 NR Description: Putative lactoylglutathione lyase (Aldoketomutase) (Glyoxalase I) (Glx I) (Ketone-aldehyde mutase)
  misc_feature (1)..(283): Homolog of NCBI NO: 15810219 NR Description: putative lactoylglutathione lyase [Arabidopsis
  misc_feature (1)..(283): Homolog of NCBI NO: 15221116 NR Description: glyoxalase I, putative (lactoylglutathione lyase)

SEQ ID NO: 40191 - protein, 243 aa, Arabidopsis thaliana; identical to SEQ ID NO: 22715
  peptide (1)..(243): Ceres Seq. ID no. 12482359
  misc_feature (1)..(243): Homolog of NCBI NO: 11281993 NR Description: lactoylglutathione lyase (EC 4.4.1.5)
  misc_feature (1)..(243): Homolog of NCBI NO: 7619802 NR Description: putative glyoxalase I [Triticum aestivum]
  misc_feature (1)..(243): Homolog of NCBI NO: 16580747 NR Description: glyoxalase I [Oryza sativa (japonica
  misc_feature (1)..(243): Homolog of NCBI NO: 4126809 NR Description: glyoxalase I [Oryza sativa (japonica
  misc_feature (1)..(179): Homolog of NCBI NO: 30682449 NR Description: glyoxalase I, putative (lactoylglutathione lyase)
  misc_feature (1)..(243): Homolog of NCBI NO: 2213425 NR Description: hypothetical protein [Citrus x paradisi]
  misc_feature (1)..(243): Homolog of NCBI NO: 7488556 NR Description: hypothetical protein - wild cabbage (fragment)
  misc_feature (1)..(243): Homolog of NCBI NO: 2494843 NR Description: Putative lactoylglutathione lyase (Aldoketomutase) (Glyoxalase I) (Glx I) (Ketone-aldehyde mutase)
  misc_feature (1)..(243): Homolog of NCBI NO: 15810219 NR Description: putative lactoylglutathione lyase [Arabidopsis
  misc_feature (1)..(243): Homolog of NCBI NO: 15221116 NR Description: glyoxalase I, putative (lactoylglutathione lyase)

SEQ ID NO: 40192 - DNA, 1639 bp, Arabidopsis thaliana
  misc_feature (1)..(1639): Ceres Seq. ID no. 12370903
  misc_feature: MA Experiment ID: 108434 Result: Up-regulated in Transcription
  misc_feature: MA Experiment 108434 PARAMETER Experiment Name: At_Root_Tips_cDNA_P Parameter: Tissue Value: Root Tips
  misc_feature: MA Experiment ID: 108461 Result: Down-regulated in Transcription
  misc_feature: MA Experiment 108461 PARAMETER Experiment Name: At_Germinating_Seeds_cDNA_P Parameter: Age (day) Value: 1 vs. 0
  misc_feature: MA Experiment 108461 PARAMETER Experiment Name: At_Germinating_Seeds_cDNA_P Parameter: Tissue Value: Germinating Seeds
  misc_feature: MA Experiment ID: 108462 Result: Down-regulated in Transcription
  misc_feature: MA Experiment 108462 PARAMETER Experiment Name: At_Germinating_Seeds_cDNA_P Parameter: Age (day) Value: 2 vs. 0
  misc_feature: MA Experiment 108462 PARAMETER Experiment Name: At_Germinating_Seeds_cDNA_P Parameter: Tissue Value: Germinating Seeds
  misc_feature: MA Experiment ID: 108463 Result: Down-regulated in Transcription
  misc_feature: MA Experiment 108463 PARAMETER Experiment Name: At_Germinating_Seeds_cDNA_P Parameter: Age (day) Value: 3 vs. 0
  misc_feature: MA Experiment 108463 PARAMETER Experiment Name: At_Germinating_Seeds_cDNA_P Parameter: Tissue Value: Germinating Seeds
  misc_feature: MA Experiment ID: 108464 Result: Down-regulated in Transcription
  misc_feature: MA Experiment 108464 PARAMETER Experiment Name: At_Germinating_Seeds_cDNA_P Parameter: Age (day) Value: 4 vs. 0
  misc_feature: MA Experiment 108464 PARAMETER Experiment Name: At_Germinating_Seeds_cDNA_P Parameter: Tissue Value: Germinating Seeds
  misc_feature: MA Experiment ID: 108595 Result: Down-regulated in Transcription
  misc_feature: MA Experiment 108595 PARAMETER Experiment Name: At_Ler-pi_Ovule_cDNA_P Parameter: Plant Line Value: null
  misc_feature: MA Experiment ID: 20000179 Result: Down-regulated in Transcription
  misc_feature: MA Experiment 20000179 PARAMETER Experiment Name: At_Germinating_Seeds_P Parameter: Age (hr) Value: 6 vs. 0
  misc_feature: MA Experiment 20000179 PARAMETER Experiment Name: At_Germinating_Seeds_P Parameter: Tissue Value: Germinating Seeds
  misc_feature: MA Experiment ID: 20000180 Result: Down-regulated in Transcription
  misc_feature: MA Experiment 20000180 PARAMETER Experiment Name: At_Germinating_Seeds_P Parameter: Age (hr) Value: 24 vs. 0
  misc_feature: MA Experiment 20000180 PARAMETER Experiment Name: At_Germinating_Seeds_P Parameter: Tissue Value: Germinating Seeds
  misc_feature: MA Experiment ID: 20000184 Result: Down-regulated in Transcription
  misc_feature: MA Experiment 20000184 PARAMETER Experiment Name: At_Shoots__P Parameter: Age (day) Value: 7
  misc_feature: MA Experiment 20000184 PARAMETER Experiment Name: At_Shoots__P Parameter: Tissue Value: Shoots vs. Whole Plant
  misc_feature: MA Experiment ID: 20001451 Result: Down-regulated in Transcription
  misc_feature: MA Experiment 20001451 PARAMETER Experiment Name: At_Far-red-induction_P Parameter: Age (day) Value: 7
  misc_feature: MA Experiment 20001451 PARAMETER Experiment Name: At_Far-red-induction_P Parameter: Light Value: Far-red vs. White
  misc_feature: MA Experiment 20001451 PARAMETER Experiment Name: At_Far-red-induction_P Parameter: Organism Value: A. thaliana
  misc_feature: MA Experiment 20001451 PARAMETER Experiment Name: At_Far-red-induction_P Parameter: Plant Line Value: Columbia
  misc_feature: MA Experiment 20001451 PARAMETER Experiment Name: At_Far-red-induction_P Parameter: Timepoint (hr) Value: 24
  misc_feature: MA Experiment 20001451 PARAMETER Experiment Name: At_Far-red-induction_P Parameter: Tissue Value: Whole Plant
  misc_feature: MA Experiment ID: 20001557 Result: Up-regulated in Transcription
  misc_feature: MA Experiment 20001557 PARAMETER Experiment Name: At_Drought_Soil_Dry_P Parameter: Age (day) Value: 27
  misc_feature: MA Experiment 20001557 PARAMETER Experiment Name: At_Drought_Soil_Dry_P Parameter: Organism Value: A. thaliana
  misc_feature: MA Experiment 20001557 PARAMETER Experiment Name: At_Drought_Soil_Dry_P Parameter: Plant Line Value: WS
  misc_feature: MA Experiment 20001557 PARAMETER Experiment Name: At_Drought_Soil_Dry_P Parameter: Post Timepoint (hr) Value: 3
  misc_feature: MA Experiment 20001557 PARAMETER Experiment Name: At_Drought_Soil_Dry_P Parameter: Post-Treatment Value: Re-Water vs. No Drought
  misc_feature: MA Experiment 20001557 PARAMETER Experiment Name: At_Drought_Soil_Dry_P Parameter: Timepoint (day) Value: 13
  misc_feature: MA Experiment 20001557 PARAMETER Experiment Name: At_Drought_Soil_Dry_P Parameter: Treatment Value: Drought vs. No Drought
  misc_feature: MA Experiment ID: 20001558 Result: Up-regulated in Transcription
  misc_feature: MA Experiment 20001558 PARAMETER Experiment Name: At_Drought_Soil_Dry_P Parameter: Age (day) Value: 27
  misc_feature: MA Experiment 20001558 PARAMETER Experiment Name: At_Drought_Soil_Dry_P Parameter: Organism Value: A. thaliana
  misc_feature: MA Experiment 20001558 PARAMETER Experiment Name: At_Drought_Soil_Dry_P Parameter: Plant Line Value: WS
  misc_feature: MA Experiment 20001558 PARAMETER Experiment Name: At_Drought_Soil_Dry_P Parameter: Post Timepoint (hr) Value: 6
  misc_feature: MA Experiment 20001558 PARAMETER Experiment Name: At_Drought_Soil_Dry_P Parameter: Post-Treatment Value: Re-Water vs. No Drought
  misc_feature: MA Experiment 20001558 PARAMETER Experiment Name: At_Drought_Soil_Dry_P Parameter: Timepoint (day) Value: 13
  misc_feature: MA Experiment 20001558 PARAMETER Experiment Name: At_Drought_Soil_Dry_P Parameter: Treatment Value: Drought vs. No Drought
aatttggagtcagagggaggcgttgcaaactcaataaagctcaaaactttccgccgtcgttttcgtcgtcggagaatacaacaaaagacctaaagcagatcaaagtaattgtagttgacggagatggagaaagtaaagattgaagaaattcagtccaccgctaagaaacaacggattgctactcacacccatatcaaaggccttggcctcgagccaactggtatccctataaaattggcagctggatttgttggtcaacttgaggctagagaggcagctggtcttgtagttgacatgattaagcagaagaaaatggcgggcaaggctcttttgcttgctggacctcctggaactgggaaaacagctttggctcttggaatctctcaagagctgggaagcaaggttccattctgtccaatggttggatctgaggtttactcatcagaggttaagaaaacagaggttctcatggagaattttagacgtgccattggtctacgtatcaaggaaaccaaagaagtctatgaaggggaggtcaccgagctgtcaccagaagaaactgaaagcctcactggaggttatggtaaaagcatcagccatgttgtaattacactcaagacagtcaaaggaaccaaacatctgaaattggatcccactatctatgatgccttgattaaggaaaaggtagctgtaggagatgtaatctatatcgaagcaaacagtggagctgtcaaacgggtaggtagaagtgatgcttttgccactgaatttgatctggaagcagaagaatatgttccacttcccaaaggagaggtccacaaaaagaaagagatagtgcaggatgtcacactccaagatctggatgcagcaaatgctcgacctcaaggtggccaggatatactttctttgatgggccaaatgatgaaaccgcggaagactgagatcactgataagcttcggcaagaaattaacaaggttgtgaaccgatatatagatgaaggtgtggcagagcttgttccaggagttctatttattgatgaggttcatatgcttgatatggagtgcttctcatacttgaaccgtgctcttgagagctcattatctccgatagtgatatttgcaacaaatagaggtgtttgcaacgtaagagggactgatatgcccagcccccatggagtccctattgatctattagatcgattggttatcatccggactcaaatctatgatccctctgaaatgatccagattatagccattcgtgcgcaagttgaagaattaaccgtggatgaagaatgcttggttctacttggggagattgggcaaagaacttcactaaggcacgctgtgcagcttctgtctcctgccagcattgtagcgaaaatgaatggccgtgacaatatttgcaaggctgatatagaggaagtaacatcactctacttggatgctaaatcttcagcaaagcttttgcatgagcaacaagaaaaatacatctcatgagaagaacactaatcgcacattttgttgaaacatctcataatttttctgtcgttttattttgtaatgtcggaatatggagaatgtctaatgggattacaatttggtttctctgaattcatttatttatgtgctatttttt

SEQ ID NO: 40193 - protein, 458 aa, Arabidopsis thaliana
  peptide (1)..(458): Ceres Seq. ID no. 12370904
  misc_feature (120)..(442): Pfam Name: TIP49 C-terminus Pfam Description: TIP49 C-terminus
  misc_feature (123)..(454): Homolog of NCBI NO: 40745980 NR Description: hypothetical protein AN1971.2 [Aspergillus
  misc_feature (4)..(457): Homolog of NCBI NO: 21358125 NR Description: CG4003-PA [Drosophila melanogaster]
  misc_feature (4)..(457): Homolog of NCBI NO: 27754170 NR Description: RuvB-like 1 [Danio rerio]
  misc_feature (4)..(457): Homolog of NCBI NO: 4506753 NR Description: TATA binding protein interacting protein 49 kDa
  misc_feature (4)..(457): Homolog of NCBI NO: 9790083 NR Description: RuvB-like protein 1; Pontin 52 [Mus musculus]
  misc_feature (4)..(30): Homolog of NCBI NO: 34908086 NR Description: P0506B12.32 [Oryza sativa (japonica
  misc_feature (30)..(407): Homolog of NCBI NO: 34908086 NR Description: P0506B12.32 [Oryza sativa (japonica
  misc_feature (4)..(457): Homolog of NCBI NO: 28201889 NR Description: RuvB-like 1 (Pontin)
  misc_feature (1)..(458): Homolog of NCBI NO: 7208771 NR Description: putative Ruv DNA-helicase [Cicer arietinum]
  misc_feature (1)..(458): Homolog of NCBI NO: 15242217 NR Description: Ruv DNA-helicase-like protein
MEKVKIEEIQSTAKKQRIATHTHIKGLGLEPTGIPIKLAAGFVGQLEAREAAGLVVDMIKQKKMAGKALLLAGPPGTGKTALALGISQELGSKVPFCPMVGSEVYSSEVKKTEVLMENFRRAIGLRIKETKEVYEGEVTELSPEETESLTGGYGKSISHVVITLKTVKGTKHLKLDPTIYDALIKEKVAVGDVIYIEANSGAVKRVGRSDAFATEFDLEAEEYVPLPKGEVHKKKEIVQDVTLQDLDAANARPQGGQDILSLMGQMMKPRKTEITDKLRQEINKVVNRYIDEGVAELVPGVLFIDEVHMLDMECFSYLNRALESSLSPIVIFATNRGVCNVRGTDMPSPHGVPIDLLDRLVIIRTQIYDPSEMIQIIAIRAQVEELTVDEECLVLLGEIGQRTSLRHAVQLLSPASIVAKMNGRDNICKADIEEVTSLYLDAKSSAKLLHEQQEKYIS

SEQ ID NO: 40194 - protein, 401 aa, Arabidopsis thaliana
  peptide (1)..(401): Ceres Seq. ID no. 12370905
  misc_feature (63)..(385): Pfam Name: TIP49 C-terminus Pfam Description: TIP49 C-terminus
  misc_feature (1)..(68): Homolog of NCBI NO: 40745980 NR Description: hypothetical protein AN1971.2 [Aspergillus
  misc_feature (66)..(397): Homolog of NCBI NO: 40745980 NR Description: hypothetical protein AN1971.2 [Aspergillus
  misc_feature (1)..(400): Homolog of NCBI NO: 21358125 NR Description: CG4003-PA [Drosophila melanogaster]
  misc_feature (1)..(400): Homolog of NCBI NO: 27754170 NR Description: RuvB-like 1 [Danio rerio]
  misc_feature (1)..(400): Homolog of NCBI NO: 4506753 NR Description: TATA binding protein interacting protein 49 kDa
  misc_feature (1)..(400): Homolog of NCBI NO: 9790083 NR Description: RuvB-like protein 1; Pontin 52 [Mus musculus]
  misc_feature (1)..(350): Homolog of NCBI NO: 34908086 NR Description: P0506B12.32 [Oryza sativa (japonica
  misc_feature (1)..(400): Homolog of NCBI NO: 28201889 NR Description: RuvB-like 1 (Pontin)
  misc_feature (1)..(401): Homolog of NCBI NO: 7208771 NR Description: putative Ruv DNA-helicase [Cicer arietinum]
  misc_feature (1)..(401): Homolog of NCBI NO: 15242217 NR Description: Ruv DNA-helicase-like protein
MIKQKKMAGKALLLAGPPGTGKTALALGISQELGSKVPFCPMVGSEVYSSEVKKTEVLMENFRRAIGLRIKETKEVYEGEVTELSPEETESLTGGYGKSISHVVITLKTVKGTKHLKLDPTIYDALIKEKVAVGDVIYIEANSGAVKRVGRSDAFATEFDLEAEEYVPLPKGEVHKKKEIVQDVTLQDLDAANARPQGGQDILSLMGQMMKPRKTEITDKLRQEINKVVNRYIDEGVAELVPGVLFIDEVHMLDMECFSYLNRALESSLSPIVIFATNRGVCNVRGTDMPSPHGVPIDLLDRLVIIRTQIYDPSEMIQIIAIRAQVEELTVDEECLVLLGEIGQRTSLRHAVQLLSPASIVAKMNGRDNICKADIEEVTSLYLDAKSSAKLLHEQQEKYIS

SEQ ID NO: 40195 - protein, 395 aa, Arabidopsis thaliana
  peptide (1)..(395): Ceres Seq. ID no. 12370906
  misc_feature (57)..(379): Pfam Name: TIP49 C-terminus Pfam Description: TIP49 C-terminus
  misc_feature (1)..(62): Homolog of NCBI NO: 40745980 NR Description: hypothetical protein AN1971.2 [Aspergillus
  misc_feature (60)..(391): Homolog of NCBI NO: 40745980 NR Description: hypothetical protein AN1971.2 [Aspergillus
  misc_feature (1)..(394): Homolog of NCBI NO: 21358125 NR Description: CG4003-PA [Drosophila melanogaster]
  misc_feature (1)..(394): Homolog of NCBI NO: 27754170 NR Description: RuvB-like 1 [Danio rerio]
  misc_feature (1)..(394): Homolog of NCBI NO: 4506753 NR Description: TATA binding protein interacting protein 49 kDa
  misc_feature (1)..(394): Homolog of NCBI NO: 9790083 NR Description: RuvB-like protein 1; Pontin 52 [Mus musculus]
  misc_feature (1)..(344): Homolog of NCBI NO: 34908086 NR Description: P0506B12.32 [Oryza sativa (japonica
  misc_feature (1)..(394): Homolog of NCBI NO: 28201889 NR Description: RuvB-like 1 (Pontin)
  misc_feature (1)..(395): Homolog of NCBI NO: 7208771 NR Description: putative Ruv DNA-helicase [Cicer arietinum]
  misc_feature (1)..(395): Homolog of NCBI NO: 15242217 NR Description: Ruv DNA-helicase-like protein
MAGKALLLAGPPGTGKTALALGISQELGSKVPFCPMVGSEVYSSEVKKTEVLMENFRRAIGLRIKETKEVYEGEVTELSPEETESLTGGYGKSISHVVITLKTVKGTKHLKLDPTIYDALIKEKVAVGDVIYIEANSGAVKRVGRSDAFATEFDLEAEEYVPLPKGEVHKKKEIVQDVTLQDLDAANARPQGGQDILSLMGQMMKPRKTEITDKLRQEINKVVNRYIDEGVAELVPGVLFIDEVHMLDMECFSYLNRALESSLSPIVIFATNRGVCNVRGTDMPSPHGVPIDLLDRLVIIRTQIYDPSEMIQIIAIRAQVEELTVDEECLVLLGEIGQRTSLRHAVQLLSPASIVAKMNGRDNICKADIEEVTSLYLDAKSSAKLLHEQQEKYIS

SEQ ID NO: 40196 - DNA, 1787 bp, Arabidopsis thaliana
  misc_feature (1)..(1787): Ceres Seq. ID no. 13491387
  misc_feature: MA Experiment ID: 108434 Result: Up-regulated in Transcription
  misc_feature: MA Experiment 108434 PARAMETER Experiment Name: At_Root_Tips_cDNA_P Parameter: Tissue Value: Root Tips
  misc_feature: MA Experiment ID: 108461 Result: Down-regulated in Transcription
  misc_feature: MA Experiment 108461 PARAMETER Experiment Name: At_Germinating_Seeds_cDNA_P Parameter: Age (day) Value: 1 vs. 0
  misc_feature: MA Experiment 108461 PARAMETER Experiment Name: At_Germinating_Seeds_cDNA_P Parameter: Tissue Value: Germinating Seeds
  misc_feature: MA Experiment ID: 108462 Result: Down-regulated in Transcription
  misc_feature: MA Experiment 108462 PARAMETER Experiment Name: At_Germinating_Seeds_cDNA_P Parameter: Age (day) Value: 2 vs. 0
  misc_feature: MA Experiment 108462 PARAMETER Experiment Name: At_Germinating_Seeds_cDNA_P Parameter: Tissue Value: Germinating Seeds
  misc_feature: MA Experiment ID: 108463 Result: Down-regulated in Transcription
  misc_feature: MA Experiment 108463 PARAMETER Experiment Name: At_Germinating_Seeds_cDNA_P Parameter: Age (day) Value: 3 vs. 0
  misc_feature: MA Experiment 108463 PARAMETER Experiment Name: At_Germinating_Seeds_cDNA_P Parameter: Tissue Value: Germinating Seeds
  misc_feature: MA Experiment ID: 108464 Result: Down-regulated in Transcription
  misc_feature: MA Experiment 108464 PARAMETER Experiment Name: At_Germinating_Seeds_cDNA_P Parameter: Age (day) Value: 4 vs. 0
  misc_feature: MA Experiment 108464 PARAMETER Experiment Name: At_Germinating_Seeds_cDNA_P Parameter: Tissue Value: Germinating Seeds
  misc_feature: MA Experiment ID: 108572 Result: Down-regulated in Transcription
  misc_feature: MA Experiment 108572 PARAMETER Experiment Name: At_Drought_cDNA_P Parameter: Timepoint (hr) Value: 1
  misc_feature: MA Experiment 108572 PARAMETER Experiment Name: At_Drought_cDNA_P Parameter: Tissue Value: Aerial
  misc_feature: MA Experiment 108572 PARAMETER Experiment Name: At_Drought_cDNA_P Parameter: Treatment Value: Drought vs. No Drought
  misc_feature: MA Experiment ID: 20000179 Result: Down-regulated in Transcription
  misc_feature: MA Experiment 20000179 PARAMETER Experiment Name: At_Germinating_Seeds_P Parameter: Age (hr) Value: 6 vs. 0
  misc_feature: MA Experiment 20000179 PARAMETER Experiment Name: At_Germinating_Seeds_P Parameter: Tissue Value: Germinating Seeds
  misc_feature: MA Experiment ID: 20000180 Result: Down-regulated in Transcription
  misc_feature: MA Experiment 20000180 PARAMETER Experiment Name: At_Germinating_Seeds_P Parameter: Age (hr) Value: 24 vs. 0
  misc_feature: MA Experiment 20000180 PARAMETER Experiment Name: At_Germinating_Seeds_P Parameter: Tissue Value: Germinating Seeds
  misc_feature: MA Experiment ID: 20000306 Result: Down-regulated in Transcription
  misc_feature: MA Experiment 20000306 PARAMETER Experiment Name: At_Germinating_Seeds_Sub_P Parameter: Age (hr) Value: 6 vs. 0
  misc_feature: MA Experiment 20000306 PARAMETER Experiment Name: At_Germinating_Seeds_Sub_P Parameter: Organism Value: A. thaliana
  misc_feature: MA Experiment 20000306 PARAMETER Experiment Name: At_Germinating_Seeds_Sub_P Parameter: Plant Line Value: WS
  misc_feature: MA Experiment 20000306 PARAMETER Experiment Name: At_Germinating_Seeds_Sub_P Parameter: Tissue Value: Germinating Seeds
  misc_feature: MA Experiment ID: 20000307 Result: Down-regulated in Transcription
  misc_feature: MA Experiment 20000307 PARAMETER Experiment Name: At_Germinating_Seeds_Sub_P Parameter: Age (hr) Value: 24 vs. 0
  misc_feature: MA Experiment 20000307 PARAMETER Experiment Name: At_Germinating_Seeds_Sub_P Parameter: Organism Value: A. thaliana
  misc_feature: MA Experiment 20000307 PARAMETER Experiment Name: At_Germinating_Seeds_Sub_P Parameter: Plant Line Value: WS
  misc_feature: MA Experiment 20000307 PARAMETER Experiment Name: At_Germinating_Seeds_Sub_P Parameter: Tissue Value: Germinating Seeds
  misc_feature: MA Experiment ID: 20000315 Result: Down-regulated in Transcription
  misc_feature: MA Experiment 20000315 PARAMETER Experiment Name: At_14day_Shoots-Roots_Sub_P Parameter: Age (day) Value: 14
  misc_feature: MA Experiment 20000315 PARAMETER Experiment Name: At_14day_Shoots-Roots_Sub_P Parameter: Organism Value: A. thaliana
  misc_feature: MA Experiment 20000315 PARAMETER Experiment Name: At_14day_Shoots-Roots_Sub_P Parameter: Plant Line Value: WS
  misc_feature: MA Experiment 20000315 PARAMETER Experiment Name: At_14day_Shoots-Roots_Sub_P Parameter: Tissue Value: Shoots vs. Whole Plant
  misc_feature: MA Experiment ID: 20000437 Result: Down-regulated in Transcription
  misc_feature: MA Experiment 20000437 PARAMETER Experiment Name: At_Drought_P Parameter: Age (day) Value: 8
  misc_feature: MA Experiment 20000437 PARAMETER Experiment Name: At_Drought_P Parameter: Organism Value: A. thaliana
  misc_feature: MA Experiment 20000437 PARAMETER Experiment Name: At_Drought_P Parameter: Plant Line Value: WS
  misc_feature: MA Experiment 20000437 PARAMETER Experiment Name: At_Drought_P Parameter: Timepoint (hr) Value: 24
  misc_feature: MA Experiment 20000437 PARAMETER Experiment Name: At_Drought_P Parameter: Tissue Value: Whole Plant
  misc_feature: MA Experiment 20000437 PARAMETER Experiment Name: At_Drought_P Parameter: Treatment Value: Drought vs. No Drought
  misc_feature: MA Experiment ID: 20001557 Result: Up-regulated in Transcription
  misc_feature: MA Experiment 20001557 PARAMETER Experiment Name: At_Drought_Soil_Dry_P Parameter: Age (day) Value: 27
  misc_feature: MA Experiment 20001557 PARAMETER Experiment Name: At_Drought_Soil_Dry_P Parameter: Organism Value: A. thaliana
  misc_feature: MA Experiment 20001557 PARAMETER Experiment Name: At_Drought_Soil_Dry_P Parameter: Plant Line Value: WS
  misc_feature: MA Experiment 20001557 PARAMETER Experiment Name: At_Drought_Soil_Dry_P Parameter: Post Timepoint (hr) Value: 3
  misc_feature: MA Experiment 20001557 PARAMETER Experiment Name: At_Drought_Soil_Dry_P Parameter: Post-Treatment Value: Re-Water vs. No Drought
  misc_feature: MA Experiment 20001557 PARAMETER Experiment Name: At_Drought_Soil_Dry_P Parameter: Timepoint (day) Value: 13
  misc_feature: MA Experiment 20001557 PARAMETER Experiment Name: At_Drought_Soil_Dry_P Parameter: Treatment Value: Drought vs. No Drought
  misc_feature: MA Experiment ID: 20001558 Result: Up-regulated in Transcription
  misc_feature: MA Experiment 20001558 PARAMETER Experiment Name: At_Drought_Soil_Dry_P Parameter: Age (day) Value: 27
  misc_feature: MA Experiment 20001558 PARAMETER Experiment Name: At_Drought_Soil_Dry_P Parameter: Organism Value: A. thaliana
  misc_feature: MA Experiment 20001558 PARAMETER Experiment Name: At_Drought_Soil_Dry_P Parameter: Plant Line Value: WS
  misc_feature: MA Experiment 20001558 PARAMETER Experiment Name: At_Drought_Soil_Dry_P Parameter: Post Timepoint (hr) Value: 6
  misc_feature: MA Experiment 20001558 PARAMETER Experiment Name: At_Drought_Soil_Dry_P Parameter: Post-Treatment Value: Re-Water vs. No Drought
  misc_feature: MA Experiment 20001558 PARAMETER Experiment Name: At_Drought_Soil_Dry_P Parameter: Timepoint (day) Value: 13
  misc_feature: MA Experiment 20001558 PARAMETER Experiment Name: At_Drought_Soil_Dry_P Parameter: Treatment Value: Drought vs. No Drought
atccttacaacaaaaatgaatttccgtaatctgattgcttccggttctcgcctcggcaagaggttctgtgcaacggtatttgctccggcgtcggcgactggcatcgtcgaagcctctgtttcttctccagcggcggcgaatgtcgtcgaagcctctgtttcttctccggcggcggagaatggcgtcagaacctctgttgctgctccgacggtggcttcaaggcagcgagagttgtacaagaaactttctatgcttagtgtgacgggaggaacagtggcagagacgttaaatcagttcatcatggagggtattactgtcagaaaagacgatctctttcgctgtgctaaaacccttcgcaaattccgtcgacctcaacacgcttttgagatctttgattggatggagaagaggaaaatgacattttctgtgtctgatcatgcaatttgtttggatctaattggaaagactaaaggtttagaagcagctgagaactactttaacaacttagatccttctgcaaagaatcatcagtcgacttatggggcgctcatgaactgttactgtgttgaacttgaggaagagaaagcaaaggctcattttgagataatggatgagcttaactttgttaacaattcgttaccgtttaataacatgatgtctatgtacatgcggttgagtcaaccggagaaggtacctgtgttggttgatgcgataaaacagaggggtatatctccttgtggtgtcacttactctatatggatgcagagctgtggaagtttgaatgacttagatggattagagaagattatagatgagatggggaaagacagtgaagctaaaaccacttggaatactttctctaatctggctgcaatctacactaaagctggtctttacgagaaggcggattctgcactgaaatctatggaggagaaaatgaatcctaacaaccgtgattcccaccattttctcatgagtttgtacgctggaatctcgaaaggtcctgaggtttatagggtttgggaatcgctgaagaaggctcgtcctgaggtcaacaacttgagctatctagtcatgttacaagcgatgagtaaactaggcgacttagatgggattaagaagattttcacagagtgggaatcgaaatgctgggcttacgatatgaggctggctaatatcgcgattaacacgtatttgaaagggaatatgtatgaagaagcagagaagattcttgatggtgccatgaaaaagtctaaaggtcctttctccaaagcgagacagcttctgatgatccatctgttggagaacgataaagcggatttggctatgaagcatttggaagcagcggtttctgattctgcagagaacaaagacgaatggggctggagctcagagctggtcagcttgtttttccttcactttgagaaagctaaagatgttgatggagcggaagatttctgcaagattttgtcgaattggaaacctcttgattctgaaactatgacatttctcataaagacttatgcagcagcagagaagactagtcctgatatgcgagagagattgtctcaacagcagatcgaagtaagcgaggagatccaagacttgcttaaaacagtttgtccctaaactaagtaataaatgtgattagcacgttatgtttaaacttgtgtcccgtttagagtttccagttccagaaaacaaagcttagttctttttttaagtctttgacatatgtgtcggttacatagtggaagatctcataaacaattaagtgtttctttcat

SEQ ID NO: 40197 - protein, 542 aa, Arabidopsis thaliana
  peptide (1)..(542): Ceres Seq. ID no. 13491388
  misc_feature (319)..(353): Pfam Name: PPR repeat Pfam Description: PPR repeat
  misc_feature (78)..(480): Homolog of NCBI NO: 32490390 NR Description: OSJNBa0041M06.2 [Oryza sativa (japonica
  misc_feature (10)..(517): Homolog of NCBI NO: 34393591 NR Description: putative DNA-binding protein
  misc_feature (78)..(505): Homolog of NCBI NO: 22329290 NR Description: pentatricopeptide (PPR) repeat-containing protein
  misc_feature (78)..(505): Homolog of NCBI NO: 20453085 NR Description: At1g02150/T7I23.8 [Arabidopsis thaliana]
  misc_feature (78)..(540): Homolog of NCBI NO: 34905490 NR Description: P0682B08.20 [Oryza sativa (japonica
  misc_feature (75)..(540): Homolog of NCBI NO: 15219808 NR Description: pentatricopeptide (PPR) repeat-containing protein
  misc_feature (51)..(542): Homolog of NCBI NO: 25407143 NR Description: hypothetical protein AT4g01990 [imported] -
  misc_feature (51)..(542): Homolog of NCBI NO: 18411800 NR Description: pentatricopeptide (PPR) repeat-containing protein
  misc_feature (6)..(542): Homolog of NCBI NO: 15217734 NR Description: pentatricopeptide (PPR) repeat-containing protein
  misc_feature (6)..(542): Homolog of NCBI NO: 17529324 NR Description: unknown protein [Arabidopsis thaliana]
ILTTKMNFRNLIASGSRLGKRFCATVFAPASATGIVEASVSSPAAANVVEASVSSPAAENGVRTSVAAPTVASRQRELYKKLSMLSVTGGTVAETLNQFIMEGITVRKDDLFRCAKTLRKFRRPQHAFEIFDWMEKRKMTFSVSDHAICLDLIGKTKGLEAAENYFNNLDPSAKNHQSTYGALMNCYCVELEEEKAKAHFEIMDELNFVNNSLPFNNMMSMYMRLSQPEKVPVLVDAIKQRGISPCGVTYSIWMQSCGSLNDLDGLEKIIDEMGKDSEAKTTWNTFSNLAAIYTKAGLYEKADSALKSMEEKMNPNNRDSHHFLMSLYAGISKGPEVYRVWESLKKARPEVNNLSYLVMLQAMSKLGDLDGIKKIFTEWESKCWAYDMRLANIAINTYLKGNMYEEAEKILDGAMKKSKGPFSKARQLLMIHLLENDKADLAMKHLEAAVSDSAENKDEWGWSSELVSLFFLHFEKAKDVDGAEDFCKILSNWKPLDSETMTFLIKTYAAAEKTSPDMRERLSQQQIEVSEEIQDLLKTVCP

SEQ ID NO: 40198 - protein, 537 aa, Arabidopsis thaliana
  peptide (1)..(537): Ceres Seq. ID no. 13491389
  misc_feature (314)..(348): Pfam Name: PPR repeat Pfam Description: PPR repeat
  misc_feature (73)..(475): Homolog of NCBI NO: 32490390 NR Description: OSJNBa0041M06.2 [Oryza sativa (japonica
  misc_feature (5)..(512): Homolog of NCBI NO: 34393591 NR Description: putative DNA-binding protein
  misc_feature (73)..(500): Homolog of NCBI NO: 22329290 NR Description: pentatricopeptide (PPR) repeat-containing protein
  misc_feature (73)..(500): Homolog of NCBI NO: 20453085 NR Description: At1g02150/T7I23.8 [Arabidopsis thaliana]
  misc_feature (73)..(535): Homolog of NCBI NO: 34905490 NR Description: P0682B08.20 [Oryza sativa (japonica
  misc_feature (70)..(535): Homolog of NCBI NO: 15219808 NR Description: pentatricopeptide (PPR) repeat-containing protein
  misc_feature (46)..(537): Homolog of NCBI NO: 25407143 NR Description: hypothetical protein AT4g01990 [imported] -
  misc_feature (46)..(537): Homolog of NCBI NO: 18411800 NR Description: pentatricopeptide (PPR) repeat-containing protein
  misc_feature (1)..(537): Homolog of NCBI NO: 15217734 NR Description: pentatricopeptide (PPR) repeat-containing protein
  misc_feature (1)..(537): Homolog of NCBI NO: 17529324 NR Description: unknown protein [Arabidopsis thaliana]
MNFRNLIASGSRLGKRFCATVFAPASATGIVEASVSSPAAANVVEASVSSPAAENGVRTSVAAPTVASRQRELYKKLSMLSVTGGTVAETLNQFIMEGITVRKDDLFRCAKTLRKFRRPQHAFEIFDWMEKRKMTFSVSDHAICLDLIGKTKGLEAAENYFNNLDPSAKNHQSTYGALMNCYCVELEEEKAKAHFEIMDELNFVNNSLPFNNMMSMYMRLSQPEKVPVLVDAIKQRGISPCGVTYSIWMQSCGSLNDLDGLEKIIDEMGKDSEAKTTWNTFSNLAAIYTKAGLYEKADSALKSMEEKMNPNNRDSHHFLMSLYAGISKGPEVYRVWESLKKARPEVNNLSYLVMLQAMSKLGDLDGIKKIFTEWESKCWAYDMRLANIAINTYLKGNMYEEAEKILDGAMKKSKGPFSKARQLLMIHLLENDKADLAMKHLEAAVSDSAENKDEWGWSSELVSLFFLHFEKAKDVDGAEDFCKILSNWKPLDSETMTFLIKTYAAAEKTSPDMRERLSQQQIEVSEEIQDLLKTVCP

SEQ ID NO: 40199 - protein, 459 aa, Arabidopsis thaliana
  peptide (1)..(459): Ceres Seq. ID no. 13491390
  misc_feature (236)..(270): Pfam Name: PPR repeat Pfam Description: PPR repeat
  misc_feature (1)..(397): Homolog of NCBI NO: 32490390 NR Description: OSJNBa0041M06.2 [Oryza sativa (japonica
  misc_feature (1)..(434): Homolog of NCBI NO: 34393591 NR Description: putative DNA-binding protein
  misc_feature (1)..(422): Homolog of NCBI NO: 22329290 NR Description: pentatricopeptide (PPR) repeat-containing protein
  misc_feature (1)..(422): Homolog of NCBI NO: 20453085 NR Description: At1g02150/T7I23.8 [Arabidopsis thaliana]
  misc_feature (1)..(457): Homolog of NCBI NO: 34905490 NR Description: P0682B08.20 [Oryza sativa (japonica
  misc_feature (1)..(457): Homolog of NCBI NO: 15219808 NR Description: pentatricopeptide (PPR) repeat-containing protein
  misc_feature (1)..(459): Homolog of NCBI NO: 25407143 NR Description: hypothetical protein AT4g01990 [imported] -
  misc_feature (1)..(459): Homolog of NCBI NO: 18411800 NR Description: pentatricopeptide (PPR) repeat-containing protein
  misc_feature (1)..(459): Homolog of NCBI NO: 15217734 NR Description: pentatricopeptide (PPR) repeat-containing protein
  misc_feature (1)..(459): Homolog of NCBI NO: 17529324 NR Description: unknown protein [Arabidopsis thaliana]
MLSVTGGTVAETLNQFIMEGITVRKDDLFRCAKTLRKFRRPQHAFEIFDWMEKRKMTFSVSDHAICLDLIGKTKGLEAAENYFNNLDPSAKNHQSTYGALMNCYCVELEEEKAKAHFEIMDELNFVNNSLPFNNMMSMYMRLSQPEKVPVLVDAIKQRGISPCGVTYSIWMQSCGSLNDLDGLEKIIDEMGKDSEAKTTWNTFSNLAAIYTKAGLYEKADSALKSMEEKMNPNNRDSHHFLMSLYAGISKGPEVYRVWESLKKARPEVNNLSYLVMLQAMSKLGDLDGIKKIFTEWESKCWAYDMRLANIAINTYLKGNMYEEAEKILDGAMKKSKGPFSKARQLLMIHLLENDKADLAMKHLEAAVSDSAENKDEWGWSSELVSLFFLHFEKAKDVDGAEDFCKILSNWKPLDSETMTFLIKTYAAAEKTSPDMRERLSQQQIEVSEEIQDLLKTVCP

SEQ ID NO: 40200 - DNA, 904 bp, Arabidopsis thaliana
  misc_feature (1)..(904): Ceres Seq. ID no. 12395811
  misc_feature: MA Experiment ID: 20000173 Result: Up-regulated in Transcription
  misc_feature: MA Experiment 20000173 PARAMETER Experiment Name: At_42deg_Heat_P Parameter: Age (day) Value: 14
  misc_feature: MA Experiment 20000173 PARAMETER Experiment Name: At_42deg_Heat_P Parameter: Organism Value: A. thaliana
  misc_feature: MA Experiment 20000173 PARAMETER Experiment Name: At_42deg_Heat_P Parameter: Plant Line Value: WS
  misc_feature: MA Experiment 20000173 PARAMETER Experiment Name: At_42deg_Heat_P Parameter: Temperature (deg C) Value: 42 vs. 22
  misc_feature: MA Experiment 20000173 PARAMETER Experiment Name: At_42deg_Heat_P Parameter: Timepoint (hr) Value: 6
  misc_feature: MA Experiment 20000173 PARAMETER Experiment Name: At_42deg_Heat_P Parameter: Tissue Value: Aerial
  misc_feature: MA Experiment ID: 20000180 Result: Down-regulated in Transcription
  misc_feature: MA Experiment 20000180 PARAMETER Experiment Name: At_Germinating_Seeds_P Parameter: Age (hr) Value: 24 vs. 0
  misc_feature: MA Experiment 20000180 PARAMETER Experiment Name: At_Germinating_Seeds_P Parameter: Tissue Value: Germinating Seeds
  misc_feature: MA Experiment ID: 20000184 Result: Down-regulated in Transcription
  misc_feature: MA Experiment 20000184 PARAMETER Experiment Name: At_Shoots__P Parameter: Age (day) Value: 7
  misc_feature: MA Experiment 20000184 PARAMETER Experiment Name: At_Shoots__P Parameter: Tissue Value: Shoots vs. Whole Plant
  misc_feature: MA Experiment ID: 20001558 Result: Up-regulated in Transcription
  misc_feature: MA Experiment 20001558 PARAMETER Experiment Name: At_Drought_Soil_Dry_P Parameter: Age (day) Value: 27
  misc_feature: MA Experiment 20001558 PARAMETER Experiment Name: At_Drought_Soil_Dry_P Parameter: Organism Value: A. thaliana
  misc_feature: MA Experiment 20001558 PARAMETER Experiment Name: At_Drought_Soil_Dry_P Parameter: Plant Line Value: WS
  misc_feature: MA Experiment 20001558 PARAMETER Experiment Name: At_Drought_Soil_Dry_P Parameter: Post Timepoint (hr) Value: 6
  misc_feature: MA Experiment 20001558 PARAMETER Experiment Name: At_Drought_Soil_Dry_P Parameter: Post-Treatment Value: Re-Water vs. No Drought
  misc_feature: MA Experiment 20001558 PARAMETER Experiment Name: At_Drought_Soil_Dry_P Parameter: Timepoint (day) Value: 13
  misc_feature: MA Experiment 20001558 PARAMETER Experiment Name: At_Drought_Soil_Dry_P Parameter: Treatment Value: Drought vs. No Drought
ctactttcttctcctttctcgtaacttgatcaaatctgcttactgtggagttatacaccttgaagagtctcgcgataatgaagaaattctatcaaaatgctgatcatgagactgataaatccaaatcggcggagacgaagaagaggaagaacatgaggagattaggaggcggtggtctttctctccaaacttttgccaacatgaaatcggaaaataatcgctataacccttctttgatcaaaaagcaaaaagagttctacaagaatgcaaagtatgtgagcaagtttaggaagtcgttgaagcagcagaacattcctgataagaatgagactggagagactagtaaggtaggtgatgatgatgatgatgataagcggaagggtaaatctaataagagaattggtgtagaggatttgtacaagcagacaagagaagagatggagagagtaaggaaggagagagaggcaatgtttcaggcgaagaaggaagcgaaagaagaggctgaatctaggaggaaagaagcaaaggggaaaatgttgaggaagactcgacatggtcagcctgtaatgaaatacagaattgagcatcttcttgaatccatcaagaaatctgccggaatcaacgaaatcgcctaacttgtgcgggttgatacagtgcagatgaagaacccagtgaggagaagttgctgatgttgcggaggctcaaagcagaaaccttgttgtcactcagatactgacctttttcttcccggagatattatgttacactactgcttatactttgagagatgctttgcggcaacatatgtagttttttgctaggccttaccgtttagctcatgattttagatgtttctttacaaacttcttttactataaatcttataaaatgataattttattcc

SEQ ID NO: 40201 - protein, 185 aa, Arabidopsis thaliana; identical to SEQ ID NO: 25810
  peptide (1)..(185): Ceres Seq. ID no. 12395812
  misc_feature (99)..(179): Homolog of NCBI NO: 19115190 NR Description: very hypothetical protein [Schizosaccharomyces
  misc_feature (1)..(185): Homolog of NCBI NO: 15236259 NR Description: unknown protein; protein id: At4g03180.1,

SEQ ID NO: 40202 - protein, 160 aa, Arabidopsis thaliana; identical to SEQ ID NO: 25811
  peptide (1)..(160): Ceres Seq. ID no. 12395813
  misc_feature (74)..(154): Homolog of NCBI NO: 19115190 NR Description: very hypothetical protein [Schizosaccharomyces
  misc_feature (1)..(160): Homolog of NCBI NO: 15236259 NR Description: unknown protein; protein id: At4g03180.1,

SEQ ID NO: 40203 - protein, 144 aa, Arabidopsis thaliana; identical to SEQ ID NO: 25812
  peptide (1)..(144): Ceres Seq. ID no. 12395814
  misc_feature (58)..(138): Homolog of NCBI NO: 19115190 NR Description: very hypothetical protein [Schizosaccharomyces
  misc_feature (1)..(144): Homolog of NCBI NO: 15236259 NR Description: unknown protein; protein id: At4g03180.1,

SEQ ID NO: 40204 - DNA, 1980 bp, Arabidopsis thaliana
  misc_feature (1)..(1980): Ceres Seq. ID no. 13501412
  misc_feature: MA Experiment ID: 108434 Result: Up-regulated in Transcription
  misc_feature: MA Experiment 108434 PARAMETER Experiment Name: At_Root_Tips_cDNA_P Parameter: Tissue Value: Root Tips
  misc_feature: MA Experiment ID: 108461 Result: Up-regulated in Transcription
  misc_feature: MA Experiment 108461 PARAMETER Experiment Name: At_Germinating_Seeds_cDNA_P Parameter: Age (day) Value: 1 vs. 0
  misc_feature: MA Experiment 108461 PARAMETER Experiment Name: At_Germinating_Seeds_cDNA_P Parameter: Tissue Value: Germinating Seeds
  misc_feature: MA Experiment ID: 108462 Result: Up-regulated in Transcription
  misc_feature: MA Experiment 108462 PARAMETER Experiment Name: At_Germinating_Seeds_cDNA_P Parameter: Age (day) Value: 2 vs. 0
  misc_feature: MA Experiment 108462 PARAMETER Experiment Name: At_Germinating_Seeds_cDNA_P Parameter: Tissue Value: Germinating Seeds
  misc_feature: MA Experiment ID: 108463 Result: Up-regulated in Transcription
  misc_feature: MA Experiment 108463 PARAMETER Experiment Name: At_Germinating_Seeds_cDNA_P Parameter: Age (day) Value: 3 vs. 0
  misc_feature: MA Experiment 108463 PARAMETER Experiment Name: At_Germinating_Seeds_cDNA_P Parameter: Tissue Value: Germinating Seeds
  misc_feature: MA Experiment ID: 108573 Result: Up-regulated in Transcription
  misc_feature: MA Experiment 108573 PARAMETER Experiment Name: At_Drought_cDNA_P Parameter: Timepoint (hr) Value: 6
  misc_feature: MA Experiment 108573 PARAMETER Experiment Name: At_Drought_cDNA_P Parameter: Tissue Value: Aerial
  misc_feature: MA Experiment 108573 PARAMETER Experiment Name: At_Drought_cDNA_P Parameter: Treatment Value: Drought vs. No Drought
  misc_feature: MA Experiment ID: 108576 Result: Down-regulated in Transcription
  misc_feature: MA Experiment 108576 PARAMETER Experiment Name: At_42deg_Heat_cDNA_P Parameter: Temperature (deg C) Value: 42 vs. 22
  misc_feature: MA Experiment 108576 PARAMETER Experiment Name: At_42deg_Heat_cDNA_P Parameter: Timepoint (hr) Value: 1
  misc_feature: MA Experiment 108576 PARAMETER Experiment Name: At_42deg_Heat_cDNA_P Parameter: Tissue Value: Aerial
  misc_feature: MA Experiment ID: 108595 Result: Down-regulated in Transcription
  misc_feature: MA Experiment 108595 PARAMETER Experiment Name: At_Ler-pi_Ovule_cDNA_P Parameter: Plant Line Value: null
  misc_feature: MA Experiment ID: 20000180 Result: Up-regulated in Transcription
  misc_feature: MA Experiment 20000180 PARAMETER Experiment Name: At_Germinating_Seeds_P Parameter: Age (hr) Value: 24 vs. 0
  misc_feature: MA Experiment 20000180 PARAMETER Experiment Name: At_Germinating_Seeds_P Parameter: Tissue Value: Germinating Seeds
  misc_feature: MA Experiment ID: 20000224 Result: Down-regulated in Transcription
  misc_feature: MA Experiment ID: 20000264 Result: Down-regulated in Transcription
  misc_feature: MA Experiment 20000264 PARAMETER Experiment Name: At_Open_Flower_P Parameter: Age (day) Value: 21
  misc_feature: MA Experiment 20000264 PARAMETER Experiment Name: At_Open_Flower_P Parameter: Plant Line Value: WS
  misc_feature: MA Experiment 20000264 PARAMETER Experiment Name: At_Open_Flower_P Parameter: Tissue Value: Open Flower vs. Whole Plant
  misc_feature: MA Experiment ID: 20000451 Result: Up-regulated in Transcription
  misc_feature: MA Experiment 20000451 PARAMETER Experiment Name: At_CS6879_Shoots-Roots_P Parameter: Age (day) Value: 14
  misc_feature: MA Experiment 20000451 PARAMETER Experiment Name: At_CS6879_Shoots-Roots_P Parameter: Organism Value: A. thaliana
  misc_feature: MA Experiment 20000451 PARAMETER Experiment Name: At_CS6879_Shoots-Roots_P Parameter: Plant Line Value: CS6879 vs. WS
  misc_feature: MA Experiment 20000451 PARAMETER Experiment Name: At_CS6879_Shoots-Roots_P Parameter: Tissue Value: Roots
  misc_feature: MA Experiment ID: 20000794 Result: Down-regulated in Transcription
  misc_feature: MA Experiment 20000794 PARAMETER Experiment Name: At_Petals_P Parameter: Age (day) Value: 23-25 days
  misc_feature: MA Experiment 20000794 PARAMETER Experiment Name: At_Petals_P Parameter: Plant Line Value: WS
  misc_feature: MA Experiment 20000794 PARAMETER Experiment Name: At_Petals_P Parameter: Tissue Value: Petals vs. Whole plant
tgaaagaaaatatccagttgactccaaatagactagaaagagaaagaaagagagagagagagagagagagaaccagagattatcgaacacgaagcagaagacgattcgtggaagagacttggagagaatatttctcaatgtctcctctcccaatcttccatcgtcttcctcacgccacgttctcttcctttctcctctcactgtctcaagctggaagttctaaaacatcagtggcattcctcaatgccttcaaatcagaagatatcattgctcgaattggactatggtggcagcttataagggctgttgtagttgtacctgtcttcaagttcctggtgcttctatgtttggtcatgtctgtcatgttcttcgttgaggttatgtacatgggaatcgttgttttgtatgtcaagctgttcaagagaaagccagagaaattttacaaatgggaagccatggaggatgatgttgagtgtggcagtgcaagctaccctatggttcttgtgcagatacctatgtacaatgaaaaagaggtttgtgagcaatctattgcagctgcttgcaaaatctcatggccatcgaatcgtataataattcaagtgcttgatgattccacggatccagccagtaaggagttggtgaaaaaggagtgtgacagatggtctaaagaaggtgtcaacataacgtttgagataagggacaacaggaacggatacaaagctggtgcgttgagagaaggaatgaggcatagctatgtgaagcagtgtgattatgttgctatctttgatgctgatttccagcctgatcctgacttcctccaccgcactgttccattcttaattcacaatcccaagttagcacttgtacaaggccggtgggagtttgtgaacgcgggtcaatgcatgatgacgagattacaggagatgtctctaagttaccactttacaatagagcagcaagttggatcttcaacatttgccttctttgggttcaacggaactgctggcgtctggagaatctcagcattgaatgagtccgggggatggaatgaccagacaacagtagaagacatggatttagctgtacgagctacactgagaggctggaagtttctatatatcgatgatctcaaggtaaaaagtgagttaccttgttccttcaaagctctgcgtagccagcagcatcgatggacttgcggccctgccaatcttttaaggaaaatggctggacaaataataagaagcgagaatgtatctctatggaagaagtggtatatgttgtacagcttcttcttcatgcgcaagatcgtggctcacatcctcacattctgcttctactgtgttatcttgccagcaactgtattgttcccagaagtcacagttccgaaatgggctgcattttatctcccttctttgatcactctcttaatcgcaattggtagactaagatcaatccaccttttggctttctgggttctatttgagaatgcaatgtccctgctaagagcaaaggctctggtcatgggcttgttcgaaacaggaagagtacaagaatgggttgtgacggagaagttaggtgatactctcaagacgaagctgattccacaagttcctaacgtcagattcagagagagggtgcatttgctggagctattggttggagcgtacctgttattctgcggaatctacgacatcgtctatgggaagaacacactctatgtgtaccttctgtttcagtcagtggccttcttcgttgttggttttggatttgtaggaaaatatgttcctgcttcctcttacttagcataggatagatcatagagtctcaatatgtttcagaaggttttttgtttgatgtcatattgagaacaatgcctatatactactctccatttgtattaacacttgagtatctgtaaccaacgaagctcagatgtgatcgatattattttttttaacagtataaaaccacttaacactg

SEQ ID NO: 40205 - protein, 601 aa, Arabidopsis thaliana
  peptide (1)..(601): Ceres Seq. ID no. 13501413
  misc_feature (167)..(342): Pfam Name: Glycosyl transferase Pfam Description: Glycosyl transferase
  misc_feature (70)..(591): Homolog of NCBI NO: 28393622 NR Description: putative cellulose synthase [Arabidopsis thaliana]
  misc_feature (91)..(595): Homolog of NCBI NO: 16519223 NR Description: cellulose synthase-like protein OsCslA9 [Oryza
  misc_feature (62)..(591): Homolog of NCBI NO: 15221657 NR Description: glycosyltransferase family 2 [Arabidopsis
  misc_feature (118)..(595): Homolog of NCBI NO: 30688416 NR Description: glycosyltransferase family 2 [Arabidopsis
  misc_feature (87)..(596): Homolog of NCBI NO: 15242959 NR Description: glycosyltransferase family 2 [Arabidopsis
  misc_feature (46)..(595): Homolog of NCBI NO: 30688411 NR Description: glycosyltransferase family 2 [Arabidopsis
  misc_feature (86)..(595): Homolog of NCBI NO: 15237519 NR Description: glycosyltransferase family 2 [Arabidopsis
  misc_feature (118)..(601): Homolog of NCBI NO: 25408401 NR Description: probable glucosyltransferase [imported] -
  misc_feature (46)..(601): Homolog of NCBI NO: 21536839 NR Description: putative glucosyltransferase [Arabidopsis
  misc_feature (46)..(601): Homolog of NCBI NO: 18403914 NR Description: glycosyltransferase family 2 [Arabidopsis
KENIQLTPNRLERERKRERERERTRDYRTRSRRRFVEETWREYFSMSPLPIFHRLPHATFSSFLLSLSQAGSSKTSVAFLNAFKSEDIIARIGLWWQLIRAVVVVPVFKFLVLLCLVMSVMFFVEVMYMGIVVLYVKLFKRKPEKFYKWEAMEDDVECGSASYPMVLVQIPMYNEKEVCEQSIAAACKISWPSNRIIIQVLDDSTDPASKELVKKECDRWSKEGVNITFEIRDNRNGYKAGALREGMRHSYVKQCDYVAIFDADFQPDPDFLHRTVPFLIHNPKLALVQGRWEFVNAGQCMMTRLQEMSLSYHFTIEQQVGSSTFAFFGFNGTAGVWRISALNESGGWNDQTTVEDMDLAVRATLRGWKFLYIDDLKVKSELPCSFKALRSQQHRWTCGPANLLRKMAGQIIRSENVSLWKKWYMLYSFFFMRKIVAHILTFCFYCVILPATVLFPEVTVPKWAAFYLPSLITLLIAIGRLRSIHLLAFWVLFENAMSLLRAKALVMGLFETGRVQEWVVTEKLGDTLKTKLIPQVPNVRFRERVHLLELLVGAYLLFCGIYDIVYGKNTLYVYLLFQSVAFFVVGFGFVGKYVPASSYLA

SEQ ID NO: 40206 - protein, 556 aa, Arabidopsis thaliana
  peptide (1)..(556): Ceres Seq. ID no. 13501414
  misc_feature (122)..(297): Pfam Name: Glycosyl transferase Pfam Description: Glycosyl transferase
  misc_feature (25)..(546): Homolog of NCBI NO: 28393622 NR Description: putative cellulose synthase [Arabidopsis thaliana]
  misc_feature (46)..(550): Homolog of NCBI NO: 16519223 NR Description: cellulose synthase-like protein OsCslA9 [Oryza
  misc_feature (17)..(546): Homolog of NCBI NO: 15221657 NR Description: glycosyltransferase family 2 [Arabidopsis
  misc_feature (73)..(550): Homolog of NCBI NO: 30688416 NR Description: glycosyltransferase family 2 [Arabidopsis
  misc_feature (42)..(551): Homolog of NCBI NO: 15242959 NR Description: glycosyltransferase family 2 [Arabidopsis
  misc_feature (1)..(550): Homolog of NCBI NO: 30688411 NR Description: glycosyltransferase family 2 [Arabidopsis
  misc_feature (41)..(550): Homolog of NCBI NO: 15237519 NR Description: glycosyltransferase family 2 [Arabidopsis
  misc_feature (73)..(556): Homolog of NCBI NO: 25408401 NR Description: probable glucosyltransferase [imported] -
  misc_feature (1)..(556): Homolog of NCBI NO: 21536839 NR Description: putative glucosyltransferase [Arabidopsis
  misc_feature (1)..(556): Homolog of NCBI NO: 18403914 NR Description: glycosyltransferase family 2 [Arabidopsis
MSPLPIFHRLPHATFSSFLLSLSQAGSSKTSVAFLNAFKSEDIIARIGLWWQLIRAVVVVPVFKFLVLLCLVMSVMFFVEVMYMGIVVLYVKLFKRKPEKFYKWEAMEDDVECGSASYPMVLVQIPMYNEKEVCEQSIAAACKISWPSNRIIIQVLDDSTDPASKELVKKECDRWSKEGVNITFEIRDNRNGYKAGALREGMRHSYVKQCDYVAIFDADFQPDPDFLHRTVPFLIHNPKLALVQGRWEFVNAGQCMMTRLQEMSLSYHFTIEQQVGSSTFAFFGFNGTAGVWRISALNESGGWNDQTTVEDMDLAVRATLRGWKFLYIDDLKVKSELPCSFKALRSQQHRWTCGPANLLRKMAGQIIRSENVSLWKKWYMLYSFFFMRKIVAHILTFCFYCVILPATVLFPEVTVPKWAAFYLPSLITLLIAIGRLRSIHLLAFWVLFENAMSLLRAKALVMGLFETGRVQEWVVTEKLGDTLKTKLIPQVPNVRFRERVHLLELLVGAYLLFCGIYDIVYGKNTLYVYLLFQSVAFFVVGFGFVGKYVPASSYLA

SEQ ID NO: 40207 - protein, 484 aa, Arabidopsis thaliana
  peptide (1)..(484): Ceres Seq. ID no. 13501415
  misc_feature (50)..(225): Pfam Name: Glycosyl transferase Pfam Description: Glycosyl transferase
  misc_feature (1)..(474): Homolog of NCBI NO: 28393622 NR Description: putative cellulose synthase [Arabidopsis thaliana]
  misc_feature (1)..(478): Homolog of NCBI NO: 16519223 NR Description: cellulose synthase-like protein OsCslA9 [Oryza
  misc_feature (1)..(474): Homolog of NCBI NO: 15221657 NR Description: glycosyltransferase family 2 [Arabidopsis
  misc_feature (1)..(478): Homolog of NCBI NO: 30688416 NR Description: glycosyltransferase family 2 [Arabidopsis
  misc_feature (1)..(479): Homolog of NCBI NO: 15242959 NR Description: glycosyltransferase family 2 [Arabidopsis
  misc_feature (1)..(478): Homolog of NCBI NO: 30688411 NR Description: glycosyltransferase family 2 [Arabidopsis
  misc_feature (1)..(478): Homolog of NCBI NO: 15237519 NR Description: glycosyltransferase family 2 [Arabidopsis
  misc_feature (1)..(484): Homolog of NCBI NO: 25408401 NR Description: probable glucosyltransferase [imported] -
  misc_feature (1)..(484): Homolog of NCBI NO: 21536839 NR Description: putative glucosyltransferase [Arabidopsis
  misc_feature (1)..(484): Homolog of NCBI NO: 18403914 NR Description: glycosyltransferase family 2 [Arabidopsis
MSVMFFVEVMYMGIVVLYVKLFKRKPEKFYKWEAMEDDVECGSASYPMVLVQIPMYNEKEVCEQSIAAACKISWPSNRIIIQVLDDSTDPASKELVKKECDRWSKEGVNITFEIRDNRNGYKAGALREGMRHSYVKQCDYVAIFDADFQPDPDFLHRTVPFLIHNPKLALVQGRWEFVNAGQCMMTRLQEMSLSYHFTIEQQVGSSTFAFFGFNGTAGVWRISALNESGGWNDQTTVEDMDLAVRATLRGWKFLYIDDLKVKSELPCSFKALRSQQHRWTCGPANLLRKMAGQIIRSENVSLWKKWYMLYSFFFMRKIVAHILTFCFYCVILPATVLFPEVTVPKWAAFYLPSLITLLIAIGRLRSIHLLAFWVLFENAMSLLRAKALVMGLFETGRVQEWVVTEKLGDTLKTKLIPQVPNVRFRERVHLLELLVGAYLLFCGIYDIVYGKNTLYVYLLFQSVAFFVVGFGFVGKYVPASSYLA

SEQ ID NO: 40208 - DNA, 1420 bp, Arabidopsis thaliana
  misc_feature (1)..(1420): Ceres Seq. ID no. 12395338
  misc_feature: MA Experiment ID: 108435 Result: Up-regulated in Transcription
  misc_feature: MA Experiment 108435 PARAMETER Experiment Name: At_stm_Mutants_cDNA_P Parameter: Plant Line Value: wt Landsburg vs stm
  misc_feature: MA Experiment 108435 PARAMETER Experiment Name: At_stm_Mutants_cDNA_P Parameter: Tissue Value: Shoot Apical Meristem Region
  misc_feature: MA Experiment ID: 108462 Result: Up-regulated in Transcription
  misc_feature: MA Experiment 108462 PARAMETER Experiment Name: At_Germinating_Seeds_cDNA_P Parameter: Age (day) Value: 2 vs. 0
  misc_feature: MA Experiment 108462 PARAMETER Experiment Name: At_Germinating_Seeds_cDNA_P Parameter: Tissue Value: Germinating Seeds
  misc_feature: MA Experiment ID: 108463 Result: Up-regulated in Transcription
  misc_feature: MA Experiment 108463 PARAMETER Experiment Name: At_Germinating_Seeds_cDNA_P Parameter: Age (day) Value: 3 vs. 0
  misc_feature: MA Experiment 108463 PARAMETER Experiment Name: At_Germinating_Seeds_cDNA_P Parameter: Tissue Value: Germinating Seeds
  misc_feature: MA Experiment ID: 108464 Result: Up-regulated in Transcription
  misc_feature: MA Experiment 108464 PARAMETER Experiment Name: At_Germinating_Seeds_cDNA_P Parameter: Age (day) Value: 4 vs. 0
  misc_feature: MA Experiment 108464 PARAMETER Experiment Name: At_Germinating_Seeds_cDNA_P Parameter: Tissue Value: Germinating Seeds
  misc_feature: MA Experiment ID: 108573 Result: Up-regulated in Transcription
  misc_feature: MA Experiment 108573 PARAMETER Experiment Name: At_Drought_cDNA_P Parameter: Timepoint (hr) Value: 6
  misc_feature: MA Experiment 108573 PARAMETER Experiment Name: At_Drought_cDNA_P Parameter: Tissue Value: Aerial
  misc_feature: MA Experiment 108573 PARAMETER Experiment Name: At_Drought_cDNA_P Parameter: Treatment Value: Drought vs. No Drought
  misc_feature: MA Experiment ID: 108667 Result: Up-regulated in Transcription
  misc_feature: MA Experiment 108667 PARAMETER Experiment Name: At_2mM_SA_cDNA_P Parameter: Plant Line Value: WS
  misc_feature: MA Experiment 108667 PARAMETER Experiment Name: At_2mM_SA_cDNA_P Parameter: Timepoint (hr) Value: 1
  misc_feature: MA Experiment 108667 PARAMETER Experiment Name: At_2mM_SA_cDNA_P Parameter: Treatment Value: 2mM SA vs. No Treatment
  misc_feature: MA Experiment ID: 20000113 Result: Down-regulated in Transcription
  misc_feature: MA Experiment 20000113 PARAMETER Experiment Name: At_42deg_Heat_cDNA_P Parameter: Temperature (deg C) Value: 42 vs. 22
  misc_feature: MA Experiment 20000113 PARAMETER Experiment Name: At_42deg_Heat_cDNA_P Parameter: Timepoint (hr) Value: 8
  misc_feature: MA Experiment 20000113 PARAMETER Experiment Name: At_42deg_Heat_cDNA_P Parameter: Tissue Value: Aerial
  misc_feature: MA Experiment ID: 20000184 Result: Down-regulated in Transcription
  misc_feature: MA Experiment 20000184 PARAMETER Experiment Name: At_Shoots__P Parameter: Age (day) Value: 7
  misc_feature: MA Experiment 20000184 PARAMETER Experiment Name: At_Shoots__P Parameter: Tissue Value: Shoots vs. Whole Plant
  misc_feature: MA Experiment ID: 20000185 Result: Down-regulated in Transcription
  misc_feature: MA Experiment 20000185 PARAMETER Experiment Name: At_Roots__P Parameter: Age (day) Value: 7 vs. 21
  misc_feature: MA Experiment 20000185 PARAMETER Experiment Name: At_Roots__P Parameter: Organism Value: A. thaliana
  misc_feature: MA Experiment 20000185 PARAMETER Experiment Name: At_Roots__P Parameter: Tissue Value: Roots vs. Whole Plant
  misc_feature: MA Experiment ID: 20000234 Result: Down-regulated in Transcription
  misc_feature: MA Experiment 20000234 PARAMETER Experiment Name: At_Siliques_P Parameter: Age (day) Value: 21
  misc_feature: MA Experiment 20000234 PARAMETER Experiment Name: At_Siliques_P Parameter: Organism Value: A. thaliana
  misc_feature: MA Experiment 20000234 PARAMETER Experiment Name: At_Siliques_P Parameter: Plant Line Value: WS
  misc_feature: MA Experiment 20000234 PARAMETER Experiment Name: At_Siliques_P Parameter: Tissue Value: Less Than 5mm Siliques vs. Whole Plant
  misc_feature: MA Experiment ID: 20000235 Result: Down-regulated in Transcription
  misc_feature: MA Experiment 20000235 PARAMETER Experiment Name: At_Siliques_P Parameter: Age (day) Value: 21
  misc_feature: MA Experiment 20000235 PARAMETER Experiment Name: At_Siliques_P Parameter: Organism Value: A. thaliana
  misc_feature: MA Experiment 20000235 PARAMETER Experiment Name: At_Siliques_P Parameter: Plant Line Value: WS
  misc_feature: MA Experiment 20000235 PARAMETER Experiment Name: At_Siliques_P Parameter: Tissue Value: 5-10mm Siliques vs. Whole Plant
  misc_feature: MA Experiment ID: 20000264 Result: Down-regulated in Transcription
  misc_feature: MA Experiment 20000264 PARAMETER Experiment Name: At_Open_Flower_P Parameter: Age (day) Value: 21
  misc_feature: MA Experiment 20000264 PARAMETER Experiment Name: At_Open_Flower_P Parameter: Plant Line Value: WS
  misc_feature: MA Experiment 20000264 PARAMETER Experiment Name: At_Open_Flower_P Parameter: Tissue Value: Open Flower vs. Whole Plant
  misc_feature: MA Experiment ID: 20000265 Result: Down-regulated in Transcription
  misc_feature: MA Experiment 20000265 PARAMETER Experiment Name: At_Open_Flower_P Parameter: Age (day) Value: 21
  misc_feature: MA Experiment 20000265 PARAMETER Experiment Name: At_Open_Flower_P Parameter: Plant Line Value: WS
  misc_feature: MA Experiment 20000265 PARAMETER Experiment Name: At_Open_Flower_P Parameter: Tissue Value: Closed Flower vs. Whole Plant
  misc_feature: MA Experiment ID: 20000286 Result: Down-regulated in Transcription
  misc_feature: MA Experiment 20000286 PARAMETER Experiment Name: At_Open_Flower_P Parameter: Age (day) Value: 21
  misc_feature: MA Experiment 20000286 PARAMETER Experiment Name: At_Open_Flower_P Parameter: Plant Line Value: WS
  misc_feature: MA Experiment 20000286 PARAMETER Experiment Name: At_Open_Flower_P Parameter: Tissue Value: Half Open vs. Whole Plant
  misc_feature: MA Experiment ID: 20000438 Result: Down-regulated in Transcription
  misc_feature: MA Experiment 20000438 PARAMETER Experiment Name: At_Shoots__P Parameter: Age (day) Value: 14
  misc_feature: MA Experiment 20000438 PARAMETER Experiment Name: At_Shoots__P Parameter: Tissue Value: Shoots vs. Whole Plant
  misc_feature: MA Experiment ID: 20000439 Result: Down-regulated in Transcription
  misc_feature: MA Experiment 20000439 PARAMETER Experiment Name: At_Roots__P Parameter: Age (day) Value: 14 vs. 21
  misc_feature: MA Experiment 20000439 PARAMETER Experiment Name: At_Roots__P Parameter: Organism Value: A. thaliana
  misc_feature: MA Experiment 20000439 PARAMETER Experiment Name: At_Roots__P Parameter: Tissue Value: Roots vs. Whole Plant
  misc_feature: MA Experiment ID: 20000573 Result: Down-regulated in Transcription
  misc_feature: MA Experiment 20000573 PARAMETER Experiment Name: At_100uM_ABA_Mutants__P Parameter: Organism Value: A. thaliana
  misc_feature: MA Experiment 20000573 PARAMETER Experiment Name: At_100uM_ABA_Mutants__P Parameter: Plant Line Value: CS22 vs. Ler wt
  misc_feature: MA Experiment 20000573 PARAMETER Experiment Name: At_100uM_ABA_Mutants__P Parameter: Timepoint (hr) Value: N/A
  misc_feature: MA Experiment 20000573 PARAMETER Experiment Name: At_100uM_ABA_Mutants__P Parameter: Tissue Value: Whole Plant
  misc_feature: MA Experiment 20000573 PARAMETER Experiment Name: At_100uM_ABA_Mutants__P Parameter: Treatment Value: None
  misc_feature: MA Experiment ID: 20000574 Result: Down-regulated in Transcription
  misc_feature: MA Experiment 20000574 PARAMETER Experiment Name: At_100uM_ABA_Mutants__P Parameter: Organism Value: A. thaliana
  misc_feature: MA Experiment 20000574 PARAMETER Experiment Name: At_100uM_ABA_Mutants__P Parameter: Plant Line Value: CS23 vs. Ler wt
  misc_feature: MA Experiment 20000574 PARAMETER Experiment Name: At_100uM_ABA_Mutants__P Parameter: Timepoint (hr) Value: N/A
  misc_feature: MA Experiment 20000574 PARAMETER Experiment Name: At_100uM_ABA_Mutants__P Parameter: Tissue Value: Whole Plant
  misc_feature: MA Experiment 20000574 PARAMETER Experiment Name: At_100uM_ABA_Mutants__P Parameter: Treatment Value: None
  misc_feature: MA Experiment ID: 20001247 Result: Up-regulated in Transcription
  misc_feature: MA Experiment 20001247 PARAMETER Experiment Name: At_Far-red-induction_P Parameter: Age (day) Value: 7
  misc_feature: MA Experiment 20001247 PARAMETER Experiment Name: At_Far-red-induction_P Parameter: Light Value: Far-red vs. White
  misc_feature: MA Experiment 20001247 PARAMETER Experiment Name: At_Far-red-induction_P Parameter: Organism Value: A. thaliana
  misc_feature: MA Experiment 20001247 PARAMETER Experiment Name: At_Far-red-induction_P Parameter: Plant Line Value: Columbia
  misc_feature: MA Experiment 20001247 PARAMETER Experiment Name: At_Far-red-induction_P Parameter: Timepoint (hr) Value: 1
  misc_feature: MA Experiment 20001247 PARAMETER Experiment Name: At_Far-red-induction_P Parameter: Tissue Value: Whole Plant
  misc_feature: MA Experiment ID: 20001248 Result: Up-regulated in Transcription
  misc_feature: MA Experiment 20001248 PARAMETER Experiment Name: At_Far-red-induction_P Parameter: Age (day) Value: 7
  misc_feature: MA Experiment 20001248 PARAMETER Experiment Name: At_Far-red-induction_P Parameter: Light Value: Far-red vs. White
  misc_feature: MA Experiment 20001248 PARAMETER Experiment Name: At_Far-red-induction_P Parameter: Organism Value: A. thaliana
  misc_feature: MA Experiment 20001248 PARAMETER Experiment Name: At_Far-red-induction_P Parameter: Plant Line Value: Columbia
  misc_feature: MA Experiment 20001248 PARAMETER Experiment Name: At_Far-red-induction_P Parameter: Timepoint (hr) Value: 4
  misc_feature: MA Experiment 20001248 PARAMETER Experiment Name: At_Far-red-induction_P Parameter: Tissue Value: Whole Plant
gctaaactccatcatcttctctttcttttttttcacttgtcccatttttttatattttcatctttctcttttggagtttcttcttctactgactctactggtaggtgtatggatttgtgagagaagaaaaaaaagcacaatctttgaatggactggaatttcaaacttagctctggttatttatctggattcgatcaagaaccagatttatcaccaatggatggttcgatctcgtttggtgggtcgtcacagtcaaaagcggatttttcatttgatctaaaacttggaagaaacattggaaactcttcctctgtttttggtgatacagagcaagtgattagtcttagtaagtggaaagatagtgctttagctaaaccagaaggttcaagaagctcgagttcaaagagaacaagagggaatggtgttggaaccaaccagatgccgatttgtcttgttgatggatgtgattctgattttagtaattgtagagagtatcataagagacataaagtttgtgatgttcattcaaaaactcctgtggttactattaatggtcataaacagaggttttgtcaacaatgcagcaggtttcatgctttggaggagtttgatgaagggaagagaagttgtaggaaacgtcttgatggacataatcgaagacgacggaagccgcagcctgaacatatcggtcgtcctgccaacttctttacgggttttcaaggtagcaaattgctagagttttctggtggttcacatgtgtttccaactacatctgtgttgaacccgagctggggaaatagtcttgtaagcgttgctgtagccgccaatggttcgagttatgggcagagccagagctatgttgttggttcttctcctgcaaagacagggataatgtttccaatctcttcttctccaaacagtaccagaagcatagcaaaacaattccctttcttgcaagaagaagaaagctcgagaaccgcatcgttgtgtgagagaatgacgagttgcatccatgactctgattgtgctctctctcttctgtcatcctcctcgtcgtcagtccctcatttgcttcaaccaccactttctttgtcccaagaagcagttgagacagttttttacgggtcgggattgtttgagaatgcctgtgcagtctctgatggatcggttatatccggtaacgaggctgtccgtcttccgcagacattcccgtttcattgggagtagtagaagaagaagtaggtagatagatagaatcagaaagatctatttgtgtctcttctcttctccctcatttttcaatgttctttatcatcatcattgttcttgttaacactacaagaaatatggacattcttaacacaccgaaaacgctataataacgtttacatagcggattcataaacgctgtgtttgccgc

SEQ ID NO: 40209 - protein, 359 aa, Arabidopsis thaliana
  peptide (1)..(359): Ceres Seq. ID no. 12395339
  misc_feature (100)..(178): Pfam Name: SBP domain Pfam Description: SBP domain
  misc_feature (34)..(311): Homolog of NCBI NO: 18396302 NR Description: putative squamosa-promoter binding protein 2
  misc_feature (79)..(177): Homolog of NCBI NO: 15227896 NR Description: putative squamosa-promoter binding protein
  misc_feature (79)..(177): Homolog of NCBI NO: 30688933 NR Description: squamosa-promoter binding protein -related
  misc_feature (79)..(177): Homolog of NCBI NO: 25352586 NR Description: squamosa promoter binding protein homolog 9
  misc_feature (79)..(177): Homolog of NCBI NO: 15028115 NR Description: putative squamosa-promoter binding protein
  misc_feature (85)..(312): Homolog of NCBI NO: 30697804 NR Description: squamosa-promoter binding protein -related
  misc_feature (85)..(312): Homolog of NCBI NO: 13877707 NR Description: similar to squamosa-promoter binding protein 1
  misc_feature (190)..(359): Homolog of NCBI NO: 20260414 NR Description: unknown protein [Arabidopsis thaliana]
  misc_feature (24)..(359): Homolog of NCBI NO: 21536841 NR Description: unknown [Arabidopsis thaliana]
  misc_feature (1)..(359): Homolog of NCBI NO: 18423163 NR Description: putative protein
MDWNFKLSSGYLSGFDQEPDLSPMDGSISFGGSSQSKADFSFDLKLGRNIGNSSSVFGDTEQVISLSKWKDSALAKPEGSRSSSSKRTRGNGVGTNQMPICLVDGCDSDFSNCREYHKRHKVCDVHSKTPVVTINGHKQRFCQQCSRFHALEEFDEGKRSCRKRLDGHNRRRRKPQPEHIGRPANFFTGFQGSKLLEFSGGSHVFPTTSVLNPSWGNSLVSVAVAANGSSYGQSQSYVVGSSPAKTGIMFPISSSPNSTRSIAKQFPFLQEEESSRTASLCERMTSCIHDSDCALSLLSSSSSSVPHLLQPPLSLSQEAVETVFYGSGLFENACAVSDGSVISGNEAVRLPQTFPFHWE

SEQ ID NO: 40210 - protein, 336 aa, Arabidopsis thaliana
  peptide (1)..(336): Ceres Seq. ID no. 12395340
  misc_feature (77)..(155): Pfam Name: SBP domain Pfam Description: SBP domain
  misc_feature (11)..(288): Homolog of NCBI NO: 18396302 NR Description: putative squamosa-promoter binding protein 2
  misc_feature (56)..(154): Homolog of NCBI NO: 25352586 NR Description: squamosa promoter binding protein homolog 9
  misc_feature (56)..(154): Homolog of NCBI NO: 30688933 NR Description: squamosa-promoter binding protein -related
  misc_feature (56)..(154): Homolog of NCBI NO: 15227896 NR Description: putative squamosa-promoter binding protein
  misc_feature (56)..(154): Homolog of NCBI NO: 15028115 NR Description: putative squamosa-promoter binding protein
  misc_feature (62)..(289): Homolog of NCBI NO: 30697804 NR Description: squamosa-promoter binding protein -related
  misc_feature (62)..(289): Homolog of NCBI NO: 13877707 NR Description: similar to squamosa-promoter binding protein 1
  misc_feature (167)..(336): Homolog of NCBI NO: 20260414 NR Description: unknown protein [Arabidopsis thaliana]
  misc_feature (1)..(336): Homolog of NCBI NO: 21536841 NR Description: unknown [Arabidopsis thaliana]
  misc_feature (1)..(336): Homolog of NCBI NO: 18423163 NR Description: putative protein
MDGSISFGGSSQSKADFSFDLKLGRNIGNSSSVFGDTEQVISLSKWKDSALAKPEGSRSSSSKRTRGNGVGTNQMPICLVDGCDSDFSNCREYHKRHKVCDVHSKTPVVTINGHKQRFCQQCSRFHALEEFDEGKRSCRKRLDGHNRRRRKPQPEHIGRPANFFTGFQGSKLLEFSGGSHVFPTTSVLNPSWGNSLVSVAVAANGSSYGQSQSYVVGSSPAKTGIMFPISSSPNSTRSIAKQFPFLQEEESSRTASLCERMTSCIHDSDCALSLLSSSSSSVPHLLQPPLSLSQEAVETVFYGSGLFENACAVSDGSVISGNEAVRLPQTFPFHWE

SEQ ID NO: 40211 - protein, 262 aa, Arabidopsis thaliana
  peptide (1)..(262): Ceres Seq. ID no. 12395341
  misc_feature (3)..(81): Pfam Name: SBP domain Pfam Description: SBP domain
  misc_feature (1)..(214): Homolog of NCBI NO: 18396302 NR Description: putative squamosa-promoter binding protein 2
  misc_feature (1)..(80): Homolog of NCBI NO: 15227896 NR Description: putative squamosa-promoter binding protein
  misc_feature (1)..(80): Homolog of NCBI NO: 25352586 NR Description: squamosa promoter binding protein homolog 9
  misc_feature (1)..(80): Homolog of NCBI NO: 30688933 NR Description: squamosa-promoter binding protein -related
  misc_feature (1)..(80): Homolog of NCBI NO: 15028115 NR Description: putative squamosa-promoter binding protein
  misc_feature (1)..(215): Homolog of NCBI NO: 30697804 NR Description: squamosa-promoter binding protein -related
  misc_feature (1)..(215): Homolog of NCBI NO: 13877707 NR Description: similar to squamosa-promoter binding protein 1
  misc_feature (93)..(262): Homolog of NCBI NO: 20260414 NR Description: unknown protein [Arabidopsis thaliana]
  misc_feature (1)..(262): Homolog of NCBI NO: 21536841 NR Description: unknown [Arabidopsis thaliana]
  misc_feature (1)..(262): Homolog of NCBI NO: 18423163 NR Description: putative protein
MPICLVDGCDSDFSNCREYHKRHKVCDVHSKTPVVTINGHKQRFCQQCSRFHALEEFDEGKRSCRKRLDGHNRRRRKPQPEHIGRPANFFTGFQGSKLLEFSGGSHVFPTTSVLNPSWGNSLVSVAVAANGSSYGQSQSYVVGSSPAKTGIMFPISSSPNSTRSIAKQFPFLQEEESSRTASLCERMTSCIHDSDCALSLLSSSSSSVPHLLQPPLSLSQEAVETVFYGSGLFENACAVSDGSVISGNEAVRLPQTFPFHWE

SEQ ID NO: 40212 - DNA, 1590 bp, Arabidopsis thaliana
  misc_feature (1)..(1590): Ceres Seq. ID no. 12327937
  misc_feature: MA Experiment ID: 108569 Result: Up-regulated in Transcription
  misc_feature: MA Experiment 108569 PARAMETER Experiment Name: At_0.001%_MeJA__cDNA_P Parameter: Timepoint (hr) Value: 6
  misc_feature: MA Experiment 108569 PARAMETER Experiment Name: At_0.001%_MeJA__cDNA_P Parameter: Tissue Value: Aerial
  misc_feature: MA Experiment 108569 PARAMETER Experiment Name: At_0.001%_MeJA__cDNA_P Parameter: Treatment Value: 0.001% MeJA vs. No Treatment
  misc_feature: MA Experiment ID: 20000224 Result: Down-regulated in Transcription
ataacctatcaattagataccatttagattagcagcgaatttcaaacggagatgtcagaatcagtgattcagggatcgaatccggatcgggttttatctccgacgagctcgaaatcagtgacgcagacggtgaacgggtcgcatcaattcgtgattcaaggatacagcttagcgaaagggatgggtatagggaagcacatagcgagtgataatttctccgtcggaggttatcagtgggggatcttcttctacccggacggtaagaatccggaggataattcgtcgtacgtctctgtttttatcgcattggccagtgaaggaaccgaagttagggcgcttttcgagctagctcttgttgaccaaagtggaaaggggaaacataaggttcatagccattttgagcggtcactcgatggtggcccttatacactcaaatacagaggaagcatgtggggatacaagcgtttcttcagacgttccattcttgagacatctgactacctgaaagacgattgcttgataatcaattgtacggttggagttgtggtttcagaaatactctgcccacagttacactctgttcacgtccctgattcagaacttggatcacattttggagttctactggatagcatggaaggttctgatataacttttaacattgctggcgagaagtttctagctcataaactagtactggctgctcgatctccatttttcaagtctaagtttttcagtgagtttgaagcaaacaatacagaggttactattaacgatttggaacctaaggtttttaaggctttgctacaattcatgtacaaagattctcttccggaagatgtggagcctgcaacagctcatacatttgagcgcttaaagctgtcagaaatatacgaaacattgattgtaaaagttttagcagcagccgacaagtacgacctgattaggctcaggttgttgtgtgaatcccacatctgcaaaggcgtatcagtcaaatccgtcgcgaagatcttagcgttggctgacagatataatgctaaggaactaaaaggcgtttgccttaagtttactgccgagaacctagcagctgtcctggagacagacgcttaccaacagatgaaggatgaatgtgtgaccctccagtccgagcttctgaaggcggtggctggtcacgaggaaggtagtaacagtactggagagcaaagtctcagagcgtgtgggcccaactttctgacggcgggggcgataccaccagccgacatgttagacaacgaaccacctagagcctcaaaatatgcatcatttcctcaggttaatagtagccatagagagggtaaatagctgtttttttctgtattcaaaaaaaaatatatgatcccaagtcctaactctatgataggtaaactctttcacttatcacttcagtaacagctttggattattcttcttttcgtgtttatgtattttaaatcccagaacatgtggttgtttcttttactctaaaacattttgatttttacggatccagaagtataccagtgtacatatcaaacagatgcatatttttccatcgagtgagttgattttatg

SEQ ID NO: 40213 - protein, 429 aa, Arabidopsis thaliana
  peptide (1)..(429): Ceres Seq. ID no. 12327938
  misc_feature (35)..(164): Pfam Name: MATH domain Pfam Description: MATH domain
  misc_feature (16)..(389): Homolog of NCBI NO: 23617108 NR Description: contains ESTs
  misc_feature (8)..(386): Homolog of NCBI NO: 28269444 NR Description: unknown protein [Oryza sativa (japonica
  misc_feature (12)..(386): Homolog of NCBI NO: 34900034 NR Description: OJ1641_C04.24 [Oryza sativa (japonica
  misc_feature (18)..(398): Homolog of NCBI NO: 21536509 NR Description: unknown [Arabidopsis thaliana]
  misc_feature (1)..(398): Homolog of NCBI NO: 30678912 NR Description: expressed protein [Arabidopsis thaliana]
  misc_feature (1)..(385): Homolog of NCBI NO: 11282376 NR Description: hypothetical protein F23N14.80 - Arabidopsis
  misc_feature (1)..(385): Homolog of NCBI NO: 30691638 NR Description: expressed protein [Arabidopsis thaliana]
  misc_feature (1)..(382): Homolog of NCBI NO: 21536843 NR Description: unknown [Arabidopsis thaliana]
  misc_feature (1)..(382): Homolog of NCBI NO: 15242126 NR Description: hypothetical protein (fragment)
  misc_feature (1)..(429): Homolog of NCBI NO: 14596183 NR Description: Unknown protein [Arabidopsis thaliana]
MSESVIQGSNPDRVLSPTSSKSVTQTVNGSHQFVIQGYSLAKGMGIGKHIASDNFSVGGYQWGIFFYPDGKNPEDNSSYVSVFIALASEGTEVRALFELALVDQSGKGKHKVHSHFERSLDGGPYTLKYRGSMWGYKRFFRRSILETSDYLKDDCLIINCTVGVVVSEILCPQLHSVHVPDSELGSHFGVLLDSMEGSDITFNIAGEKFLAHKLVLAARSPFFKSKFFSEFEANNTEVTINDLEPKVFKALLQFMYKDSLPEDVEPATAHTFERLKLSEIYETLIVKVLAAADKYDLIRLRLLCESHICKGVSVKSVAKILALADRYNAKELKGVCLKFTAENLAAVLETDAYQQMKDECVTLQSELLKAVAGHEEGSNSTGEQSLRACGPNFLTAGAIPPADMLDNEPPRASKYASFPQVNSSHREGK

SEQ ID NO: 40214 - protein, 386 aa, Arabidopsis thaliana
  peptide (1)..(386): Ceres Seq. ID no. 12327939
  misc_feature (1)..(121): Pfam Name: MATH domain Pfam Description: MATH domain
  misc_feature (1)..(346): Homolog of NCBI NO: 23617108 NR Description: contains ESTs
  misc_feature (1)..(343): Homolog of NCBI NO: 28269444 NR Description: unknown protein [Oryza sativa (japonica
  misc_feature (1)..(343): Homolog of NCBI NO: 34900034 NR Description: OJ1641_C04.24 [Oryza sativa (japonica
  misc_feature (1)..(355): Homolog of NCBI NO: 21536509 NR Description: unknown [Arabidopsis thaliana]
  misc_feature (1)..(355): Homolog of NCBI NO: 30678912 NR Description: expressed protein [Arabidopsis thaliana]
  misc_feature (1)..(342): Homolog of NCBI NO: 11282376 NR Description: hypothetical protein F23N14.80 - Arabidopsis
  misc_feature (1)..(342): Homolog of NCBI NO: 30691638 NR Description: expressed protein [Arabidopsis thaliana]
  misc_feature (1)..(339): Homolog of NCBI NO: 21536843 NR Description: unknown [Arabidopsis thaliana]
  misc_feature (1)..(339): Homolog of NCBI NO: 15242126 NR Description: hypothetical protein (fragment)
  misc_feature (1)..(386): Homolog of NCBI NO: 14596183 NR Description: Unknown protein [Arabidopsis thaliana]
MGIGKHIASDNFSVGGYQWGIFFYPDGKNPEDNSSYVSVFIALASEGTEVRALFELALVDQSGKGKHKVHSHFERSLDGGPYTLKYRGSMWGYKRFFRRSILETSDYLKDDCLIINCTVGVVVSEILCPQLHSVHVPDSELGSHFGVLLDSMEGSDITFNIAGEKFLAHKLVLAARSPFFKSKFFSEFEANNTEVTINDLEPKVFKALLQFMYKDSLPEDVEPATAHTFERLKLSEIYETLIVKVLAAADKYDLIRLRLLCESHICKGVSVKSVAKILALADRYNAKELKGVCLKFTAENLAAVLETDAYQQMKDECVTLQSELLKAVAGHEEGSNSTGEQSLRACGPNFLTAGAIPPADMLDNEPPRASKYASFPQVNSSHREGK

SEQ ID NO: 40215 - protein, 297 aa, Arabidopsis thaliana
  peptide (1)..(297): Ceres Seq. ID no. 12327940
  misc_feature (56)..(180): Pfam Name: BTB/POZ domain Pfam Description: BTB/POZ domain
  misc_feature (1)..(257): Homolog of NCBI NO: 23617108 NR Description: contains ESTs
  misc_feature (1)..(254): Homolog of NCBI NO: 28269444 NR Description: unknown protein [Oryza sativa (japonica
  misc_feature (1)..(254): Homolog of NCBI NO: 34900034 NR Description: OJ1641_C04.24 [Oryza sativa (japonica
  misc_feature (1)..(266): Homolog of NCBI NO: 21536509 NR Description: unknown [Arabidopsis thaliana]
  misc_feature (1)..(266): Homolog of NCBI NO: 30678912 NR Description: expressed protein [Arabidopsis thaliana]
  misc_feature (1)..(253): Homolog of NCBI NO: 11282376 NR Description: hypothetical protein F23N14.80 - Arabidopsis
  misc_feature (1)..(253): Homolog of NCBI NO: 30691638 NR Description: expressed protein [Arabidopsis thaliana]
  misc_feature (1)..(250): Homolog of NCBI NO: 21536843 NR Description: unknown [Arabidopsis thaliana]
  misc_feature (1)..(250): Homolog of NCBI NO: 15242126 NR Description: hypothetical protein (fragment)
  misc_feature (1)..(297): Homolog of NCBI NO: 14596183 NR Description: Unknown protein [Arabidopsis thaliana]
MWGYKRFFRRSILETSDYLKDDCLIINCTVGVVVSEILCPQLHSVHVPDSELGSHFGVLLDSMEGSDITFNIAGEKFLAHKLVLAARSPFFKSKFFSEFEANNTEVTINDLEPKVFKALLQFMYKDSLPEDVEPATAHTFERLKLSEIYETLIVKVLAAADKYDLIRLRLLCESHICKGVSVKSVAKILALADRYNAKELKGVCLKFTAENLAAVLETDAYQQMKDECVTLQSELLKAVAGHEEGSNSTGEQSLRACGPNFLTAGAIPPADMLDNEPPRASKYASFPQVNSSHREGK

SEQ ID NO: 40216 - DNA, 1779 bp, Arabidopsis thaliana; identical to SEQ ID NO: 29030
  misc_feature (1)..(1779): Ceres Seq. ID no. 13600793
  misc_feature: MA Experiment ID: 20000179 Result: Up-regulated in Transcription
  misc_feature: MA Experiment 20000179 PARAMETER Experiment Name: At_Germinating_Seeds_P Parameter: Age (hr) Value: 6 vs. 0
  misc_feature: MA Experiment 20000179 PARAMETER Experiment Name: At_Germinating_Seeds_P Parameter: Tissue Value: Germinating Seeds
  misc_feature: MA Experiment ID: 20001451 Result: Down-regulated in Transcription
  misc_feature: MA Experiment 20001451 PARAMETER Experiment Name: At_Far-red-induction_P Parameter: Age (day) Value: 7
  misc_feature: MA Experiment 20001451 PARAMETER Experiment Name: At_Far-red-induction_P Parameter: Light Value: Far-red vs. White
  misc_feature: MA Experiment 20001451 PARAMETER Experiment Name: At_Far-red-induction_P Parameter: Organism Value: A. thaliana
  misc_feature: MA Experiment 20001451 PARAMETER Experiment Name: At_Far-red-induction_P Parameter: Plant Line Value: Columbia
  misc_feature: MA Experiment 20001451 PARAMETER Experiment Name: At_Far-red-induction_P Parameter: Timepoint (hr) Value: 24
  misc_feature: MA Experiment 20001451 PARAMETER Experiment Name: At_Far-red-induction_P Parameter: Tissue Value: Whole Plant

SEQ ID NO: 40217 - protein, 464 aa, Arabidopsis thaliana; identical to SEQ ID NO: 29031
  peptide (1)..(464): Ceres Seq. ID no. 15219006
  misc_feature (26)..(456): Pfam Name: Ribophorin I Pfam Description: Ribophorin I
  misc_feature (26)..(456): Pfam Name: Ribophorin I Pfam Description: Ribophorin I
  misc_feature (26)..(456): Pfam Name: Ribophorin I Pfam Description: Ribophorin I
  misc_feature (19)..(463): Homolog of NCBI NO: 31543605 NR Description: ribophorin I
  misc_feature (19)..(463): Homolog of NCBI NO: 16359229 NR Description: ribophorin I [Mus musculus]
  misc_feature (22)..(463): Homolog of NCBI NO: 9857227 NR Description: ribophorin I [Sus scrofa]
  misc_feature (19)..(463): Homolog of NCBI NO: 4506675 NR Description: ribophorin I [Homo sapiens]
  misc_feature (11)..(463): Homolog of NCBI NO: 28175644 NR Description: Similar to ribophorin I [Xenopus laevis]
  misc_feature (19)..(463): Homolog of NCBI NO: 31543605 NR Description: ribophorin I
  misc_feature (22)..(463): Homolog of NCBI NO: 9857227 NR Description: ribophorin I [Sus scrofa]
  misc_feature (11)..(463): Homolog of NCBI NO: 28175644 NR Description: Similar to ribophorin I [Xenopus laevis]
  misc_feature (19)..(463): Homolog of NCBI NO: 4506675 NR Description: ribophorin I [Homo sapiens]
  misc_feature (22)..(463): Homolog of NCBI NO: 9857227 NR Description: ribophorin I [Sus scrofa]
  misc_feature (19)..(463): Homolog of NCBI NO: 16359229 NR Description: ribophorin I [Mus musculus]
  misc_feature (19)..(463): Homolog of NCBI NO: 31543605 NR Description: ribophorin I
  misc_feature (1)..(464): Homolog of NCBI NO: 15226341 NR Description: ribophorin I -related [Arabidopsis thaliana]
  misc_feature (14)..(464): Homolog of NCBI NO: 7489438 NR Description: ribophorin I homolog - barley (fragment)
  misc_feature (5)..(464): Homolog of NCBI NO: 15223039 NR Description: ribophorin I
  misc_feature (4)..(463): Homolog of NCBI NO: 28277278 NR Description: Similar to ribophorin I [Xenopus laevis]
  misc_feature (1)..(463): Homolog of NCBI NO: 40674542 NR Description: Unknown (protein for MGC:76266) [Silurana
  misc_feature (1)..(464): Homolog of NCBI NO: 15226341 NR Description: ribophorin I -related [Arabidopsis thaliana]
  misc_feature (14)..(464): Homolog of NCBI NO: 7489438 NR Description: ribophorin I homolog - barley (fragment)
  misc_feature (5)..(464): Homolog of NCBI NO: 15223039 NR Description: ribophorin I
  misc_feature (4)..(463): Homolog of NCBI NO: 28277278 NR Description: Similar to ribophorin I [Xenopus laevis]
  misc_feature (1)..(463): Homolog of NCBI NO: 40674542 NR Description: Unknown (protein for MGC:76266) [Silurana
  misc_feature (11)..(463): Homolog of NCBI NO: 28175644 NR Description: Similar to ribophorin I [Xenopus laevis]
  misc_feature (19)..(463): Homolog of NCBI NO: 4506675 NR Description: ribophorin I [Homo sapiens]
  misc_feature (19)..(463): Homolog of NCBI NO: 16359229 NR Description: ribophorin I [Mus musculus]
  misc_feature (1)..(463): Homolog of NCBI NO: 40674542 NR Description: Unknown (protein for MGC:76266) [Silurana
  misc_feature (4)..(463): Homolog of NCBI NO: 28277278 NR Description: Similar to ribophorin I [Xenopus laevis]
  misc_feature (5)..(464): Homolog of NCBI NO: 15223039 NR Description: ribophorin I
  misc_feature (14)..(464): Homolog of NCBI NO: 7489438 NR Description: ribophorin I homolog - barley (fragment)
  misc_feature (1)..(464): Homolog of NCBI NO: 15226341 NR Description: ribophorin I -related [Arabidopsis thaliana]

SEQ ID NO: 40218 - protein, 403 aa, Arabidopsis thaliana; identical to SEQ ID NO: 29032
  peptide (1)..(403): Ceres Seq. ID no. 15219007
  misc_feature (1)..(395): Pfam Name: Ribophorin I Pfam Description: Ribophorin I
  misc_feature (1)..(395): Pfam Name: Ribophorin I Pfam Description: Ribophorin I
  misc_feature (1)..(395): Pfam Name: Ribophorin I Pfam Description: Ribophorin I
  misc_feature (1)..(402): Homolog of NCBI NO: 31543605 NR Description: ribophorin I
  misc_feature (1)..(402): Homolog of NCBI NO: 16359229 NR Description: ribophorin I [Mus musculus]
  misc_feature (1)..(402): Homolog of NCBI NO: 9857227 NR Description: ribophorin I [Sus scrofa]
  misc_feature (1)..(402): Homolog of NCBI NO: 4506675 NR Description: ribophorin I [Homo sapiens]
  misc_feature (1)..(402): Homolog of NCBI NO: 28175644 NR Description: Similar to ribophorin I [Xenopus laevis]
  misc_feature (1)..(402): Homolog of NCBI NO: 31543605 NR Description: ribophorin I
  misc_feature (1)..(402): Homolog of NCBI NO: 9857227 NR Description: ribophorin I [Sus scrofa]
  misc_feature (1)..(402): Homolog of NCBI NO: 28175644 NR Description: Similar to ribophorin I [Xenopus laevis]
  misc_feature (1)..(402): Homolog of NCBI NO: 4506675 NR Description: ribophorin I [Homo sapiens]
  misc_feature (1)..(402): Homolog of NCBI NO: 9857227 NR Description: ribophorin I [Sus scrofa]
  misc_feature (1)..(402): Homolog of NCBI NO: 16359229 NR Description: ribophorin I [Mus musculus]
  misc_feature (1)..(402): Homolog of NCBI NO: 31543605 NR Description: ribophorin I
  misc_feature (1)..(403): Homolog of NCBI NO: 15226341 NR Description: ribophorin I -related [Arabidopsis thaliana]
  misc_feature (1)..(403): Homolog of NCBI NO: 7489438 NR Description: ribophorin I homolog - barley (fragment)
  misc_feature (1)..(403): Homolog of NCBI NO: 15223039 NR Description: ribophorin I
  misc_feature (1)..(402): Homolog of NCBI NO: 28277278 NR Description: Similar to ribophorin I [Xenopus laevis]
  misc_feature (1)..(402): Homolog of NCBI NO: 40674542 NR Description: Unknown (protein for MGC:76266) [Silurana
  misc_feature (1)..(403): Homolog of NCBI NO: 15226341 NR Description: ribophorin I -related [Arabidopsis thaliana]
  misc_feature (1)..(403): Homolog of NCBI NO: 7489438 NR Description: ribophorin I homolog - barley (fragment)
  misc_feature (1)..(403): Homolog of NCBI NO: 15223039 NR Description: ribophorin I
  misc_feature (1)..(402): Homolog of NCBI NO: 28277278 NR Description: Similar to ribophorin I [Xenopus laevis]
  misc_feature (1)..(402): Homolog of NCBI NO: 40674542 NR Description: Unknown (protein for MGC:76266) [Silurana
  misc_feature (1)..(402): Homolog of NCBI NO: 28175644 NR Description: Similar to ribophorin I [Xenopus laevis]
  misc_feature (1)..(402): Homolog of NCBI NO: 4506675 NR Description: ribophorin I [Homo sapiens]
  misc_feature (1)..(402): Homolog of NCBI NO: 16359229 NR Description: ribophorin I [Mus musculus]
  misc_feature (1)..(402): Homolog of NCBI NO: 40674542 NR Description: Unknown (protein for MGC:76266) [Silurana
  misc_feature (1)..(402): Homolog of NCBI NO: 28277278 NR Description: Similar to ribophorin I [Xenopus laevis]
  misc_feature (1)..(403): Homolog of NCBI NO: 15223039 NR Description: ribophorin I
  misc_feature (1)..(403): Homolog of NCBI NO: 7489438 NR Description: ribophorin I homolog - barley (fragment)
  misc_feature (1)..(403): Homolog of NCBI NO: 15226341 NR Description: ribophorin I -related [Arabidopsis thaliana]

SEQ ID NO: 40219 - protein, 389 aa, Arabidopsis thaliana; identical to SEQ ID NO: 29033
  peptide (1)..(389): Ceres Seq. ID no. 15219008
  misc_feature (1)..(381): Pfam Name: Ribophorin I Pfam Description: Ribophorin I
  misc_feature (1)..(381): Pfam Name: Ribophorin I Pfam Description: Ribophorin I
  misc_feature (1)..(381): Pfam Name: Ribophorin I Pfam Description: Ribophorin I
  misc_feature (1)..(388): Homolog of NCBI NO: 31543605 NR Description: ribophorin I
  misc_feature (1)..(388): Homolog of NCBI NO: 16359229 NR Description: ribophorin I [Mus musculus]
  misc_feature (1)..(388): Homolog of NCBI NO: 9857227 NR Description: ribophorin I [Sus scrofa]
  misc_feature (1)..(388): Homolog of NCBI NO: 4506675 NR Description: ribophorin I [Homo sapiens]
  misc_feature (1)..(388): Homolog of NCBI NO: 28175644 NR Description: Similar to ribophorin I [Xenopus laevis]
  misc_feature (1)..(388): Homolog of NCBI NO: 31543605 NR Description: ribophorin I
  misc_feature (1)..(388): Homolog of NCBI NO: 9857227 NR Description: ribophorin I [Sus scrofa]
  misc_feature (1)..(388): Homolog of NCBI NO: 28175644 NR Description: Similar to ribophorin I [Xenopus laevis]
  misc_feature (1)..(388): Homolog of NCBI NO: 4506675 NR Description: ribophorin I [Homo sapiens]
  misc_feature (1)..(388): Homolog of NCBI NO: 9857227 NR Description: ribophorin I [Sus scrofa]
  misc_feature (1)..(388): Homolog of NCBI NO: 16359229 NR Description: ribophorin I [Mus musculus]
  misc_feature (1)..(388): Homolog of NCBI NO: 31543605 NR Description: ribophorin I
  misc_feature (1)..(389): Homolog of NCBI NO: 15226341 NR Description: ribophorin I -related [Arabidopsis thaliana]
  misc_feature (1)..(389): Homolog of NCBI NO: 7489438 NR Description: ribophorin I homolog - barley (fragment)
  misc_feature (1)..(389): Homolog of NCBI NO: 15223039 NR Description: ribophorin I
  misc_feature (1)..(388): Homolog of NCBI NO: 28277278 NR Description: Similar to ribophorin I [Xenopus laevis]
  misc_feature (1)..(388): Homolog of NCBI NO: 40674542 NR Description: Unknown (protein for MGC:76266) [Silurana
  misc_feature (1)..(389): Homolog of NCBI NO: 15226341 NR Description: ribophorin I -related [Arabidopsis thaliana]
  misc_feature (1)..(389): Homolog of NCBI NO: 7489438 NR Description: ribophorin I homolog - barley (fragment)
  misc_feature (1)..(389): Homolog of NCBI NO: 15223039 NR Description: ribophorin I
  misc_feature (1)..(388): Homolog of NCBI NO: 28277278 NR Description: Similar to ribophorin I [Xenopus laevis]
  misc_feature (1)..(388): Homolog of NCBI NO: 40674542 NR Description: Unknown (protein for MGC:76266) [Silurana
  misc_feature (1)..(388): Homolog of NCBI NO: 28175644 NR Description: Similar to ribophorin I [Xenopus laevis]
  misc_feature (1)..(388): Homolog of NCBI NO: 4506675 NR Description: ribophorin I [Homo sapiens]
  misc_feature (1)..(388): Homolog of NCBI NO: 16359229 NR Description: ribophorin I [Mus musculus]
  misc_feature (1)..(388): Homolog of NCBI NO: 40674542 NR Description: Unknown (protein for MGC:76266) [Silurana
  misc_feature (1)..(388): Homolog of NCBI NO: 28277278 NR Description: Similar to ribophorin I [Xenopus laevis]
  misc_feature (1)..(389): Homolog of NCBI NO: 15223039 NR Description: ribophorin I
  misc_feature (1)..(389): Homolog of NCBI NO: 7489438 NR Description: ribophorin I homolog - barley (fragment)
  misc_feature (1)..(389): Homolog of NCBI NO: 15226341 NR Description: ribophorin I -related [Arabidopsis thaliana]

SEQ ID NO: 40220 - DNA, 1627 bp, Arabidopsis thaliana
  misc_feature (1)..(1627): Ceres Seq. ID no. 13488633
  misc_feature: MA Experiment ID: 108573 Result: Up-regulated in Transcription
  misc_feature: MA Experiment 108573 PARAMETER Experiment Name: At_Drought_cDNA_P Parameter: Timepoint (hr) Value: 6
  misc_feature: MA Experiment 108573 PARAMETER Experiment Name: At_Drought_cDNA_P Parameter: Tissue Value: Aerial
  misc_feature: MA Experiment 108573 PARAMETER Experiment Name: At_Drought_cDNA_P Parameter: Treatment Value: Drought vs. No Drought
  misc_feature: MA Experiment ID: 108577 Result: Down-regulated in Transcription
  misc_feature: MA Experiment 108577 PARAMETER Experiment Name: At_42deg_Heat_cDNA_P Parameter: Temperature (deg C) Value: 42 vs. 22
  misc_feature: MA Experiment 108577 PARAMETER Experiment Name: At_42deg_Heat_cDNA_P Parameter: Timepoint (hr) Value: 6
  misc_feature: MA Experiment 108577 PARAMETER Experiment Name: At_42deg_Heat_cDNA_P Parameter: Tissue Value: Aerial
  misc_feature: MA Experiment ID: 20000113 Result: Down-regulated in Transcription
  misc_feature: MA Experiment 20000113 PARAMETER Experiment Name: At_42deg_Heat_cDNA_P Parameter: Temperature (deg C) Value: 42 vs. 22
  misc_feature: MA Experiment 20000113 PARAMETER Experiment Name: At_42deg_Heat_cDNA_P Parameter: Timepoint (hr) Value: 8
  misc_feature: MA Experiment 20000113 PARAMETER Experiment Name: At_42deg_Heat_cDNA_P Parameter: Tissue Value: Aerial
gtttctaactttttcttatgtaacccacccacatgcttgttcttctttctatcatcttcttacacgactacgacttgtctttctttacccttttttttttttgttttgtttaaagtttctctctttgtgggttcttgttgttagagaaatcagctgccccagatcagagcttggttttggatttaggattgtttgttaggttttacaatggactccccacaatctgttgtttcaccattcaagattggtgagtcagagaatgagaactcaaattctgtgcagagttctggaaaccaatcgaatggcataaattccaatgggaaagattctaaaagttgtggccggcaagaccttgttggtgctcttgaggtttatgtccatcaggcaagggatatccataacatttgtatatatcacaagcaagacgtttatgccaagctttgccttacaagtgatcctgataagtctgtctcgaccaaaatcatcaatggcggtgggaggaatccggtttttgatgacaatgttaagcttgatgtcagggttctggacacttccctcaaatgtgagatttacatgatgagcagggtgaagaattatcttgaggaccagctgcttggttttactctggttcctatgtcggaactgctcttcaagaatgggaaactcgagaaagagttctctctttcttccactgatctctaccattcgccagctggttttgttcaattgtcactctcctattatggatcctaccctgacgtgatggctattccctctatgccttcgtctgtttctattgatgaaactaccaaggatccagaagggtctgaatcagttccgggtgagttggataagatagagtttccagatcctaatgttgctaatgaaaatgagaagatggtttccgagtattttgggatctcttgttccactattgactcagaaacttctgacagcttggttacttccgatgctgagaatcatgtgactaattctgtcacttctatactgaagcaagattcacctgagagcagcaatgcaacaaatggagctgcttctcctcacgcttcagctcactccgccacagaaacaccaaaccatgaacatctctctgtcgtgaactccaaagcgagttcccaggagtcagagagcgaggcttctggtgagacatctgaggagaagactgtgaaatccgtcctcactgtgaaggttgagccagagtcaaaggtggtgcagcaggatatagccgacatgtacatgaaaagcatgcaacagtttacagattcactggctaagatgaagcttcctctggacattgacagcccaacaaaatcagaaaattcaagctctgattctcagaagctgccaacaccaaagagcaacaacggatcccgtgtgttctatgggagcaggcctttcttctgagcatctcttttaccaagttcagagaaagaacgcaggtcacccttagacttttctaatgaagaaagactaatcctaatgatgtaattttataatgtactatttcatgttgtatctcccatctggtcagcttgatgctttagttgatgtgagttattattacgtatcactagcctttactctattagaactatgtacgcattat

SEQ ID NO: 40221 - protein, 405 aa, Arabidopsis thaliana
  peptide (1)..(405): Ceres Seq. ID no. 13488634
  misc_feature (53)..(140): Pfam Name: C2 domain Pfam Description: C2 domain
  misc_feature (53)..(405): Homolog of NCBI NO: 34906644 NR Description: P0431G06.18 [Oryza sativa (japonica
  misc_feature (36)..(343): Homolog of NCBI NO: 34901084 NR Description: contains ESTs
  misc_feature (44)..(405): Homolog of NCBI NO: 18416832 NR Description: C2 domain-containing protein [Arabidopsis
  misc_feature (38)..(405): Homolog of NCBI NO: 24414275 NR Description: Unknown protein [Oryza sativa (japonica
  misc_feature (19)..(405): Homolog of NCBI NO: 21593485 NR Description: unknown [Arabidopsis thaliana]
  misc_feature (19)..(405): Homolog of NCBI NO: 25405379 NR Description: unknown protein [imported] - Arabidopsis thaliana
  misc_feature (19)..(405): Homolog of NCBI NO: 18403117 NR Description: C2 domain-containing protein [Arabidopsis
  misc_feature (1)..(405): Homolog of NCBI NO: 30696612 NR Description: C2 domain-containing protein [Arabidopsis
  misc_feature (1)..(405): Homolog of NCBI NO: 28393796 NR Description: unknown protein [Arabidopsis thaliana]
  misc_feature (1)..(405): Homolog of NCBI NO: 9758185 NR Description: gene_id:MTE17.25~pir||T07080~similar to unknown
MDSPQSVVSPFKIGESENENSNSVQSSGNQSNGINSNGKDSKSCGRQDLVGALEVYVHQARDIHNICIYHKQDVYAKLCLTSDPDKSVSTKIINGGGRNPVFDDNVKLDVRVLDTSLKCEIYMMSRVKNYLEDQLLGFTLVPMSELLFKNGKLEKEFSLSSTDLYHSPAGFVQLSLSYYGSYPDVMAIPSMPSSVSIDETTKDPEGSESVPGELDKIEFPDPNVANENEKMVSEYFGISCSTIDSETSDSLVTSDAENHVTNSVTSILKQDSPESSNATNGAASPHASAHSATETPNHEHLSVVNSKASSQESESEASGETSEEKTVKSVLTVKVEPESKVVQQDIADMYMKSMQQFTDSLAKMKLPLDIDSPTKSENSSSDSQKLPTPKSNNGSRVFYGSRPFF

SEQ ID NO: 40222 - protein, 283 aa, Arabidopsis thaliana
  peptide (1)..(283): Ceres Seq. ID no. 13488635
  misc_feature (1)..(283): Homolog of NCBI NO: 34906644 NR Description: P0431G06.18 [Oryza sativa (japonica
  misc_feature (1)..(221): Homolog of NCBI NO: 34901084 NR Description: contains ESTs
  misc_feature (1)..(283): Homolog of NCBI NO: 18416832 NR Description: C2 domain-containing protein [Arabidopsis
  misc_feature (1)..(283): Homolog of NCBI NO: 24414275 NR Description: Unknown protein [Oryza sativa (japonica
  misc_feature (1)..(283): Homolog of NCBI NO: 21593485 NR Description: unknown [Arabidopsis thaliana]
  misc_feature (1)..(283): Homolog of NCBI NO: 25405379 NR Description: unknown protein [imported] - Arabidopsis thaliana
  misc_feature (1)..(283): Homolog of NCBI NO: 18403117 NR Description: C2 domain-containing protein [Arabidopsis
  misc_feature (1)..(283): Homolog of NCBI NO: 30696612 NR Description: C2 domain-containing protein [Arabidopsis
  misc_feature (1)..(283): Homolog of NCBI NO: 28393796 NR Description: unknown protein [Arabidopsis thaliana]
  misc_feature (1)..(283): Homolog of NCBI NO: 9758185 NR Description: gene_id:MTE17.25~pir||T07080~similar to unknown
MMSRVKNYLEDQLLGFTLVPMSELLFKNGKLEKEFSLSSTDLYHSPAGFVQLSLSYYGSYPDVMAIPSMPSSVSIDETTKDPEGSESVPGELDKIEFPDPNVANENEKMVSEYFGISCSTIDSETSDSLVTSDAENHVTNSVTSILKQDSPESSNATNGAASPHASAHSATETPNHEHLSVVNSKASSQESESEASGETSEEKTVKSVLTVKVEPESKVVQQDIADMYMKSMQQFTDSLAKMKLPLDIDSPTKSENSSSDSQKLPTPKSNNGSRVFYGSRPFF

SEQ ID NO: 40223 - protein, 282 aa, Arabidopsis thaliana
  peptide (1)..(282): Ceres Seq. ID no. 13488636
  misc_feature (1)..(282): Homolog of NCBI NO: 34906644 NR Description: P0431G06.18 [Oryza sativa (japonica
  misc_feature (1)..(220): Homolog of NCBI NO: 34901084 NR Description: contains ESTs
  misc_feature (1)..(282): Homolog of NCBI NO: 18416832 NR Description: C2 domain-containing protein [Arabidopsis
  misc_feature (1)..(282): Homolog of NCBI NO: 24414275 NR Description: Unknown protein [Oryza sativa (japonica
  misc_feature (1)..(282): Homolog of NCBI NO: 21593485 NR Description: unknown [Arabidopsis thaliana]
  misc_feature (1)..(282): Homolog of NCBI NO: 25405379 NR Description: unknown protein [imported] - Arabidopsis thaliana
  misc_feature (1)..(282): Homolog of NCBI NO: 18403117 NR Description: C2 domain-containing protein [Arabidopsis
  misc_feature (1)..(282): Homolog of NCBI NO: 30696612 NR Description: C2 domain-containing protein [Arabidopsis
  misc_feature (1)..(282): Homolog of NCBI NO: 28393796 NR Description: unknown protein [Arabidopsis thaliana]
  misc_feature (1)..(282): Homolog of NCBI NO: 9758185 NR Description: gene_id:MTE17.25~pir||T07080~similar to unknown
MSRVKNYLEDQLLGFTLVPMSELLFKNGKLEKEFSLSSTDLYHSPAGFVQLSLSYYGSYPDVMAIPSMPSSVSIDETTKDPEGSESVPGELDKIEFPDPNVANENEKMVSEYFGISCSTIDSETSDSLVTSDAENHVTNSVTSILKQDSPESSNATNGAASPHASAHSATETPNHEHLSVVNSKASSQESESEASGETSEEKTVKSVLTVKVEPESKVVQQDIADMYMKSMQQFTDSLAKMKLPLDIDSPTKSENSSSDSQKLPTPKSNNGSRVFYGSRPFF

SEQ ID NO: 40224 - DNA, 2775 bp, Arabidopsis thaliana
  misc_feature (1)..(2775): Ceres Seq. ID no. 12344987
  misc_feature: MA Experiment ID: 20000227 Result: Up-regulated in Transcription
  misc_feature: MA Experiment 20000227 PARAMETER Experiment Name: At_Root-Tips-vs-Tops_P Parameter: Tissue Value: Root Tips vs. Root Tops
  misc_feature: MA Experiment ID: 20000286 Result: Up-regulated in Transcription
  misc_feature: MA Experiment 20000286 PARAMETER Experiment Name: At_Open_Flower_P Parameter: Age (day) Value: 21
  misc_feature: MA Experiment 20000286 PARAMETER Experiment Name: At_Open_Flower_P Parameter: Plant Line Value: WS
  misc_feature: MA Experiment 20000286 PARAMETER Experiment Name: At_Open_Flower_P Parameter: Tissue Value: Half Open vs. Whole Plant
  misc_feature: MA Experiment ID: 20000794 Result: Up-regulated in Transcription
  misc_feature: MA Experiment 20000794 PARAMETER Experiment Name: At_Petals_P Parameter: Age (day) Value: 23-25 days
  misc_feature: MA Experiment 20000794 PARAMETER Experiment Name: At_Petals_P Parameter: Plant Line Value: WS
  misc_feature: MA Experiment 20000794 PARAMETER Experiment Name: At_Petals_P Parameter: Tissue Value: Petals vs. Whole plant
gaggtctctttctctatctccctctgtttactcccacagctctaaaagcgttttcgaatcgtcacacctggagaaggaagctaatcactttctcattttggaactttgaggagagatctgaaagtttttttttttgttgttgttctggatcgttcctgttccactctcttcatcttccgatcatcgttattttcgaagctctctacaaacaaaatcgattttttttctggttaatctaaagaggtgaccgaaagaagaaaacttttacgttttgcatggagtaagaatgccagagttaagaagtggagcaaggagatcgagacgccttgacgagcagcctaaccctccgctagttgaacaagcagaaaatatcgtacttcctcctcagactgcaacaaggagaagaggtggtggtagaggaagggggaatgctgctttagctaaaggtgcggcacctccaagaccaactgctgccggtaggggcaggggtatcaggttgacagacttagagccagaaccttgtgaggttcgtccagctgcaggtgctataggggccactgaacctgccttaaatcgagttgaaggggtagctgataaggatattgctgcggaaggcggtagcgcagagaaagtagtaggcatggaagaagattccagcatgggtccagtccctgagagggtacaagttggaaattctcctgtttataagacggagaggaaacttggtaaaggtggctttggtcaagtttatgttggcagaagggtgagtggtggcagtgataggattggagcagatgcaattgaggtagctctaaaacttgaacatcgcaatagtaaaggctgtaactttggcccaccttacgagtggcaagtgtacaatacgctcaatagctgttatggaattcctgctgtacatcataagggtcgtcaaggagatttttacattctggtcatggacatgcttgggcctagcctttgggatgtttggaattctttggctcaatcgatgtctccaaacatggtagcatgcattgcagtggaggcgatatctattcttgaaaaactgcatatgaaggggtttgtgcatggagatgtgaaaccagaaaactttttgcttggtcagcctggaacagcagacgagaagaaactataccttatcgatcttggtctagcatcaagatggaaagattcacactctggccagcatgttgaatatgatcaaaggccagatgtatttagaggaacaataaggtatgcaagttgccatgcacatcttggtcgtacaggaagtcggagggatgatctggagtcattggcttatacattaatatttctgatgcggggaaggttgccatggcaaggataccagggtgataacaagagctttcttgtttgcaagaaaaagatgtcaacctctcctgaattgatgtgttgtttttgtcctcccccgtttaagctgttcctcgaggcagttacgaatatgaagtttgatgaggagcccaactatgccaagcttatctcgatttttgatactcttatcgagccatgtgctatatctagaccaattagaattgatggggctctaaaggttggccaaaagcgaggaagattgcttatcaatttggaagaggatgaacagccaaggaagaaaattagaatcggcagtcctgccacacagtggatttcagtctataatgcacgccgtcctatgaaacagagatatcattacaacgttgcagacttaagacttgcacagcatgttgagaaaggtaatgaggatggccttttcataagctgtgtagcatcatcagctaatctctgggccatcatcatggatgctgggactggtttcagttctcaagtttatgaactgtcctcagtcttcctgcacaaggactggatcatggaacaatgggaaaagaactactatatcagttccatagctggtgcaaataatggaagctcgttggttgttatggctaaaggaactccttatacccagcaatcttacaaagtcagcgactcatttccattcaagtggataaataaaaagtggaaagaaggttttcatgtaacatccatgaccaccgctgggagtcgttggggtgtagtaatgtccaggaactcaggctactctgaacaggtggtggagcttgacttcttgtacccaagtgaaggaatacatcgaaggtgggaaagtggatacaggataacatcaatggctgcaacagctgatcaagcagctcttatattgagtatacctaaacgaaaaataaccgatgaaacccaagagactctccggacttctgccttcccaagtacccatgtcaaggagaaatgggcgaaaaatctgtacattgcatcaatatgctatggtcggacagtttgctgatgaaacatggagtatactgtttcaacctctctcactctctctctagggttttagggacgatctctctctagaagcctgacaacgtgtagccttcggtttcagtacaatccaaaggtaaaccttaaccaggagccaacctatgtgactgtgtaatgaaatgaaatttgtctctatgtatgtagtaagtacaagataaaaggaaaaaaaaaaaattgagtagaagagacgaaatcattattactagaaatgatgaagagctgcaacaagattatgcagtttctggcttatttggctttgtacctgatttgagtacagaatcaggaggaagcaacatgtttgttataatgaacatataattctaagaaggctttcatcttttggtc

SEQ ID NO: 40225 - protein, 701 aa, Arabidopsis thaliana
  peptide (1)..(701): Ceres Seq. ID no. 12344988
  misc_feature (139)..(435): Homolog of NCBI NO: 25287608 NR Description: probable casein kinase I [imported] - Arabidopsis
  misc_feature (395)..(701): Homolog of NCBI NO: 28392919 NR Description: putative casein kinase [Arabidopsis thaliana]
  misc_feature (399)..(701): Homolog of NCBI NO: 22135892 NR Description: putative casein kinase [Arabidopsis thaliana]
  misc_feature (44)..(700): Homolog of NCBI NO: 18139937 NR Description: serine/threonine protein kinase [Chlamydomonas
  misc_feature (110)..(700): Homolog of NCBI NO: 30682888 NR Description: protein kinase family [Arabidopsis thaliana]
  misc_feature (241)..(701): Homolog of NCBI NO: 6006848 NR Description: unknown protein, 5' partial [Arabidopsis thaliana]
  misc_feature (1)..(700): Homolog of NCBI NO: 15231321 NR Description: casein kinase, putative
  misc_feature (1)..(701): Homolog of NCBI NO: 34394436 NR Description: putative casein kinase 1, delta isoform 1
  misc_feature (1)..(701): Homolog of NCBI NO: 28269422 NR Description: putative serine/threonine protein kinase
  misc_feature (1)..(700): Homolog of NCBI NO: 34909952 NR Description: putative casein kinase [Oryza sativa (japonica
  misc_feature (139)..(435): Homolog of NCBI NO: 25287608 NR Description: probable casein kinase I [imported] - Arabidopsis
  misc_feature (395)..(701): Homolog of NCBI NO: 28392919 NR Description: putative casein kinase [Arabidopsis thaliana]
  misc_feature (399)..(701): Homolog of NCBI NO: 22135892 NR Description: putative casein kinase [Arabidopsis thaliana]
  misc_feature (44)..(700): Homolog of NCBI NO: 18139937 NR Description: serine/threonine protein kinase [Chlamydomonas
  misc_feature (110)..(700): Homolog of NCBI NO: 30682888 NR Description: protein kinase family [Arabidopsis thaliana]
  misc_feature (241)..(701): Homolog of NCBI NO: 6006848 NR Description: unknown protein, 5' partial [Arabidopsis thaliana]
  misc_feature (1)..(700): Homolog of NCBI NO: 15231321 NR Description: casein kinase, putative
  misc_feature (1)..(701): Homolog of NCBI NO: 34394436 NR Description: putative casein kinase 1, delta isoform 1
  misc_feature (1)..(701): Homolog of NCBI NO: 28269422 NR Description: putative serine/threonine protein kinase
  misc_feature (1)..(700): Homolog of NCBI NO: 34909952 NR Description: putative casein kinase [Oryza sativa (japonica
MPELRSGARRSRRLDEQPNPPLVEQAENIVLPPQTATRRRGGGRGRGNAALAKGAAPPRPTAAGRGRGIRLTDLEPEPCEVRPAAGAIGATEPALNRVEGVADKDIAAEGGSAEKVVGMEEDSSMGPVPERVQVGNSPVYKTERKLGKGGFGQVYVGRRVSGGSDRIGADAIEVALKLEHRNSKGCNFGPPYEWQVYNTLNSCYGIPAVHHKGRQGDFYILVMDMLGPSLWDVWNSLAQSMSPNMVACIAVEAISILEKLHMKGFVHGDVKPENFLLGQPGTADEKKLYLIDLGLASRWKDSHSGQHVEYDQRPDVFRGTIRYASCHAHLGRTGSRRDDLESLAYTLIFLMRGRLPWQGYQGDNKSFLVCKKKMSTSPELMCCFCPPPFKLFLEAVTNMKFDEEPNYAKLISIFDTLIEPCAISRPIRIDGALKVGQKRGRLLINLEEDEQPRKKIRIGSPATQWISVYNARRPMKQRYHYNVADLRLAQHVEKGNEDGLFISCVASSANLWAIIMDAGTGFSSQVYELSSVFLHKDWIMEQWEKNYYISSIAGANNGSSLVVMAKGTPYTQQSYKVSDSFPFKWINKKWKEGFHVTSMTTAGSRWGVVMSRNSGYSEQVVELDFLYPSEGIHRRWESGYRITSMAATADQAALILSIPKRKITDETQETLRTSAFPSTHVKEKWAKNLYIASICYGRTVC

SEQ ID NO: 40226 - protein, 583 aa, Arabidopsis thaliana
  peptide (1)..(583): Ceres Seq. ID no. 12344989
  misc_feature (21)..(317): Homolog of NCBI NO: 25287608 NR Description: probable casein kinase I [imported] - Arabidopsis
  misc_feature (277)..(583): Homolog of NCBI NO: 28392919 NR Description: putative casein kinase [Arabidopsis thaliana]
  misc_feature (281)..(583): Homolog of NCBI NO: 22135892 NR Description: putative casein kinase [Arabidopsis thaliana]
  misc_feature (1)..(582): Homolog of NCBI NO: 18139937 NR Description: serine/threonine protein kinase [Chlamydomonas
  misc_feature (1)..(582): Homolog of NCBI NO: 30682888 NR Description: protein kinase family [Arabidopsis thaliana]
  misc_feature (123)..(583): Homolog of NCBI NO: 6006848 NR Description: unknown protein, 5' partial [Arabidopsis thaliana]
  misc_feature (1)..(582): Homolog of NCBI NO: 15231321 NR Description: casein kinase, putative
  misc_feature (1)..(583): Homolog of NCBI NO: 34394436 NR Description: putative casein kinase 1, delta isoform 1
  misc_feature (1)..(583): Homolog of NCBI NO: 28269422 NR Description: putative serine/threonine protein kinase
  misc_feature (1)..(582): Homolog of NCBI NO: 34909952 NR Description: putative casein kinase [Oryza sativa (japonica
  misc_feature (21)..(317): Homolog of NCBI NO: 25287608 NR Description: probable casein kinase I [imported] - Arabidopsis
  misc_feature (277)..(583): Homolog of NCBI NO: 28392919 NR Description: putative casein kinase [Arabidopsis thaliana]
  misc_feature (281)..(583): Homolog of NCBI NO: 22135892 NR Description: putative casein kinase [Arabidopsis thaliana]
  misc_feature (1)..(582): Homolog of NCBI NO: 18139937 NR Description: serine/threonine protein kinase [Chlamydomonas
  misc_feature (1)..(582): Homolog of NCBI NO: 30682888 NR Description: protein kinase family [Arabidopsis thaliana]
  misc_feature (123)..(583): Homolog of NCBI NO: 6006848 NR Description: unknown protein, 5' partial [Arabidopsis thaliana]
  misc_feature (1)..(582): Homolog of NCBI NO: 15231321 NR Description: casein kinase, putative
  misc_feature (1)..(583): Homolog of NCBI NO: 34394436 NR Description: putative casein kinase 1, delta isoform 1
  misc_feature (1)..(583): Homolog of NCBI NO: 28269422 NR Description: putative serine/threonine protein kinase
  misc_feature (1)..(582): Homolog of NCBI NO: 34909952 NR Description: putative casein kinase [Oryza sativa (japonica
MEEDSSMGPVPERVQVGNSPVYKTERKLGKGGFGQVYVGRRVSGGSDRIGADAIEVALKLEHRNSKGCNFGPPYEWQVYNTLNSCYGIPAVHHKGRQGDFYILVMDMLGPSLWDVWNSLAQSMSPNMVACIAVEAISILEKLHMKGFVHGDVKPENFLLGQPGTADEKKLYLIDLGLASRWKDSHSGQHVEYDQRPDVFRGTIRYASCHAHLGRTGSRRDDLESLAYTLIFLMRGRLPWQGYQGDNKSFLVCKKKMSTSPELMCCFCPPPFKLFLEAVTNMKFDEEPNYAKLISIFDTLIEPCAISRPIRIDGALKVGQKRGRLLINLEEDEQPRKKIRIGSPATQWISVYNARRPMKQRYHYNVADLRLAQHVEKGNEDGLFISCVASSANLWAIIMDAGTGFSSQVYELSSVFLHKDWIMEQWEKNYYISSIAGANNGSSLVVMAKGTPYTQQSYKVSDSFPFKWINKKWKEGFHVTSMTTAGSRWGVVMSRNSGYSEQVVELDFLYPSEGIHRRWESGYRITSMAATADQAALILSIPKRKITDETQETLRTSAFPSTHVKEKWAKNLYIASICYGRTVC

SEQ ID NO: 40227 - protein, 577 aa, Arabidopsis thaliana
  peptide (1)..(577): Ceres Seq. ID no. 12344990
  misc_feature (15)..(311): Homolog of NCBI NO: 25287608 NR Description: probable casein kinase I [imported] - Arabidopsis
  misc_feature (271)..(577): Homolog of NCBI NO: 28392919 NR Description: putative casein kinase [Arabidopsis thaliana]
  misc_feature (275)..(577): Homolog of NCBI NO: 22135892 NR Description: putative casein kinase [Arabidopsis thaliana]
  misc_feature (1)..(576): Homolog of NCBI NO: 18139937 NR Description: serine/threonine protein kinase [Chlamydomonas
  misc_feature (1)..(576): Homolog of NCBI NO: 30682888 NR Description: protein kinase family [Arabidopsis thaliana]
  misc_feature (117)..(577): Homolog of NCBI NO: 6006848 NR Description: unknown protein, 5' partial [Arabidopsis thaliana]
  misc_feature (1)..(576): Homolog of NCBI NO: 15231321 NR Description: casein kinase, putative
  misc_feature (1)..(577): Homolog of NCBI NO: 34394436 NR Description: putative casein kinase 1, delta isoform 1
  misc_feature (1)..(577): Homolog of NCBI NO: 28269422 NR Description: putative serine/threonine protein kinase
  misc_feature (1)..(576): Homolog of NCBI NO: 34909952 NR Description: putative casein kinase [Oryza sativa (japonica
  misc_feature (15)..(311): Homolog of NCBI NO: 25287608 NR Description: probable casein kinase I [imported] - Arabidopsis
  misc_feature (271)..(577): Homolog of NCBI NO: 28392919 NR Description: putative casein kinase [Arabidopsis thaliana]
  misc_feature (275)..(577): Homolog of NCBI NO: 22135892 NR Description: putative casein kinase [Arabidopsis thaliana]
  misc_feature (1)..(576): Homolog of NCBI NO: 18139937 NR Description: serine/threonine protein kinase [Chlamydomonas
  misc_feature (1)..(576): Homolog of NCBI NO: 30682888 NR Description: protein kinase family [Arabidopsis thaliana]
  misc_feature (117)..(577): Homolog of NCBI NO: 6006848 NR Description: unknown protein, 5' partial [Arabidopsis thaliana]
  misc_feature (1)..(576): Homolog of NCBI NO: 15231321 NR Description: casein kinase, putative
  misc_feature (1)..(577): Homolog of NCBI NO: 34394436 NR Description: putative casein kinase 1, delta isoform 1
  misc_feature (1)..(577): Homolog of NCBI NO: 28269422 NR Description: putative serine/threonine protein kinase
  misc_feature (1)..(576): Homolog of NCBI NO: 34909952 NR Description: putative casein kinase [Oryza sativa (japonica
MGPVPERVQVGNSPVYKTERKLGKGGFGQVYVGRRVSGGSDRIGADAIEVALKLEHRNSKGCNFGPPYEWQVYNTLNSCYGIPAVHHKGRQGDFYILVMDMLGPSLWDVWNSLAQSMSPNMVACIAVEAISILEKLHMKGFVHGDVKPENFLLGQPGTADEKKLYLIDLGLASRWKDSHSGQHVEYDQRPDVFRGTIRYASCHAHLGRTGSRRDDLESLAYTLIFLMRGRLPWQGYQGDNKSFLVCKKKMSTSPELMCCFCPPPFKLFLEAVTNMKFDEEPNYAKLISIFDTLIEPCAISRPIRIDGALKVGQKRGRLLINLEEDEQPRKKIRIGSPATQWISVYNARRPMKQRYHYNVADLRLAQHVEKGNEDGLFISCVASSANLWAIIMDAGTGFSSQVYELSSVFLHKDWIMEQWEKNYYISSIAGANNGSSLVVMAKGTPYTQQSYKVSDSFPFKWINKKWKEGFHVTSMTTAGSRWGVVMSRNSGYSEQVVELDFLYPSEGIHRRWESGYRITSMAATADQAALILSIPKRKITDETQETLRTSAFPSTHVKEKWAKNLYIASICYGRTVC

SEQ ID NO: 40228 - DNA, 1197 bp, Arabidopsis thaliana
  misc_feature (1)..(1197): Ceres Seq. ID no. 12678852
  misc_feature: MA Experiment ID: 108577 Result: Down-regulated in Transcription
  misc_feature: MA Experiment 108577 PARAMETER Experiment Name: At_42deg_Heat_cDNA_P Parameter: Temperature (deg C) Value: 42 vs. 22
  misc_feature: MA Experiment 108577 PARAMETER Experiment Name: At_42deg_Heat_cDNA_P Parameter: Timepoint (hr) Value: 6
  misc_feature: MA Experiment 108577 PARAMETER Experiment Name: At_42deg_Heat_cDNA_P Parameter: Tissue Value: Aerial
  misc_feature: MA Experiment ID: 108579 Result: Down-regulated in Transcription
  misc_feature: MA Experiment 108579 PARAMETER Experiment Name: At_4deg_Cold_cDNA_P Parameter: Temperature (deg C) Value: 4 vs. 22
  misc_feature: MA Experiment 108579 PARAMETER Experiment Name: At_4deg_Cold_cDNA_P Parameter: Timepoint (hr) Value: 6
  misc_feature: MA Experiment 108579 PARAMETER Experiment Name: At_4deg_Cold_cDNA_P Parameter: Tissue Value: Aerial
  misc_feature: MA Experiment ID: 108595 Result: Down-regulated in Transcription
  misc_feature: MA Experiment 108595 PARAMETER Experiment Name: At_Ler-pi_Ovule_cDNA_P Parameter: Plant Line Value: null
  misc_feature: MA Experiment ID: 20000184 Result: Down-regulated in Transcription
  misc_feature: MA Experiment 20000184 PARAMETER Experiment Name: At_Shoots__P Parameter: Age (day) Value: 7
  misc_feature: MA Experiment 20000184 PARAMETER Experiment Name: At_Shoots__P Parameter: Tissue Value: Shoots vs. Whole Plant
  misc_feature: Pfam Name: Elongin_A Pfam Description: RNA polymerase II transcription factor SIII (Elongin) subunit A
cggcgtctgtttaccgctatcatcattcttccgggaagaggaaaaggtttcttcgatcgtcgaagagattctttggacaagtcccctccttcctggttcaatcttcgattcagctctcttttaatttttttggttttgggaagctgctatgttatttgagaggcttaccaagaaaccaccttcgcttgttgatctttgcgtaaggaaagcgattgataatgtaaagtacattggatatgttggtggggttgattttcagctccttgagcagattctgcaacactgtacactagaacagctgaagcacatagaggatgctactgacgacacagatcttagtccaatcaccgataagttttggaagggattctataagaagcactatggagaagaggacatgaaggatcttatagaggacctggagtggaataaagtaaatgatttcaaatggaggaacttatatgagttgaaggttatagctgtgcaacaaaaggagaaggaacttggtggtcgactgaaagaacgttacaaggacgaaaatgaaaggaaacaaagtcgacaaactaaggtctgctcgaaagctcctccaagcaaaagaccattttggggtaatagtgcatcaggttacaatcttgggcatgtgaagagcaacatcatgaagaaggcaaaaatagatctgttgaagagtcaagaagtgaaaaatcttactgcgattaaaaggaacaccattcagaagagtttcagtatttctactccaaagaaaactggcttatctgcgaattcgccttcaacttcaagaagcattccttatggtggacgaaatcttactgaaactaaaaagaacacgattcagaagagtttcagtatatctgctccaaagaggactggcttatccgctaatgcgccttcaacttcaagaagcgttccttctggtggacaaaagctacctccaaggaggatcaacggccttcctgggactgctccttcaacttcaaaaaatgcagccaccagacaaaaacatgtaatgtaacttatatagcttttttacagatcattttttcttcgagtgtatcatttacatggctacttcaagtttcaagaactccgagttttgaaactctggcttgatgatatcctagtttgtaacaatagatcttcaaaagtttttacaatgatttaataaagtgctttgttttc

SEQ ID NO: 40229 - protein, 293 aa, Arabidopsis thaliana
  peptide (1)..(293): Ceres Seq. ID no. 12678853
  misc_feature: Pfam Name: Elongin_A Pfam Description: RNA polymerase II transcription factor SIII (Elongin) subunit A
  misc_feature (1)..(293): Homolog of NCBI NO: 25370823 NR Description: hypothetical protein At2g42780 [imported] -
  misc_feature (1)..(293): Homolog of NCBI NO: 18406058 NR Description: expressed protein
MLFERLTKKPPSLVDLCVRKAIDNVKYIGYVGGVDFQLLEQILQHCTLEQLKHIEDATDDTDLSPITDKFWKGFYKKHYGEEDMKDLIEDLEWNKVNDFKWRNLYELKVIAVQQKEKELGGRLKERYKDENERKQSRQTKVCSKAPPSKRPFWGNSASGYNLGHVKSNIMKKAKIDLLKSQEVKNLTAIKRNTIQKSFSISTPKKTGLSANSPSTSRSIPYGGRNLTETKKNTIQKSFSISAPKRTGLSANAPSTSRSVPSGGQKLPPRRINGLPGTAPSTSKNAATRQKHVM

SEQ ID NO: 40230 - protein, 210 aa, Arabidopsis thaliana
  peptide (1)..(210): Ceres Seq. ID no. 12678854
  misc_feature: Pfam Name: Elongin_A Pfam Description: RNA polymerase II transcription factor SIII (Elongin) subunit A
  misc_feature (1)..(210): Homolog of NCBI NO: 25370823 NR Description: hypothetical protein At2g42780 [imported] -
  misc_feature (1)..(210): Homolog of NCBI NO: 18406058 NR Description: expressed protein
MKDLIEDLEWNKVNDFKWRNLYELKVIAVQQKEKELGGRLKERYKDENERKQSRQTKVCSKAPPSKRPFWGNSASGYNLGHVKSNIMKKAKIDLLKSQEVKNLTAIKRNTIQKSFSISTPKKTGLSANSPSTSRSIPYGGRNLTETKKNTIQKSFSISAPKRTGLSANAPSTSRSVPSGGQKLPPRRINGLPGTAPSTSKNAATRQKHVM

SEQ ID NO: 40231 - DNA, 1214 bp, Arabidopsis thaliana
  misc_feature (1)..(1214): Ceres Seq. ID no. 13489093
  misc_feature: MA Experiment ID: 108434 Result: Down-regulated in Transcription
  misc_feature: MA Experiment 108434 PARAMETER Experiment Name: At_Root_Tips_cDNA_P Parameter: Tissue Value: Root Tips
  misc_feature: MA Experiment ID: 108462 Result: Down-regulated in Transcription
  misc_feature: MA Experiment 108462 PARAMETER Experiment Name: At_Germinating_Seeds_cDNA_P Parameter: Age (day) Value: 2 vs. 0
  misc_feature: MA Experiment 108462 PARAMETER Experiment Name: At_Germinating_Seeds_cDNA_P Parameter: Tissue Value: Germinating Seeds
  misc_feature: MA Experiment ID: 108463 Result: Down-regulated in Transcription
  misc_feature: MA Experiment 108463 PARAMETER Experiment Name: At_Germinating_Seeds_cDNA_P Parameter: Age (day) Value: 3 vs. 0
  misc_feature: MA Experiment 108463 PARAMETER Experiment Name: At_Germinating_Seeds_cDNA_P Parameter: Tissue Value: Germinating Seeds
  misc_feature: MA Experiment ID: 108585 Result: Up-regulated in Transcription
  misc_feature: MA Experiment 108585 PARAMETER Experiment Name: At_5mM_NaNP_cDNA_P Parameter: Timepoint (hr) Value: 6
  misc_feature: MA Experiment 108585 PARAMETER Experiment Name: At_5mM_NaNP_cDNA_P Parameter: Tissue Value: Aerial
  misc_feature: MA Experiment 108585 PARAMETER Experiment Name: At_5mM_NaNP_cDNA_P Parameter: Treatment Value: null
  misc_feature: MA Experiment ID: 108594 Result: Down-regulated in Transcription
  misc_feature: MA Experiment 108594 PARAMETER Experiment Name: At_Ler-rhl_Root_cDNA_P Parameter: Plant Line Value: null
  misc_feature: MA Experiment ID: 108595 Result: Up-regulated in Transcription
  misc_feature: MA Experiment 108595 PARAMETER Experiment Name: At_Ler-pi_Ovule_cDNA_P Parameter: Plant Line Value: null
  misc_feature: MA Experiment ID: 20000087 Result: Up-regulated in Transcription
  misc_feature: MA Experiment 20000087 PARAMETER Experiment Name: At_100uM_ABA_Mutants_cDNA_P Parameter: Plant Line Value: WS
  misc_feature: MA Experiment 20000087 PARAMETER Experiment Name: At_100uM_ABA_Mutants_cDNA_P Parameter: Timepoint (hr) Value: 6
  misc_feature: MA Experiment 20000087 PARAMETER Experiment Name: At_100uM_ABA_Mutants_cDNA_P Parameter: Tissue Value: Aerial
  misc_feature: MA Experiment 20000087 PARAMETER Experiment Name: At_100uM_ABA_Mutants_cDNA_P Parameter: Treatment Value: 100uM ABA vs. No Treatment
  misc_feature: MA Experiment ID: 20000089 Result: Up-regulated in Transcription
  misc_feature: MA Experiment ID: 20000090 Result: Up-regulated in Transcription
  misc_feature: MA Experiment ID: 20000117 Result: Up-regulated in Transcription
  misc_feature: MA Experiment 20000117 PARAMETER Experiment Name: At_100uM_ABA_Mutants_cDNA_P Parameter: Plant Line Value: Columbia
  misc_feature: MA Experiment 20000117 PARAMETER Experiment Name: At_100uM_ABA_Mutants_cDNA_P Parameter: Timepoint (hr) Value: 6
  misc_feature: MA Experiment 20000117 PARAMETER Experiment Name: At_100uM_ABA_Mutants_cDNA_P Parameter: Tissue Value: Aerial
  misc_feature: MA Experiment 20000117 PARAMETER Experiment Name: At_100uM_ABA_Mutants_cDNA_P Parameter: Treatment Value: 100uM ABA vs. No Treatment
  misc_feature: MA Experiment ID: 20000182 Result: Up-regulated in Transcription
  misc_feature: MA Experiment 20000182 PARAMETER Experiment Name: At_2mM_SA_P Parameter: Age (day) Value: 14
  misc_feature: MA Experiment 20000182 PARAMETER Experiment Name: At_2mM_SA_P Parameter: Organism Value: A. thaliana
  misc_feature: MA Experiment 20000182 PARAMETER Experiment Name: At_2mM_SA_P Parameter: Plant Line Value: WS
  misc_feature: MA Experiment 20000182 PARAMETER Experiment Name: At_2mM_SA_P Parameter: Timepoint (hr) Value: 6
  misc_feature: MA Experiment 20000182 PARAMETER Experiment Name: At_2mM_SA_P Parameter: Tissue Value: Aerial
  misc_feature: MA Experiment 20000182 PARAMETER Experiment Name: At_2mM_SA_P Parameter: Treatment Value: 2mM SA vs. No Treatment
  misc_feature: MA Experiment ID: 20000184 Result: Down-regulated in Transcription
  misc_feature: MA Experiment 20000184 PARAMETER Experiment Name: At_Shoots__P Parameter: Age (day) Value: 7
  misc_feature: MA Experiment 20000184 PARAMETER Experiment Name: At_Shoots__P Parameter: Tissue Value: Shoots vs. Whole Plant
  misc_feature: MA Experiment ID: 20000227 Result: Down-regulated in Transcription
  misc_feature: MA Experiment 20000227 PARAMETER Experiment Name: At_Root-Tips-vs-Tops_P Parameter: Tissue Value: Root Tips vs. Root Tops
  misc_feature: MA Experiment ID: 20000234 Result: Down-regulated in Transcription
  misc_feature: MA Experiment 20000234 PARAMETER Experiment Name: At_Siliques_P Parameter: Age (day) Value: 21
  misc_feature: MA Experiment 20000234 PARAMETER Experiment Name: At_Siliques_P Parameter: Organism Value: A. thaliana
  misc_feature: MA Experiment 20000234 PARAMETER Experiment Name: At_Siliques_P Parameter: Plant Line Value: WS
  misc_feature: MA Experiment 20000234 PARAMETER Experiment Name: At_Siliques_P Parameter: Tissue Value: Less Than 5mm Siliques vs. Whole Plant
  misc_feature: MA Experiment ID: 20000235 Result: Down-regulated in Transcription
  misc_feature: MA Experiment 20000235 PARAMETER Experiment Name: At_Siliques_P Parameter: Age (day) Value: 21
  misc_feature: MA Experiment 20000235 PARAMETER Experiment Name: At_Siliques_P Parameter: Organism Value: A. thaliana
  misc_feature: MA Experiment 20000235 PARAMETER Experiment Name: At_Siliques_P Parameter: Plant Line Value: WS
  misc_feature: MA Experiment 20000235 PARAMETER Experiment Name: At_Siliques_P Parameter: Tissue Value: 5-10mm Siliques vs. Whole Plant
  misc_feature: MA Experiment ID: 20000264 Result: Down-regulated in Transcription
  misc_feature: MA Experiment 20000264 PARAMETER Experiment Name: At_Open_Flower_P Parameter: Age (day) Value: 21
  misc_feature: MA Experiment 20000264 PARAMETER Experiment Name: At_Open_Flower_P Parameter: Plant Line Value: WS
  misc_feature: MA Experiment 20000264 PARAMETER Experiment Name: At_Open_Flower_P Parameter: Tissue Value: Open Flower vs. Whole Plant
  misc_feature: MA Experiment ID: 20000286 Result: Down-regulated in Transcription
  misc_feature: MA Experiment 20000286 PARAMETER Experiment Name: At_Open_Flower_P Parameter: Age (day) Value: 21
  misc_feature: MA Experiment 20000286 PARAMETER Experiment Name: At_Open_Flower_P Parameter: Plant Line Value: WS
  misc_feature: MA Experiment 20000286 PARAMETER Experiment Name: At_Open_Flower_P Parameter: Tissue Value: Half Open vs. Whole Plant
  misc_feature: MA Experiment ID: 20000438 Result: Down-regulated in Transcription
  misc_feature: MA Experiment 20000438 PARAMETER Experiment Name: At_Shoots__P Parameter: Age (day) Value: 14
  misc_feature: MA Experiment 20000438 PARAMETER Experiment Name: At_Shoots__P Parameter: Tissue Value: Shoots vs. Whole Plant
  misc_feature: MA Experiment ID: 20000441 Result: Up-regulated in Transcription
  misc_feature: MA Experiment 20000441 PARAMETER Experiment Name: At_1uM_BR-BRZ__P Parameter: Tissue Value: Shoot Apices
  misc_feature: MA Experiment 20000441 PARAMETER Experiment Name: At_1uM_BR-BRZ__P Parameter: Treatment Value: 1uM BR vs. No Treatment
  misc_feature: MA Experiment ID: 20001555 Result: Down-regulated in Transcription
  misc_feature: MA Experiment 20001555 PARAMETER Experiment Name: At_Drought_Soil_Dry_P Parameter: Age (day) Value: 24
  misc_feature: MA Experiment 20001555 PARAMETER Experiment Name: At_Drought_Soil_Dry_P Parameter: Organism Value: A. thaliana
  misc_feature: MA Experiment 20001555 PARAMETER Experiment Name: At_Drought_Soil_Dry_P Parameter: Plant Line Value: WS
  misc_feature: MA Experiment 20001555 PARAMETER Experiment Name: At_Drought_Soil_Dry_P Parameter: Post Timepoint (hr) Value: None
  misc_feature: MA Experiment 20001555 PARAMETER Experiment Name: At_Drought_Soil_Dry_P Parameter: Post-Treatment Value: None
  misc_feature: MA Experiment 20001555 PARAMETER Experiment Name: At_Drought_Soil_Dry_P Parameter: Timepoint (day) Value: 10
  misc_feature: MA Experiment 20001555 PARAMETER Experiment Name: At_Drought_Soil_Dry_P Parameter: Treatment Value: Drought vs. No Drought
  misc_feature: MA Experiment ID: 20001556 Result: Down-regulated in Transcription
  misc_feature: MA Experiment 20001556 PARAMETER Experiment Name: At_Drought_Soil_Dry_P Parameter: Age (day) Value: 26
  misc_feature: MA Experiment 20001556 PARAMETER Experiment Name: At_Drought_Soil_Dry_P Parameter: Organism Value: A. thaliana
  misc_feature: MA Experiment 20001556 PARAMETER Experiment Name: At_Drought_Soil_Dry_P Parameter: Plant Line Value: WS
  misc_feature: MA Experiment 20001556 PARAMETER Experiment Name: At_Drought_Soil_Dry_P Parameter: Post Timepoint (hr) Value: None
  misc_feature: MA Experiment 20001556 PARAMETER Experiment Name: At_Drought_Soil_Dry_P Parameter: Post-Treatment Value: None
  misc_feature: MA Experiment 20001556 PARAMETER Experiment Name: At_Drought_Soil_Dry_P Parameter: Timepoint (day) Value: 12
  misc_feature: MA Experiment 20001556 PARAMETER Experiment Name: At_Drought_Soil_Dry_P Parameter: Treatment Value: Drought vs. No Drought
gtcactttgtctcgtccaccttttaaaaaccctctctaaagtctccgaaacatcttctctcttaaacaaatcctctctgattcgatgggttttagcaaagaagagattagtaaaaccagaaagctttggtcatctctatggagaggaatcaaaactatattcgttttgttcacaatgttcttctcttttctccttgtctctgctcctatcttcctcgccgtcgccgatgctctcctcccttccgctctcctccaccgcttctcttcgccggcgactctctcttctcatctcaccaactacgatttccgtcactccctcatcgatattcctttaatctcaatcattagatccgctgttatactctgtgtttatggactctgtgacggaccaaaactatcgagaggaccgtatctgacaataacaatgatttgttcaatatcttctctaatctacgtttcgttaaaagctgcgtttgtgttcggtgagccagcgatcggagacggaggaggaaactacttcagagcggcggaagtggctctgtttctatgctcgtcagtcttagccataggtcacatcgttgtggcttatcgaacaagttgtagagaaagaaaaaagcttctcgtcttcaaaatcgacattgaagccgtttcggcttgtaaaaacgtgtacccgagataccaaaagatcttattacaacaagagagactcaaatagagacgtatttccaagagaatcaatacttgtaaatatatacacatacctcaacatgtaaataaaactaatatataaaaacatacggcgtataaatgtaacttctccttctgcctttcggcgttgacccatcaactccttcgcttttaagtttcagaaggatccaaagcaaaaggaatggagattaattatataacctatgcttttttaaatgagacatttcagatgaactggcagttgttagctttaacattatattagttagggcgatttgtaaataatccagagttcctcaatgagaaaagaagcccaaggctgtctctccgttttgtatatatgtttatgtttgtatttctttgtggttttaatatatgttttgtaattgtaatttgtaagcataagcacatagtatgtgatacgtccgcgtggatttctttatacgtcaccaaaatctctaatagaatcgtaaagcaacctttttacgatcaatatctatttatctt

SEQ ID NO: 40232 - protein, 209 aa, Arabidopsis thaliana
  peptide (1)..(209): Ceres Seq. ID no. 13489094
  misc_feature (13)..(188): Homolog of NCBI NO: 37536434 NR Description: unknown protein [Oryza sativa (japonica
  misc_feature (25)..(200): Homolog of NCBI NO: 25405595 NR Description: unknown protein, 18223-15857 [imported] -
  misc_feature (28)..(196): Homolog of NCBI NO: 34911750 NR Description: P0038D11.18 [Oryza sativa (japonica
  misc_feature (20)..(201): Homolog of NCBI NO: 15218212 NR Description: hydrolase, alpha/beta fold family [Arabidopsis
  misc_feature (13)..(188): Homolog of NCBI NO: 25446696 NR Description: Unknown protein [Oryza sativa (japonica
  misc_feature (20)..(201): Homolog of NCBI NO: 15220097 NR Description: hydrolase, alpha/beta fold family [Arabidopsis
  misc_feature (1)..(190): Homolog of NCBI NO: 30694336 NR Description: expressed protein [Arabidopsis thaliana]
  misc_feature (1)..(209): Homolog of NCBI NO: 30694339 NR Description: expressed protein [Arabidopsis thaliana]
  misc_feature (1)..(209): Homolog of NCBI NO: 30688139 NR Description: expressed protein [Arabidopsis thaliana]
MGFSKEEISKTRKLWSSLWRGIKTIFVLFTMFFSFLLVSAPIFLAVADALLPSALLHRFSSPATLSSHLTNYDFRHSLIDIPLISIIRSAVILCVYGLCDGPKLSRGPYLTITMICSISSLIYVSLKAAFVFGEPAIGDGGGNYFRAAEVALFLCSSVLAIGHIVVAYRTSCRERKKLLVFKIDIEAVSACKNVYPRYQKILLQQERLK

SEQ ID NO: 40233 - protein, 179 aa, Arabidopsis thaliana
  peptide (1)..(179): Ceres Seq. ID no. 13489095
  misc_feature (1)..(158): Homolog of NCBI NO: 37536434 NR Description: unknown protein [Oryza sativa (japonica
  misc_feature (1)..(170): Homolog of NCBI NO: 25405595 NR Description: unknown protein, 18223-15857 [imported] -
  misc_feature (1)..(166): Homolog of NCBI NO: 34911750 NR Description: P0038D11.18 [Oryza sativa (japonica
  misc_feature (1)..(171): Homolog of NCBI NO: 15218212 NR Description: hydrolase, alpha/beta fold family [Arabidopsis
  misc_feature (1)..(158): Homolog of NCBI NO: 25446696 NR Description: Unknown protein [Oryza sativa (japonica
  misc_feature (1)..(171): Homolog of NCBI NO: 15220097 NR Description: hydrolase, alpha/beta fold family [Arabidopsis
  misc_feature (1)..(160): Homolog of NCBI NO: 30694336 NR Description: expressed protein [Arabidopsis thaliana]
  misc_feature (1)..(179): Homolog of NCBI NO: 30694339 NR Description: expressed protein [Arabidopsis thaliana]
  misc_feature (1)..(179): Homolog of NCBI NO: 30688139 NR Description: expressed protein [Arabidopsis thaliana]
MFFSFLLVSAPIFLAVADALLPSALLHRFSSPATLSSHLTNYDFRHSLIDIPLISIIRSAVILCVYGLCDGPKLSRGPYLTITMICSISSLIYVSLKAAFVFGEPAIGDGGGNYFRAAEVALFLCSSVLAIGHIVVAYRTSCRERKKLLVFKIDIEAVSACKNVYPRYQKILLQQERLK

SEQ ID NO: 40234 - protein, 110 aa, Arabidopsis thaliana
  peptide (1)..(110): Ceres Seq. ID no. 13489096
SLCLVHLLKTLSKVSETSSLLNKSSLIRWVLAKKRLVKPESFGHLYGEESKLYSFCSQCSSLFSLSLLLSSSPSPMLSSLPLSSTASLRRRLSLLISPTTISVTPSSIFL

SEQ ID NO: 40235 - DNA, 1339 bp, Arabidopsis thaliana
  misc_feature (1)..(1339): Ceres Seq. ID no. 12395822
  misc_feature: MA Experiment ID: 20000184 Result: Up-regulated in Transcription
  misc_feature: MA Experiment 20000184 PARAMETER Experiment Name: At_Shoots__P Parameter: Age (day) Value: 7
  misc_feature: MA Experiment 20000184 PARAMETER Experiment Name: At_Shoots__P Parameter: Tissue Value: Shoots vs. Whole Plant
  misc_feature: MA Experiment ID: 20000234 Result: Up-regulated in Transcription
  misc_feature: MA Experiment 20000234 PARAMETER Experiment Name: At_Siliques_P Parameter: Age (day) Value: 21
  misc_feature: MA Experiment 20000234 PARAMETER Experiment Name: At_Siliques_P Parameter: Organism Value: A. thaliana
  misc_feature: MA Experiment 20000234 PARAMETER Experiment Name: At_Siliques_P Parameter: Plant Line Value: WS
  misc_feature: MA Experiment 20000234 PARAMETER Experiment Name: At_Siliques_P Parameter: Tissue Value: Less Than 5mm Siliques vs. Whole Plant
  misc_feature: MA Experiment ID: 20000235 Result: Up-regulated in Transcription
  misc_feature: MA Experiment 20000235 PARAMETER Experiment Name: At_Siliques_P Parameter: Age (day) Value: 21
  misc_feature: MA Experiment 20000235 PARAMETER Experiment Name: At_Siliques_P Parameter: Organism Value: A. thaliana
  misc_feature: MA Experiment 20000235 PARAMETER Experiment Name: At_Siliques_P Parameter: Plant Line Value: WS
  misc_feature: MA Experiment 20000235 PARAMETER Experiment Name: At_Siliques_P Parameter: Tissue Value: 5-10mm Siliques vs. Whole Plant
  misc_feature: MA Experiment ID: 20000436 Result: Up-regulated in Transcription
  misc_feature: MA Experiment 20000436 PARAMETER Experiment Name: At_Drought_P Parameter: Age (day) Value: 7
  misc_feature: MA Experiment 20000436 PARAMETER Experiment Name: At_Drought_P Parameter: Organism Value: A. thaliana
  misc_feature: MA Experiment 20000436 PARAMETER Experiment Name: At_Drought_P Parameter: Plant Line Value: WS
  misc_feature: MA Experiment 20000436 PARAMETER Experiment Name: At_Drought_P Parameter: Timepoint (hr) Value: 12
  misc_feature: MA Experiment 20000436 PARAMETER Experiment Name: At_Drought_P Parameter: Tissue Value: Whole Plant
  misc_feature: MA Experiment 20000436 PARAMETER Experiment Name: At_Drought_P Parameter: Treatment Value: Drought vs. No Drought
  misc_feature: MA Experiment ID: 20000495 Result: Up-regulated in Transcription
  misc_feature: MA Experiment 20000495 PARAMETER Experiment Name: At_Guard_Cells_P Parameter: Harvest Date Value: 8/2/2002
  misc_feature: MA Experiment 20000495 PARAMETER Experiment Name: At_Guard_Cells_P Parameter: Organism Value: A. thaliana
  misc_feature: MA Experiment 20000495 PARAMETER Experiment Name: At_Guard_Cells_P Parameter: Tissue Value: Guard Cells vs. Leaves
  misc_feature: MA Experiment ID: 20000794 Result: Down-regulated in Transcription
  misc_feature: MA Experiment 20000794 PARAMETER Experiment Name: At_Petals_P Parameter: Age (day) Value: 23-25 days
  misc_feature: MA Experiment 20000794 PARAMETER Experiment Name: At_Petals_P Parameter: Plant Line Value: WS
  misc_feature: MA Experiment 20000794 PARAMETER Experiment Name: At_Petals_P Parameter: Tissue Value: Petals vs. Whole plant
  misc_feature: MA Experiment ID: 20001248 Result: Down-regulated in Transcription
  misc_feature: MA Experiment 20001248 PARAMETER Experiment Name: At_Far-red-induction_P Parameter: Age (day) Value: 7
  misc_feature: MA Experiment 20001248 PARAMETER Experiment Name: At_Far-red-induction_P Parameter: Light Value: Far-red vs. White
  misc_feature: MA Experiment 20001248 PARAMETER Experiment Name: At_Far-red-induction_P Parameter: Organism Value: A. thaliana
  misc_feature: MA Experiment 20001248 PARAMETER Experiment Name: At_Far-red-induction_P Parameter: Plant Line Value: Columbia
  misc_feature: MA Experiment 20001248 PARAMETER Experiment Name: At_Far-red-induction_P Parameter: Timepoint (hr) Value: 4
  misc_feature: MA Experiment 20001248 PARAMETER Experiment Name: At_Far-red-induction_P Parameter: Tissue Value: Whole Plant
  misc_feature: MA Experiment ID: 20001451 Result: Up-regulated in Transcription
  misc_feature: MA Experiment 20001451 PARAMETER Experiment Name: At_Far-red-induction_P Parameter: Age (day) Value: 7
  misc_feature: MA Experiment 20001451 PARAMETER Experiment Name: At_Far-red-induction_P Parameter: Light Value: Far-red vs. White
  misc_feature: MA Experiment 20001451 PARAMETER Experiment Name: At_Far-red-induction_P Parameter: Organism Value: A. thaliana
  misc_feature: MA Experiment 20001451 PARAMETER Experiment Name: At_Far-red-induction_P Parameter: Plant Line Value: Columbia
  misc_feature: MA Experiment 20001451 PARAMETER Experiment Name: At_Far-red-induction_P Parameter: Timepoint (hr) Value: 24
  misc_feature: MA Experiment 20001451 PARAMETER Experiment Name: At_Far-red-induction_P Parameter: Tissue Value: Whole Plant
  misc_feature: MA Experiment ID: 20001556 Result: Down-regulated in Transcription
  misc_feature: MA Experiment 20001556 PARAMETER Experiment Name: At_Drought_Soil_Dry_P Parameter: Age (day) Value: 26
  misc_feature: MA Experiment 20001556 PARAMETER Experiment Name: At_Drought_Soil_Dry_P Parameter: Organism Value: A. thaliana
  misc_feature: MA Experiment 20001556 PARAMETER Experiment Name: At_Drought_Soil_Dry_P Parameter: Plant Line Value: WS
  misc_feature: MA Experiment 20001556 PARAMETER Experiment Name: At_Drought_Soil_Dry_P Parameter: Post Timepoint (hr) Value: None
  misc_feature: MA Experiment 20001556 PARAMETER Experiment Name: At_Drought_Soil_Dry_P Parameter: Post-Treatment Value: None
  misc_feature: MA Experiment 20001556 PARAMETER Experiment Name: At_Drought_Soil_Dry_P Parameter: Timepoint (day) Value: 12
  misc_feature: MA Experiment 20001556 PARAMETER Experiment Name: At_Drought_Soil_Dry_P Parameter: Treatment Value: Drought vs. No Drought
  misc_feature: MA Experiment ID: 20001557 Result: Down-regulated in Transcription
  misc_feature: MA Experiment 20001557 PARAMETER Experiment Name: At_Drought_Soil_Dry_P Parameter: Age (day) Value: 27
  misc_feature: MA Experiment 20001557 PARAMETER Experiment Name: At_Drought_Soil_Dry_P Parameter: Organism Value: A. thaliana
  misc_feature: MA Experiment 20001557 PARAMETER Experiment Name: At_Drought_Soil_Dry_P Parameter: Plant Line Value: WS
  misc_feature: MA Experiment 20001557 PARAMETER Experiment Name: At_Drought_Soil_Dry_P Parameter: Post Timepoint (hr) Value: 3
  misc_feature: MA Experiment 20001557 PARAMETER Experiment Name: At_Drought_Soil_Dry_P Parameter: Post-Treatment Value: Re-Water vs. No Drought
  misc_feature: MA Experiment 20001557 PARAMETER Experiment Name: At_Drought_Soil_Dry_P Parameter: Timepoint (day) Value: 13
  misc_feature: MA Experiment 20001557 PARAMETER Experiment Name: At_Drought_Soil_Dry_P Parameter: Treatment Value: Drought vs. No Drought
  misc_feature: MA Experiment ID: 20001558 Result: Down-regulated in Transcription
  misc_feature: MA Experiment 20001558 PARAMETER Experiment Name: At_Drought_Soil_Dry_P Parameter: Age (day) Value: 27
  misc_feature: MA Experiment 20001558 PARAMETER Experiment Name: At_Drought_Soil_Dry_P Parameter: Organism Value: A. thaliana
  misc_feature: MA Experiment 20001558 PARAMETER Experiment Name: At_Drought_Soil_Dry_P Parameter: Plant Line Value: WS
  misc_feature: MA Experiment 20001558 PARAMETER Experiment Name: At_Drought_Soil_Dry_P Parameter: Post Timepoint (hr) Value: 6
  misc_feature: MA Experiment 20001558 PARAMETER Experiment Name: At_Drought_Soil_Dry_P Parameter: Post-Treatment Value: Re-Water vs. No Drought
  misc_feature: MA Experiment 20001558 PARAMETER Experiment Name: At_Drought_Soil_Dry_P Parameter: Timepoint (day) Value: 13
  misc_feature: MA Experiment 20001558 PARAMETER Experiment Name: At_Drought_Soil_Dry_P Parameter: Treatment Value: Drought vs. No Drought
agagatgatcaaacaatggcgactttgattctatcattcttgcttcttcttctagcaacaaagcttcctgaatcactagctggtcactgcaccaccacgacggcgacgaaaagcttcgagaaatgtatctctcttccaacacaacaaacgtcaatcgcgtggacataccatccacacaacgctactctcgacctttgtttctttggaactttcatctcaccttccgggtgggttggatgggggattaacccggattccccggcgcagatgactggttctcgtgtcctcatcgcctttccagatccgaattctggtcagctcatcctccttccttacgttcttgactcttcagtcaagcttcagaaaggtcctctgctttcccgtccgcttgaccttgtccgtctctcttcctcctctgcttctctctacggtggtaaaatggccactatccgtaatggcgcttccgttcagatttatgcctctgttaagctctcctcgaacaatactaagatccaccatgtttggaacagaggtctttatgtccaaggttactctcccaccattcatcctactacttccaccgatctctcctccttctccacctttgatgtcacttcaggatttgcaactgttaatcaaaacagcggttcccgagctttaaaagtgactcacggagtagtcaacgcgatatcgtggggttttctcctcccggcgggagcagtaacagctagatacctccgccaaatgcaatcaataggacccacttggttctacatccacgcagcaatacagctaaccggtttcctcctaggaaccattggcttctccattggaatcgtgctcggccataattcccctggagtgacctatgggttacatcggagcctcgggatagctactttcacagcagcggcgctgcaaacactggctttgctgttcagaccaaagacgaccaataagttccggaggtactggaagtcttaccatcattttgtcgggtacgcgtgtgtggtgatgggcgtggtgaatgtgttccaagggtttgaggttttaagggaaggaaggtcgtacgcaaagctcggttactgtctatgtctgtcgacgctggttggtgtctgcgtggccatggaagttaactcgtgggttgtgttttgtcgaaaggctaaagaggagaagatgaagagagatggtttgaccggtgtcgatagatgcagtgggagtcatagttaggtcttgggtcctaattataagacagaaaaagagacacaatatcatttatatatctttgcttagtaccctcatgtacaatgtaacttgttggttcaaagttgacttaccc

SEQ ID NO: 40236 - protein, 409 aa, Arabidopsis thaliana
  peptide (1)..(409): Ceres Seq. ID no. 12395823
  misc_feature (90)..(231): Pfam Name: Protein of unknown function (DUF568) Pfam Description: Protein of unknown function (DUF568)
  misc_feature (11)..(394): Homolog of NCBI NO: 18404500 NR Description: expressed protein
  misc_feature (3)..(394): Homolog of NCBI NO: 21593814 NR Description: unknown [Arabidopsis thaliana]
  misc_feature (3)..(394): Homolog of NCBI NO: 15235545 NR Description: putative protein
  misc_feature (14)..(389): Homolog of NCBI NO: 21592781 NR Description: putative membrane protein [Arabidopsis thaliana]
  misc_feature (14)..(389): Homolog of NCBI NO: 18421491 NR Description: Expressed protein
  misc_feature (6)..(213): Homolog of NCBI NO: 25411125 NR Description: hypothetical protein At2g04850 [imported] -
  misc_feature (133)..(409): Homolog of NCBI NO: 25411125 NR Description: hypothetical protein At2g04850 [imported] -
  misc_feature (4)..(395): Homolog of NCBI NO: 24414274 NR Description: Hypothetical protein [Oryza sativa (japonica
  misc_feature (6)..(409): Homolog of NCBI NO: 18395877 NR Description: expressed protein
  misc_feature (6)..(409): Homolog of NCBI NO: 21536849 NR Description: unknown [Arabidopsis thaliana]
RDDQTMATLILSFLLLLLATKLPESLAGHCTTTTATKSFEKCISLPTQQTSIAWTYHPHNATLDLCFFGTFISPSGWVGWGINPDSPAQMTGSRVLIAFPDPNSGQLILLPYVLDSSVKLQKGPLLSRPLDLVRLSSSSASLYGGKMATIRNGASVQIYASVKLSSNNTKIHHVWNRGLYVQGYSPTIHPTTSTDLSSFSTFDVTSGFATVNQNSGSRALKVTHGVVNAISWGFLLPAGAVTARYLRQMQSIGPTWFYIHAAIQLTGFLLGTIGFSIGIVLGHNSPGVTYGLHRSLGIATFTAAALQTLALLFRPKTTNKFRRYWKSYHHFVGYACVVMGVVNVFQGFEVLREGRSYAKLGYCLCLSTLVGVCVAMEVNSWVVFCRKAKEEKMKRDGLTGVDRCSGSHS

SEQ ID NO: 40237 - protein, 404 aa, Arabidopsis thaliana
  peptide (1)..(404): Ceres Seq. ID no. 12395824
  misc_feature (85)..(226): Pfam Name: Protein of unknown function (DUF568) Pfam Description: Protein of unknown function (DUF568)
  misc_feature (6)..(389): Homolog of NCBI NO: 18404500 NR Description: expressed protein
  misc_feature (1)..(389): Homolog of NCBI NO: 21593814 NR Description: unknown [Arabidopsis thaliana]
  misc_feature (1)..(389): Homolog of NCBI NO: 15235545 NR Description: putative protein
  misc_feature (9)..(384): Homolog of NCBI NO: 21592781 NR Description: putative membrane protein [Arabidopsis thaliana]
  misc_feature (9)..(384): Homolog of NCBI NO: 18421491 NR Description: Expressed protein
  misc_feature (1)..(208): Homolog of NCBI NO: 25411125 NR Description: hypothetical protein At2g04850 [imported] -
  misc_feature (128)..(404): Homolog of NCBI NO: 25411125 NR Description: hypothetical protein At2g04850 [imported] -
  misc_feature (1)..(390): Homolog of NCBI NO: 24414274 NR Description: Hypothetical protein [Oryza sativa (japonica
  misc_feature (1)..(404): Homolog of NCBI NO: 18395877 NR Description: expressed protein
  misc_feature (1)..(404): Homolog of NCBI NO: 21536849 NR Description: unknown [Arabidopsis thaliana]
MATLILSFLLLLLATKLPESLAGHCTTTTATKSFEKCISLPTQQTSIAWTYHPHNATLDLCFFGTFISPSGWVGWGINPDSPAQMTGSRVLIAFPDPNSGQLILLPYVLDSSVKLQKGPLLSRPLDLVRLSSSSASLYGGKMATIRNGASVQIYASVKLSSNNTKIHHVWNRGLYVQGYSPTIHPTTSTDLSSFSTFDVTSGFATVNQNSGSRALKVTHGVVNAISWGFLLPAGAVTARYLRQMQSIGPTWFYIHAAIQLTGFLLGTIGFSIGIVLGHNSPGVTYGLHRSLGIATFTAAALQTLALLFRPKTTNKFRRYWKSYHHFVGYACVVMGVVNVFQGFEVLREGRSYAKLGYCLCLSTLVGVCVAMEVNSWVVFCRKAKEEKMKRDGLTGVDRCSGSHS

SEQ ID NO: 40238 - protein, 320 aa, Arabidopsis thaliana
  peptide (1)..(320): Ceres Seq. ID no. 12395825
  misc_feature (1)..(142): Pfam Name: Protein of unknown function (DUF568) Pfam Description: Protein of unknown function (DUF568)
  misc_feature (1)..(305): Homolog of NCBI NO: 18404500 NR Description: expressed protein
  misc_feature (1)..(305): Homolog of NCBI NO: 21593814 NR Description: unknown [Arabidopsis thaliana]
  misc_feature (1)..(305): Homolog of NCBI NO: 15235545 NR Description: putative protein
  misc_feature (1)..(300): Homolog of NCBI NO: 21592781 NR Description: putative membrane protein [Arabidopsis thaliana]
  misc_feature (1)..(300): Homolog of NCBI NO: 18421491 NR Description: Expressed protein
  misc_feature (1)..(124): Homolog of NCBI NO: 25411125 NR Description: hypothetical protein At2g04850 [imported] -
  misc_feature (44)..(320): Homolog of NCBI NO: 25411125 NR Description: hypothetical protein At2g04850 [imported] -
  misc_feature (1)..(306): Homolog of NCBI NO: 24414274 NR Description: Hypothetical protein [Oryza sativa (japonica
  misc_feature (1)..(320): Homolog of NCBI NO: 18395877 NR Description: expressed protein
  misc_feature (1)..(320): Homolog of NCBI NO: 21536849 NR Description: unknown [Arabidopsis thaliana]
MTGSRVLIAFPDPNSGQLILLPYVLDSSVKLQKGPLLSRPLDLVRLSSSSASLYGGKMATIRNGASVQIYASVKLSSNNTKIHHVWNRGLYVQGYSPTIHPTTSTDLSSFSTFDVTSGFATVNQNSGSRALKVTHGVVNAISWGFLLPAGAVTARYLRQMQSIGPTWFYIHAAIQLTGFLLGTIGFSIGIVLGHNSPGVTYGLHRSLGIATFTAAALQTLALLFRPKTTNKFRRYWKSYHHFVGYACVVMGVVNVFQGFEVLREGRSYAKLGYCLCLSTLVGVCVAMEVNSWVVFCRKAKEEKMKRDGLTGVDRCSGSHS

SEQ ID NO: 40239 - DNA, 946 bp, Arabidopsis thaliana
  misc_feature (1)..(946): Ceres Seq. ID no. 12325904
  misc_feature: MA Experiment ID: 108434 Result: Up-regulated in Transcription
  misc_feature: MA Experiment 108434 PARAMETER Experiment Name: At_Root_Tips_cDNA_P Parameter: Tissue Value: Root Tips
  misc_feature: MA Experiment ID: 108462 Result: Down-regulated in Transcription
  misc_feature: MA Experiment 108462 PARAMETER Experiment Name: At_Germinating_Seeds_cDNA_P Parameter: Age (day) Value: 2 vs. 0
  misc_feature: MA Experiment 108462 PARAMETER Experiment Name: At_Germinating_Seeds_cDNA_P Parameter: Tissue Value: Germinating Seeds
  misc_feature: MA Experiment ID: 108463 Result: Down-regulated in Transcription
  misc_feature: MA Experiment 108463 PARAMETER Experiment Name: At_Germinating_Seeds_cDNA_P Parameter: Age (day) Value: 3 vs. 0
  misc_feature: MA Experiment 108463 PARAMETER Experiment Name: At_Germinating_Seeds_cDNA_P Parameter: Tissue Value: Germinating Seeds
  misc_feature: MA Experiment ID: 108464 Result: Down-regulated in Transcription
  misc_feature: MA Experiment 108464 PARAMETER Experiment Name: At_Germinating_Seeds_cDNA_P Parameter: Age (day) Value: 4 vs. 0
  misc_feature: MA Experiment 108464 PARAMETER Experiment Name: At_Germinating_Seeds_cDNA_P Parameter: Tissue Value: Germinating Seeds
  misc_feature: MA Experiment ID: 108573 Result: Down-regulated in Transcription
  misc_feature: MA Experiment 108573 PARAMETER Experiment Name: At_Drought_cDNA_P Parameter: Timepoint (hr) Value: 6
  misc_feature: MA Experiment 108573 PARAMETER Experiment Name: At_Drought_cDNA_P Parameter: Tissue Value: Aerial
  misc_feature: MA Experiment 108573 PARAMETER Experiment Name: At_Drought_cDNA_P Parameter: Treatment Value: Drought vs. No Drought
  misc_feature: MA Experiment ID: 108595 Result: Down-regulated in Transcription
  misc_feature: MA Experiment 108595 PARAMETER Experiment Name: At_Ler-pi_Ovule_cDNA_P Parameter: Plant Line Value: null
  misc_feature: MA Experiment ID: 20000071 Result: Down-regulated in Transcription
  misc_feature: MA Experiment 20000071 PARAMETER Experiment Name: At_100uM_ABA_Mutants_cDNA_P Parameter: Plant Line Value: CS8104
  misc_feature: MA Experiment 20000071 PARAMETER Experiment Name: At_100uM_ABA_Mutants_cDNA_P Parameter: Timepoint (hr) Value: 6
  misc_feature: MA Experiment 20000071 PARAMETER Experiment Name: At_100uM_ABA_Mutants_cDNA_P Parameter: Tissue Value: Aerial
  misc_feature: MA Experiment 20000071 PARAMETER Experiment Name: At_100uM_ABA_Mutants_cDNA_P Parameter: Treatment Value: 100uM ABA vs. No Treatment
  misc_feature: MA Experiment ID: 20000072 Result: Down-regulated in Transcription
  misc_feature: MA Experiment 20000072 PARAMETER Experiment Name: At_100uM_ABA_Mutants_cDNA_P Parameter: Plant Line Value: CS8105
  misc_feature: MA Experiment 20000072 PARAMETER Experiment Name: At_100uM_ABA_Mutants_cDNA_P Parameter: Timepoint (hr) Value: 6
  misc_feature: MA Experiment 20000072 PARAMETER Experiment Name: At_100uM_ABA_Mutants_cDNA_P Parameter: Tissue Value: Aerial
  misc_feature: MA Experiment 20000072 PARAMETER Experiment Name: At_100uM_ABA_Mutants_cDNA_P Parameter: Treatment Value: 100uM ABA vs. No Treatment
  misc_feature: MA Experiment ID: 20000087 Result: Down-regulated in Transcription
  misc_feature: MA Experiment 20000087 PARAMETER Experiment Name: At_100uM_ABA_Mutants_cDNA_P Parameter: Plant Line Value: WS
  misc_feature: MA Experiment 20000087 PARAMETER Experiment Name: At_100uM_ABA_Mutants_cDNA_P Parameter: Timepoint (hr) Value: 6
  misc_feature: MA Experiment 20000087 PARAMETER Experiment Name: At_100uM_ABA_Mutants_cDNA_P Parameter: Tissue Value: Aerial
  misc_feature: MA Experiment 20000087 PARAMETER Experiment Name: At_100uM_ABA_Mutants_cDNA_P Parameter: Treatment Value: 100uM ABA vs. No Treatment
  misc_feature: MA Experiment ID: 20000111 Result: Up-regulated in Transcription
  misc_feature: MA Experiment 20000111 PARAMETER Experiment Name: At_42deg_Heat_cDNA_P Parameter: Temperature (deg C) Value: 42 vs. 22
  misc_feature: MA Experiment 20000111 PARAMETER Experiment Name: At_42deg_Heat_cDNA_P Parameter: Timepoint (hr) Value: 6
  misc_feature: MA Experiment 20000111 PARAMETER Experiment Name: At_42deg_Heat_cDNA_P Parameter: Tissue Value: Aerial
  misc_feature: MA Experiment ID: 20000113 Result: Up-regulated in Transcription
  misc_feature: MA Experiment 20000113 PARAMETER Experiment Name: At_42deg_Heat_cDNA_P Parameter: Temperature (deg C) Value: 42 vs. 22
  misc_feature: MA Experiment 20000113 PARAMETER Experiment Name: At_42deg_Heat_cDNA_P Parameter: Timepoint (hr) Value: 8
  misc_feature: MA Experiment 20000113 PARAMETER Experiment Name: At_42deg_Heat_cDNA_P Parameter: Tissue Value: Aerial
  misc_feature: MA Experiment ID: 20000173 Result: Up-regulated in Transcription
  misc_feature: MA Experiment 20000173 PARAMETER Experiment Name: At_42deg_Heat_P Parameter: Age (day) Value: 14
  misc_feature: MA Experiment 20000173 PARAMETER Experiment Name: At_42deg_Heat_P Parameter: Organism Value: A. thaliana
  misc_feature: MA Experiment 20000173 PARAMETER Experiment Name: At_42deg_Heat_P Parameter: Plant Line Value: WS
  misc_feature: MA Experiment 20000173 PARAMETER Experiment Name: At_42deg_Heat_P Parameter: Temperature (deg C) Value: 42 vs. 22
  misc_feature: MA Experiment 20000173 PARAMETER Experiment Name: At_42deg_Heat_P Parameter: Timepoint (hr) Value: 6
  misc_feature: MA Experiment 20000173 PARAMETER Experiment Name: At_42deg_Heat_P Parameter: Tissue Value: Aerial
  misc_feature: MA Experiment ID: 20000437 Result: Down-regulated in Transcription
  misc_feature: MA Experiment 20000437 PARAMETER Experiment Name: At_Drought_P Parameter: Age (day) Value: 8
  misc_feature: MA Experiment 20000437 PARAMETER Experiment Name: At_Drought_P Parameter: Organism Value: A. thaliana
  misc_feature: MA Experiment 20000437 PARAMETER Experiment Name: At_Drought_P Parameter: Plant Line Value: WS
  misc_feature: MA Experiment 20000437 PARAMETER Experiment Name: At_Drought_P Parameter: Timepoint (hr) Value: 24
  misc_feature: MA Experiment 20000437 PARAMETER Experiment Name: At_Drought_P Parameter: Tissue Value: Whole Plant
  misc_feature: MA Experiment 20000437 PARAMETER Experiment Name: At_Drought_P Parameter: Treatment Value: Drought vs. No Drought
  misc_feature: MA Experiment ID: 20000439 Result: Down-regulated in Transcription
  misc_feature: MA Experiment 20000439 PARAMETER Experiment Name: At_Roots__P Parameter: Age (day) Value: 14 vs. 21
  misc_feature: MA Experiment 20000439 PARAMETER Experiment Name: At_Roots__P Parameter: Organism Value: A. thaliana
  misc_feature: MA Experiment 20000439 PARAMETER Experiment Name: At_Roots__P Parameter: Tissue Value: Roots vs. Whole Plant
  misc_feature: MA Experiment ID: 20000573 Result: Down-regulated in Transcription
  misc_feature: MA Experiment 20000573 PARAMETER Experiment Name: At_100uM_ABA_Mutants__P Parameter: Organism Value: A. thaliana
  misc_feature: MA Experiment 20000573 PARAMETER Experiment Name: At_100uM_ABA_Mutants__P Parameter: Plant Line Value: CS22 vs. Ler wt
  misc_feature: MA Experiment 20000573 PARAMETER Experiment Name: At_100uM_ABA_Mutants__P Parameter: Timepoint (hr) Value: N/A
  misc_feature: MA Experiment 20000573 PARAMETER Experiment Name: At_100uM_ABA_Mutants__P Parameter: Tissue Value: Whole Plant
  misc_feature: MA Experiment 20000573 PARAMETER Experiment Name: At_100uM_ABA_Mutants__P Parameter: Treatment Value: None
  misc_feature: MA Experiment ID: 20000574 Result: Down-regulated in Transcription
  misc_feature: MA Experiment 20000574 PARAMETER Experiment Name: At_100uM_ABA_Mutants__P Parameter: Organism Value: A. thaliana
  misc_feature: MA Experiment 20000574 PARAMETER Experiment Name: At_100uM_ABA_Mutants__P Parameter: Plant Line Value: CS23 vs. Ler wt
  misc_feature: MA Experiment 20000574 PARAMETER Experiment Name: At_100uM_ABA_Mutants__P Parameter: Timepoint (hr) Value: N/A
  misc_feature: MA Experiment 20000574 PARAMETER Experiment Name: At_100uM_ABA_Mutants__P Parameter: Tissue Value: Whole Plant
  misc_feature: MA Experiment 20000574 PARAMETER Experiment Name: At_100uM_ABA_Mutants__P Parameter: Treatment Value: None
  misc_feature: MA Experiment ID: 20000794 Result: Down-regulated in Transcription
  misc_feature: MA Experiment 20000794 PARAMETER Experiment Name: At_Petals_P Parameter: Age (day) Value: 23-25 days
  misc_feature: MA Experiment 20000794 PARAMETER Experiment Name: At_Petals_P Parameter: Plant Line Value: WS
  misc_feature: MA Experiment 20000794 PARAMETER Experiment Name: At_Petals_P Parameter: Tissue Value: Petals vs. Whole plant
  misc_feature: MA Experiment ID: 20001248 Result: Down-regulated in Transcription
  misc_feature: MA Experiment 20001248 PARAMETER Experiment Name: At_Far-red-induction_P Parameter: Age (day) Value: 7
  misc_feature: MA Experiment 20001248 PARAMETER Experiment Name: At_Far-red-induction_P Parameter: Light Value: Far-red vs. White
  misc_feature: MA Experiment 20001248 PARAMETER Experiment Name: At_Far-red-induction_P Parameter: Organism Value: A. thaliana
  misc_feature: MA Experiment 20001248 PARAMETER Experiment Name: At_Far-red-induction_P Parameter: Plant Line Value: Columbia
  misc_feature: MA Experiment 20001248 PARAMETER Experiment Name: At_Far-red-induction_P Parameter: Timepoint (hr) Value: 4
  misc_feature: MA Experiment 20001248 PARAMETER Experiment Name: At_Far-red-induction_P Parameter: Tissue Value: Whole Plant
  misc_feature: MA Experiment ID: 20001558 Result: Up-regulated in Transcription
  misc_feature: MA Experiment 20001558 PARAMETER Experiment Name: At_Drought_Soil_Dry_P Parameter: Age (day) Value: 27
  misc_feature: MA Experiment 20001558 PARAMETER Experiment Name: At_Drought_Soil_Dry_P Parameter: Organism Value: A. thaliana
  misc_feature: MA Experiment 20001558 PARAMETER Experiment Name: At_Drought_Soil_Dry_P Parameter: Plant Line Value: WS
  misc_feature: MA Experiment 20001558 PARAMETER Experiment Name: At_Drought_Soil_Dry_P Parameter: Post Timepoint (hr) Value: 6
  misc_feature: MA Experiment 20001558 PARAMETER Experiment Name: At_Drought_Soil_Dry_P Parameter: Post-Treatment Value: Re-Water vs. No Drought
  misc_feature: MA Experiment 20001558 PARAMETER Experiment Name: At_Drought_Soil_Dry_P Parameter: Timepoint (day) Value: 13
  misc_feature: MA Experiment 20001558 PARAMETER Experiment Name: At_Drought_Soil_Dry_P Parameter: Treatment Value: Drought vs. No Drought
  misc_feature: MA Experiment ID: 20001560 Result: Up-regulated in Transcription
  misc_feature: MA Experiment 20001560 PARAMETER Experiment Name: At_Drought_Soil_Dry_P Parameter: Age (day) Value: 28
  misc_feature: MA Experiment 20001560 PARAMETER Experiment Name: At_Drought_Soil_Dry_P Parameter: Organism Value: A. thaliana
  misc_feature: MA Experiment 20001560 PARAMETER Experiment Name: At_Drought_Soil_Dry_P Parameter: Plant Line Value: WS
  misc_feature: MA Experiment 20001560 PARAMETER Experiment Name: At_Drought_Soil_Dry_P Parameter: Post Timepoint (hr) Value: None
  misc_feature: MA Experiment 20001560 PARAMETER Experiment Name: At_Drought_Soil_Dry_P Parameter: Post-Treatment Value: None
  misc_feature: MA Experiment 20001560 PARAMETER Experiment Name: At_Drought_Soil_Dry_P Parameter: Timepoint (day) Value: 14
  misc_feature: MA Experiment 20001560 PARAMETER Experiment Name: At_Drought_Soil_Dry_P Parameter: Treatment Value: Drought vs. No Drought
acagtcgtcactcaccacctcaccgacctcaccgttccttatccatttggctgacgcaaaatcgaatcggaaccctaaaatctctccgaaagccatgtctcctcctcctgctgtagtcactgaatctgccgatggacaacctgagcaaccaccggttaccgccattgctgaagagctggagaaaaagcttcagactgatgaaccgattgtagaagatgttaaagatgatgaagacgatgatgatgatgacgaagaagaggaagacgacgatgctcaaggtgtaagtggaagttcaaagcagagtagaagtgaaaagaagagtaggaaggcgatgttgaagctcggtatgaaacctgtcactggtgttagtcgagtaaccatcaagagaacgaaaaacgttctcttctttatctctaagcctgatgtctttaagagcccgcattcagaaacctatgttatattcggtgaggccaagatcgaggatttgagctctcagcttcaaacgcaagctgctcaacagtttaagatgcctgaaattggagccacatctcagagagcagaggcatcgacagccactgtagaagcacaggtggaagaagatgaagaggaaatcgatgagaccggtgtggaggctcgtgacattgacttggtcatgactcaggctggagtttctcgtagcaaagcggttaaagcactcaagagtcacgatggagacattgtaagtgcaataatggaactcactacttgagagttaagagagattgagtctctatgctttattcacttgcagattgttttcaaatacttttggatttatcaggaaattggattattgttgtccttacgagtatctaatctagtttgtttgttatgatgcttatgcagtatctgagttgtactgtgtttttcacgacaatgtattggagaaaatacatatcaaaattcg

SEQ ID NO: 40240 - protein, 248 aa, Arabidopsis thaliana
  peptide (1)..(248): Ceres Seq. ID no. 12325905
  misc_feature (102)..(161): Pfam Name: NAC domain Pfam Description: NAC domain
  misc_feature (46)..(248): Homolog of NCBI NO: 21536597 NR Description: putative alpha NAC [Arabidopsis thaliana]
  misc_feature (46)..(248): Homolog of NCBI NO: 18398710 NR Description: expressed protein
  misc_feature (48)..(248): Homolog of NCBI NO: 15230476 NR Description: nascent polypeptide associated complex alpha
  misc_feature (39)..(248): Homolog of NCBI NO: 32352154 NR Description: nascent polypeptide associated complex alpha
  misc_feature (36)..(94): Homolog of NCBI NO: 4115918 NR Description: similar to nascent polypeptide associated complex
  misc_feature (93)..(248): Homolog of NCBI NO: 4115918 NR Description: similar to nascent polypeptide associated complex
  misc_feature (36)..(247): Homolog of NCBI NO: 34902238 NR Description: Putative nascent polypeptide associated complex
  misc_feature (36)..(248): Homolog of NCBI NO: 15235122 NR Description: putative alpha NAC
  misc_feature (32)..(248): Homolog of NCBI NO: 15229149 NR Description: alpha NAC-like protein
  misc_feature (32)..(248): Homolog of NCBI NO: 13899101 NR Description: alpha NAC-like protein [Arabidopsis thaliana]
QSSLTTSPTSPFLIHLADAKSNRNPKISPKAMSPPPAVVTESADGQPEQPPVTAIAEELEKKLQTDEPIVEDVKDDEDDDDDDEEEEDDDAQGVSGSSKQSRSEKKSRKAMLKLGMKPVTGVSRVTIKRTKNVLFFISKPDVFKSPHSETYVIFGEAKIEDLSSQLQTQAAQQFKMPEIGATSQRAEASTATVEAQVEEDEEEIDETGVEARDIDLVMTQAGVSRSKAVKALKSHDGDIVSAIMELTT

SEQ ID NO: 40241 - protein, 217 aa, Arabidopsis thaliana
  peptide (1)..(217): Ceres Seq. ID no. 12325906
  misc_feature (71)..(130): Pfam Name: NAC domain Pfam Description: NAC domain
  misc_feature (15)..(217): Homolog of NCBI NO: 21536597 NR Description: putative alpha NAC [Arabidopsis thaliana]
  misc_feature (15)..(217): Homolog of NCBI NO: 18398710 NR Description: expressed protein
  misc_feature (17)..(217): Homolog of NCBI NO: 15230476 NR Description: nascent polypeptide associated complex alpha
  misc_feature (8)..(217): Homolog of NCBI NO: 32352154 NR Description: nascent polypeptide associated complex alpha
  misc_feature (5)..(63): Homolog of NCBI NO: 4115918 NR Description: similar to nascent polypeptide associated complex
  misc_feature (62)..(217): Homolog of NCBI NO: 4115918 NR Description: similar to nascent polypeptide associated complex
  misc_feature (5)..(216): Homolog of NCBI NO: 34902238 NR Description: Putative nascent polypeptide associated complex
  misc_feature (5)..(217): Homolog of NCBI NO: 15235122 NR Description: putative alpha NAC
  misc_feature (1)..(217): Homolog of NCBI NO: 15229149 NR Description: alpha NAC-like protein
  misc_feature (1)..(217): Homolog of NCBI NO: 13899101 NR Description: alpha NAC-like protein [Arabidopsis thaliana]
MSPPPAVVTESADGQPEQPPVTAIAEELEKKLQTDEPIVEDVKDDEDDDDDDEEEEDDDAQGVSGSSKQSRSEKKSRKAMLKLGMKPVTGVSRVTIKRTKNVLFFISKPDVFKSPHSETYVIFGEAKIEDLSSQLQTQAAQQFKMPEIGATSQRAEASTATVEAQVEEDEEEIDETGVEARDIDLVMTQAGVSRSKAVKALKSHDGDIVSAIMELTT

SEQ ID NO: 40242 - protein, 138 aa, Arabidopsis thaliana
  peptide (1)..(138): Ceres Seq. ID no. 12325907
  misc_feature (1)..(51): Pfam Name: NAC domain Pfam Description: NAC domain
  misc_feature (1)..(138): Homolog of NCBI NO: 6752882 NR Description: nascent polypeptide associated complex alpha
  misc_feature (1)..(138): Homolog of NCBI NO: 21536597 NR Description: putative alpha NAC [Arabidopsis thaliana]
  misc_feature (1)..(138): Homolog of NCBI NO: 18398710 NR Description: expressed protein
  misc_feature (1)..(138): Homolog of NCBI NO: 15230476 NR Description: nascent polypeptide associated complex alpha
  misc_feature (1)..(138): Homolog of NCBI NO: 32352154 NR Description: nascent polypeptide associated complex alpha
  misc_feature (1)..(138): Homolog of NCBI NO: 4115918 NR Description: similar to nascent polypeptide associated complex
  misc_feature (1)..(137): Homolog of NCBI NO: 34902238 NR Description: Putative nascent polypeptide associated complex
  misc_feature (1)..(138): Homolog of NCBI NO: 15235122 NR Description: putative alpha NAC
  misc_feature (1)..(138): Homolog of NCBI NO: 15229149 NR Description: alpha NAC-like protein
  misc_feature (1)..(138): Homolog of NCBI NO: 13899101 NR Description: alpha NAC-like protein [Arabidopsis thaliana]
MLKLGMKPVTGVSRVTIKRTKNVLFFISKPDVFKSPHSETYVIFGEAKIEDLSSQLQTQAAQQFKMPEIGATSQRAEASTATVEAQVEEDEEEIDETGVEARDIDLVMTQAGVSRSKAVKALKSHDGDIVSAIMELTT

SEQ ID NO: 40243 - DNA, 1982 bp, Arabidopsis thaliana
  misc_feature (1)..(1982): Ceres Seq. ID no. 13576744
  misc_feature: MA Experiment ID: 108434 Result: Up-regulated in Transcription
  misc_feature: MA Experiment 108434 PARAMETER Experiment Name: At_Root_Tips_cDNA_P Parameter: Tissue Value: Root Tips
  misc_feature: MA Experiment ID: 108461 Result: Up-regulated in Transcription
  misc_feature: MA Experiment 108461 PARAMETER Experiment Name: At_Germinating_Seeds_cDNA_P Parameter: Age (day) Value: 1 vs. 0
  misc_feature: MA Experiment 108461 PARAMETER Experiment Name: At_Germinating_Seeds_cDNA_P Parameter: Tissue Value: Germinating Seeds
  misc_feature: MA Experiment ID: 20000111 Result: Down-regulated in Transcription
  misc_feature: MA Experiment 20000111 PARAMETER Experiment Name: At_42deg_Heat_cDNA_P Parameter: Temperature (deg C) Value: 42 vs. 22
  misc_feature: MA Experiment 20000111 PARAMETER Experiment Name: At_42deg_Heat_cDNA_P Parameter: Timepoint (hr) Value: 6
  misc_feature: MA Experiment 20000111 PARAMETER Experiment Name: At_42deg_Heat_cDNA_P Parameter: Tissue Value: Aerial
  misc_feature: MA Experiment ID: 20000113 Result: Down-regulated in Transcription
  misc_feature: MA Experiment 20000113 PARAMETER Experiment Name: At_42deg_Heat_cDNA_P Parameter: Temperature (deg C) Value: 42 vs. 22
  misc_feature: MA Experiment 20000113 PARAMETER Experiment Name: At_42deg_Heat_cDNA_P Parameter: Timepoint (hr) Value: 8
  misc_feature: MA Experiment 20000113 PARAMETER Experiment Name: At_42deg_Heat_cDNA_P Parameter: Tissue Value: Aerial
  misc_feature: MA Experiment ID: 20000173 Result: Down-regulated in Transcription
  misc_feature: MA Experiment 20000173 PARAMETER Experiment Name: At_42deg_Heat_P Parameter: Age (day) Value: 14
  misc_feature: MA Experiment 20000173 PARAMETER Experiment Name: At_42deg_Heat_P Parameter: Organism Value: A. thaliana
  misc_feature: MA Experiment 20000173 PARAMETER Experiment Name: At_42deg_Heat_P Parameter: Plant Line Value: WS
  misc_feature: MA Experiment 20000173 PARAMETER Experiment Name: At_42deg_Heat_P Parameter: Temperature (deg C) Value: 42 vs. 22
  misc_feature: MA Experiment 20000173 PARAMETER Experiment Name: At_42deg_Heat_P Parameter: Timepoint (hr) Value: 6
  misc_feature: MA Experiment 20000173 PARAMETER Experiment Name: At_42deg_Heat_P Parameter: Tissue Value: Aerial
  misc_feature: MA Experiment ID: 20000184 Result: Down-regulated in Transcription
  misc_feature: MA Experiment 20000184 PARAMETER Experiment Name: At_Shoots__P Parameter: Age (day) Value: 7
  misc_feature: MA Experiment 20000184 PARAMETER Experiment Name: At_Shoots__P Parameter: Tissue Value: Shoots vs. Whole Plant
  misc_feature: MA Experiment ID: 20000224 Result: Up-regulated in Transcription
  misc_feature: MA Experiment ID: 20000794 Result: Down-regulated in Transcription
  misc_feature: MA Experiment 20000794 PARAMETER Experiment Name: At_Petals_P Parameter: Age (day) Value: 23-25 days
  misc_feature: MA Experiment 20000794 PARAMETER Experiment Name: At_Petals_P Parameter: Plant Line Value: WS
  misc_feature: MA Experiment 20000794 PARAMETER Experiment Name: At_Petals_P Parameter: Tissue Value: Petals vs. Whole plant
  misc_feature: MA Experiment ID: 20001451 Result: Down-regulated in Transcription
  misc_feature: MA Experiment 20001451 PARAMETER Experiment Name: At_Far-red-induction_P Parameter: Age (day) Value: 7
  misc_feature: MA Experiment 20001451 PARAMETER Experiment Name: At_Far-red-induction_P Parameter: Light Value: Far-red vs. White
  misc_feature: MA Experiment 20001451 PARAMETER Experiment Name: At_Far-red-induction_P Parameter: Organism Value: A. thaliana
  misc_feature: MA Experiment 20001451 PARAMETER Experiment Name: At_Far-red-induction_P Parameter: Plant Line Value: Columbia
  misc_feature: MA Experiment 20001451 PARAMETER Experiment Name: At_Far-red-induction_P Parameter: Timepoint (hr) Value: 24
  misc_feature: MA Experiment 20001451 PARAMETER Experiment Name: At_Far-red-induction_P Parameter: Tissue Value: Whole Plant
aggttacttgttagatctcaacaaccaggtcgcacacactaaaatggcgttccgcgttttgctcctcttctcactcaccgcacttctcatcttctccgccgtttctccttctttcgccgcttcttcctccgacgacgttgacgatgaggatctcagcttcctcgaagatctcaaagaagacgacgttcccggcgctgactcactctcttcctcaactggatttgacgaattcgaaggaggagaagaagaagatcccgatatgtacaacgacgatgacgatgaagaaggagatttttccgatctaggtaatccggattccgatccgttaccgacgccggagattgatgagaaagacgttgtggttatcaaggagcgtaacttcactgatgtgattgagaataatcaatacgttttggttgagttttatgctccgtggtgtggtcattgtcagtctcttgctcctgagtatgctgctgctgccacggagcttaaggaagatggtgttgttttggctaagattgatgcgacggaggagaatgagttagctcaggagtatcgtgttcagggctttccgacgcttcttttcttcgttgatggtgagcacaagccttacactggaggaaggactaaagaaacaattgtgacatgggtgaagaagaagattggtcctggtgtgtataatctaactacattagatgatgctgagaaagtgttgacttctgggaacaaagttgttttgggatacttgaactccttggtgggtgttgagcacgatcagcttaatgctgcttccaaagctgaagacgatgtgaacttttatcaaacagtgaatcctgatgttgcaaagatgtttcaccttgatccggagtctaaaaggcctgctcttgtcctagttaagaaggaagaggagaaaattagccattttgatggagaatttgttaagtctgctctagttagttttgtgtctgccaacaagcttgctttggtctctgttttcaccagagagactgctccggaaatttttgagagtgcaatcaagaaacagttgttgttgtttgtaaccaaaaatgaatctgaaaaggttcttacggaatttcaagaagcagcgaaatcattcaaaggaaagctcatctttgtatctgtggatctggataatgaggattatgggaagccagtcgctgaatactttggtgtgtctggaaatggtcctaaacttattggctacacagggaatgaagaccctaaaaaatactttttcgatggcgagatccagtcagataaaattaagatatttggggaggatttcctgaacgacaagttaaagcctttctataagtcagaccccattcctgaaaagaacgatgaagatgtgaaaatagtggttggagataactttgatgaaattgttctggacgattctaaagatgtgcttctcgaggtctacgcaccatggtgtggccattgccaagcccttgagccaatgtataacaaacttgccaagcatttacgaagtattgattctctcgtcataaccaagatggatggaacaaccaatgaacatcccaaggcaaaggctgaggggttccctaccattctcttcttccctgcgggcaacaagacttcagagccgattactgtagatacagaccgcactgtggttgcattttacaagttcttaaggaaacacgcaacgatcccattcaaactggagaaacctgcatcaaccgaatcacctaaaactgcagagtccacaccaaaagtagaaactaccgagaccaaagaatcacccgatagcacgacaaagagtagccaaagtgactcgaaggacgaattgtgatcagaaaagggtataatatatattacatgtctccttaagttgttatatgtatgatcagaattgtcacatcatgagtttggactagataaagatgggaattaaagtaattttagttttgagaaagacaatttcttttgatttggtc

SEQ ID NO: 40244 - protein, 611 aa, Arabidopsis thaliana
  peptide (1)..(611): Ceres Seq. ID no. 13576745
  misc_feature (130)..(539): Homolog of NCBI NO: 15218191 NR Description: protein disulfide isomerase family [Arabidopsis
  misc_feature (109)..(611): Homolog of NCBI NO: 30923135 NR Description: Protein disulfide isomerase precursor (PDI)
  misc_feature (105)..(586): Homolog of NCBI NO: 7437394 NR Description: protein disulfide-isomerase (EC 5.3.4.1) RB60 -
  misc_feature (99)..(588): Homolog of NCBI NO: 5902592 NR Description: protein disulfide isomerase precursor
  misc_feature (113)..(611): Homolog of NCBI NO: 20805287 NR Description: protein disulfide isomerase-like PDI-M
  misc_feature (106)..(611): Homolog of NCBI NO: 20805285 NR Description: protein disulfide isomerase-like PDI-H
  misc_feature (10)..(594): Homolog of NCBI NO: 7437396 NR Description: protein disulfide-isomerase homolog F28P10.60 -
  misc_feature (155)..(584): Homolog of NCBI NO: 28140231 NR Description: protein disulphide isomerase [Elaeis guineensis]
  misc_feature (10)..(594): Homolog of NCBI NO: 22331799 NR Description: protein disulfide isomerase family [Arabidopsis
  misc_feature (15)..(545): Homolog of NCBI NO: 30697408 NR Description: protein disulfide isomerase family [Arabidopsis
GYLLDLNNQVAHTKMAFRVLLLFSLTALLIFSAVSPSFAASSSDDVDDEDLSFLEDLKEDDVPGADSLSSSTGFDEFEGGEEEDPDMYNDDDDEEGDFSDLGNPDSDPLPTPEIDEKDVVVIKERNFTDVIENNQYVLVEFYAPWCGHCQSLAPEYAAAATELKEDGVVLAKIDATEENELAQEYRVQGFPTLLFFVDGEHKPYTGGRTKETIVTWVKKKIGPGVYNLTTLDDAEKVLTSGNKVVLGYLNSLVGVEHDQLNAASKAEDDVNFYQTVNPDVAKMFHLDPESKRPALVLVKKEEEKISHFDGEFVKSALVSFVSANKLALVSVFTRETAPEIFESAIKKQLLLFVTKNESEKVLTEFQEAAKSFKGKLIFVSVDLDNEDYGKPVAEYFGVSGNGPKLIGYTGNEDPKKYFFDGEIQSDKIKIFGEDFLNDKLKPFYKSDPIPEKNDEDVKIVVGDNFDEIVLDDSKDVLLEVYAPWCGHCQALEPMYNKLAKHLRSIDSLVITKMDGTTNEHPKAKAEGFPTILFFPAGNKTSEPITVDTDRTVVAFYKFLRKHATIPFKLEKPASTESPKTAESTPKVETTETKESPDSTTKSSQSDSKDEL

SEQ ID NO: 40245 - protein, 597 aa, Arabidopsis thaliana
  peptide (1)..(597): Ceres Seq. ID no. 13576746
  misc_feature (116)..(525): Homolog of NCBI NO: 15218191 NR Description: protein disulfide isomerase family [Arabidopsis
  misc_feature (95)..(597): Homolog of NCBI NO: 30923135 NR Description: Protein disulfide isomerase precursor (PDI)
  misc_feature (91)..(572): Homolog of NCBI NO: 7437394 NR Description: protein disulfide-isomerase (EC 5.3.4.1) RB60 -
  misc_feature (85)..(574): Homolog of NCBI NO: 5902592 NR Description: protein disulfide isomerase precursor
  misc_feature (99)..(597): Homolog of NCBI NO: 20805287 NR Description: protein disulfide isomerase-like PDI-M
  misc_feature (92)..(597): Homolog of NCBI NO: 20805285 NR Description: protein disulfide isomerase-like PDI-H
  misc_feature (1)..(580): Homolog of NCBI NO: 7437396 NR Description: protein disulfide-isomerase homolog F28P10.60 -
  misc_feature (141)..(570): Homolog of NCBI NO: 28140231 NR Description: protein disulphide isomerase [Elaeis guineensis]
  misc_feature (1)..(580): Homolog of NCBI NO: 22331799 NR Description: protein disulfide isomerase family [Arabidopsis
  misc_feature (1)..(531): Homolog of NCBI NO: 30697408 NR Description: protein disulfide isomerase family [Arabidopsis
MAFRVLLLFSLTALLIFSAVSPSFAASSSDDVDDEDLSFLEDLKEDDVPGADSLSSSTGFDEFEGGEEEDPDMYNDDDDEEGDFSDLGNPDSDPLPTPEIDEKDVVVIKERNFTDVIENNQYVLVEFYAPWCGHCQSLAPEYAAAATELKEDGVVLAKIDATEENELAQEYRVQGFPTLLFFVDGEHKPYTGGRTKETIVTWVKKKIGPGVYNLTTLDDAEKVLTSGNKVVLGYLNSLVGVEHDQLNAASKAEDDVNFYQTVNPDVAKMFHLDPESKRPALVLVKKEEEKISHFDGEFVKSALVSFVSANKLALVSVFTRETAPEIFESAIKKQLLLFVTKNESEKVLTEFQEAAKSFKGKLIFVSVDLDNEDYGKPVAEYFGVSGNGPKLIGYTGNEDPKKYFFDGEIQSDKIKIFGEDFLNDKLKPFYKSDPIPEKNDEDVKIVVGDNFDEIVLDDSKDVLLEVYAPWCGHCQALEPMYNKLAKHLRSIDSLVITKMDGTTNEHPKAKAEGFPTILFFPAGNKTSEPITVDTDRTVVAFYKFLRKHATIPFKLEKPASTESPKTAESTPKVETTETKESPDSTTKSSQSDSKDEL

SEQ ID NO: 40246 - protein, 525 aa, Arabidopsis thaliana
  peptide (1)..(525): Ceres Seq. ID no. 13576747
  misc_feature (44)..(453): Homolog of NCBI NO: 15218191 NR Description: protein disulfide isomerase family [Arabidopsis
  misc_feature (23)..(525): Homolog of NCBI NO: 30923135 NR Description: Protein disulfide isomerase precursor (PDI)
  misc_feature (19)..(500): Homolog of NCBI NO: 7437394 NR Description: protein disulfide-isomerase (EC 5.3.4.1) RB60 -
  misc_feature (13)..(502): Homolog of NCBI NO: 5902592 NR Description: protein disulfide isomerase precursor
  misc_feature (27)..(525): Homolog of NCBI NO: 20805287 NR Description: protein disulfide isomerase-like PDI-M
  misc_feature (20)..(525): Homolog of NCBI NO: 20805285 NR Description: protein disulfide isomerase-like PDI-H
  misc_feature (1)..(508): Homolog of NCBI NO: 7437396 NR Description: protein disulfide-isomerase homolog F28P10.60 -
  misc_feature (69)..(498): Homolog of NCBI NO: 28140231 NR Description: protein disulphide isomerase [Elaeis guineensis]
  misc_feature (1)..(508): Homolog of NCBI NO: 22331799 NR Description: protein disulfide isomerase family [Arabidopsis
  misc_feature (1)..(459): Homolog of NCBI NO: 30697408 NR Description: protein disulfide isomerase family [Arabidopsis
MYNDDDDEEGDFSDLGNPDSDPLPTPEIDEKDVVVIKERNFTDVIENNQYVLVEFYAPWCGHCQSLAPEYAAAATELKEDGVVLAKIDATEENELAQEYRVQGFPTLLFFVDGEHKPYTGGRTKETIVTWVKKKIGPGVYNLTTLDDAEKVLTSGNKVVLGYLNSLVGVEHDQLNAASKAEDDVNFYQTVNPDVAKMFHLDPESKRPALVLVKKEEEKISHFDGEFVKSALVSFVSANKLALVSVFTRETAPEIFESAIKKQLLLFVTKNESEKVLTEFQEAAKSFKGKLIFVSVDLDNEDYGKPVAEYFGVSGNGPKLIGYTGNEDPKKYFFDGEIQSDKIKIFGEDFLNDKLKPFYKSDPIPEKNDEDVKIVVGDNFDEIVLDDSKDVLLEVYAPWCGHCQALEPMYNKLAKHLRSIDSLVITKMDGTTNEHPKAKAEGFPTILFFPAGNKTSEPITVDTDRTVVAFYKFLRKHATIPFKLEKPASTESPKTAESTPKVETTETKESPDSTTKSSQSDSKDEL

SEQ ID NO: 40247 - DNA, 1133 bp, Arabidopsis thaliana
  misc_feature (1)..(1133): Ceres Seq. ID no. 12327732
  misc_feature: MA Experiment ID: 108573 Result: Up-regulated in Transcription
  misc_feature: MA Experiment 108573 PARAMETER Experiment Name: At_Drought_cDNA_P Parameter: Timepoint (hr) Value: 6
  misc_feature: MA Experiment 108573 PARAMETER Experiment Name: At_Drought_cDNA_P Parameter: Tissue Value: Aerial
  misc_feature: MA Experiment 108573 PARAMETER Experiment Name: At_Drought_cDNA_P Parameter: Treatment Value: Drought vs. No Drought
  misc_feature: MA Experiment ID: 20000224 Result: Down-regulated in Transcription
ttctttcttcgtcttcaacttcttctaccgagattgattctatttcttccggatcttacgcaaccattactctcacctcaggcagaaatgtttctatgttgaagaagaaggaaatggttataagtcttggaagttttagtatcatcagttgtgtcttagaaaactgggaacggctcttttcctctgttaccatagctgagttagcttgagaaacttttgaattggattcagatcatgccttactttgctcagaggctttacaatacttgcaaggcgtctttctcttcagacggaccaataacagaagatgctctggagaaggttcgcaatgtcttggagaaaatcaagccatctgatgttggaattgagcaggatgctcaattggcacggtccaggtctggtcctctcaatgaacgcaatggaagtaatcagtctcccccagcaataaagtatcttcatttgcatgagtgtgacagtttctctatagtaatcttctgtatgccaccttcttctatgatacctcttcataaccatccgggcatgaccgtgctaagcaagctcgtttatggttcaatgcatgtgaagtcatatgattggctagagcctcaactgaccgaaccagaggatccatcacaagcaagacctgctaaactggtgaaggatactgagatgacggctcaaagcccagtaacaacattatatccgaaaagtggtggcaacattcactgtttcaaagccatcacccattgtgctattcttgacatcttagctccaccttactcttcagagcatgatcggcattgcacttacttccggaaatccagaagagaagacttaccaggtgaattagaagtggatggagaagtggtcacagacgtgacatggcttgaggaatttcaaccgcctgatgactttgtgatacgacgaattccgtacagaggtcctgtcattagaacttgatgatgatctaatctttacttgtcacataatttgggcggcttcgggtttttattttttatttatattcctttcggaaataatttggggggtctttttatattgcaaacgggattgtacatactaatttgtgatacaccgtgtgtctccgtttcattatattgcaaaagacttcc

SEQ ID NO: 40248 - protein, 241 aa, Arabidopsis thaliana
  peptide (1)..(241): Ceres Seq. ID no. 12327733
  misc_feature (6)..(240): Homolog of NCBI NO: 21618020 NR Description: unknown [Arabidopsis thaliana]
  misc_feature (6)..(240): Homolog of NCBI NO: 15242505 NR Description: putative protein
  misc_feature (6)..(240): Homolog of NCBI NO: 10176982 NR Description: contains similarity to unknown
  misc_feature (6)..(240): Homolog of NCBI NO: 18394617 NR Description: expressed protein
  misc_feature (6)..(239): Homolog of NCBI NO: 15242218 NR Description: putative protein; protein id: At5g15120.1
  misc_feature (1)..(240): Homolog of NCBI NO: 38345647 NR Description: OSJNBb0040D15.1 [Oryza sativa (japonica
  misc_feature (1)..(240): Homolog of NCBI NO: 15231104 NR Description: putative protein
  misc_feature (1)..(241): Homolog of NCBI NO: 25370572 NR Description: hypothetical protein At2g42670 [imported] -
  misc_feature (1)..(241): Homolog of NCBI NO: 18406030 NR Description: expressed protein
  misc_feature (1)..(241): Homolog of NCBI NO: 21536850 NR Description: unknown [Arabidopsis thaliana]
MPYFAQRLYNTCKASFSSDGPITEDALEKVRNVLEKIKPSDVGIEQDAQLARSRSGPLNERNGSNQSPPAIKYLHLHECDSFSIVIFCMPPSSMIPLHNHPGMTVLSKLVYGSMHVKSYDWLEPQLTEPEDPSQARPAKLVKDTEMTAQSPVTTLYPKSGGNIHCFKAITHCAILDILAPPYSSEHDRHCTYFRKSRREDLPGELEVDGEVVTDVTWLEEFQPPDDFVIRRIPYRGPVIRT

SEQ ID NO: 40249 - protein, 153 aa, Arabidopsis thaliana
  peptide (1)..(153): Ceres Seq. ID no. 12327734
  misc_feature (1)..(152): Homolog of NCBI NO: 21618020 NR Description: unknown [Arabidopsis thaliana]
  misc_feature (1)..(152): Homolog of NCBI NO: 15242505 NR Description: putative protein
  misc_feature (1)..(152): Homolog of NCBI NO: 10176982 NR Description: contains similarity to unknown
  misc_feature (1)..(152): Homolog of NCBI NO: 18394617 NR Description: expressed protein
  misc_feature (1)..(151): Homolog of NCBI NO: 15242218 NR Description: putative protein; protein id: At5g15120.1
  misc_feature (1)..(152): Homolog of NCBI NO: 38345647 NR Description: OSJNBb0040D15.1 [Oryza sativa (japonica
  misc_feature (1)..(152): Homolog of NCBI NO: 15231104 NR Description: putative protein
  misc_feature (1)..(153): Homolog of NCBI NO: 25370572 NR Description: hypothetical protein At2g42670 [imported] -
  misc_feature (1)..(153): Homolog of NCBI NO: 18406030 NR Description: expressed protein
  misc_feature (1)..(153): Homolog of NCBI NO: 21536850 NR Description: unknown [Arabidopsis thaliana]
MPPSSMIPLHNHPGMTVLSKLVYGSMHVKSYDWLEPQLTEPEDPSQARPAKLVKDTEMTAQSPVTTLYPKSGGNIHCFKAITHCAILDILAPPYSSEHDRHCTYFRKSRREDLPGELEVDGEVVTDVTWLEEFQPPDDFVIRRIPYRGPVIRT

SEQ ID NO: 40250 - protein, 148 aa, Arabidopsis thaliana
  peptide (1)..(148): Ceres Seq. ID no. 12327735
  misc_feature (1)..(147): Homolog of NCBI NO: 21618020 NR Description: unknown [Arabidopsis thaliana]
  misc_feature (1)..(147): Homolog of NCBI NO: 15242505 NR Description: putative protein
  misc_feature (1)..(147): Homolog of NCBI NO: 10176982 NR Description: contains similarity to unknown
  misc_feature (1)..(147): Homolog of NCBI NO: 18394617 NR Description: expressed protein
  misc_feature (1)..(146): Homolog of NCBI NO: 15242218 NR Description: putative protein; protein id: At5g15120.1
  misc_feature (1)..(147): Homolog of NCBI NO: 38345647 NR Description: OSJNBb0040D15.1 [Oryza sativa (japonica
  misc_feature (1)..(147): Homolog of NCBI NO: 15231104 NR Description: putative protein
  misc_feature (1)..(148): Homolog of NCBI NO: 25370572 NR Description: hypothetical protein At2g42670 [imported] -
  misc_feature (1)..(148): Homolog of NCBI NO: 18406030 NR Description: expressed protein
  misc_feature (1)..(148): Homolog of NCBI NO: 21536850 NR Description: unknown [Arabidopsis thaliana]
MIPLHNHPGMTVLSKLVYGSMHVKSYDWLEPQLTEPEDPSQARPAKLVKDTEMTAQSPVTTLYPKSGGNIHCFKAITHCAILDILAPPYSSEHDRHCTYFRKSRREDLPGELEVDGEVVTDVTWLEEFQPPDDFVIRRIPYRGPVIRT

SEQ ID NO: 40251 - DNA, 1894 bp, Arabidopsis thaliana
  misc_feature (1)..(1894): Ceres Seq. ID no. 13495826
  misc_feature: MA Experiment ID: 108435 Result: Up-regulated in Transcription
  misc_feature: MA Experiment 108435 PARAMETER Experiment Name: At_stm_Mutants_cDNA_P Parameter: Plant Line Value: wt Landsburg vs stm
  misc_feature: MA Experiment 108435 PARAMETER Experiment Name: At_stm_Mutants_cDNA_P Parameter: Tissue Value: Shoot Apical Meristem Region
  misc_feature: MA Experiment ID: 108573 Result: Up-regulated in Transcription
  misc_feature: MA Experiment 108573 PARAMETER Experiment Name: At_Drought_cDNA_P Parameter: Timepoint (hr) Value: 6
  misc_feature: MA Experiment 108573 PARAMETER Experiment Name: At_Drought_cDNA_P Parameter: Tissue Value: Aerial
  misc_feature: MA Experiment 108573 PARAMETER Experiment Name: At_Drought_cDNA_P Parameter: Treatment Value: Drought vs. No Drought
  misc_feature: MA Experiment ID: 108595 Result: Down-regulated in Transcription
  misc_feature: MA Experiment 108595 PARAMETER Experiment Name: At_Ler-pi_Ovule_cDNA_P Parameter: Plant Line Value: null
  misc_feature: MA Experiment ID: 20000185 Result: Up-regulated in Transcription
  misc_feature: MA Experiment 20000185 PARAMETER Experiment Name: At_Roots__P Parameter: Age (day) Value: 7 vs. 21
  misc_feature: MA Experiment 20000185 PARAMETER Experiment Name: At_Roots__P Parameter: Organism Value: A. thaliana
  misc_feature: MA Experiment 20000185 PARAMETER Experiment Name: At_Roots__P Parameter: Tissue Value: Roots vs. Whole Plant
ggggaatgtgacaaagcaatctgggttgtctgattatttccaatgacttccttctctgtctgattcgtttgtttcggcgattcaactcttcttcaacgccctgagagtcacgcacgagaattggattgatggtttttcacacgcaggagaggcgattcgttgtcttcttcttgtcccgttgacctgtttcgatctcagatggtgattatgcagcagctgattctaaattagggcatttaaatccgccttccaggtgaatttttgaaaagtaattaaagggtgttcttgaatggacttgaaaatggataatgttattgggggaaagtttaaacttggtcggaagatcggtggtggctcttttggagaactttttcttgccgtaagtttgcaaaccggagaggaagcagctgttaagctggagcctgcgaaaactaagcatccccaacttcattatgagtcgaagatatacatgcttctacaaggaggaagtggcatccccagccttaagtggtttggggttcagggagactacaatgcgatggtcattgatctgcttgggccgagtttggaagacttgttcaactactgcaataggaggcttactttgaaggcagttttgatgcttgcagatcaactgattagcagagttgaatatatgcattcaagggggtttcttcaccgtgacatcaaacctgacaatttcttgatgggacttggtcgcaaagcaaaccaggtgtatatcattgattttgggcttgcaaagaagtatagggatctccaaacacataggcatatcccctatagagaaaacaagaaccttacgggcacagctcggtatgctagtgtcaacactcacctaggagttgagcaaagtaggagggatgatctggagtctcttggttacgtactcatgtatttcctgagaggaagcttaccgtggcagggactaaaagctggcacaaagaagcaaaagtatgacagaattagcgagaagaaagtatcaactcctatagaggtcttgtgcaagtcatatccacccgaattcgtatcatactttcaatactgcagatctctgcgattcgaagacaaaccagactactcatatctaaagagacttttccgagacttgtttatccgtgaaggttatcagtttgattatgtattcgactggactgcattgaaacaccctcagagtagtgccaggtcccattccagtacacatgaaaggcatcgtaccggtaaaccagggatgggtgcgggaccgtctgctgaaaaacctgaaaggatttcagtagggaacatccgcgataaattctcaggtgcggtcgaagcatttgcgagaaggaacgttagaggacccagtccccatcaaaaccataccagacatcgaactcttgacgaaattccttcaatgaaacctgctgtgaatatggtatctgagaaaggaagaaacacttccagatacggcagtgcttcgaggagagcagtagcctcaggaagtagaccaagctcatcaggtgaacaaagggagagccgggactcgagccgcgtagcctcaagcggtggcggtgtccgaccatcagtcttccaaagaacccaagcagcagctgctgtgagtggatacgagtcaaagacagcatctgcctttaaccgcgaccgagtagccgcttcaagaacagcacgagacgaggctctcagaagcttcgagcttctttcgatccgcaaatgaagccttcatcaattggctctttgctgtaaattggattcttctttacatatgttgtttggtcctttgtttccacgaaactcccaatttttcatgtattatcaaattctctggattttgtatcaatttttacacactttattgtaatcatgacaatttgttgagttt

SEQ ID NO: 40252 - protein, 479 aa, Arabidopsis thaliana
  peptide (1)..(479): Ceres Seq. ID no. 13495827
  misc_feature (5)..(477): Homolog of NCBI NO: 15219733 NR Description: casein kinase, putative [Arabidopsis thaliana]
  misc_feature (4)..(446): Homolog of NCBI NO: 15236471 NR Description: casein kinase I (CKI1) [Arabidopsis thaliana]
  misc_feature (5)..(440): Homolog of NCBI NO: 15229427 NR Description: casein kinase, putative [Arabidopsis thaliana]
  misc_feature (5)..(316): Homolog of NCBI NO: 7434306 NR Description: probable protein kinase (EC 2.7.1.-) F20O9.240 -
  misc_feature (5)..(477): Homolog of NCBI NO: 15239840 NR Description: casein kinase I, putative [Arabidopsis thaliana]
  misc_feature (5)..(479): Homolog of NCBI NO: 30678728 NR Description: protein kinase (ADK1) [Arabidopsis thaliana]
  misc_feature (5)..(479): Homolog of NCBI NO: 18087640 NR Description: AT5g44100/MLN1_2 [Arabidopsis thaliana]
  misc_feature (5)..(479): Homolog of NCBI NO: 15240091 NR Description: casein kinase, putative [Arabidopsis thaliana]
  misc_feature (5)..(479): Homolog of NCBI NO: 21536851 NR Description: protein kinase ADK1-like protein [Arabidopsis
  misc_feature (1)..(479): Homolog of NCBI NO: 18417216 NR Description: casein kinase, putative [Arabidopsis thaliana]
MDLKMDNVIGGKFKLGRKIGGGSFGELFLAVSLQTGEEAAVKLEPAKTKHPQLHYESKIYMLLQGGSGIPSLKWFGVQGDYNAMVIDLLGPSLEDLFNYCNRRLTLKAVLMLADQLISRVEYMHSRGFLHRDIKPDNFLMGLGRKANQVYIIDFGLAKKYRDLQTHRHIPYRENKNLTGTARYASVNTHLGVEQSRRDDLESLGYVLMYFLRGSLPWQGLKAGTKKQKYDRISEKKVSTPIEVLCKSYPPEFVSYFQYCRSLRFEDKPDYSYLKRLFRDLFIREGYQFDYVFDWTALKHPQSSARSHSSTHERHRTGKPGMGAGPSAEKPERISVGNIRDKFSGAVEAFARRNVRGPSPHQNHTRHRTLDEIPSMKPAVNMVSEKGRNTSRYGSASRRAVASGSRPSSSGEQRESRDSSRVASSGGGVRPSVFQRTQAAAAVSGYESKTASAFNRDRVAASRTARDEALRSFELLSIRK

SEQ ID NO: 40253 - protein, 475 aa, Arabidopsis thaliana
  peptide (1)..(475): Ceres Seq. ID no. 13495828
  misc_feature (1)..(473): Homolog of NCBI NO: 15219733 NR Description: casein kinase, putative [Arabidopsis thaliana]
  misc_feature (1)..(442): Homolog of NCBI NO: 15236471 NR Description: casein kinase I (CKI1) [Arabidopsis thaliana]
  misc_feature (1)..(436): Homolog of NCBI NO: 15229427 NR Description: casein kinase, putative [Arabidopsis thaliana]
  misc_feature (1)..(312): Homolog of NCBI NO: 7434306 NR Description: probable protein kinase (EC 2.7.1.-) F20O9.240 -
  misc_feature (1)..(473): Homolog of NCBI NO: 15239840 NR Description: casein kinase I, putative [Arabidopsis thaliana]
  misc_feature (1)..(475): Homolog of NCBI NO: 30678728 NR Description: protein kinase (ADK1) [Arabidopsis thaliana]
  misc_feature (1)..(475): Homolog of NCBI NO: 18087640 NR Description: AT5g44100/MLN1_2 [Arabidopsis thaliana]
  misc_feature (1)..(475): Homolog of NCBI NO: 15240091 NR Description: casein kinase, putative [Arabidopsis thaliana]
  misc_feature (1)..(475): Homolog of NCBI NO: 21536851 NR Description: protein kinase ADK1-like protein [Arabidopsis
  misc_feature (1)..(475): Homolog of NCBI NO: 18417216 NR Description: casein kinase, putative [Arabidopsis thaliana]
MDNVIGGKFKLGRKIGGGSFGELFLAVSLQTGEEAAVKLEPAKTKHPQLHYESKIYMLLQGGSGIPSLKWFGVQGDYNAMVIDLLGPSLEDLFNYCNRRLTLKAVLMLADQLISRVEYMHSRGFLHRDIKPDNFLMGLGRKANQVYIIDFGLAKKYRDLQTHRHIPYRENKNLTGTARYASVNTHLGVEQSRRDDLESLGYVLMYFLRGSLPWQGLKAGTKKQKYDRISEKKVSTPIEVLCKSYPPEFVSYFQYCRSLRFEDKPDYSYLKRLFRDLFIREGYQFDYVFDWTALKHPQSSARSHSSTHERHRTGKPGMGAGPSAEKPERISVGNIRDKFSGAVEAFARRNVRGPSPHQNHTRHRTLDEIPSMKPAVNMVSEKGRNTSRYGSASRRAVASGSRPSSSGEQRESRDSSRVASSGGGVRPSVFQRTQAAAAVSGYESKTASAFNRDRVAASRTARDEALRSFELLSIRK

SEQ ID NO: 40254 - protein, 419 aa, Arabidopsis thaliana
  peptide (1)..(419): Ceres Seq. ID no. 13495829
  misc_feature (1)..(417): Homolog of NCBI NO: 15219733 NR Description: casein kinase, putative [Arabidopsis thaliana]
  misc_feature (1)..(386): Homolog of NCBI NO: 15236471 NR Description: casein kinase I (CKI1) [Arabidopsis thaliana]
  misc_feature (1)..(380): Homolog of NCBI NO: 15229427 NR Description: casein kinase, putative [Arabidopsis thaliana]
  misc_feature (1)..(256): Homolog of NCBI NO: 7434306 NR Description: probable protein kinase (EC 2.7.1.-) F20O9.240 -
  misc_feature (1)..(417): Homolog of NCBI NO: 15239840 NR Description: casein kinase I, putative [Arabidopsis thaliana]
  misc_feature (1)..(419): Homolog of NCBI NO: 30678728 NR Description: protein kinase (ADK1) [Arabidopsis thaliana]
  misc_feature (1)..(419): Homolog of NCBI NO: 18087640 NR Description: AT5g44100/MLN1_2 [Arabidopsis thaliana]
  misc_feature (1)..(419): Homolog of NCBI NO: 15240091 NR Description: casein kinase, putative [Arabidopsis thaliana]
  misc_feature (1)..(419): Homolog of NCBI NO: 21536851 NR Description: protein kinase ADK1-like protein [Arabidopsis
  misc_feature (1)..(419): Homolog of NCBI NO: 18417216 NR Description: casein kinase, putative [Arabidopsis thaliana]
MLLQGGSGIPSLKWFGVQGDYNAMVIDLLGPSLEDLFNYCNRRLTLKAVLMLADQLISRVEYMHSRGFLHRDIKPDNFLMGLGRKANQVYIIDFGLAKKYRDLQTHRHIPYRENKNLTGTARYASVNTHLGVEQSRRDDLESLGYVLMYFLRGSLPWQGLKAGTKKQKYDRISEKKVSTPIEVLCKSYPPEFVSYFQYCRSLRFEDKPDYSYLKRLFRDLFIREGYQFDYVFDWTALKHPQSSARSHSSTHERHRTGKPGMGAGPSAEKPERISVGNIRDKFSGAVEAFARRNVRGPSPHQNHTRHRTLDEIPSMKPAVNMVSEKGRNTSRYGSASRRAVASGSRPSSSGEQRESRDSSRVASSGGGVRPSVFQRTQAAAAVSGYESKTASAFNRDRVAASRTARDEALRSFELLSIRK

SEQ ID NO: 40255 - DNA, 800 bp, Arabidopsis thaliana
  misc_feature (1)..(800): Ceres Seq. ID no. 12323263
  misc_feature: MA Experiment ID: 108488 Result: Down-regulated in Transcription
  misc_feature: MA Experiment ID: 20000224 Result: Down-regulated in Transcription
aaaaagagaaacttaaaaaaaatcgatcctttaagttaaagtttgtatctttcgattgttttgttccgacccttgtaaaatttgttctcaggaaattaaaaaaggttggattttgatcgatgggttcttcgtcaggacaacccgaatttgattacttgtttaaggttttattgatcggagattctggtgttggaaagagctctcttttgttgagtttcacatctaatacctttgatgatctttctccaacgattggtgtggattttaaggttaagtatctgacaattggagaaaagaaactcaagcttgcgatttgggatacagctgggcaagagagatttaggacgctaacaagttcgtattacagaggagctcagggtataattatggtatatgatgtgacacgaagagacacgttcacaaacctatcagacatatgggctaaggaaatcgacctctattcgactaatcaggattgcattaagatgcttgtcgggaataaagttgataaggagagtgaaagagctgtttctaaaaaagaaggcatagactttgctcgggagtacggatgtttgtttctggagtgtagtgcaaagactcgagtcaacgttgagcaatgttttgaagagcttgttcttaagatattggaaacgccgagtcttactgctgaaggttcgtctggcggaaagaagaacatcttcaaacaaaaccccgcacagaccaccagtacctcgtcgagctactgctgctcgtcttagacatggttttacagtttatgacaaattacactcttgctcatc

SEQ ID NO: 40256 - protein, 212 aa, Arabidopsis thaliana [sequence omitted]

SEQ ID NO: 40257 - protein, 123 aa, Arabidopsis thaliana; identical to SEQ ID NO: 26494
  peptide (1)..(123): Ceres Seq. ID no. 12323265
  misc_feature (1)..(88): Pfam Name: Ras family Pfam Description: Ras family
  misc_feature (1)..(120): Homolog of NCBI NO: 33416686 NR Description: Unknown (protein for MGC:69017) [Xenopus laevis]
  misc_feature (1)..(102): Homolog of NCBI NO: 549810 NR Description: GTP-BINDING PROTEIN YPTV3
  misc_feature (1)..(121): Homolog of NCBI NO: 37534998 NR Description: putative GTP-binding protein
  misc_feature (1)..(121): Homolog of NCBI NO: 15451614 NR Description: Putative GTP-binding protein [Oryza sativa]
  misc_feature (1)..(102): Homolog of NCBI NO: 15232785 NR Description: GTP-binding protein, putative; protein id:
  misc_feature (1)..(122): Homolog of NCBI NO: 1370172 NR Description: RAB1X [Lotus japonicus]
  misc_feature (1)..(122): Homolog of NCBI NO: 18414255 NR Description: putative protein
  misc_feature (1)..(121): Homolog of NCBI NO: 1370174 NR Description: RAB1Y [Lotus japonicus]
  misc_feature (1)..(123): Homolog of NCBI NO: 25294118 NR Description: protein F9C16.3 [imported] - Arabidopsis thaliana
  misc_feature (1)..(123): Homolog of NCBI NO: 15218575 NR Description: GTP-binding protein(RAB1Y), putative

SEQ ID NO: 40258 - DNA, 1724 bp, Arabidopsis thaliana
  misc_feature (1)..(1724): Ceres Seq. ID no. 12328006
  misc_feature: MA Experiment ID: 108434 Result: Down-regulated in Transcription
  misc_feature: MA Experiment 108434 PARAMETER Experiment Name: At_Root_Tips_cDNA_P Parameter: Tissue Value: Root Tips
  misc_feature: MA Experiment ID: 108462 Result: Down-regulated in Transcription
  misc_feature: MA Experiment 108462 PARAMETER Experiment Name: At_Germinating_Seeds_cDNA_P Parameter: Age (day) Value: 2 vs. 0
  misc_feature: MA Experiment 108462 PARAMETER Experiment Name: At_Germinating_Seeds_cDNA_P Parameter: Tissue Value: Germinating Seeds
  misc_feature: MA Experiment ID: 108463 Result: Down-regulated in Transcription
  misc_feature: MA Experiment 108463 PARAMETER Experiment Name: At_Germinating_Seeds_cDNA_P Parameter: Age (day) Value: 3 vs. 0
  misc_feature: MA Experiment 108463 PARAMETER Experiment Name: At_Germinating_Seeds_cDNA_P Parameter: Tissue Value: Germinating Seeds
  misc_feature: MA Experiment ID: 108464 Result: Down-regulated in Transcription
  misc_feature: MA Experiment 108464 PARAMETER Experiment Name: At_Germinating_Seeds_cDNA_P Parameter: Age (day) Value: 4 vs. 0
  misc_feature: MA Experiment 108464 PARAMETER Experiment Name: At_Germinating_Seeds_cDNA_P Parameter: Tissue Value: Germinating Seeds
  misc_feature: MA Experiment ID: 108488 Result: Down-regulated in Transcription
  misc_feature: MA Experiment ID: 108573 Result: Up-regulated in Transcription
  misc_feature: MA Experiment 108573 PARAMETER Experiment Name: At_Drought_cDNA_P Parameter: Timepoint (hr) Value: 6
  misc_feature: MA Experiment 108573 PARAMETER Experiment Name: At_Drought_cDNA_P Parameter: Tissue Value: Aerial
  misc_feature: MA Experiment 108573 PARAMETER Experiment Name: At_Drought_cDNA_P Parameter: Treatment Value: Drought vs. No Drought
  misc_feature: MA Experiment ID: 108594 Result: Down-regulated in Transcription
  misc_feature: MA Experiment 108594 PARAMETER Experiment Name: At_Ler-rhl_Root_cDNA_P Parameter: Plant Line Value: null
  misc_feature: MA Experiment ID: 20000794 Result: Up-regulated in Transcription
  misc_feature: MA Experiment 20000794 PARAMETER Experiment Name: At_Petals_P Parameter: Age (day) Value: 23-25 days
  misc_feature: MA Experiment 20000794 PARAMETER Experiment Name: At_Petals_P Parameter: Plant Line Value: WS
  misc_feature: MA Experiment 20000794 PARAMETER Experiment Name: At_Petals_P Parameter: Tissue Value: Petals vs. Whole plant
  misc_feature: MA Experiment ID: 20001757 Result: Down-regulated in Transcription
  misc_feature: MA Experiment 20001757 PARAMETER Experiment Name: At_50mM_NH4NO3_L-to-H_P Parameter: Timepoint (hr) Value: 6
  misc_feature: MA Experiment 20001757 PARAMETER Experiment Name: At_50mM_NH4NO3_L-to-H_P Parameter: Tissue Value: Leaf
  misc_feature: MA Experiment 20001757 PARAMETER Experiment Name: At_50mM_NH4NO3_L-to-H_P Parameter: Treatment Value: 50mM NH4NO3 vs 100mM Mannitol
  misc_feature: MA Experiment ID: 20001905 Result: Up-regulated in Transcription
  misc_feature: MA Experiment 20001905 PARAMETER Experiment Name: At_Drought_Reproduction_P Parameter: Age (day) Value: 40
  misc_feature: MA Experiment 20001905 PARAMETER Experiment Name: At_Drought_Reproduction_P Parameter: Organism Value: A. thaliana
  misc_feature: MA Experiment 20001905 PARAMETER Experiment Name: At_Drought_Reproduction_P Parameter: Plant Line Value: WS
  misc_feature: MA Experiment 20001905 PARAMETER Experiment Name: At_Drought_Reproduction_P Parameter: Timepoint (day) Value: 10
  misc_feature: MA Experiment 20001905 PARAMETER Experiment Name: At_Drought_Reproduction_P Parameter: Tissue Value: Rosettes
  misc_feature: MA Experiment 20001905 PARAMETER Experiment Name: At_Drought_Reproduction_P Parameter: Treatment Value: Drought vs. No Drought
aaacaaattcagacaagaaacctcaacggctcagacccaccaataccaattttttaaagagatttctgtcacaattgcgaatcgagctggattcttgggctcgctttttctttcaatcaaaagtttcgatattagtgaaggataaaattcgctaaaaaaagagaattttttttgttaaaaaaattataaaagctggctttctcaaaatttctccatgtggtcgacgaagaagacgaagaagacgaagaagaaagagaaagtctcttagcaaacatgaccgccaccgaagctaagaatcgcaaaatcaatgtcggagatggagatgacgttgttgatatcgaaatccctgacactgctcatcaaattagcagcgattcatggtttcaggtggcgttcgttttgaccaccggtataaacagcgcgtatgtgttgggatattcaggaacaattatggttcctttaggttggattggtggtgtggttggtcttcttattgctactgcaatctctctttatgcaaacactctcatagctaagcttcatgagtttggtggcagaagacatattcgctatagagaccttgctggattcatttacggtaggaaggcttatcatcttacatggggattgcaatatgttaatcttttcatgattaattgtggattcattatcctagctggttccgccttaaaggctgtttatgtgcttttcagggatgatcataccatgaaactacctcattttatagccattgctggtttgatttgtgcgattttcgctattgggattcctcatttatcggctcttggggtctggcttggagtttcgaccttcctcagtctcatctatattgttgtggcaatcgtgctatcggttagagatggagtaaaaacaccttcaagagattacgagatacaaggatcatcattgagcaaactttttaccatcacaggagcagccgcaaatctggttttcgcattcaacaccgggatgcttccagaaattcaggcaacagtgaggcaaccagttgttaaaaacatgatgaaggctctatactttcaattcacagcgggtgttttaccgatgtacgcagttacattcatcggatattgggcttacggatcctcaacctcgacctatctactaaacagtgttaatggcccactctgggtcaaagcccttgctaacgtctctgctatccttcaatctgttatctctttgcacatatttgcgagtccaacatatgagtacatggacacaaagtatgggatcaaaggaaacccatttgcgataaagaacttgctgtttaggatcatggcgagaggcgggtacatagcggtaagcacgcttatctcagcgctgctgccgttcctcggtgacttcatgagcctaactggtgcagtgagcacattccctctcacattcattctagccaaccatatgtactataaggcaaagaacaataagctgaatgctatgcaaaagctatggcattggcttaacgttgtcttctttagtttgatgtctgttgctgcagccattgcagctgtcagactcatcgccgttgattccaaaaatttccatgtttttgcagatttgtaattcattatattatatagtcaattgtgtatccttcattcttaggcaggtttatttctcctgtaagcttgtattctctctctctttgtcttaccattagagcctaaataaataaatcaagttct

SEQ ID NO: 40259 - protein, 442 aa, Arabidopsis thaliana
  peptide (1)..(442): Ceres Seq. ID no. 12328007
  misc_feature (15)..(442): Homolog of NCBI NO: 11358960 NR Description: proline transport protein [imported] - rice
  misc_feature (17)..(442): Homolog of NCBI NO: 11358950 NR Description: proline transport protein 3 [imported] - tomato
  misc_feature (22)..(442): Homolog of NCBI NO: 8571474 NR Description: proline/glycine betaine transporter [Atriplex
  misc_feature (17)..(442): Homolog of NCBI NO: 21069020 NR Description: betaine/proline transporter [Avicennia marina]
  misc_feature (17)..(442): Homolog of NCBI NO: 21069018 NR Description: betaine/proline transporter [Avicennia marina]
  misc_feature (1)..(442): Homolog of NCBI NO: 15228183 NR Description: proline transporter 2
  misc_feature (6)..(442): Homolog of NCBI NO: 21554196 NR Description: putative proline transporter [Arabidopsis
  misc_feature (6)..(442): Homolog of NCBI NO: 15228000 NR Description: putative proline transporter
  misc_feature (1)..(442): Homolog of NCBI NO: 21593453 NR Description: proline transporter 1 [Arabidopsis thaliana]
  misc_feature (1)..(442): Homolog of NCBI NO: 15225591 NR Description: proline transporter 1
MTATEAKNRKINVGDGDDVVDIEIPDTAHQISSDSWFQVAFVLTTGINSAYVLGYSGTIMVPLGWIGGVVGLLIATAISLYANTLIAKLHEFGGRRHIRYRDLAGFIYGRKAYHLTWGLQYVNLFMINCGFIILAGSALKAVYVLFRDDHTMKLPHFIAIAGLICAIFAIGIPHLSALGVWLGVSTFLSLIYIVVAIVLSVRDGVKTPSRDYEIQGSSLSKLFTITGAAANLVFAFNTGMLPEIQATVRQPVVKNMMKALYFQFTAGVLPMYAVTFIGYWAYGSSTSTYLLNSVNGPLWVKALANVSAILQSVISLHIFASPTYEYMDTKYGIKGNPFAIKNLLFRIMARGGYIAVSTLISALLPFLGDFMSLTGAVSTFPLTFILANHMYYKAKNNKLNAMQKLWHWLNVVFFSLMSVAAAIAAVRLIAVDSKNFHVFADL

SEQ ID NO: 40260 - protein, 383 aa, Arabidopsis thaliana
  peptide (1)..(383): Ceres Seq. ID no. 12328008
  misc_feature (1)..(383): Homolog of NCBI NO: 11358960 NR Description: proline transport protein [imported] - rice
  misc_feature (1)..(383): Homolog of NCBI NO: 11358950 NR Description: proline transport protein 3 [imported] - tomato
  misc_feature (1)..(383): Homolog of NCBI NO: 8571474 NR Description: proline/glycine betaine transporter [Atriplex
  misc_feature (1)..(383): Homolog of NCBI NO: 21069020 NR Description: betaine/proline transporter [Avicennia marina]
  misc_feature (1)..(383): Homolog of NCBI NO: 21069018 NR Description: betaine/proline transporter [Avicennia marina]
  misc_feature (1)..(383): Homolog of NCBI NO: 15228183 NR Description: proline transporter 2
  misc_feature (1)..(383): Homolog of NCBI NO: 21554196 NR Description: putative proline transporter [Arabidopsis
  misc_feature (1)..(383): Homolog of NCBI NO: 15228000 NR Description: putative proline transporter
  misc_feature (1)..(383): Homolog of NCBI NO: 21593453 NR Description: proline transporter 1 [Arabidopsis thaliana]
  misc_feature (1)..(383): Homolog of NCBI NO: 15225591 NR Description: proline transporter 1
MVPLGWIGGVVGLLIATAISLYANTLIAKLHEFGGRRHIRYRDLAGFIYGRKAYHLTWGLQYVNLFMINCGFIILAGSALKAVYVLFRDDHTMKLPHFIAIAGLICAIFAIGIPHLSALGVWLGVSTFLSLIYIVVAIVLSVRDGVKTPSRDYEIQGSSLSKLFTITGAAANLVFAFNTGMLPEIQATVRQPVVKNMMKALYFQFTAGVLPMYAVTFIGYWAYGSSTSTYLLNSVNGPLWVKALANVSAILQSVISLHIFASPTYEYMDTKYGIKGNPFAIKNLLFRIMARGGYIAVSTLISALLPFLGDFMSLTGAVSTFPLTFILANHMYYKAKNNKLNAMQKLWHWLNVVFFSLMSVAAAIAAVRLIAVDSKNFHVFADL

SEQ ID NO: 40261 - protein, 317 aa, Arabidopsis thaliana; identical to SEQ ID NO: 24809
  peptide (1)..(317): Ceres Seq. ID no. 12328009
  misc_feature (1)..(317): Homolog of NCBI NO: 11358960 NR Description: proline transport protein [imported] - rice
  misc_feature (1)..(317): Homolog of NCBI NO: 11358950 NR Description: proline transport protein 3 [imported] - tomato
  misc_feature (1)..(317): Homolog of NCBI NO: 8571474 NR Description: proline/glycine betaine transporter [Atriplex
  misc_feature (1)..(317): Homolog of NCBI NO: 21069020 NR Description: betaine/proline transporter [Avicennia marina]
  misc_feature (1)..(317): Homolog of NCBI NO: 21069018 NR Description: betaine/proline transporter [Avicennia marina]
  misc_feature (1)..(317): Homolog of NCBI NO: 15228183 NR Description: proline transporter 2
  misc_feature (1)..(317): Homolog of NCBI NO: 21554196 NR Description: putative proline transporter [Arabidopsis
  misc_feature (1)..(317): Homolog of NCBI NO: 15228000 NR Description: putative proline transporter
  misc_feature (1)..(317): Homolog of NCBI NO: 21593453 NR Description: proline transporter 1 [Arabidopsis thaliana]
  misc_feature (1)..(317): Homolog of NCBI NO: 15225591 NR Description: proline transporter 1

SEQ ID NO: 40262 - DNA, 1757 bp, Arabidopsis thaliana
  misc_feature (1)..(1757): Ceres Seq. ID no. 12327748
  misc_feature: MA Experiment ID: 108461 Result: Up-regulated in Transcription
  misc_feature: MA Experiment 108461 PARAMETER Experiment Name: At_Germinating_Seeds_cDNA_P Parameter: Age (day) Value: 1 vs. 0
  misc_feature: MA Experiment 108461 PARAMETER Experiment Name: At_Germinating_Seeds_cDNA_P Parameter: Tissue Value: Germinating Seeds
  misc_feature: MA Experiment ID: 108561 Result: Down-regulated in Transcription
  misc_feature: MA Experiment 108561 PARAMETER Experiment Name: At_100uM_ABA_cDNA_P Parameter: Timepoint (hr) Value: 6
  misc_feature: MA Experiment 108561 PARAMETER Experiment Name: At_100uM_ABA_cDNA_P Parameter: Tissue Value: Aerial
  misc_feature: MA Experiment 108561 PARAMETER Experiment Name: At_100uM_ABA_cDNA_P Parameter: Treatment Value: 100uM ABA vs. No Treatment
  misc_feature: MA Experiment ID: 108572 Result: Down-regulated in Transcription
  misc_feature: MA Experiment 108572 PARAMETER Experiment Name: At_Drought_cDNA_P Parameter: Timepoint (hr) Value: 1
  misc_feature: MA Experiment 108572 PARAMETER Experiment Name: At_Drought_cDNA_P Parameter: Tissue Value: Aerial
  misc_feature: MA Experiment 108572 PARAMETER Experiment Name: At_Drought_cDNA_P Parameter: Treatment Value: Drought vs. No Drought
  misc_feature: MA Experiment ID: 108574 Result: Up-regulated in Transcription
  misc_feature: MA Experiment 108574 PARAMETER Experiment Name: At_Wounding__cDNA_P Parameter: Timepoint (hr) Value: 1
  misc_feature: MA Experiment 108574 PARAMETER Experiment Name: At_Wounding__cDNA_P Parameter: Tissue Value: Aerial
  misc_feature: MA Experiment 108574 PARAMETER Experiment Name: At_Wounding__cDNA_P Parameter: Treatment Value: Wounding vs. No Wounding
  misc_feature: MA Experiment ID: 108577 Result: Down-regulated in Transcription
  misc_feature: MA Experiment 108577 PARAMETER Experiment Name: At_42deg_Heat_cDNA_P Parameter: Temperature (deg C) Value: 42 vs. 22
  misc_feature: MA Experiment 108577 PARAMETER Experiment Name: At_42deg_Heat_cDNA_P Parameter: Timepoint (hr) Value: 6
  misc_feature: MA Experiment 108577 PARAMETER Experiment Name: At_42deg_Heat_cDNA_P Parameter: Tissue Value: Aerial
  misc_feature: MA Experiment ID: 108579 Result: Up-regulated in Transcription
  misc_feature: MA Experiment 108579 PARAMETER Experiment Name: At_4deg_Cold_cDNA_P Parameter: Temperature (deg C) Value: 4 vs. 22
  misc_feature: MA Experiment 108579 PARAMETER Experiment Name: At_4deg_Cold_cDNA_P Parameter: Timepoint (hr) Value: 6
  misc_feature: MA Experiment 108579 PARAMETER Experiment Name: At_4deg_Cold_cDNA_P Parameter: Tissue Value: Aerial
  misc_feature: MA Experiment ID: 108605 Result: Down-regulated in Transcription
  misc_feature: MA Experiment 108605 PARAMETER Experiment Name: At_100uM_ABA_cDNA_P Parameter: Timepoint (hr) Value: 6
  misc_feature: MA Experiment 108605 PARAMETER Experiment Name: At_100uM_ABA_cDNA_P Parameter: Tissue Value: Aerial
  misc_feature: MA Experiment 108605 PARAMETER Experiment Name: At_100uM_ABA_cDNA_P Parameter: Treatment Value: 100uM ABA vs. No Treatment
  misc_feature: MA Experiment ID: 108607 Result: Down-regulated in Transcription
  misc_feature: MA Experiment 108607 PARAMETER Experiment Name: At_100uM_ABA_cDNA_P Parameter: Timepoint (hr) Value: 4
  misc_feature: MA Experiment 108607 PARAMETER Experiment Name: At_100uM_ABA_cDNA_P Parameter: Tissue Value: Aerial
  misc_feature: MA Experiment 108607 PARAMETER Experiment Name: At_100uM_ABA_cDNA_P Parameter: Treatment Value: 100uM ABA vs. No Treatment
  misc_feature: MA Experiment ID: 108668 Result: Down-regulated in Transcription
  misc_feature: MA Experiment 108668 PARAMETER Experiment Name: At_2mM_SA_cDNA_P Parameter: Plant Line Value: WS
  misc_feature: MA Experiment 108668 PARAMETER Experiment Name: At_2mM_SA_cDNA_P Parameter: Timepoint (hr) Value: 6
  misc_feature: MA Experiment 108668 PARAMETER Experiment Name: At_2mM_SA_cDNA_P Parameter: Treatment Value: 2mM SA vs. No Treatment
  misc_feature: MA Experiment ID: 20000069 Result: Down-regulated in Transcription
  misc_feature: MA Experiment 20000069 PARAMETER Experiment Name: At_100uM_ABA_Mutants_cDNA_P Parameter: Plant Line Value: CS23
  misc_feature: MA Experiment 20000069 PARAMETER Experiment Name: At_100uM_ABA_Mutants_cDNA_P Parameter: Timepoint (hr) Value: 6
  misc_feature: MA Experiment 20000069 PARAMETER Experiment Name: At_100uM_ABA_Mutants_cDNA_P Parameter: Tissue Value: Aerial
  misc_feature: MA Experiment 20000069 PARAMETER Experiment Name: At_100uM_ABA_Mutants_cDNA_P Parameter: Treatment Value: 100uM ABA vs. No Treatment
  misc_feature: MA Experiment ID: 20000072 Result: Down-regulated in Transcription
  misc_feature: MA Experiment 20000072 PARAMETER Experiment Name: At_100uM_ABA_Mutants_cDNA_P Parameter: Plant Line Value: CS8105
  misc_feature: MA Experiment 20000072 PARAMETER Experiment Name: At_100uM_ABA_Mutants_cDNA_P Parameter: Timepoint (hr) Value: 6
  misc_feature: MA Experiment 20000072 PARAMETER Experiment Name: At_100uM_ABA_Mutants_cDNA_P Parameter: Tissue Value: Aerial
  misc_feature: MA Experiment 20000072 PARAMETER Experiment Name: At_100uM_ABA_Mutants_cDNA_P Parameter: Treatment Value: 100uM ABA vs. No Treatment
  misc_feature: MA Experiment ID: 20000087 Result: Down-regulated in Transcription
  misc_feature: MA Experiment 20000087 PARAMETER Experiment Name: At_100uM_ABA_Mutants_cDNA_P Parameter: Plant Line Value: WS
  misc_feature: MA Experiment 20000087 PARAMETER Experiment Name: At_100uM_ABA_Mutants_cDNA_P Parameter: Timepoint (hr) Value: 6
  misc_feature: MA Experiment 20000087 PARAMETER Experiment Name: At_100uM_ABA_Mutants_cDNA_P Parameter: Tissue Value: Aerial
  misc_feature: MA Experiment 20000087 PARAMETER Experiment Name: At_100uM_ABA_Mutants_cDNA_P Parameter: Treatment Value: 100uM ABA vs. No Treatment
  misc_feature: MA Experiment ID: 20000112 Result: Down-regulated in Transcription
  misc_feature: MA Experiment 20000112 PARAMETER Experiment Name: At_42deg_Heat_cDNA_P Parameter: Temperature (deg C) Value: 42 vs. 22
  misc_feature: MA Experiment 20000112 PARAMETER Experiment Name: At_42deg_Heat_cDNA_P Parameter: Timepoint (hr) Value: 2
  misc_feature: MA Experiment 20000112 PARAMETER Experiment Name: At_42deg_Heat_cDNA_P Parameter: Tissue Value: Aerial
  misc_feature: MA Experiment ID: 20000117 Result: Down-regulated in Transcription
  misc_feature: MA Experiment 20000117 PARAMETER Experiment Name: At_100uM_ABA_Mutants_cDNA_P Parameter: Plant Line Value: Columbia
  misc_feature: MA Experiment 20000117 PARAMETER Experiment Name: At_100uM_ABA_Mutants_cDNA_P Parameter: Timepoint (hr) Value: 6
  misc_feature: MA Experiment 20000117 PARAMETER Experiment Name: At_100uM_ABA_Mutants_cDNA_P Parameter: Tissue Value: Aerial
  misc_feature: MA Experiment 20000117 PARAMETER Experiment Name: At_100uM_ABA_Mutants_cDNA_P Parameter: Treatment Value: 100uM ABA vs. No Treatment
  misc_feature: MA Experiment ID: 20000171 Result: Down-regulated in Transcription
  misc_feature: MA Experiment 20000171 PARAMETER Experiment Name: At_42deg_Heat_P Parameter: Age (day) Value: 14
  misc_feature: MA Experiment 20000171 PARAMETER Experiment Name: At_42deg_Heat_P Parameter: Organism Value: A. thaliana
  misc_feature: MA Experiment 20000171 PARAMETER Experiment Name: At_42deg_Heat_P Parameter: Plant Line Value: WS
  misc_feature: MA Experiment 20000171 PARAMETER Experiment Name: At_42deg_Heat_P Parameter: Temperature (deg C) Value: 42 vs. 22
  misc_feature: MA Experiment 20000171 PARAMETER Experiment Name: At_42deg_Heat_P Parameter: Timepoint (hr) Value: 1
  misc_feature: MA Experiment 20000171 PARAMETER Experiment Name: At_42deg_Heat_P Parameter: Tissue Value: Aerial
  misc_feature: MA Experiment ID: 20000179 Result: Up-regulated in Transcription
  misc_feature: MA Experiment 20000179 PARAMETER Experiment Name: At_Germinating_Seeds_P Parameter: Age (hr) Value: 6 vs. 0
  misc_feature: MA Experiment 20000179 PARAMETER Experiment Name: At_Germinating_Seeds_P Parameter: Tissue Value: Germinating Seeds
  misc_feature: MA Experiment ID: 20000180 Result: Up-regulated in Transcription
  misc_feature: MA Experiment 20000180 PARAMETER Experiment Name: At_Germinating_Seeds_P Parameter: Age (hr) Value: 24 vs. 0
  misc_feature: MA Experiment 20000180 PARAMETER Experiment Name: At_Germinating_Seeds_P Parameter: Tissue Value: Germinating Seeds
  misc_feature: MA Experiment ID: 20000182 Result: Down-regulated in Transcription
  misc_feature: MA Experiment 20000182 PARAMETER Experiment Name: At_2mM_SA_P Parameter: Age (day) Value: 14
  misc_feature: MA Experiment 20000182 PARAMETER Experiment Name: At_2mM_SA_P Parameter: Organism Value: A. thaliana
  misc_feature: MA Experiment 20000182 PARAMETER Experiment Name: At_2mM_SA_P Parameter: Plant Line Value: WS
  misc_feature: MA Experiment 20000182 PARAMETER Experiment Name: At_2mM_SA_P Parameter: Timepoint (hr) Value: 6
  misc_feature: MA Experiment 20000182 PARAMETER Experiment Name: At_2mM_SA_P Parameter: Tissue Value: Aerial
  misc_feature: MA Experiment 20000182 PARAMETER Experiment Name: At_2mM_SA_P Parameter: Treatment Value: 2mM SA vs. No Treatment
  misc_feature: MA Experiment ID: 20000185 Result: Down-regulated in Transcription
  misc_feature: MA Experiment 20000185 PARAMETER Experiment Name: At_Roots__P Parameter: Age (day) Value: 7 vs. 21
  misc_feature: MA Experiment 20000185 PARAMETER Experiment Name: At_Roots__P Parameter: Organism Value: A. thaliana
  misc_feature: MA Experiment 20000185 PARAMETER Experiment Name: At_Roots__P Parameter: Tissue Value: Roots vs. Whole Plant
  misc_feature: MA Experiment ID: 20000234 Result: Up-regulated in Transcription
  misc_feature: MA Experiment 20000234 PARAMETER Experiment Name: At_Siliques_P Parameter: Age (day) Value: 21
  misc_feature: MA Experiment 20000234 PARAMETER Experiment Name: At_Siliques_P Parameter: Organism Value: A. thaliana
  misc_feature: MA Experiment 20000234 PARAMETER Experiment Name: At_Siliques_P Parameter: Plant Line Value: WS
  misc_feature: MA Experiment 20000234 PARAMETER Experiment Name: At_Siliques_P Parameter: Tissue Value: Less Than 5mm Siliques vs. Whole Plant
  misc_feature: MA Experiment ID: 20000437 Result: Down-regulated in Transcription
  misc_feature: MA Experiment 20000437 PARAMETER Experiment Name: At_Drought_P Parameter: Age (day) Value: 8
  misc_feature: MA Experiment 20000437 PARAMETER Experiment Name: At_Drought_P Parameter: Organism Value: A. thaliana
  misc_feature: MA Experiment 20000437 PARAMETER Experiment Name: At_Drought_P Parameter: Plant Line Value: WS
  misc_feature: MA Experiment 20000437 PARAMETER Experiment Name: At_Drought_P Parameter: Timepoint (hr) Value: 24
  misc_feature: MA Experiment 20000437 PARAMETER Experiment Name: At_Drought_P Parameter: Tissue Value: Whole Plant
  misc_feature: MA Experiment 20000437 PARAMETER Experiment Name: At_Drought_P Parameter: Treatment Value: Drought vs. No Drought
  misc_feature: MA Experiment ID: 20000495 Result: Down-regulated in Transcription
  misc_feature: MA Experiment 20000495 PARAMETER Experiment Name: At_Guard_Cells_P Parameter: Harvest Date Value: 8/2/2002
  misc_feature: MA Experiment 20000495 PARAMETER Experiment Name: At_Guard_Cells_P Parameter: Organism Value: A. thaliana
  misc_feature: MA Experiment 20000495 PARAMETER Experiment Name: At_Guard_Cells_P Parameter: Tissue Value: Guard Cells vs. Leaves
  misc_feature: MA Experiment ID: 20000794 Result: Down-regulated in Transcription
  misc_feature: MA Experiment 20000794 PARAMETER Experiment Name: At_Petals_P Parameter: Age (day) Value: 23-25 days
  misc_feature: MA Experiment 20000794 PARAMETER Experiment Name: At_Petals_P Parameter: Plant Line Value: WS
  misc_feature: MA Experiment 20000794 PARAMETER Experiment Name: At_Petals_P Parameter: Tissue Value: Petals vs. Whole plant
  misc_feature: MA Experiment ID: 20001247 Result: Up-regulated in Transcription
  misc_feature: MA Experiment 20001247 PARAMETER Experiment Name: At_Far-red-induction_P Parameter: Age (day) Value: 7
  misc_feature: MA Experiment 20001247 PARAMETER Experiment Name: At_Far-red-induction_P Parameter: Light Value: Far-red vs. White
  misc_feature: MA Experiment 20001247 PARAMETER Experiment Name: At_Far-red-induction_P Parameter: Organism Value: A. thaliana
  misc_feature: MA Experiment 20001247 PARAMETER Experiment Name: At_Far-red-induction_P Parameter: Plant Line Value: Columbia
  misc_feature: MA Experiment 20001247 PARAMETER Experiment Name: At_Far-red-induction_P Parameter: Timepoint (hr) Value: 1
  misc_feature: MA Experiment 20001247 PARAMETER Experiment Name: At_Far-red-induction_P Parameter: Tissue Value: Whole Plant
  misc_feature: MA Experiment ID: 20001451 Result: Down-regulated in Transcription
  misc_feature: MA Experiment 20001451 PARAMETER Experiment Name: At_Far-red-induction_P Parameter: Age (day) Value: 7
  misc_feature: MA Experiment 20001451 PARAMETER Experiment Name: At_Far-red-induction_P Parameter: Light Value: Far-red vs. White
  misc_feature: MA Experiment 20001451 PARAMETER Experiment Name: At_Far-red-induction_P Parameter: Organism Value: A. thaliana
  misc_feature: MA Experiment 20001451 PARAMETER Experiment Name: At_Far-red-induction_P Parameter: Plant Line Value: Columbia
  misc_feature: MA Experiment 20001451 PARAMETER Experiment Name: At_Far-red-induction_P Parameter: Timepoint (hr) Value: 24
  misc_feature: MA Experiment 20001451 PARAMETER Experiment Name: At_Far-red-induction_P Parameter: Tissue Value: Whole Plant
  misc_feature: MA Experiment ID: 20001560 Result: Up-regulated in Transcription
  misc_feature: MA Experiment 20001560 PARAMETER Experiment Name: At_Drought_Soil_Dry_P Parameter: Age (day) Value: 28
  misc_feature: MA Experiment 20001560 PARAMETER Experiment Name: At_Drought_Soil_Dry_P Parameter: Organism Value: A. thaliana
  misc_feature: MA Experiment 20001560 PARAMETER Experiment Name: At_Drought_Soil_Dry_P Parameter: Plant Line Value: WS
  misc_feature: MA Experiment 20001560 PARAMETER Experiment Name: At_Drought_Soil_Dry_P Parameter: Post Timepoint (hr) Value: None
  misc_feature: MA Experiment 20001560 PARAMETER Experiment Name: At_Drought_Soil_Dry_P Parameter: Post-Treatment Value: None
  misc_feature: MA Experiment 20001560 PARAMETER Experiment Name: At_Drought_Soil_Dry_P Parameter: Timepoint (day) Value: 14
  misc_feature: MA Experiment 20001560 PARAMETER Experiment Name: At_Drought_Soil_Dry_P Parameter: Treatment Value: Drought vs. No Drought
  misc_feature: MA Experiment ID: 20001905 Result: Down-regulated in Transcription
  misc_feature: MA Experiment 20001905 PARAMETER Experiment Name: At_Drought_Reproduction_P Parameter: Age (day) Value: 40
  misc_feature: MA Experiment 20001905 PARAMETER Experiment Name: At_Drought_Reproduction_P Parameter: Organism Value: A. thaliana
  misc_feature: MA Experiment 20001905 PARAMETER Experiment Name: At_Drought_Reproduction_P Parameter: Plant Line Value: WS
  misc_feature: MA Experiment 20001905 PARAMETER Experiment Name: At_Drought_Reproduction_P Parameter: Timepoint (day) Value: 10
  misc_feature: MA Experiment 20001905 PARAMETER Experiment Name: At_Drought_Reproduction_P Parameter: Tissue Value: Rosettes
  misc_feature: MA Experiment 20001905 PARAMETER Experiment Name: At_Drought_Reproduction_P Parameter: Treatment Value: Drought vs. No Drought
  misc_feature: MA Experiment ID: 20001906 Result: Down-regulated in Transcription
  misc_feature: MA Experiment 20001906 PARAMETER Experiment Name: At_Drought_Reproduction_P Parameter: Age (day) Value: 35
  misc_feature: MA Experiment 20001906 PARAMETER Experiment Name: At_Drought_Reproduction_P Parameter: Organism Value: A. thaliana
  misc_feature: MA Experiment 20001906 PARAMETER Experiment Name: At_Drought_Reproduction_P Parameter: Plant Line Value: WS
  misc_feature: MA Experiment 20001906 PARAMETER Experiment Name: At_Drought_Reproduction_P Parameter: Timepoint (day) Value: 5
  misc_feature: MA Experiment 20001906 PARAMETER Experiment Name: At_Drought_Reproduction_P Parameter: Tissue Value: Siliques
  misc_feature: MA Experiment 20001906 PARAMETER Experiment Name: At_Drought_Reproduction_P Parameter: Treatment Value: Drought vs. No Drought
  misc_feature: MA Experiment ID: 20001911 Result: Down-regulated in Transcription
  misc_feature: MA Experiment 20001911 PARAMETER Experiment Name: At_Drought_Reproduction_P Parameter: Age (day) Value: 40
  misc_feature: MA Experiment 20001911 PARAMETER Experiment Name: At_Drought_Reproduction_P Parameter: Organism Value: A. thaliana
  misc_feature: MA Experiment 20001911 PARAMETER Experiment Name: At_Drought_Reproduction_P Parameter: Plant Line Value: WS
  misc_feature: MA Experiment 20001911 PARAMETER Experiment Name: At_Drought_Reproduction_P Parameter: Timepoint (day) Value: 10
  misc_feature: MA Experiment 20001911 PARAMETER Experiment Name: At_Drought_Reproduction_P Parameter: Tissue Value: Flowers
  misc_feature: MA Experiment 20001911 PARAMETER Experiment Name: At_Drought_Reproduction_P Parameter: Treatment Value: Drought vs. No Drought
gagagataacagagagatagtttcttcttcatccaaaagaatccaatcttttcctcaaaagatagtttctggatcgaacgacaatggagattttctactacttggtgtttggggttttgggtctcgtcgtcgcggcgttggagcttagcaagaacaacaaggatcgaatcaacacttcttcagctttcaattctttcaagaacaattatctccttgtctattcgctcatgatggcgggtgattggttgcagggtccatatgtgtactatctttatagtacttatggatttggtaaaggggacattggacagcttttcattgctggttttggttcctctatgttgtttggtaccatcgttgggtctctagccgacaaacagggtcgtaagagggcatgtgttacctattgtattacctatatattgagctgcatcaccaagcattctcctcaatataaggttttgatggtaggccgtgtcttgggaggcattgctacttcccttctgttttcgtcatttgaatcatggctagttgctgagcacaataagaggggctttgagcagcaatggctgtctgtgacattttcaaaggcagtgttttttggcaacggtctcgttgcaattatcgctggattgtttgggaacctgcttgttgataccttctctcttgggcctgttgcgccatttgacgctgctgcatgctttcttactattggaatggctgtcattctatcatcatggacagaaaactatggagatccatcagaaaacaaggacttgcttacccagttcagaggtgctgcagtggccattgcctctgatgagaagatagcactattgggtgctatccagtcgctctttgaaggatctatgtatacttttgtattcctctggactcctgctctaagtccgaacgatgaggagattccccatggtttcatttttgcaacatttatgctagcttcgatgctaggcagttcccttgcatctcgtctgttgtctcgttcaactcccaaagtagagagctacatgcagattgttttcctagtttccggtgctgcactattgcttccaatattaatgactttgttcatagcaccttccaaggtgaaaggtggaggaatctctttctcgggttgctttcagctccttgggttctgtatattcgaggcgtgtgtaggactgttttggccatccataatgaagatgagatcccaatacatcccagaagaagccagaagcacaataatgaactttttccgcattcctctgaatatctttgtctgcgttgtattgtacaatgtaaatgcattccctatcacggtcatgtttggaatgtgctcgatcttcctctttgttgcaagtctcctacaaaggcggctcatgatgattgttgacaaaccaaaaacaaatgactggacaccccttgaagaaagaaacacagaagaagatcccctcaacatatgatgaattaactatacatatgcacattctggattcagtaatggagacagatagaagaagaggactttaaggtatatggtatatagaacgcaacaatgcatacaaagagatcatagcgttgtaagactcgatgcagtagttcgattgtttaatttttcttggctatatttttgaatatgttaaattcaaagacaagtataagttttatgcaatcaatgtgttattctttctttctatgcaacctctaccatcctcaccataattagccagcttttaagaggcaaaacatctttc

SEQ ID NO: 40263 - protein, 460 aa, Arabidopsis thaliana
  peptide (1)..(460): Ceres Seq. ID no. 12327749
  misc_feature (4)..(358): Pfam Name: Protein of unknown function (DUF791) Pfam Description: Protein of unknown function (DUF791)
  misc_feature (1)..(459): Homolog of NCBI NO: 34902182 NR Description: Putative transporter [Oryza sativa (japonica
  misc_feature (1)..(459): Homolog of NCBI NO: 37536124 NR Description: putative transporter [Oryza sativa (japonica
  misc_feature (1)..(155): Homolog of NCBI NO: 11292198 NR Description: hypothetical protein F2K15.170 - Arabidopsis
  misc_feature (144)..(460): Homolog of NCBI NO: 11292198 NR Description: hypothetical protein F2K15.170 - Arabidopsis
  misc_feature (1)..(459): Homolog of NCBI NO: 6633826 NR Description: F1N19.22 [Arabidopsis thaliana]
  misc_feature (1)..(459): Homolog of NCBI NO: 15217708 NR Description: unknown protein; protein id: At1g64650.1
  misc_feature (1)..(460): Homolog of NCBI NO: 30693172 NR Description: expressed protein [Arabidopsis thaliana]
  misc_feature (350)..(406): Homolog of NCBI NO: 7487513 NR Description: hypothetical protein T29A15.210 - Arabidopsis
  misc_feature (1)..(343): Homolog of NCBI NO: 7487513 NR Description: hypothetical protein T29A15.210 - Arabidopsis
  misc_feature (1)..(460): Homolog of NCBI NO: 18417054 NR Description: putative protein
MEIFYYLVFGVLGLVVAALELSKNNKDRINTSSAFNSFKNNYLLVYSLMMAGDWLQGPYVYYLYSTYGFGKGDIGQLFIAGFGSSMLFGTIVGSLADKQGRKRACVTYCITYILSCITKHSPQYKVLMVGRVLGGIATSLLFSSFESWLVAEHNKRGFEQQWLSVTFSKAVFFGNGLVAIIAGLFGNLLVDTFSLGPVAPFDAAACFLTIGMAVILSSWTENYGDPSENKDLLTQFRGAAVAIASDEKIALLGAIQSLFEGSMYTFVFLWTPALSPNDEEIPHGFIFATFMLASMLGSSLASRLLSRSTPKVESYMQIVFLVSGAALLLPILMTLFIAPSKVKGGGISFSGCFQLLGFCIFEACVGLFWPSIMKMRSQYIPEEARSTIMNFFRIPLNIFVCVVLYNVNAFPITVMFGMCSIFLFVASLLQRRLMMIVDKPKTNDWTPLEERNTEEDPLNI

SEQ ID NO: 40264 - protein, 412 aa, Arabidopsis thaliana
  peptide (1)..(412): Ceres Seq. ID no. 12327750
  misc_feature (1)..(310): Pfam Name: Protein of unknown function (DUF791) Pfam Description: Protein of unknown function (DUF791)
  misc_feature (1)..(411): Homolog of NCBI NO: 34902182 NR Description: Putative transporter [Oryza sativa (japonica
  misc_feature (1)..(411): Homolog of NCBI NO: 37536124 NR Description: putative transporter [Oryza sativa (japonica
  misc_feature (1)..(107): Homolog of NCBI NO: 11292198 NR Description: hypothetical protein F2K15.170 - Arabidopsis
  misc_feature (96)..(412): Homolog of NCBI NO: 11292198 NR Description: hypothetical protein F2K15.170 - Arabidopsis
  misc_feature (1)..(411): Homolog of NCBI NO: 6633826 NR Description: F1N19.22 [Arabidopsis thaliana]
  misc_feature (1)..(411): Homolog of NCBI NO: 15217708 NR Description: unknown protein; protein id: At1g64650.1
  misc_feature (1)..(412): Homolog of NCBI NO: 30693172 NR Description: expressed protein [Arabidopsis thaliana]
  misc_feature (302)..(358): Homolog of NCBI NO: 7487513 NR Description: hypothetical protein T29A15.210 - Arabidopsis
  misc_feature (1)..(295): Homolog of NCBI NO: 7487513 NR Description: hypothetical protein T29A15.210 - Arabidopsis
  misc_feature (1)..(412): Homolog of NCBI NO: 18417054 NR Description: putative protein
MMAGDWLQGPYVYYLYSTYGFGKGDIGQLFIAGFGSSMLFGTIVGSLADKQGRKRACVTYCITYILSCITKHSPQYKVLMVGRVLGGIATSLLFSSFESWLVAEHNKRGFEQQWLSVTFSKAVFFGNGLVAIIAGLFGNLLVDTFSLGPVAPFDAAACFLTIGMAVILSSWTENYGDPSENKDLLTQFRGAAVAIASDEKIALLGAIQSLFEGSMYTFVFLWTPALSPNDEEIPHGFIFATFMLASMLGSSLASRLLSRSTPKVESYMQIVFLVSGAALLLPILMTLFIAPSKVKGGGISFSGCFQLLGFCIFEACVGLFWPSIMKMRSQYIPEEARSTIMNFFRIPLNIFVCVVLYNVNAFPITVMFGMCSIFLFVASLLQRRLMMIVDKPKTNDWTPLEERNTEEDPLNI

SEQ ID NO: 40265 - protein, 411 aa, Arabidopsis thaliana
  peptide (1)..(411): Ceres Seq. ID no. 12327751
  misc_feature (1)..(309): Pfam Name: Protein of unknown function (DUF791) Pfam Description: Protein of unknown function (DUF791)
  misc_feature (1)..(410): Homolog of NCBI NO: 34902182 NR Description: Putative transporter [Oryza sativa (japonica
  misc_feature (1)..(410): Homolog of NCBI NO: 37536124 NR Description: putative transporter [Oryza sativa (japonica
  misc_feature (1)..(106): Homolog of NCBI NO: 11292198 NR Description: hypothetical protein F2K15.170 - Arabidopsis
  misc_feature (95)..(411): Homolog of NCBI NO: 11292198 NR Description: hypothetical protein F2K15.170 - Arabidopsis
  misc_feature (1)..(410): Homolog of NCBI NO: 6633826 NR Description: F1N19.22 [Arabidopsis thaliana]
  misc_feature (1)..(410): Homolog of NCBI NO: 15217708 NR Description: unknown protein; protein id: At1g64650.1
  misc_feature (1)..(411): Homolog of NCBI NO: 30693172 NR Description: expressed protein [Arabidopsis thaliana]
  misc_feature (301)..(357): Homolog of NCBI NO: 7487513 NR Description: hypothetical protein T29A15.210 - Arabidopsis
  misc_feature (1)..(294): Homolog of NCBI NO: 7487513 NR Description: hypothetical protein T29A15.210 - Arabidopsis
  misc_feature (1)..(411): Homolog of NCBI NO: 18417054 NR Description: putative protein
MAGDWLQGPYVYYLYSTYGFGKGDIGQLFIAGFGSSMLFGTIVGSLADKQGRKRACVTYCITYILSCITKHSPQYKVLMVGRVLGGIATSLLFSSFESWLVAEHNKRGFEQQWLSVTFSKAVFFGNGLVAIIAGLFGNLLVDTFSLGPVAPFDAAACFLTIGMAVILSSWTENYGDPSENKDLLTQFRGAAVAIASDEKIALLGAIQSLFEGSMYTFVFLWTPALSPNDEEIPHGFIFATFMLASMLGSSLASRLLSRSTPKVESYMQIVFLVSGAALLLPILMTLFIAPSKVKGGGISFSGCFQLLGFCIFEACVGLFWPSIMKMRSQYIPEEARSTIMNFFRIPLNIFVCVVLYNVNAFPITVMFGMCSIFLFVASLLQRRLMMIVDKPKTNDWTPLEERNTEEDPLNI

SEQ ID NO: 40266 - DNA, 1537 bp, Arabidopsis thaliana
  misc_feature (1)..(1537): Ceres Seq. ID no. 12327752
  misc_feature: MA Experiment ID: 108434 Result: Up-regulated in Transcription
  misc_feature: MA Experiment 108434 PARAMETER Experiment Name: At_Root_Tips_cDNA_P Parameter: Tissue Value: Root Tips
  misc_feature: MA Experiment ID: 108462 Result: Down-regulated in Transcription
  misc_feature: MA Experiment 108462 PARAMETER Experiment Name: At_Germinating_Seeds_cDNA_P Parameter: Age (day) Value: 2 vs. 0
  misc_feature: MA Experiment 108462 PARAMETER Experiment Name: At_Germinating_Seeds_cDNA_P Parameter: Tissue Value: Germinating Seeds
  misc_feature: MA Experiment ID: 108569 Result: Up-regulated in Transcription
  misc_feature: MA Experiment 108569 PARAMETER Experiment Name: At_0.001%_MeJA__cDNA_P Parameter: Timepoint (hr) Value: 6
  misc_feature: MA Experiment 108569 PARAMETER Experiment Name: At_0.001%_MeJA__cDNA_P Parameter: Tissue Value: Aerial
  misc_feature: MA Experiment 108569 PARAMETER Experiment Name: At_0.001%_MeJA__cDNA_P Parameter: Treatment Value: 0.001% MeJA vs. No Treatment
  misc_feature: MA Experiment ID: 108573 Result: Up-regulated in Transcription
  misc_feature: MA Experiment 108573 PARAMETER Experiment Name: At_Drought_cDNA_P Parameter: Timepoint (hr) Value: 6
  misc_feature: MA Experiment 108573 PARAMETER Experiment Name: At_Drought_cDNA_P Parameter: Tissue Value: Aerial
  misc_feature: MA Experiment 108573 PARAMETER Experiment Name: At_Drought_cDNA_P Parameter: Treatment Value: Drought vs. No Drought
  misc_feature: MA Experiment ID: 108576 Result: Up-regulated in Transcription
  misc_feature: MA Experiment 108576 PARAMETER Experiment Name: At_42deg_Heat_cDNA_P Parameter: Temperature (deg C) Value: 42 vs. 22
  misc_feature: MA Experiment 108576 PARAMETER Experiment Name: At_42deg_Heat_cDNA_P Parameter: Timepoint (hr) Value: 1
  misc_feature: MA Experiment 108576 PARAMETER Experiment Name: At_42deg_Heat_cDNA_P Parameter: Tissue Value: Aerial
  misc_feature: MA Experiment ID: 108577 Result: Up-regulated in Transcription
  misc_feature: MA Experiment 108577 PARAMETER Experiment Name: At_42deg_Heat_cDNA_P Parameter: Temperature (deg C) Value: 42 vs. 22
  misc_feature: MA Experiment 108577 PARAMETER Experiment Name: At_42deg_Heat_cDNA_P Parameter: Timepoint (hr) Value: 6
  misc_feature: MA Experiment 108577 PARAMETER Experiment Name: At_42deg_Heat_cDNA_P Parameter: Tissue Value: Aerial
  misc_feature: MA Experiment ID: 108585 Result: Up-regulated in Transcription
  misc_feature: MA Experiment 108585 PARAMETER Experiment Name: At_5mM_NaNP_cDNA_P Parameter: Timepoint (hr) Value: 6
  misc_feature: MA Experiment 108585 PARAMETER Experiment Name: At_5mM_NaNP_cDNA_P Parameter: Tissue Value: Aerial
  misc_feature: MA Experiment 108585 PARAMETER Experiment Name: At_5mM_NaNP_cDNA_P Parameter: Treatment Value: null
  misc_feature: MA Experiment ID: 20000069 Result: Down-regulated in Transcription
  misc_feature: MA Experiment 20000069 PARAMETER Experiment Name: At_100uM_ABA_Mutants_cDNA_P Parameter: Plant Line Value: CS23
  misc_feature: MA Experiment 20000069 PARAMETER Experiment Name: At_100uM_ABA_Mutants_cDNA_P Parameter: Timepoint (hr) Value: 6
  misc_feature: MA Experiment 20000069 PARAMETER Experiment Name: At_100uM_ABA_Mutants_cDNA_P Parameter: Tissue Value: Aerial
  misc_feature: MA Experiment 20000069 PARAMETER Experiment Name: At_100uM_ABA_Mutants_cDNA_P Parameter: Treatment Value: 100uM ABA vs. No Treatment
  misc_feature: MA Experiment ID: 20000087 Result: Down-regulated in Transcription
  misc_feature: MA Experiment 20000087 PARAMETER Experiment Name: At_100uM_ABA_Mutants_cDNA_P Parameter: Plant Line Value: WS
  misc_feature: MA Experiment 20000087 PARAMETER Experiment Name: At_100uM_ABA_Mutants_cDNA_P Parameter: Timepoint (hr) Value: 6
  misc_feature: MA Experiment 20000087 PARAMETER Experiment Name: At_100uM_ABA_Mutants_cDNA_P Parameter: Tissue Value: Aerial
  misc_feature: MA Experiment 20000087 PARAMETER Experiment Name: At_100uM_ABA_Mutants_cDNA_P Parameter: Treatment Value: 100uM ABA vs. No Treatment
  misc_feature: MA Experiment ID: 20000093 Result: Up-regulated in Transcription
  misc_feature: MA Experiment 20000093 PARAMETER Experiment Name: At_42deg_Heat_cDNA_P Parameter: Temperature (deg C) Value: 42 vs. 22
  misc_feature: MA Experiment 20000093 PARAMETER Experiment Name: At_42deg_Heat_cDNA_P Parameter: Timepoint (hr) Value: 0.5
  misc_feature: MA Experiment 20000093 PARAMETER Experiment Name: At_42deg_Heat_cDNA_P Parameter: Tissue Value: Aerial
  misc_feature: MA Experiment ID: 20000112 Result: Up-regulated in Transcription
  misc_feature: MA Experiment 20000112 PARAMETER Experiment Name: At_42deg_Heat_cDNA_P Parameter: Temperature (deg C) Value: 42 vs. 22
  misc_feature: MA Experiment 20000112 PARAMETER Experiment Name: At_42deg_Heat_cDNA_P Parameter: Timepoint (hr) Value: 2
  misc_feature: MA Experiment 20000112 PARAMETER Experiment Name: At_42deg_Heat_cDNA_P Parameter: Tissue Value: Aerial
  misc_feature: MA Experiment ID: 20000144 Result: Up-regulated in Transcription
  misc_feature: MA Experiment 20000144 PARAMETER Experiment Name: At_42deg_Heat_cDNA_P Parameter: Temperature (deg C) Value: 42 vs. 22
  misc_feature: MA Experiment 20000144 PARAMETER Experiment Name: At_42deg_Heat_cDNA_P Parameter: Timepoint (hr) Value: 1
  misc_feature: MA Experiment 20000144 PARAMETER Experiment Name: At_42deg_Heat_cDNA_P Parameter: Tissue Value: Aerial
  misc_feature: MA Experiment ID: 20000171 Result: Up-regulated in Transcription
  misc_feature: MA Experiment 20000171 PARAMETER Experiment Name: At_42deg_Heat_P Parameter: Age (day) Value: 14
  misc_feature: MA Experiment 20000171 PARAMETER Experiment Name: At_42deg_Heat_P Parameter: Organism Value: A. thaliana
  misc_feature: MA Experiment 20000171 PARAMETER Experiment Name: At_42deg_Heat_P Parameter: Plant Line Value: WS
  misc_feature: MA Experiment 20000171 PARAMETER Experiment Name: At_42deg_Heat_P Parameter: Temperature (deg C) Value: 42 vs. 22
  misc_feature: MA Experiment 20000171 PARAMETER Experiment Name: At_42deg_Heat_P Parameter: Timepoint (hr) Value: 1
  misc_feature: MA Experiment 20000171 PARAMETER Experiment Name: At_42deg_Heat_P Parameter: Tissue Value: Aerial
  misc_feature: MA Experiment ID: 20000173 Result: Up-regulated in Transcription
  misc_feature: MA Experiment 20000173 PARAMETER Experiment Name: At_42deg_Heat_P Parameter: Age (day) Value: 14
  misc_feature: MA Experiment 20000173 PARAMETER Experiment Name: At_42deg_Heat_P Parameter: Organism Value: A. thaliana
  misc_feature: MA Experiment 20000173 PARAMETER Experiment Name: At_42deg_Heat_P Parameter: Plant Line Value: WS
  misc_feature: MA Experiment 20000173 PARAMETER Experiment Name: At_42deg_Heat_P Parameter: Temperature (deg C) Value: 42 vs. 22
  misc_feature: MA Experiment 20000173 PARAMETER Experiment Name: At_42deg_Heat_P Parameter: Timepoint (hr) Value: 6
  misc_feature: MA Experiment 20000173 PARAMETER Experiment Name: At_42deg_Heat_P Parameter: Tissue Value: Aerial
  misc_feature: MA Experiment ID: 20000179 Result: Down-regulated in Transcription
  misc_feature: MA Experiment 20000179 PARAMETER Experiment Name: At_Germinating_Seeds_P Parameter: Age (hr) Value: 6 vs. 0
  misc_feature: MA Experiment 20000179 PARAMETER Experiment Name: At_Germinating_Seeds_P Parameter: Tissue Value: Germinating Seeds
  misc_feature: MA Experiment ID: 20000184 Result: Up-regulated in Transcription
  misc_feature: MA Experiment 20000184 PARAMETER Experiment Name: At_Shoots__P Parameter: Age (day) Value: 7
  misc_feature: MA Experiment 20000184 PARAMETER Experiment Name: At_Shoots__P Parameter: Tissue Value: Shoots vs. Whole Plant
  misc_feature: MA Experiment ID: 20000185 Result: Up-regulated in Transcription
  misc_feature: MA Experiment 20000185 PARAMETER Experiment Name: At_Roots__P Parameter: Age (day) Value: 7 vs. 21
  misc_feature: MA Experiment 20000185 PARAMETER Experiment Name: At_Roots__P Parameter: Organism Value: A. thaliana
  misc_feature: MA Experiment 20000185 PARAMETER Experiment Name: At_Roots__P Parameter: Tissue Value: Roots vs. Whole Plant
  misc_feature: MA Experiment ID: 20000234 Result: Up-regulated in Transcription
  misc_feature: MA Experiment 20000234 PARAMETER Experiment Name: At_Siliques_P Parameter: Age (day) Value: 21
  misc_feature: MA Experiment 20000234 PARAMETER Experiment Name: At_Siliques_P Parameter: Organism Value: A. thaliana
  misc_feature: MA Experiment 20000234 PARAMETER Experiment Name: At_Siliques_P Parameter: Plant Line Value: WS
  misc_feature: MA Experiment 20000234 PARAMETER Experiment Name: At_Siliques_P Parameter: Tissue Value: Less Than 5mm Siliques vs. Whole Plant
  misc_feature: MA Experiment ID: 20000439 Result: Up-regulated in Transcription
  misc_feature: MA Experiment 20000439 PARAMETER Experiment Name: At_Roots__P Parameter: Age (day) Value: 14 vs. 21
  misc_feature: MA Experiment 20000439 PARAMETER Experiment Name: At_Roots__P Parameter: Organism Value: A. thaliana
  misc_feature: MA Experiment 20000439 PARAMETER Experiment Name: At_Roots__P Parameter: Tissue Value: Roots vs. Whole Plant
  misc_feature: MA Experiment ID: 20000794 Result: Up-regulated in Transcription
  misc_feature: MA Experiment 20000794 PARAMETER Experiment Name: At_Petals_P Parameter: Age (day) Value: 23-25 days
  misc_feature: MA Experiment 20000794 PARAMETER Experiment Name: At_Petals_P Parameter: Plant Line Value: WS
  misc_feature: MA Experiment 20000794 PARAMETER Experiment Name: At_Petals_P Parameter: Tissue Value: Petals vs. Whole plant
  misc_feature: MA Experiment ID: 20001248 Result: Down-regulated in Transcription
  misc_feature: MA Experiment 20001248 PARAMETER Experiment Name: At_Far-red-induction_P Parameter: Age (day) Value: 7
  misc_feature: MA Experiment 20001248 PARAMETER Experiment Name: At_Far-red-induction_P Parameter: Light Value: Far-red vs. White
  misc_feature: MA Experiment 20001248 PARAMETER Experiment Name: At_Far-red-induction_P Parameter: Organism Value: A. thaliana
  misc_feature: MA Experiment 20001248 PARAMETER Experiment Name: At_Far-red-induction_P Parameter: Plant Line Value: Columbia
  misc_feature: MA Experiment 20001248 PARAMETER Experiment Name: At_Far-red-induction_P Parameter: Timepoint (hr) Value: 4
  misc_feature: MA Experiment 20001248 PARAMETER Experiment Name: At_Far-red-induction_P Parameter: Tissue Value: Whole Plant
  misc_feature: MA Experiment ID: 20001450 Result: Down-regulated in Transcription
  misc_feature: MA Experiment 20001450 PARAMETER Experiment Name: At_Far-red-induction_P Parameter: Age (day) Value: 7
  misc_feature: MA Experiment 20001450 PARAMETER Experiment Name: At_Far-red-induction_P Parameter: Light Value: Far-red vs. White
  misc_feature: MA Experiment 20001450 PARAMETER Experiment Name: At_Far-red-induction_P Parameter: Organism Value: A. thaliana
  misc_feature: MA Experiment 20001450 PARAMETER Experiment Name: At_Far-red-induction_P Parameter: Plant Line Value: Columbia
  misc_feature: MA Experiment 20001450 PARAMETER Experiment Name: At_Far-red-induction_P Parameter: Timepoint (hr) Value: 8
  misc_feature: MA Experiment 20001450 PARAMETER Experiment Name: At_Far-red-induction_P Parameter: Tissue Value: Whole Plant
  misc_feature: MA Experiment ID: 20001451 Result: Down-regulated in Transcription
  misc_feature: MA Experiment 20001451 PARAMETER Experiment Name: At_Far-red-induction_P Parameter: Age (day) Value: 7
  misc_feature: MA Experiment 20001451 PARAMETER Experiment Name: At_Far-red-induction_P Parameter: Light Value: Far-red vs. White
  misc_feature: MA Experiment 20001451 PARAMETER Experiment Name: At_Far-red-induction_P Parameter: Organism Value: A. thaliana
  misc_feature: MA Experiment 20001451 PARAMETER Experiment Name: At_Far-red-induction_P Parameter: Plant Line Value: Columbia
  misc_feature: MA Experiment 20001451 PARAMETER Experiment Name: At_Far-red-induction_P Parameter: Timepoint (hr) Value: 24
  misc_feature: MA Experiment 20001451 PARAMETER Experiment Name: At_Far-red-induction_P Parameter: Tissue Value: Whole Plant
agattccgattgttttcttcgattaagttttgagctagattctctagatctgtttcaccgatttggttgatttctccgtcaatctgaactcgcggtgtgcatcttgttgtttgcagtgtttttagtttgttttacgaagaatcaactatggcgacgaagagaagcgttggaactttgaaggaagcggatctgaagggaaagagtgtgttcgtgagggttgatctcaacgttcctttggatgataactctaacatcaccgatgacaccaggattcgtgccgctgttcccaccatcaagtacttgatgggtaatggatctagggttgttctctgcagtcacttgggccgcccaaaaggtgttactcctaagtacagcttaaagcctcttgtgcccagattgtctgaacttcttggtgttgaggttgtaatggcaaatgactctattggtgaggaagtccagaagttggttgcaggactacctgaaggtggtgttttgctcttggagaatgtgaggttctacgccgaggaagagaagaatgatcctgaatttgcaaagaagcttgctgctcttgccgatgtttacgttaatgatgccttcggaactgctcacagagctcatgcttccactgagggagttgccaaattcttgaagccttcagttgctggtttcctcatgcagaaggaacttgattaccttgtcggagctgtggcaaaccccaagaagccttttgctgccattgttggaggctcaaaggtttcaacaaagattggtgtcattgagtctctcttgaacacagttgacatcctcctgctcggtggaggtatgatttttactttctacaaggcacaaggactctcagtcggatcttcccttgtggaggaggacaagcttgacttggcaaagtcactcatggagaaagcaaaggccaaaggtgtctctctcttgctcccaaccgatgtggttattgctgacaagtttgctcccgatgctaacagcaagatagtgccagccactgccatccctgatggctggatgggtctagatattggtccagactccatcaagacattcagcgaagctctggacacaaccaaaaccatcatctggaatggtcccatgggtgtgtttgaattcgataagtttgctgctggaactgaggccgtagcaaagcagcttgcagaactaagcggaaagggagtaaccacaatcattggaggaggtgactctgttgctgccgtcgagaaggttggtttggcagacaagatgagccacatctctaccggaggcggtgctagtttggagcttcttgagggtaagccacttccaggagtcctcgctctcgacgaagcttgaaaatcctcacgttggatttcatcgctattttgtgttgttatatgtataagtcgtctggttatcttgtgaccagacgagcaagccattatttatcagcttgagattttcgtctacggctctctttttatgagttttttagtttggagcctttttttaataataagagatgaaactctgattgacg

SEQ ID NO: 40267 - protein, 401 aa, Arabidopsis thaliana; identical to SEQ ID NO: 24557
  peptide (1)..(401): Ceres Seq. ID no. 12327753
  misc_feature (3)..(401): Pfam Name: Phosphoglycerate kinase Pfam Description: Phosphoglycerate kinase
  misc_feature (1)..(401): Homolog of NCBI NO: 7434544 NR Description: phosphoglycerate kinase (EC 2.7.2.3) precursor,
  misc_feature (1)..(401): Homolog of NCBI NO: 2499497 NR Description: Phosphoglycerate kinase, chloroplast precursor
  misc_feature (1)..(401): Homolog of NCBI NO: 129916 NR Description: Phosphoglycerate kinase, cytosolic
  misc_feature (1)..(401): Homolog of NCBI NO: 3738259 NR Description: cytosolic phosphoglycerate kinase 1 [Populus
  misc_feature (1)..(401): Homolog of NCBI NO: 29124969 NR Description: 3-phosphoglycerate kinase [Populus tremuloides]
  misc_feature (1)..(401): Homolog of NCBI NO: 9230771 NR Description: cytosolic phosphoglycerate kinase [Pisum sativum]
  misc_feature (1)..(401): Homolog of NCBI NO: 2499498 NR Description: Phosphoglycerate kinase, cytosolic
  misc_feature (1)..(401): Homolog of NCBI NO: 3738257 NR Description: cytosolic phosphoglycerate kinase 1 [Populus
  misc_feature (1)..(401): Homolog of NCBI NO: 21536853 NR Description: phosphoglycerate kinase, putative [Arabidopsis
  misc_feature (1)..(401): Homolog of NCBI NO: 15219412 NR Description: phosphoglycerate kinase, putative

SEQ ID NO: 40268 - protein, 349 aa, Arabidopsis thaliana; identical to SEQ ID NO: 24558
  peptide (1)..(349): Ceres Seq. ID no. 12327754
  misc_feature (1)..(349): Pfam Name: Phosphoglycerate kinase Pfam Description: Phosphoglycerate kinase
  misc_feature (1)..(349): Homolog of NCBI NO: 7434544 NR Description: phosphoglycerate kinase (EC 2.7.2.3) precursor,
  misc_feature (1)..(349): Homolog of NCBI NO: 2499497 NR Description: Phosphoglycerate kinase, chloroplast precursor
  misc_feature (1)..(349): Homolog of NCBI NO: 129916 NR Description: Phosphoglycerate kinase, cytosolic
  misc_feature (1)..(349): Homolog of NCBI NO: 3738259 NR Description: cytosolic phosphoglycerate kinase 1 [Populus
  misc_feature (1)..(349): Homolog of NCBI NO: 29124969 NR Description: 3-phosphoglycerate kinase [Populus tremuloides]
  misc_feature (1)..(349): Homolog of NCBI NO: 9230771 NR Description: cytosolic phosphoglycerate kinase [Pisum sativum]
  misc_feature (1)..(349): Homolog of NCBI NO: 2499498 NR Description: Phosphoglycerate kinase, cytosolic
  misc_feature (1)..(349): Homolog of NCBI NO: 3738257 NR Description: cytosolic phosphoglycerate kinase 1 [Populus
  misc_feature (1)..(349): Homolog of NCBI NO: 21536853 NR Description: phosphoglycerate kinase, putative [Arabidopsis
  misc_feature (1)..(349): Homolog of NCBI NO: 15219412 NR Description: phosphoglycerate kinase, putative

SEQ ID NO: 40269 - protein, 308 aa, Arabidopsis thaliana
  peptide (1)..(308): Ceres Seq. ID no. 12327755
  misc_feature (1)..(308): Pfam Name: Phosphoglycerate kinase Pfam Description: Phosphoglycerate kinase
  misc_feature (1)..(308): Homolog of NCBI NO: 7434544 NR Description: phosphoglycerate kinase (EC 2.7.2.3) precursor,
  misc_feature (1)..(308): Homolog of NCBI NO: 2499497 NR Description: Phosphoglycerate kinase, chloroplast precursor
  misc_feature (1)..(308): Homolog of NCBI NO: 129916 NR Description: Phosphoglycerate kinase, cytosolic
  misc_feature (1)..(308): Homolog of NCBI NO: 3738259 NR Description: cytosolic phosphoglycerate kinase 1 [Populus
  misc_feature (1)..(308): Homolog of NCBI NO: 29124969 NR Description: 3-phosphoglycerate kinase [Populus tremuloides]
  misc_feature (1)..(308): Homolog of NCBI NO: 9230771 NR Description: cytosolic phosphoglycerate kinase [Pisum sativum]
  misc_feature (1)..(308): Homolog of NCBI NO: 2499498 NR Description: Phosphoglycerate kinase, cytosolic
  misc_feature (1)..(308): Homolog of NCBI NO: 3738257 NR Description: cytosolic phosphoglycerate kinase 1 [Populus
  misc_feature (1)..(308): Homolog of NCBI NO: 21536853 NR Description: phosphoglycerate kinase, putative [Arabidopsis
  misc_feature (1)..(308): Homolog of NCBI NO: 15219412 NR Description: phosphoglycerate kinase, putative
MANDSIGEEVQKLVAGLPEGGVLLLENVRFYAEEEKNDPEFAKKLAALADVYVNDAFGTAHRAHASTEGVAKFLKPSVAGFLMQKELDYLVGAVANPKKPFAAIVGGSKVSTKIGVIESLLNTVDILLLGGGMIFTFYKAQGLSVGSSLVEEDKLDLAKSLMEKAKAKGVSLLLPTDVVIADKFAPDANSKIVPATAIPDGWMGLDIGPDSIKTFSEALDTTKTIIWNGPMGVFEFDKFAAGTEAVAKQLAELSGKGVTTIIGGGDSVAAVEKVGLADKMSHISTGGGASLELLEGKPLPGVLALDEA

SEQ ID NO: 40270 - DNA, 1500 bp, Arabidopsis thaliana
  misc_feature (1)..(1500): Ceres Seq. ID no. 13494132
  misc_feature: MA Experiment ID: 108501 Result: Down-regulated in Transcription
  misc_feature: MA Experiment 108501 PARAMETER Experiment Name: At_ap2_floral_buds_cDNA_P Parameter: Plant Line Value: ap2 (Ler.)
  misc_feature: MA Experiment 108501 PARAMETER Experiment Name: At_ap2_floral_buds_cDNA_P Parameter: Tissue Value: Closed Flower
  misc_feature: MA Experiment ID: 108561 Result: Up-regulated in Transcription
  misc_feature: MA Experiment 108561 PARAMETER Experiment Name: At_100uM_ABA_cDNA_P Parameter: Timepoint (hr) Value: 6
  misc_feature: MA Experiment 108561 PARAMETER Experiment Name: At_100uM_ABA_cDNA_P Parameter: Tissue Value: Aerial
  misc_feature: MA Experiment 108561 PARAMETER Experiment Name: At_100uM_ABA_cDNA_P Parameter: Treatment Value: 100uM ABA vs. No Treatment
  misc_feature: MA Experiment ID: 108569 Result: Up-regulated in Transcription
  misc_feature: MA Experiment 108569 PARAMETER Experiment Name: At_0.001%_MeJA__cDNA_P Parameter: Timepoint (hr) Value: 6
  misc_feature: MA Experiment 108569 PARAMETER Experiment Name: At_0.001%_MeJA__cDNA_P Parameter: Tissue Value: Aerial
  misc_feature: MA Experiment 108569 PARAMETER Experiment Name: At_0.001%_MeJA__cDNA_P Parameter: Treatment Value: 0.001% MeJA vs. No Treatment
  misc_feature: MA Experiment ID: 108572 Result: Up-regulated in Transcription
  misc_feature: MA Experiment 108572 PARAMETER Experiment Name: At_Drought_cDNA_P Parameter: Timepoint (hr) Value: 1
  misc_feature: MA Experiment 108572 PARAMETER Experiment Name: At_Drought_cDNA_P Parameter: Tissue Value: Aerial
  misc_feature: MA Experiment 108572 PARAMETER Experiment Name: At_Drought_cDNA_P Parameter: Treatment Value: Drought vs. No Drought
  misc_feature: MA Experiment ID: 108573 Result: Up-regulated in Transcription
  misc_feature: MA Experiment 108573 PARAMETER Experiment Name: At_Drought_cDNA_P Parameter: Timepoint (hr) Value: 6
  misc_feature: MA Experiment 108573 PARAMETER Experiment Name: At_Drought_cDNA_P Parameter: Tissue Value: Aerial
  misc_feature: MA Experiment 108573 PARAMETER Experiment Name: At_Drought_cDNA_P Parameter: Treatment Value: Drought vs. No Drought
  misc_feature: MA Experiment ID: 108605 Result: Up-regulated in Transcription
  misc_feature: MA Experiment 108605 PARAMETER Experiment Name: At_100uM_ABA_cDNA_P Parameter: Timepoint (hr) Value: 6
  misc_feature: MA Experiment 108605 PARAMETER Experiment Name: At_100uM_ABA_cDNA_P Parameter: Tissue Value: Aerial
  misc_feature: MA Experiment 108605 PARAMETER Experiment Name: At_100uM_ABA_cDNA_P Parameter: Treatment Value: 100uM ABA vs. No Treatment
  misc_feature: MA Experiment ID: 108607 Result: Up-regulated in Transcription
  misc_feature: MA Experiment 108607 PARAMETER Experiment Name: At_100uM_ABA_cDNA_P Parameter: Timepoint (hr) Value: 4
  misc_feature: MA Experiment 108607 PARAMETER Experiment Name: At_100uM_ABA_cDNA_P Parameter: Tissue Value: Aerial
  misc_feature: MA Experiment 108607 PARAMETER Experiment Name: At_100uM_ABA_cDNA_P Parameter: Treatment Value: 100uM ABA vs. No Treatment
  misc_feature: MA Experiment ID: 20000069 Result: Up-regulated in Transcription
  misc_feature: MA Experiment 20000069 PARAMETER Experiment Name: At_100uM_ABA_Mutants_cDNA_P Parameter: Plant Line Value: CS23
  misc_feature: MA Experiment 20000069 PARAMETER Experiment Name: At_100uM_ABA_Mutants_cDNA_P Parameter: Timepoint (hr) Value: 6
  misc_feature: MA Experiment 20000069 PARAMETER Experiment Name: At_100uM_ABA_Mutants_cDNA_P Parameter: Tissue Value: Aerial
  misc_feature: MA Experiment 20000069 PARAMETER Experiment Name: At_100uM_ABA_Mutants_cDNA_P Parameter: Treatment Value: 100uM ABA vs. No Treatment
  misc_feature: MA Experiment ID: 20000070 Result: Up-regulated in Transcription
  misc_feature: MA Experiment 20000070 PARAMETER Experiment Name: At_100uM_ABA_Mutants_cDNA_P Parameter: Plant Line Value: CS24
  misc_feature: MA Experiment 20000070 PARAMETER Experiment Name: At_100uM_ABA_Mutants_cDNA_P Parameter: Timepoint (hr) Value: 6
  misc_feature: MA Experiment 20000070 PARAMETER Experiment Name: At_100uM_ABA_Mutants_cDNA_P Parameter: Tissue Value: Aerial
  misc_feature: MA Experiment 20000070 PARAMETER Experiment Name: At_100uM_ABA_Mutants_cDNA_P Parameter: Treatment Value: 100uM ABA vs. No Treatment
  misc_feature: MA Experiment ID: 20000071 Result: Up-regulated in Transcription
  misc_feature: MA Experiment 20000071 PARAMETER Experiment Name: At_100uM_ABA_Mutants_cDNA_P Parameter: Plant Line Value: CS8104
  misc_feature: MA Experiment 20000071 PARAMETER Experiment Name: At_100uM_ABA_Mutants_cDNA_P Parameter: Timepoint (hr) Value: 6
  misc_feature: MA Experiment 20000071 PARAMETER Experiment Name: At_100uM_ABA_Mutants_cDNA_P Parameter: Tissue Value: Aerial
  misc_feature: MA Experiment 20000071 PARAMETER Experiment Name: At_100uM_ABA_Mutants_cDNA_P Parameter: Treatment Value: 100uM ABA vs. No Treatment
  misc_feature: MA Experiment ID: 20000072 Result: Up-regulated in Transcription
  misc_feature: MA Experiment 20000072 PARAMETER Experiment Name: At_100uM_ABA_Mutants_cDNA_P Parameter: Plant Line Value: CS8105
  misc_feature: MA Experiment 20000072 PARAMETER Experiment Name: At_100uM_ABA_Mutants_cDNA_P Parameter: Timepoint (hr) Value: 6
  misc_feature: MA Experiment 20000072 PARAMETER Experiment Name: At_100uM_ABA_Mutants_cDNA_P Parameter: Tissue Value: Aerial
  misc_feature: MA Experiment 20000072 PARAMETER Experiment Name: At_100uM_ABA_Mutants_cDNA_P Parameter: Treatment Value: 100uM ABA vs. No Treatment
  misc_feature: MA Experiment ID: 20000086 Result: Up-regulated in Transcription
  misc_feature: MA Experiment 20000086 PARAMETER Experiment Name: At_100uM_ABA_Mutants_cDNA_P Parameter: Plant Line Value: CS22
  misc_feature: MA Experiment 20000086 PARAMETER Experiment Name: At_100uM_ABA_Mutants_cDNA_P Parameter: Timepoint (hr) Value: 6
  misc_feature: MA Experiment 20000086 PARAMETER Experiment Name: At_100uM_ABA_Mutants_cDNA_P Parameter: Tissue Value: Aerial
  misc_feature: MA Experiment 20000086 PARAMETER Experiment Name: At_100uM_ABA_Mutants_cDNA_P Parameter: Treatment Value: 100uM ABA vs. No Treatment
  misc_feature: MA Experiment ID: 20000087 Result: Up-regulated in Transcription
  misc_feature: MA Experiment 20000087 PARAMETER Experiment Name: At_100uM_ABA_Mutants_cDNA_P Parameter: Plant Line Value: WS
  misc_feature: MA Experiment 20000087 PARAMETER Experiment Name: At_100uM_ABA_Mutants_cDNA_P Parameter: Timepoint (hr) Value: 6
  misc_feature: MA Experiment 20000087 PARAMETER Experiment Name: At_100uM_ABA_Mutants_cDNA_P Parameter: Tissue Value: Aerial
  misc_feature: MA Experiment 20000087 PARAMETER Experiment Name: At_100uM_ABA_Mutants_cDNA_P Parameter: Treatment Value: 100uM ABA vs. No Treatment
  misc_feature: MA Experiment ID: 20000088 Result: Up-regulated in Transcription
  misc_feature: MA Experiment 20000088 PARAMETER Experiment Name: At_100uM_ABA_Mutants_cDNA_P Parameter: Plant Line Value: Landsberg
  misc_feature: MA Experiment 20000088 PARAMETER Experiment Name: At_100uM_ABA_Mutants_cDNA_P Parameter: Timepoint (hr) Value: 6
  misc_feature: MA Experiment 20000088 PARAMETER Experiment Name: At_100uM_ABA_Mutants_cDNA_P Parameter: Tissue Value: Aerial
  misc_feature: MA Experiment 20000088 PARAMETER Experiment Name: At_100uM_ABA_Mutants_cDNA_P Parameter: Treatment Value: 100uM ABA vs. No Treatment
  misc_feature: MA Experiment ID: 20000169 Result: Up-regulated in Transcription
  misc_feature: MA Experiment 20000169 PARAMETER Experiment Name: At_100uM_ABA_P Parameter: Age (day) Value: 14
  misc_feature: MA Experiment 20000169 PARAMETER Experiment Name: At_100uM_ABA_P Parameter: Organism Value: A. thaliana
  misc_feature: MA Experiment 20000169 PARAMETER Experiment Name: At_100uM_ABA_P Parameter: Plant Line Value: WS
  misc_feature: MA Experiment 20000169 PARAMETER Experiment Name: At_100uM_ABA_P Parameter: Timepoint (hr) Value: 6
  misc_feature: MA Experiment 20000169 PARAMETER Experiment Name: At_100uM_ABA_P Parameter: Tissue Value: Aerial
  misc_feature: MA Experiment 20000169 PARAMETER Experiment Name: At_100uM_ABA_P Parameter: Treatment Value: 100uM ABA vs. No Treatment
  misc_feature: MA Experiment ID: 20000171 Result: Down-regulated in Transcription
  misc_feature: MA Experiment 20000171 PARAMETER Experiment Name: At_42deg_Heat_P Parameter: Age (day) Value: 14
  misc_feature: MA Experiment 20000171 PARAMETER Experiment Name: At_42deg_Heat_P Parameter: Organism Value: A. thaliana
  misc_feature: MA Experiment 20000171 PARAMETER Experiment Name: At_42deg_Heat_P Parameter: Plant Line Value: WS
  misc_feature: MA Experiment 20000171 PARAMETER Experiment Name: At_42deg_Heat_P Parameter: Temperature (deg C) Value: 42 vs. 22
  misc_feature: MA Experiment 20000171 PARAMETER Experiment Name: At_42deg_Heat_P Parameter: Timepoint (hr) Value: 1
  misc_feature: MA Experiment 20000171 PARAMETER Experiment Name: At_42deg_Heat_P Parameter: Tissue Value: Aerial
  misc_feature: MA Experiment ID: 20000264 Result: Up-regulated in Transcription
  misc_feature: MA Experiment 20000264 PARAMETER Experiment Name: At_Open_Flower_P Parameter: Age (day) Value: 21
  misc_feature: MA Experiment 20000264 PARAMETER Experiment Name: At_Open_Flower_P Parameter: Plant Line Value: WS
  misc_feature: MA Experiment 20000264 PARAMETER Experiment Name: At_Open_Flower_P Parameter: Tissue Value: Open Flower vs. Whole Plant
  misc_feature: MA Experiment ID: 20000265 Result: Up-regulated in Transcription
  misc_feature: MA Experiment 20000265 PARAMETER Experiment Name: At_Open_Flower_P Parameter: Age (day) Value: 21
  misc_feature: MA Experiment 20000265 PARAMETER Experiment Name: At_Open_Flower_P Parameter: Plant Line Value: WS
  misc_feature: MA Experiment 20000265 PARAMETER Experiment Name: At_Open_Flower_P Parameter: Tissue Value: Closed Flower vs. Whole Plant
  misc_feature: MA Experiment ID: 20000286 Result: Up-regulated in Transcription
  misc_feature: MA Experiment 20000286 PARAMETER Experiment Name: At_Open_Flower_P Parameter: Age (day) Value: 21
  misc_feature: MA Experiment 20000286 PARAMETER Experiment Name: At_Open_Flower_P Parameter: Plant Line Value: WS
  misc_feature: MA Experiment 20000286 PARAMETER Experiment Name: At_Open_Flower_P Parameter: Tissue Value: Half Open vs. Whole Plant
  misc_feature: MA Experiment ID: 20000437 Result: Up-regulated in Transcription
  misc_feature: MA Experiment 20000437 PARAMETER Experiment Name: At_Drought_P Parameter: Age (day) Value: 8
  misc_feature: MA Experiment 20000437 PARAMETER Experiment Name: At_Drought_P Parameter: Organism Value: A. thaliana
  misc_feature: MA Experiment 20000437 PARAMETER Experiment Name: At_Drought_P Parameter: Plant Line Value: WS
  misc_feature: MA Experiment 20000437 PARAMETER Experiment Name: At_Drought_P Parameter: Timepoint (hr) Value: 24
  misc_feature: MA Experiment 20000437 PARAMETER Experiment Name: At_Drought_P Parameter: Tissue Value: Whole Plant
  misc_feature: MA Experiment 20000437 PARAMETER Experiment Name: At_Drought_P Parameter: Treatment Value: Drought vs. No Drought
  misc_feature: MA Experiment ID: 20000453 Result: Up-regulated in Transcription
  misc_feature: MA Experiment 20000453 PARAMETER Experiment Name: At_100uM_ABA_P Parameter: Age (day) Value: 15
  misc_feature: MA Experiment 20000453 PARAMETER Experiment Name: At_100uM_ABA_P Parameter: Organism Value: A. thaliana
  misc_feature: MA Experiment 20000453 PARAMETER Experiment Name: At_100uM_ABA_P Parameter: Plant Line Value: WS
  misc_feature: MA Experiment 20000453 PARAMETER Experiment Name: At_100uM_ABA_P Parameter: Timepoint (hr) Value: 24
  misc_feature: MA Experiment 20000453 PARAMETER Experiment Name: At_100uM_ABA_P Parameter: Tissue Value: Aerial
  misc_feature: MA Experiment 20000453 PARAMETER Experiment Name: At_100uM_ABA_P Parameter: Treatment Value: 100uM ABA vs. No Treatment
  misc_feature: MA Experiment ID: 20000495 Result: Down-regulated in Transcription
  misc_feature: MA Experiment 20000495 PARAMETER Experiment Name: At_Guard_Cells_P Parameter: Harvest Date Value: 8/2/2002
  misc_feature: MA Experiment 20000495 PARAMETER Experiment Name: At_Guard_Cells_P Parameter: Organism Value: A. thaliana
  misc_feature: MA Experiment 20000495 PARAMETER Experiment Name: At_Guard_Cells_P Parameter: Tissue Value: Guard Cells vs. Leaves
  misc_feature: MA Experiment ID: 20000573 Result: Up-regulated in Transcription
  misc_feature: MA Experiment 20000573 PARAMETER Experiment Name: At_100uM_ABA_Mutants__P Parameter: Organism Value: A. thaliana
  misc_feature: MA Experiment 20000573 PARAMETER Experiment Name: At_100uM_ABA_Mutants__P Parameter: Plant Line Value: CS22 vs. Ler wt
  misc_feature: MA Experiment 20000573 PARAMETER Experiment Name: At_100uM_ABA_Mutants__P Parameter: Timepoint (hr) Value: N/A
  misc_feature: MA Experiment 20000573 PARAMETER Experiment Name: At_100uM_ABA_Mutants__P Parameter: Tissue Value: Whole Plant
  misc_feature: MA Experiment 20000573 PARAMETER Experiment Name: At_100uM_ABA_Mutants__P Parameter: Treatment Value: None
  misc_feature: MA Experiment ID: 20000574 Result: Up-regulated in Transcription
  misc_feature: MA Experiment 20000574 PARAMETER Experiment Name: At_100uM_ABA_Mutants__P Parameter: Organism Value: A. thaliana
  misc_feature: MA Experiment 20000574 PARAMETER Experiment Name: At_100uM_ABA_Mutants__P Parameter: Plant Line Value: CS23 vs. Ler wt
  misc_feature: MA Experiment 20000574 PARAMETER Experiment Name: At_100uM_ABA_Mutants__P Parameter: Timepoint (hr) Value: N/A
  misc_feature: MA Experiment 20000574 PARAMETER Experiment Name: At_100uM_ABA_Mutants__P Parameter: Tissue Value: Whole Plant
  misc_feature: MA Experiment 20000574 PARAMETER Experiment Name: At_100uM_ABA_Mutants__P Parameter: Treatment Value: None
  misc_feature: MA Experiment ID: 20000709 Result: Down-regulated in Transcription
  misc_feature: MA Experiment 20000709 PARAMETER Experiment Name: At_15mM_NH4NO3_L-to-H_P Parameter: Age (hr) Value: 14
  misc_feature: MA Experiment 20000709 PARAMETER Experiment Name: At_15mM_NH4NO3_L-to-H_P Parameter: Organism Value: A. thaliana
  misc_feature: MA Experiment 20000709 PARAMETER Experiment Name: At_15mM_NH4NO3_L-to-H_P Parameter: Plant Line Value: WS
  misc_feature: MA Experiment 20000709 PARAMETER Experiment Name: At_15mM_NH4NO3_L-to-H_P Parameter: Timepoint (hr) Value: 4
  misc_feature: MA Experiment 20000709 PARAMETER Experiment Name: At_15mM_NH4NO3_L-to-H_P Parameter: Tissue Value: Aerial
  misc_feature: MA Experiment 20000709 PARAMETER Experiment Name: At_15mM_NH4NO3_L-to-H_P Parameter: Treatment Value: 15mM NH4NO3 vs. 30mM Mannitol
  misc_feature: MA Experiment ID: 20001457 Result: Down-regulated in Transcription
  misc_feature: MA Experiment 20001457 PARAMETER Experiment Name: At_50mM_NH4NO3_L-to-H_P Parameter: Age (day) Value: Undefined
  misc_feature: MA Experiment 20001457 PARAMETER Experiment Name: At_50mM_NH4NO3_L-to-H_P Parameter: Organism Value: Undefined
  misc_feature: MA Experiment 20001457 PARAMETER Experiment Name: At_50mM_NH4NO3_L-to-H_P Parameter: Plant Line Value: Undefined
  misc_feature: MA Experiment 20001457 PARAMETER Experiment Name: At_50mM_NH4NO3_L-to-H_P Parameter: Timepoint (hr) Value: 0.5
  misc_feature: MA Experiment 20001457 PARAMETER Experiment Name: At_50mM_NH4NO3_L-to-H_P Parameter: Tissue Value: Siliques
  misc_feature: MA Experiment 20001457 PARAMETER Experiment Name: At_50mM_NH4NO3_L-to-H_P Parameter: Treatment Value: 50mM NH4NO3 vs. 100mM Manitol
  misc_feature: MA Experiment ID: 20001554 Result: Up-regulated in Transcription
  misc_feature: MA Experiment 20001554 PARAMETER Experiment Name: At_Drought_Soil_Dry_P Parameter: Age (day) Value: 21
  misc_feature: MA Experiment 20001554 PARAMETER Experiment Name: At_Drought_Soil_Dry_P Parameter: Organism Value: A. thaliana
  misc_feature: MA Experiment 20001554 PARAMETER Experiment Name: At_Drought_Soil_Dry_P Parameter: Plant Line Value: WS
  misc_feature: MA Experiment 20001554 PARAMETER Experiment Name: At_Drought_Soil_Dry_P Parameter: Post Timepoint (hr) Value: None
  misc_feature: MA Experiment 20001554 PARAMETER Experiment Name: At_Drought_Soil_Dry_P Parameter: Post-Treatment Value: None
  misc_feature: MA Experiment 20001554 PARAMETER Experiment Name: At_Drought_Soil_Dry_P Parameter: Timepoint (day) Value: 7
  misc_feature: MA Experiment 20001554 PARAMETER Experiment Name: At_Drought_Soil_Dry_P Parameter: Treatment Value: Drought vs. No Drought
  misc_feature: MA Experiment ID: 20001555 Result: Up-regulated in Transcription
  misc_feature: MA Experiment 20001555 PARAMETER Experiment Name: At_Drought_Soil_Dry_P Parameter: Age (day) Value: 24
  misc_feature: MA Experiment 20001555 PARAMETER Experiment Name: At_Drought_Soil_Dry_P Parameter: Organism Value: A. thaliana
  misc_feature: MA Experiment 20001555 PARAMETER Experiment Name: At_Drought_Soil_Dry_P Parameter: Plant Line Value: WS
  misc_feature: MA Experiment 20001555 PARAMETER Experiment Name: At_Drought_Soil_Dry_P Parameter: Post Timepoint (hr) Value: None
  misc_feature: MA Experiment 20001555 PARAMETER Experiment Name: At_Drought_Soil_Dry_P Parameter: Post-Treatment Value: None
  misc_feature: MA Experiment 20001555 PARAMETER Experiment Name: At_Drought_Soil_Dry_P Parameter: Timepoint (day) Value: 10
  misc_feature: MA Experiment 20001555 PARAMETER Experiment Name: At_Drought_Soil_Dry_P Parameter: Treatment Value: Drought vs. No Drought
  misc_feature: MA Experiment ID: 20001559 Result: Up-regulated in Transcription
  misc_feature: MA Experiment 20001559 PARAMETER Experiment Name: At_Drought_Soil_Dry_P Parameter: Age (day) Value: 28
  misc_feature: MA Experiment 20001559 PARAMETER Experiment Name: At_Drought_Soil_Dry_P Parameter: Organism Value: A. thaliana
  misc_feature: MA Experiment 20001559 PARAMETER Experiment Name: At_Drought_Soil_Dry_P Parameter: Plant Line Value: WS
  misc_feature: MA Experiment 20001559 PARAMETER Experiment Name: At_Drought_Soil_Dry_P Parameter: Post Timepoint (hr) Value: 29
  misc_feature: MA Experiment 20001559 PARAMETER Experiment Name: At_Drought_Soil_Dry_P Parameter: Post-Treatment Value: Re-Water vs. No Drought
  misc_feature: MA Experiment 20001559 PARAMETER Experiment Name: At_Drought_Soil_Dry_P Parameter: Timepoint (day) Value: 14
  misc_feature: MA Experiment 20001559 PARAMETER Experiment Name: At_Drought_Soil_Dry_P Parameter: Treatment Value: Drought vs. No Drought
  misc_feature: MA Experiment ID: 20001757 Result: Down-regulated in Transcription
  misc_feature: MA Experiment 20001757 PARAMETER Experiment Name: At_50mM_NH4NO3_L-to-H_P Parameter: Timepoint (hr) Value: 6
  misc_feature: MA Experiment 20001757 PARAMETER Experiment Name: At_50mM_NH4NO3_L-to-H_P Parameter: Tissue Value: Leaf
  misc_feature: MA Experiment 20001757 PARAMETER Experiment Name: At_50mM_NH4NO3_L-to-H_P Parameter: Treatment Value: 50mM NH4NO3 vs 100mM Mannitol
  misc_feature: MA Experiment ID: 20001904 Result: Up-regulated in Transcription
  misc_feature: MA Experiment 20001904 PARAMETER Experiment Name: At_Drought_Reproduction_P Parameter: Age (day) Value: 37
  misc_feature: MA Experiment 20001904 PARAMETER Experiment Name: At_Drought_Reproduction_P Parameter: Organism Value: A. thaliana
  misc_feature: MA Experiment 20001904 PARAMETER Experiment Name: At_Drought_Reproduction_P Parameter: Plant Line Value: WS
  misc_feature: MA Experiment 20001904 PARAMETER Experiment Name: At_Drought_Reproduction_P Parameter: Timepoint (day) Value: 7
  misc_feature: MA Experiment 20001904 PARAMETER Experiment Name: At_Drought_Reproduction_P Parameter: Tissue Value: Rosettes
  misc_feature: MA Experiment 20001904 PARAMETER Experiment Name: At_Drought_Reproduction_P Parameter: Treatment Value: Drought vs. No Drought
  misc_feature: MA Experiment ID: 20001905 Result: Up-regulated in Transcription
  misc_feature: MA Experiment 20001905 PARAMETER Experiment Name: At_Drought_Reproduction_P Parameter: Age (day) Value: 40
  misc_feature: MA Experiment 20001905 PARAMETER Experiment Name: At_Drought_Reproduction_P Parameter: Organism Value: A. thaliana
  misc_feature: MA Experiment 20001905 PARAMETER Experiment Name: At_Drought_Reproduction_P Parameter: Plant Line Value: WS
  misc_feature: MA Experiment 20001905 PARAMETER Experiment Name: At_Drought_Reproduction_P Parameter: Timepoint (day) Value: 10
  misc_feature: MA Experiment 20001905 PARAMETER Experiment Name: At_Drought_Reproduction_P Parameter: Tissue Value: Rosettes
  misc_feature: MA Experiment 20001905 PARAMETER Experiment Name: At_Drought_Reproduction_P Parameter: Treatment Value: Drought vs. No Drought
  misc_feature: MA Experiment ID: 20001906 Result: Up-regulated in Transcription
  misc_feature: MA Experiment 20001906 PARAMETER Experiment Name: At_Drought_Reproduction_P Parameter: Age (day) Value: 35
  misc_feature: MA Experiment 20001906 PARAMETER Experiment Name: At_Drought_Reproduction_P Parameter: Organism Value: A. thaliana
  misc_feature: MA Experiment 20001906 PARAMETER Experiment Name: At_Drought_Reproduction_P Parameter: Plant Line Value: WS
  misc_feature: MA Experiment 20001906 PARAMETER Experiment Name: At_Drought_Reproduction_P Parameter: Timepoint (day) Value: 5
  misc_feature: MA Experiment 20001906 PARAMETER Experiment Name: At_Drought_Reproduction_P Parameter: Tissue Value: Siliques
  misc_feature: MA Experiment 20001906 PARAMETER Experiment Name: At_Drought_Reproduction_P Parameter: Treatment Value: Drought vs. No Drought
acgtgtgattctatcttcaaagtatcaaagtatggaccatcaagtgtctctgccacaatctaccaccactggtctttctttcaaggtgcatcgccagcagcgggagctagtcactccggctaaaccaacgccacgagagctcaagcctctctccgacatagacgaccaacaaggactaagatttcaaattccagttatttttttctatagacctaacctttcaagtgatcttgatccggtccaggtgataaagaaagccctcgccgatgcgctggtttactactatccgttcgctggtaggctccgggaactttcaaaccggaaactcgcggtggactgcaccggtgaaggcgttttgttcatcgaggctgaagctgacgtggcgcttgctgagctggaagaggctgatgctcttcttcctccattccctttcctagaagagcttctctttgatgtggaaggctctagtgatgtgcttaacactcctctgcttctcgtccaggtcacgcgattgaaatgctgtggatttatcttcgcactccgcttcaaccataccatgaccgatggagccggcctgtcgctctttctgaaatcactatgcgagttggcgtgtgggcttcacgcaccctcggttccacccgtatggaaccgacacttgttgactgtgagtgcttcggaggcgcgtgtgacccacacacaccgtgagtacgatgatcaggtgggaatcgatgtggtcgccactggacaccctttggttagccggtctttctttttcagagcagaagagatctccgctataaggaaactccttccgcctgatctacacaatacctcatttgaagctttgtcgtcatttttgtggcgttgtcggactattgcgttgaatcctgaccccaacactgagatgcgtctaacttgcatcatcaactcgcgttccaagcttagaaacccaccgctagagcctggttactacggaaatgtgtttgtcattcccgcagcaatagcgacagcaagagatctaatagagaaaccgcttgagtttgttttgaggttgatacaagaaacgaagtcaagtgtaaccgaggactacgtccgttcagtgaccgccctaatggcgactagaggccggcctatgtttgtggcatcagggaactacataatatcggacttgagacattttgatttaggaaaaattgattttggaccgtggggtaagccagtgtacggtggaaccgctaaggccggtatcgcgcttttcccgggagtgagcttctacgtgccgtttaagaataaaaaaggtgagacaggtacagttgtggcgattagcttgccggtacgggcgatggagacgttcgtagcagagctaaatggagtgctaaatgtgtctaaaggatgagagcttagtcgagactcgagacgttattagtaatgtagtaaatagttccttttcttattcgacatcatagtgtagtaactaatatttatatcattgcatctttc

SEQ ID NO: 40271 - protein, 464 aa, Arabidopsis thaliana
  peptide (1)..(464): Ceres Seq. ID no. 13494133
  misc_feature (27)..(458): Pfam Name: Transferase family Pfam Description: Transferase family
  misc_feature (22)..(451): Homolog of NCBI NO: 27085290 NR Description: acyltransferase 2 [Capsicum chinense]
  misc_feature (26)..(463): Homolog of NCBI NO: 7484744 NR Description: probable anthranilate N-benzoyltransferase (EC
  misc_feature (22)..(461): Homolog of NCBI NO: 18652312 NR Description: putative acyltransferase [Cucumis melo]
  misc_feature (20)..(459): Homolog of NCBI NO: 37535814 NR Description: putative hypersensitivity-related (hsr)protein
  misc_feature (25)..(460): Homolog of NCBI NO: 22854876 NR Description: benzoyl coenzyme A: benzyl alcohol benzoyl
  misc_feature (25)..(461): Homolog of NCBI NO: 7489142 NR Description: hsr201 protein, hypersensitivity-related - common
  misc_feature (25)..(461): Homolog of NCBI NO: 22854880 NR Description: benzoyl coenzyme A: benzyl alcohol benzoyl
  misc_feature (25)..(460): Homolog of NCBI NO: 15237985 NR Description: transferase family [Arabidopsis thaliana]
  misc_feature (11)..(464): Homolog of NCBI NO: 15228568 NR Description: transferase family [Arabidopsis thaliana]
  misc_feature (11)..(464): Homolog of NCBI NO: 21536854 NR Description: putative hypersensitivity-related gene
RVILSSKYQSMDHQVSLPQSTTTGLSFKVHRQQRELVTPAKPTPRELKPLSDIDDQQGLRFQIPVIFFYRPNLSSDLDPVQVIKKALADALVYYYPFAGRLRELSNRKLAVDCTGEGVLFIEAEADVALAELEEADALLPPFPFLEELLFDVEGSSDVLNTPLLLVQVTRLKCCGFIFALRFNHTMTDGAGLSLFLKSLCELACGLHAPSVPPVWNRHLLTVSASEARVTHTHREYDDQVGIDVVATGHPLVSRSFFFRAEEISAIRKLLPPDLHNTSFEALSSFLWRCRTIALNPDPNTEMRLTCIINSRSKLRNPPLEPGYYGNVFVIPAAIATARDLIEKPLEFVLRLIQETKSSVTEDYVRSVTALMATRGRPMFVASGNYIISDLRHFDLGKIDFGPWGKPVYGGTAKAGIALFPGVSFYVPFKNKKGETGTVVAISLPVRAMETFVAELNGVLNVSKG

SEQ ID NO: 40272 - protein, 454 aa, Arabidopsis thaliana
  peptide (1)..(454): Ceres Seq. ID no. 13494134
  misc_feature (17)..(448): Pfam Name: Transferase family Pfam Description: Transferase family
  misc_feature (12)..(441): Homolog of NCBI NO: 27085290 NR Description: acyltransferase 2 [Capsicum chinense]
  misc_feature (16)..(453): Homolog of NCBI NO: 7484744 NR Description: probable anthranilate N-benzoyltransferase (EC
  misc_feature (12)..(451): Homolog of NCBI NO: 18652312 NR Description: putative acyltransferase [Cucumis melo]
  misc_feature (10)..(449): Homolog of NCBI NO: 37535814 NR Description: putative hypersensitivity-related (hsr)protein
  misc_feature (15)..(450): Homolog of NCBI NO: 22854876 NR Description: benzoyl coenzyme A: benzyl alcohol benzoyl
  misc_feature (15)..(451): Homolog of NCBI NO: 7489142 NR Description: hsr201 protein, hypersensitivity-related - common
  misc_feature (15)..(451): Homolog of NCBI NO: 22854880 NR Description: benzoyl coenzyme A: benzyl alcohol benzoyl
  misc_feature (15)..(450): Homolog of NCBI NO: 15237985 NR Description: transferase family [Arabidopsis thaliana]
  misc_feature (1)..(454): Homolog of NCBI NO: 15228568 NR Description: transferase family [Arabidopsis thaliana]
  misc_feature (1)..(454): Homolog of NCBI NO: 21536854 NR Description: putative hypersensitivity-related gene
MDHQVSLPQSTTTGLSFKVHRQQRELVTPAKPTPRELKPLSDIDDQQGLRFQIPVIFFYRPNLSSDLDPVQVIKKALADALVYYYPFAGRLRELSNRKLAVDCTGEGVLFIEAEADVALAELEEADALLPPFPFLEELLFDVEGSSDVLNTPLLLVQVTRLKCCGFIFALRFNHTMTDGAGLSLFLKSLCELACGLHAPSVPPVWNRHLLTVSASEARVTHTHREYDDQVGIDVVATGHPLVSRSFFFRAEEISAIRKLLPPDLHNTSFEALSSFLWRCRTIALNPDPNTEMRLTCIINSRSKLRNPPLEPGYYGNVFVIPAAIATARDLIEKPLEFVLRLIQETKSSVTEDYVRSVTALMATRGRPMFVASGNYIISDLRHFDLGKIDFGPWGKPVYGGTAKAGIALFPGVSFYVPFKNKKGETGTVVAISLPVRAMETFVAELNGVLNVSKG

SEQ ID NO: 40273 - protein, 279 aa, Arabidopsis thaliana
  peptide (1)..(279): Ceres Seq. ID no. 13494135
  misc_feature (1)..(273): Pfam Name: Transferase family Pfam Description: Transferase family
  misc_feature (1)..(266): Homolog of NCBI NO: 27085290 NR Description: acyltransferase 2 [Capsicum chinense]
  misc_feature (1)..(278): Homolog of NCBI NO: 7484744 NR Description: probable anthranilate N-benzoyltransferase (EC
  misc_feature (1)..(276): Homolog of NCBI NO: 18652312 NR Description: putative acyltransferase [Cucumis melo]
  misc_feature (1)..(274): Homolog of NCBI NO: 37535814 NR Description: putative hypersensitivity-related (hsr)protein
  misc_feature (1)..(275): Homolog of NCBI NO: 22854876 NR Description: benzoyl coenzyme A: benzyl alcohol benzoyl
  misc_feature (1)..(276): Homolog of NCBI NO: 7489142 NR Description: hsr201 protein, hypersensitivity-related - common
  misc_feature (1)..(276): Homolog of NCBI NO: 22854880 NR Description: benzoyl coenzyme A: benzyl alcohol benzoyl
  misc_feature (1)..(275): Homolog of NCBI NO: 15237985 NR Description: transferase family [Arabidopsis thaliana]
  misc_feature (1)..(279): Homolog of NCBI NO: 15228568 NR Description: transferase family [Arabidopsis thaliana]
  misc_feature (1)..(279): Homolog of NCBI NO: 21536854 NR Description: putative hypersensitivity-related gene
MTDGAGLSLFLKSLCELACGLHAPSVPPVWNRHLLTVSASEARVTHTHREYDDQVGIDVVATGHPLVSRSFFFRAEEISAIRKLLPPDLHNTSFEALSSFLWRCRTIALNPDPNTEMRLTCIINSRSKLRNPPLEPGYYGNVFVIPAAIATARDLIEKPLEFVLRLIQETKSSVTEDYVRSVTALMATRGRPMFVASGNYIISDLRHFDLGKIDFGPWGKPVYGGTAKAGIALFPGVSFYVPFKNKKGETGTVVAISLPVRAMETFVAELNGVLNVSKG

SEQ ID NO: 40274 - DNA, 872 bp, Arabidopsis thaliana
  misc_feature (1)..(872): Ceres Seq. ID no. 12337298
  misc_feature: MA Experiment ID: 108434 Result: Down-regulated in Transcription
  misc_feature: MA Experiment 108434 PARAMETER Experiment Name: At_Root_Tips_cDNA_P Parameter: Tissue Value: Root Tips
  misc_feature: MA Experiment ID: 20000286 Result: Down-regulated in Transcription
  misc_feature: MA Experiment 20000286 PARAMETER Experiment Name: At_Open_Flower_P Parameter: Age (day) Value: 21
  misc_feature: MA Experiment 20000286 PARAMETER Experiment Name: At_Open_Flower_P Parameter: Plant Line Value: WS
  misc_feature: MA Experiment 20000286 PARAMETER Experiment Name: At_Open_Flower_P Parameter: Tissue Value: Half Open vs. Whole Plant
  misc_feature: MA Experiment ID: 20001558 Result: Down-regulated in Transcription
  misc_feature: MA Experiment 20001558 PARAMETER Experiment Name: At_Drought_Soil_Dry_P Parameter: Age (day) Value: 27
  misc_feature: MA Experiment 20001558 PARAMETER Experiment Name: At_Drought_Soil_Dry_P Parameter: Organism Value: A. thaliana
  misc_feature: MA Experiment 20001558 PARAMETER Experiment Name: At_Drought_Soil_Dry_P Parameter: Plant Line Value: WS
  misc_feature: MA Experiment 20001558 PARAMETER Experiment Name: At_Drought_Soil_Dry_P Parameter: Post Timepoint (hr) Value: 6
  misc_feature: MA Experiment 20001558 PARAMETER Experiment Name: At_Drought_Soil_Dry_P Parameter: Post-Treatment Value: Re-Water vs. No Drought
  misc_feature: MA Experiment 20001558 PARAMETER Experiment Name: At_Drought_Soil_Dry_P Parameter: Timepoint (day) Value: 13
  misc_feature: MA Experiment 20001558 PARAMETER Experiment Name: At_Drought_Soil_Dry_P Parameter: Treatment Value: Drought vs. No Drought
aaataatcggaaacagcgtcttctccataaacccagaaaatcgcagagagctttctcttgtctttgtacagatctctcccatcatcgttcgtgattcgatgccttctcgtagaagaactctcctcaaagtcatcatcctcggtgatagcggggttgggaagacttctttaatgaatcaatatgttaataagaagttcagcaaccagtataaggcaactattggggctgatttcttgactaaggaagttcaatttgaagaccggcttttcactttacagatctgggacacagctggtcaagaaaggtttcagagtcttggtgttgcgttttatcgtggtgctgattgctgtgttcttgtatatgatgtcaactccgcaaaatcattcgaggatctcaacaactggagggaagagtttctgatccaggcaagtccttcggatccagagaactttccctttgttgttatcggtaataagatcgatgtggatggtggaagcagccgggtggtatcagagaagaaggctcgagcttggtgtgcttcgaaaggaaacattccatactatgaaacctcagctaaagtaggcaccaatgtagaagacgcgttcctgtgcataactacgaacgcaatgaagagtggagaagaggaagaaatgtacctaccagacacgatcgatgtcggaaccagcaatccacagaggtcaacaggatgtgaatgctgaaagtgttcatttgacctatgctctctcatcagttatcccactctgaggttttttaccatattgtaaatctgttgttctgtggtacattaatattttaaaattttagaaccctaataaataaataattaaaaagccgaattgggttggtcggtg

SEQ ID NO: 40275 - protein, 238 aa, Arabidopsis thaliana
  peptide (1)..(238): Ceres Seq. ID no. 12337299
  misc_feature (42)..(210): Pfam Name: Ras family Pfam Description: Ras family
  misc_feature (33)..(238): Homolog of NCBI NO: 3914550 NR Description: RAS-RELATED PROTEIN RAB7
  misc_feature (33)..(238): Homolog of NCBI NO: 1370188 NR Description: RAB7D [Lotus japonicus]
  misc_feature (33)..(236): Homolog of NCBI NO: 3914557 NR Description: RAS-RELATED PROTEIN RAB7 (POSSIBLE
  misc_feature (33)..(238): Homolog of NCBI NO: 7438408 NR Description: GTP-binding protein Rab7b - common tobacco
  misc_feature (33)..(238): Homolog of NCBI NO: 400923 NR Description: RAS-RELATED PROTEIN RAB7
  misc_feature (33)..(238): Homolog of NCBI NO: 34484308 NR Description: putative GTP-binding protein [Cucumis sativus]
  misc_feature (33)..(238): Homolog of NCBI NO: 1370186 NR Description: RAB7C [Lotus japonicus]
  misc_feature (33)..(238): Homolog of NCBI NO: 21536526 NR Description: GTP binding protein, putative [Arabidopsis
  misc_feature (33)..(238): Homolog of NCBI NO: 15230211 NR Description: GTP-binding protein, putative
  misc_feature (33)..(238): Homolog of NCBI NO: 15222098 NR Description: small GTP-binding protein, putative
IIGNSVFSINPENRRELSLVFVQISPIIVRDSMPSRRRTLLKVIILGDSGVGKTSLMNQYVNKKFSNQYKATIGADFLTKEVQFEDRLFTLQIWDTAGQERFQSLGVAFYRGADCCVLVYDVNSAKSFEDLNNWREEFLIQASPSDPENFPFVVIGNKIDVDGGSSRVVSEKKARAWCASKGNIPYYETSAKVGTNVEDAFLCITTNAMKSGEEEEMYLPDTIDVGTSNPQRSTGCEC

SEQ ID NO: 40276 - protein, 206 aa, Arabidopsis thaliana
  peptide (1)..(206): Ceres Seq. ID no. 12337300
  misc_feature (10)..(178): Pfam Name: Ras family Pfam Description: Ras family
  misc_feature (1)..(206): Homolog of NCBI NO: 3914550 NR Description: RAS-RELATED PROTEIN RAB7
  misc_feature (1)..(206): Homolog of NCBI NO: 1370188 NR Description: RAB7D [Lotus japonicus]
  misc_feature (1)..(204): Homolog of NCBI NO: 3914557 NR Description: RAS-RELATED PROTEIN RAB7 (POSSIBLE
  misc_feature (1)..(206): Homolog of NCBI NO: 7438408 NR Description: GTP-binding protein Rab7b - common tobacco
  misc_feature (1)..(206): Homolog of NCBI NO: 400923 NR Description: RAS-RELATED PROTEIN RAB7
  misc_feature (1)..(206): Homolog of NCBI NO: 34484308 NR Description: putative GTP-binding protein [Cucumis sativus]
  misc_feature (1)..(206): Homolog of NCBI NO: 1370186 NR Description: RAB7C [Lotus japonicus]
  misc_feature (1)..(206): Homolog of NCBI NO: 21536526 NR Description: GTP binding protein, putative [Arabidopsis
  misc_feature (1)..(206): Homolog of NCBI NO: 15230211 NR Description: GTP-binding protein, putative
  misc_feature (1)..(206): Homolog of NCBI NO: 15222098 NR Description: small GTP-binding protein, putative
MPSRRRTLLKVIILGDSGVGKTSLMNQYVNKKFSNQYKATIGADFLTKEVQFEDRLFTLQIWDTAGQERFQSLGVAFYRGADCCVLVYDVNSAKSFEDLNNWREEFLIQASPSDPENFPFVVIGNKIDVDGGSSRVVSEKKARAWCASKGNIPYYETSAKVGTNVEDAFLCITTNAMKSGEEEEMYLPDTIDVGTSNPQRSTGCEC

SEQ ID NO: 40277 - protein, 182 aa, Arabidopsis thaliana
  peptide (1)..(182): Ceres Seq. ID no. 12337301
  misc_feature (1)..(154): Pfam Name: Ras family Pfam Description: Ras family
  misc_feature (1)..(182): Homolog of NCBI NO: 3914550 NR Description: RAS-RELATED PROTEIN RAB7
  misc_feature (1)..(182): Homolog of NCBI NO: 1370188 NR Description: RAB7D [Lotus japonicus]
  misc_feature (1)..(180): Homolog of NCBI NO: 3914557 NR Description: RAS-RELATED PROTEIN RAB7 (POSSIBLE
  misc_feature (1)..(182): Homolog of NCBI NO: 7438408 NR Description: GTP-binding protein Rab7b - common tobacco
  misc_feature (1)..(182): Homolog of NCBI NO: 400923 NR Description: RAS-RELATED PROTEIN RAB7
  misc_feature (1)..(182): Homolog of NCBI NO: 34484308 NR Description: putative GTP-binding protein [Cucumis sativus]
  misc_feature (1)..(182): Homolog of NCBI NO: 1370186 NR Description: RAB7C [Lotus japonicus]
  misc_feature (1)..(182): Homolog of NCBI NO: 21536526 NR Description: GTP binding protein, putative [Arabidopsis
  misc_feature (1)..(182): Homolog of NCBI NO: 15230211 NR Description: GTP-binding protein, putative
  misc_feature (1)..(182): Homolog of NCBI NO: 15222098 NR Description: small GTP-binding protein, putative
MNQYVNKKFSNQYKATIGADFLTKEVQFEDRLFTLQIWDTAGQERFQSLGVAFYRGADCCVLVYDVNSAKSFEDLNNWREEFLIQASPSDPENFPFVVIGNKIDVDGGSSRVVSEKKARAWCASKGNIPYYETSAKVGTNVEDAFLCITTNAMKSGEEEEMYLPDTIDVGTSNPQRSTGCEC

SEQ ID NO: 40278 - DNA, 1231 bp, Arabidopsis thaliana
  misc_feature (1)..(1231): Ceres Seq. ID no. 12329306
  misc_feature: MA Experiment ID: 20000264 Result: Up-regulated in Transcription
  misc_feature: MA Experiment 20000264 PARAMETER Experiment Name: At_Open_Flower_P Parameter: Age (day) Value: 21
  misc_feature: MA Experiment 20000264 PARAMETER Experiment Name: At_Open_Flower_P Parameter: Plant Line Value: WS
  misc_feature: MA Experiment 20000264 PARAMETER Experiment Name: At_Open_Flower_P Parameter: Tissue Value: Open Flower vs. Whole Plant
  misc_feature: MA Experiment ID: 20000286 Result: Up-regulated in Transcription
  misc_feature: MA Experiment 20000286 PARAMETER Experiment Name: At_Open_Flower_P Parameter: Age (day) Value: 21
  misc_feature: MA Experiment 20000286 PARAMETER Experiment Name: At_Open_Flower_P Parameter: Plant Line Value: WS
  misc_feature: MA Experiment 20000286 PARAMETER Experiment Name: At_Open_Flower_P Parameter: Tissue Value: Half Open vs. Whole Plant
  misc_feature: MA Experiment ID: 20000439 Result: Down-regulated in Transcription
  misc_feature: MA Experiment 20000439 PARAMETER Experiment Name: At_Roots__P Parameter: Age (day) Value: 14 vs. 21
  misc_feature: MA Experiment 20000439 PARAMETER Experiment Name: At_Roots__P Parameter: Organism Value: A. thaliana
  misc_feature: MA Experiment 20000439 PARAMETER Experiment Name: At_Roots__P Parameter: Tissue Value: Roots vs. Whole Plant
  misc_feature: MA Experiment ID: 20000573 Result: Up-regulated in Transcription
  misc_feature: MA Experiment 20000573 PARAMETER Experiment Name: At_100uM_ABA_Mutants__P Parameter: Organism Value: A. thaliana
  misc_feature: MA Experiment 20000573 PARAMETER Experiment Name: At_100uM_ABA_Mutants__P Parameter: Plant Line Value: CS22 vs. Ler wt
  misc_feature: MA Experiment 20000573 PARAMETER Experiment Name: At_100uM_ABA_Mutants__P Parameter: Timepoint (hr) Value: N/A
  misc_feature: MA Experiment 20000573 PARAMETER Experiment Name: At_100uM_ABA_Mutants__P Parameter: Tissue Value: Whole Plant
  misc_feature: MA Experiment 20000573 PARAMETER Experiment Name: At_100uM_ABA_Mutants__P Parameter: Treatment Value: None
  misc_feature: MA Experiment ID: 20000794 Result: Up-regulated in Transcription
  misc_feature: MA Experiment 20000794 PARAMETER Experiment Name: At_Petals_P Parameter: Age (day) Value: 23-25 days
  misc_feature: MA Experiment 20000794 PARAMETER Experiment Name: At_Petals_P Parameter: Plant Line Value: WS
  misc_feature: MA Experiment 20000794 PARAMETER Experiment Name: At_Petals_P Parameter: Tissue Value: Petals vs. Whole plant
  misc_feature: MA Experiment ID: 20001757 Result: Down-regulated in Transcription
  misc_feature: MA Experiment 20001757 PARAMETER Experiment Name: At_50mM_NH4NO3_L-to-H_P Parameter: Timepoint (hr) Value: 6
  misc_feature: MA Experiment 20001757 PARAMETER Experiment Name: At_50mM_NH4NO3_L-to-H_P Parameter: Tissue Value: Leaf
  misc_feature: MA Experiment 20001757 PARAMETER Experiment Name: At_50mM_NH4NO3_L-to-H_P Parameter: Treatment Value: 50mM NH4NO3 vs 100mM Mannitol
atcttttcgtagacattctctctcgatctttagttttcataactcatcttcttttttactttttttttttttttttggaagatgaatatctccgtcgaaaaccctgtttttgtacatgaggactcgacaacgcagaagaccggagagttacgattggacagcgacataccaatgtcgaagatatcatccgatgatgaagtgtttttggctcctgagatgaacgcatttggtcgtcaattcagagactacacggatacaaacagcgagaggcaaaagagcgtcgaacatttctatgcaacacaacacactaaccaaactttagactttgtacagaaaatgagaagtgagtatggaaaattggacaagatggtgatgaacatttgggaatgttgtgaacttttaaaagaagtggtggacgagagtgatcccgacctcgacgaaccacaaattcaacatttgcttcaatctgcggaagcaatccgtaaagattatcctaacgaagattggcttcatctcactgcgcttatccatgatcttgggaaggttcttaccctaccacagtttggagggcttcctcaatgggctgttgttggtgacacatttcctgttgggtgtgcatttgatgaatctaacgtacaccacaagtattttatggaaaaccctgattttaacaaccctaagtacaataccaaagctggaatttattctgaaggctgtggacttgaaaatgttcttatgtcatggggacatgatgactacatgtatctggtggccaaggagaatggaagcaccttaccatccccgggactattcatcatccgataccattccttttatccattgcacaaggctggagcttacactcaccttatgaacgaggaagacaaggagaatctcaaatggcttcatgtttttaacaagtatgacttatacagcaagagcaaagtacacgtcaatgtcgagaaggttaagccgtactacatgtctcttatcaagaaatatttcccggaaaatctgaggtggtgaaaacggcatcgaggccgtccaaaaaaagtctactattagaaagataaaatggtgtgtgtgtttgattagttgtcgtttaagcatattattgcccagttaataaagttgtattgttacattagctaatgttaatgttaatgttgatacaaacggttattgtatcttgtctgtcctattataaactaaaatgatattttcttctttc

SEQ ID NO: 40279 - protein, 314 aa, Arabidopsis thaliana
  peptide (1)..(314): Ceres Seq. ID no. 12329307
  misc_feature (58)..(314): Pfam Name: Family of unknown function (DUF706) Pfam Description: Family of unknown function (DUF706)
  misc_feature (38)..(306): Homolog of NCBI NO: 7262695 NR Description: Strong similarity to an unknown protein from
  misc_feature (74)..(314): Homolog of NCBI NO: 13877657 NR Description: Unknown protein [Arabidopsis thaliana]
  misc_feature (38)..(314): Homolog of NCBI NO: 26451656 NR Description: unknown protein [Arabidopsis thaliana]
  misc_feature (38)..(314): Homolog of NCBI NO: 30683840 NR Description: expressed protein [Arabidopsis thaliana]
  misc_feature (18)..(314): Homolog of NCBI NO: 18399158 NR Description: expressed protein
  misc_feature (18)..(314): Homolog of NCBI NO: 21554393 NR Description: unknown [Arabidopsis thaliana]
  misc_feature (1)..(314): Homolog of NCBI NO: 30687167 NR Description: expressed protein [Arabidopsis thaliana]
  misc_feature (1)..(314): Homolog of NCBI NO: 7487428 NR Description: hypothetical protein T25K17.70 - Arabidopsis
  misc_feature (1)..(314): Homolog of NCBI NO: 15241891 NR Description: putative protein
  misc_feature (1)..(314): Homolog of NCBI NO: 21536858 NR Description: unknown [Arabidopsis thaliana]
MNISVENPVFVHEDSTTQKTGELRLDSDIPMSKISSDDEVFLAPEMNAFGRQFRDYTDTNSERQKSVEHFYATQHTNQTLDFVQKMRSEYGKLDKMVMNIWECCELLKEVVDESDPDLDEPQIQHLLQSAEAIRKDYPNEDWLHLTALIHDLGKVLTLPQFGGLPQWAVVGDTFPVGCAFDESNVHHKYFMENPDFNNPKYNTKAGIYSEGCGLENVLMSWGHDDYMYLVAKENGSTLPSPGLFIIRYHSFYPLHKAGAYTHLMNEEDKENLKWLHVFNKYDLYSKSKVHVNVEKVKPYYMSLIKKYFPENLRW

SEQ ID NO: 40280 - protein, 284 aa, Arabidopsis thaliana
  peptide (1)..(284): Ceres Seq. ID no. 12329308
  misc_feature (28)..(284): Pfam Name: Family of unknown function (DUF706) Pfam Description: Family of unknown function (DUF706)
  misc_feature (8)..(276): Homolog of NCBI NO: 7262695 NR Description: Strong similarity to an unknown protein from
  misc_feature (44)..(284): Homolog of NCBI NO: 13877657 NR Description: Unknown protein [Arabidopsis thaliana]
  misc_feature (8)..(284): Homolog of NCBI NO: 26451656 NR Description: unknown protein [Arabidopsis thaliana]
  misc_feature (8)..(284): Homolog of NCBI NO: 30683840 NR Description: expressed protein [Arabidopsis thaliana]
  misc_feature (1)..(284): Homolog of NCBI NO: 18399158 NR Description: expressed protein
  misc_feature (1)..(284): Homolog of NCBI NO: 21554393 NR Description: unknown [Arabidopsis thaliana]
  misc_feature (1)..(284): Homolog of NCBI NO: 30687167 NR Description: expressed protein [Arabidopsis thaliana]
  misc_feature (1)..(284): Homolog of NCBI NO: 7487428 NR Description: hypothetical protein T25K17.70 - Arabidopsis
  misc_feature (1)..(284): Homolog of NCBI NO: 15241891 NR Description: putative protein
  misc_feature (1)..(284): Homolog of NCBI NO: 21536858 NR Description: unknown [Arabidopsis thaliana]
MSKISSDDEVFLAPEMNAFGRQFRDYTDTNSERQKSVEHFYATQHTNQTLDFVQKMRSEYGKLDKMVMNIWECCELLKEVVDESDPDLDEPQIQHLLQSAEAIRKDYPNEDWLHLTALIHDLGKVLTLPQFGGLPQWAVVGDTFPVGCAFDESNVHHKYFMENPDFNNPKYNTKAGIYSEGCGLENVLMSWGHDDYMYLVAKENGSTLPSPGLFIIRYHSFYPLHKAGAYTHLMNEEDKENLKWLHVFNKYDLYSKSKVHVNVEKVKPYYMSLIKKYFPENLRW

SEQ ID NO: 40281 - protein, 269 aa, Arabidopsis thaliana
  peptide (1)..(269): Ceres Seq. ID no. 12329309
  misc_feature (13)..(269): Pfam Name: Family of unknown function (DUF706) Pfam Description: Family of unknown function (DUF706)
  misc_feature (1)..(261): Homolog of NCBI NO: 7262695 NR Description: Strong similarity to an unknown protein from
  misc_feature (29)..(269): Homolog of NCBI NO: 13877657 NR Description: Unknown protein [Arabidopsis thaliana]
  misc_feature (1)..(269): Homolog of NCBI NO: 26451656 NR Description: unknown protein [Arabidopsis thaliana]
  misc_feature (1)..(269): Homolog of NCBI NO: 30683840 NR Description: expressed protein [Arabidopsis thaliana]
  misc_feature (1)..(269): Homolog of NCBI NO: 18399158 NR Description: expressed protein
  misc_feature (1)..(269): Homolog of NCBI NO: 21554393 NR Description: unknown [Arabidopsis thaliana]
  misc_feature (1)..(269): Homolog of NCBI NO: 30687167 NR Description: expressed protein [Arabidopsis thaliana]
  misc_feature (1)..(269): Homolog of NCBI NO: 7487428 NR Description: hypothetical protein T25K17.70 - Arabidopsis
  misc_feature (1)..(269): Homolog of NCBI NO: 15241891 NR Description: putative protein
  misc_feature (1)..(269): Homolog of NCBI NO: 21536858 NR Description: unknown [Arabidopsis thaliana]
MNAFGRQFRDYTDTNSERQKSVEHFYATQHTNQTLDFVQKMRSEYGKLDKMVMNIWECCELLKEVVDESDPDLDEPQIQHLLQSAEAIRKDYPNEDWLHLTALIHDLGKVLTLPQFGGLPQWAVVGDTFPVGCAFDESNVHHKYFMENPDFNNPKYNTKAGIYSEGCGLENVLMSWGHDDYMYLVAKENGSTLPSPGLFIIRYHSFYPLHKAGAYTHLMNEEDKENLKWLHVFNKYDLYSKSKVHVNVEKVKPYYMSLIKKYFPENLRW

SEQ ID NO: 40282 - DNA, 1376 bp, Arabidopsis thaliana
  misc_feature (1)..(1376): Ceres Seq. ID no. 13489321
  misc_feature: MA Experiment ID: 108434 Result: Down-regulated in Transcription
  misc_feature: MA Experiment 108434 PARAMETER Experiment Name: At_Root_Tips_cDNA_P Parameter: Tissue Value: Root Tips
  misc_feature: MA Experiment ID: 108462 Result: Down-regulated in Transcription
  misc_feature: MA Experiment 108462 PARAMETER Experiment Name: At_Germinating_Seeds_cDNA_P Parameter: Age (day) Value: 2 vs. 0
  misc_feature: MA Experiment 108462 PARAMETER Experiment Name: At_Germinating_Seeds_cDNA_P Parameter: Tissue Value: Germinating Seeds
  misc_feature: MA Experiment ID: 108463 Result: Down-regulated in Transcription
  misc_feature: MA Experiment 108463 PARAMETER Experiment Name: At_Germinating_Seeds_cDNA_P Parameter: Age (day) Value: 3 vs. 0
  misc_feature: MA Experiment 108463 PARAMETER Experiment Name: At_Germinating_Seeds_cDNA_P Parameter: Tissue Value: Germinating Seeds
  misc_feature: MA Experiment ID: 108464 Result: Down-regulated in Transcription
  misc_feature: MA Experiment 108464 PARAMETER Experiment Name: At_Germinating_Seeds_cDNA_P Parameter: Age (day) Value: 4 vs. 0
  misc_feature: MA Experiment 108464 PARAMETER Experiment Name: At_Germinating_Seeds_cDNA_P Parameter: Tissue Value: Germinating Seeds
  misc_feature: MA Experiment ID: 108561 Result: Up-regulated in Transcription
  misc_feature: MA Experiment 108561 PARAMETER Experiment Name: At_100uM_ABA_cDNA_P Parameter: Timepoint (hr) Value: 6
  misc_feature: MA Experiment 108561 PARAMETER Experiment Name: At_100uM_ABA_cDNA_P Parameter: Tissue Value: Aerial
  misc_feature: MA Experiment 108561 PARAMETER Experiment Name: At_100uM_ABA_cDNA_P Parameter: Treatment Value: 100uM ABA vs. No Treatment
  misc_feature: MA Experiment ID: 108569 Result: Up-regulated in Transcription
  misc_feature: MA Experiment 108569 PARAMETER Experiment Name: At_0.001%_MeJA__cDNA_P Parameter: Timepoint (hr) Value: 6
  misc_feature: MA Experiment 108569 PARAMETER Experiment Name: At_0.001%_MeJA__cDNA_P Parameter: Tissue Value: Aerial
  misc_feature: MA Experiment 108569 PARAMETER Experiment Name: At_0.001%_MeJA__cDNA_P Parameter: Treatment Value: 0.001% MeJA vs. No Treatment
  misc_feature: MA Experiment ID: 108577 Result: Up-regulated in Transcription
  misc_feature: MA Experiment 108577 PARAMETER Experiment Name: At_42deg_Heat_cDNA_P Parameter: Temperature (deg C) Value: 42 vs. 22
  misc_feature: MA Experiment 108577 PARAMETER Experiment Name: At_42deg_Heat_cDNA_P Parameter: Timepoint (hr) Value: 6
  misc_feature: MA Experiment 108577 PARAMETER Experiment Name: At_42deg_Heat_cDNA_P Parameter: Tissue Value: Aerial
  misc_feature: MA Experiment ID: 108667 Result: Down-regulated in Transcription
  misc_feature: MA Experiment 108667 PARAMETER Experiment Name: At_2mM_SA_cDNA_P Parameter: Plant Line Value: WS
  misc_feature: MA Experiment 108667 PARAMETER Experiment Name: At_2mM_SA_cDNA_P Parameter: Timepoint (hr) Value: 1
  misc_feature: MA Experiment 108667 PARAMETER Experiment Name: At_2mM_SA_cDNA_P Parameter: Treatment Value: 2mM SA vs. No Treatment
  misc_feature: MA Experiment ID: 108668 Result: Up-regulated in Transcription
  misc_feature: MA Experiment 108668 PARAMETER Experiment Name: At_2mM_SA_cDNA_P Parameter: Plant Line Value: WS
  misc_feature: MA Experiment 108668 PARAMETER Experiment Name: At_2mM_SA_cDNA_P Parameter: Timepoint (hr) Value: 6
  misc_feature: MA Experiment 108668 PARAMETER Experiment Name: At_2mM_SA_cDNA_P Parameter: Treatment Value: 2mM SA vs. No Treatment
  misc_feature: MA Experiment ID: 20000069 Result: Up-regulated in Transcription
  misc_feature: MA Experiment 20000069 PARAMETER Experiment Name: At_100uM_ABA_Mutants_cDNA_P Parameter: Plant Line Value: CS23
  misc_feature: MA Experiment 20000069 PARAMETER Experiment Name: At_100uM_ABA_Mutants_cDNA_P Parameter: Timepoint (hr) Value: 6
  misc_feature: MA Experiment 20000069 PARAMETER Experiment Name: At_100uM_ABA_Mutants_cDNA_P Parameter: Tissue Value: Aerial
  misc_feature: MA Experiment 20000069 PARAMETER Experiment Name: At_100uM_ABA_Mutants_cDNA_P Parameter: Treatment Value: 100uM ABA vs. No Treatment
  misc_feature: MA Experiment ID: 20000070 Result: Up-regulated in Transcription
  misc_feature: MA Experiment 20000070 PARAMETER Experiment Name: At_100uM_ABA_Mutants_cDNA_P Parameter: Plant Line Value: CS24
  misc_feature: MA Experiment 20000070 PARAMETER Experiment Name: At_100uM_ABA_Mutants_cDNA_P Parameter: Timepoint (hr) Value: 6
  misc_feature: MA Experiment 20000070 PARAMETER Experiment Name: At_100uM_ABA_Mutants_cDNA_P Parameter: Tissue Value: Aerial
  misc_feature: MA Experiment 20000070 PARAMETER Experiment Name: At_100uM_ABA_Mutants_cDNA_P Parameter: Treatment Value: 100uM ABA vs. No Treatment
  misc_feature: MA Experiment ID: 20000071 Result: Up-regulated in Transcription
  misc_feature: MA Experiment 20000071 PARAMETER Experiment Name: At_100uM_ABA_Mutants_cDNA_P Parameter: Plant Line Value: CS8104
  misc_feature: MA Experiment 20000071 PARAMETER Experiment Name: At_100uM_ABA_Mutants_cDNA_P Parameter: Timepoint (hr) Value: 6
  misc_feature: MA Experiment 20000071 PARAMETER Experiment Name: At_100uM_ABA_Mutants_cDNA_P Parameter: Tissue Value: Aerial
  misc_feature: MA Experiment 20000071 PARAMETER Experiment Name: At_100uM_ABA_Mutants_cDNA_P Parameter: Treatment Value: 100uM ABA vs. No Treatment
  misc_feature: MA Experiment ID: 20000072 Result: Up-regulated in Transcription
  misc_feature: MA Experiment 20000072 PARAMETER Experiment Name: At_100uM_ABA_Mutants_cDNA_P Parameter: Plant Line Value: CS8105
  misc_feature: MA Experiment 20000072 PARAMETER Experiment Name: At_100uM_ABA_Mutants_cDNA_P Parameter: Timepoint (hr) Value: 6
  misc_feature: MA Experiment 20000072 PARAMETER Experiment Name: At_100uM_ABA_Mutants_cDNA_P Parameter: Tissue Value: Aerial
  misc_feature: MA Experiment 20000072 PARAMETER Experiment Name: At_100uM_ABA_Mutants_cDNA_P Parameter: Treatment Value: 100uM ABA vs. No Treatment
  misc_feature: MA Experiment ID: 20000086 Result: Up-regulated in Transcription
  misc_feature: MA Experiment 20000086 PARAMETER Experiment Name: At_100uM_ABA_Mutants_cDNA_P Parameter: Plant Line Value: CS22
  misc_feature: MA Experiment 20000086 PARAMETER Experiment Name: At_100uM_ABA_Mutants_cDNA_P Parameter: Timepoint (hr) Value: 6
  misc_feature: MA Experiment 20000086 PARAMETER Experiment Name: At_100uM_ABA_Mutants_cDNA_P Parameter: Tissue Value: Aerial
  misc_feature: MA Experiment 20000086 PARAMETER Experiment Name: At_100uM_ABA_Mutants_cDNA_P Parameter: Treatment Value: 100uM ABA vs. No Treatment
  misc_feature: MA Experiment ID: 20000088 Result: Up-regulated in Transcription
  misc_feature: MA Experiment 20000088 PARAMETER Experiment Name: At_100uM_ABA_Mutants_cDNA_P Parameter: Plant Line Value: Landsberg
  misc_feature: MA Experiment 20000088 PARAMETER Experiment Name: At_100uM_ABA_Mutants_cDNA_P Parameter: Timepoint (hr) Value: 6
  misc_feature: MA Experiment 20000088 PARAMETER Experiment Name: At_100uM_ABA_Mutants_cDNA_P Parameter: Tissue Value: Aerial
  misc_feature: MA Experiment 20000088 PARAMETER Experiment Name: At_100uM_ABA_Mutants_cDNA_P Parameter: Treatment Value: 100uM ABA vs. No Treatment
  misc_feature: MA Experiment ID: 20000117 Result: Up-regulated in Transcription
  misc_feature: MA Experiment 20000117 PARAMETER Experiment Name: At_100uM_ABA_Mutants_cDNA_P Parameter: Plant Line Value: Columbia
  misc_feature: MA Experiment 20000117 PARAMETER Experiment Name: At_100uM_ABA_Mutants_cDNA_P Parameter: Timepoint (hr) Value: 6
  misc_feature: MA Experiment 20000117 PARAMETER Experiment Name: At_100uM_ABA_Mutants_cDNA_P Parameter: Tissue Value: Aerial
  misc_feature: MA Experiment 20000117 PARAMETER Experiment Name: At_100uM_ABA_Mutants_cDNA_P Parameter: Treatment Value: 100uM ABA vs. No Treatment
  misc_feature: MA Experiment ID: 20000144 Result: Up-regulated in Transcription
  misc_feature: MA Experiment 20000144 PARAMETER Experiment Name: At_42deg_Heat_cDNA_P Parameter: Temperature (deg C) Value: 42 vs. 22
  misc_feature: MA Experiment 20000144 PARAMETER Experiment Name: At_42deg_Heat_cDNA_P Parameter: Timepoint (hr) Value: 1
  misc_feature: MA Experiment 20000144 PARAMETER Experiment Name: At_42deg_Heat_cDNA_P Parameter: Tissue Value: Aerial
  misc_feature: MA Experiment ID: 20000171 Result: Up-regulated in Transcription
  misc_feature: MA Experiment 20000171 PARAMETER Experiment Name: At_42deg_Heat_P Parameter: Age (day) Value: 14
  misc_feature: MA Experiment 20000171 PARAMETER Experiment Name: At_42deg_Heat_P Parameter: Organism Value: A. thaliana
  misc_feature: MA Experiment 20000171 PARAMETER Experiment Name: At_42deg_Heat_P Parameter: Plant Line Value: WS
  misc_feature: MA Experiment 20000171 PARAMETER Experiment Name: At_42deg_Heat_P Parameter: Temperature (deg C) Value: 42 vs. 22
  misc_feature: MA Experiment 20000171 PARAMETER Experiment Name: At_42deg_Heat_P Parameter: Timepoint (hr) Value: 1
  misc_feature: MA Experiment 20000171 PARAMETER Experiment Name: At_42deg_Heat_P Parameter: Tissue Value: Aerial
  misc_feature: MA Experiment ID: 20000180 Result: Down-regulated in Transcription
  misc_feature: MA Experiment 20000180 PARAMETER Experiment Name: At_Germinating_Seeds_P Parameter: Age (hr) Value: 24 vs. 0
  misc_feature: MA Experiment 20000180 PARAMETER Experiment Name: At_Germinating_Seeds_P Parameter: Tissue Value: Germinating Seeds
  misc_feature: MA Experiment ID: 20000182 Result: Up-regulated in Transcription
  misc_feature: MA Experiment 20000182 PARAMETER Experiment Name: At_2mM_SA_P Parameter: Age (day) Value: 14
  misc_feature: MA Experiment 20000182 PARAMETER Experiment Name: At_2mM_SA_P Parameter: Organism Value: A. thaliana
  misc_feature: MA Experiment 20000182 PARAMETER Experiment Name: At_2mM_SA_P Parameter: Plant Line Value: WS
  misc_feature: MA Experiment 20000182 PARAMETER Experiment Name: At_2mM_SA_P Parameter: Timepoint (hr) Value: 6
  misc_feature: MA Experiment 20000182 PARAMETER Experiment Name: At_2mM_SA_P Parameter: Tissue Value: Aerial
  misc_feature: MA Experiment 20000182 PARAMETER Experiment Name: At_2mM_SA_P Parameter: Treatment Value: 2mM SA vs. No Treatment
  misc_feature: MA Experiment ID: 20000184 Result: Down-regulated in Transcription
  misc_feature: MA Experiment 20000184 PARAMETER Experiment Name: At_Shoots__P Parameter: Age (day) Value: 7
  misc_feature: MA Experiment 20000184 PARAMETER Experiment Name: At_Shoots__P Parameter: Tissue Value: Shoots vs. Whole Plant
  misc_feature: MA Experiment ID: 20000185 Result: Down-regulated in Transcription
  misc_feature: MA Experiment 20000185 PARAMETER Experiment Name: At_Roots__P Parameter: Age (day) Value: 7 vs. 21
  misc_feature: MA Experiment 20000185 PARAMETER Experiment Name: At_Roots__P Parameter: Organism Value: A. thaliana
  misc_feature: MA Experiment 20000185 PARAMETER Experiment Name: At_Roots__P Parameter: Tissue Value: Roots vs. Whole Plant
  misc_feature: MA Experiment ID: 20000227 Result: Down-regulated in Transcription
  misc_feature: MA Experiment 20000227 PARAMETER Experiment Name: At_Root-Tips-vs-Tops_P Parameter: Tissue Value: Root Tips vs. Root Tops
  misc_feature: MA Experiment ID: 20000234 Result: Down-regulated in Transcription
  misc_feature: MA Experiment 20000234 PARAMETER Experiment Name: At_Siliques_P Parameter: Age (day) Value: 21
  misc_feature: MA Experiment 20000234 PARAMETER Experiment Name: At_Siliques_P Parameter: Organism Value: A. thaliana
  misc_feature: MA Experiment 20000234 PARAMETER Experiment Name: At_Siliques_P Parameter: Plant Line Value: WS
  misc_feature: MA Experiment 20000234 PARAMETER Experiment Name: At_Siliques_P Parameter: Tissue Value: Less Than 5mm Siliques vs. Whole Plant
  misc_feature: MA Experiment ID: 20000235 Result: Down-regulated in Transcription
  misc_feature: MA Experiment 20000235 PARAMETER Experiment Name: At_Siliques_P Parameter: Age (day) Value: 21
  misc_feature: MA Experiment 20000235 PARAMETER Experiment Name: At_Siliques_P Parameter: Organism Value: A. thaliana
  misc_feature: MA Experiment 20000235 PARAMETER Experiment Name: At_Siliques_P Parameter: Plant Line Value: WS
  misc_feature: MA Experiment 20000235 PARAMETER Experiment Name: At_Siliques_P Parameter: Tissue Value: 5-10mm Siliques vs. Whole Plant
  misc_feature: MA Experiment ID: 20000267 Result: Up-regulated in Transcription
  misc_feature: MA Experiment 20000267 PARAMETER Experiment Name: At_Drought_P Parameter: Age (day) Value: 7
  misc_feature: MA Experiment 20000267 PARAMETER Experiment Name: At_Drought_P Parameter: Organism Value: A. thaliana
  misc_feature: MA Experiment 20000267 PARAMETER Experiment Name: At_Drought_P Parameter: Plant Line Value: WS
  misc_feature: MA Experiment 20000267 PARAMETER Experiment Name: At_Drought_P Parameter: Timepoint (hr) Value: 6
  misc_feature: MA Experiment 20000267 PARAMETER Experiment Name: At_Drought_P Parameter: Tissue Value: Whole Plant
  misc_feature: MA Experiment 20000267 PARAMETER Experiment Name: At_Drought_P Parameter: Treatment Value: Drought vs. No Drought
  misc_feature: MA Experiment ID: 20000268 Result: Up-regulated in Transcription
  misc_feature: MA Experiment 20000268 PARAMETER Experiment Name: At_100mM_NaCl__P Parameter: Age (day) Value: 14
  misc_feature: MA Experiment 20000268 PARAMETER Experiment Name: At_100mM_NaCl__P Parameter: Organism Value: A. thaliana
  misc_feature: MA Experiment 20000268 PARAMETER Experiment Name: At_100mM_NaCl__P Parameter: Plant Line Value: WS
  misc_feature: MA Experiment 20000268 PARAMETER Experiment Name: At_100mM_NaCl__P Parameter: Timepoint (hr) Value: 6
  misc_feature: MA Experiment 20000268 PARAMETER Experiment Name: At_100mM_NaCl__P Parameter: Tissue Value: Whole Plant
  misc_feature: MA Experiment 20000268 PARAMETER Experiment Name: At_100mM_NaCl__P Parameter: Treatment Value: 100mM NaCl vs. No Treatment
  misc_feature: MA Experiment ID: 20000269 Result: Down-regulated in Transcription
  misc_feature: MA Experiment 20000269 PARAMETER Experiment Name: At_1mM_KNO3_L-vs-H_Roots_P Parameter: Age (day) Value: 7,10,12
  misc_feature: MA Experiment 20000269 PARAMETER Experiment Name: At_1mM_KNO3_L-vs-H_Roots_P Parameter: Organism Value: A. thaliana
  misc_feature: MA Experiment 20000269 PARAMETER Experiment Name: At_1mM_KNO3_L-vs-H_Roots_P Parameter: Plant Line Value: WS
  misc_feature: MA Experiment 20000269 PARAMETER Experiment Name: At_1mM_KNO3_L-vs-H_Roots_P Parameter: Timepoint (day) Value: 7,10,12
  misc_feature: MA Experiment 20000269 PARAMETER Experiment Name: At_1mM_KNO3_L-vs-H_Roots_P Parameter: Tissue Value: Roots
  misc_feature: MA Experiment 20000269 PARAMETER Experiment Name: At_1mM_KNO3_L-vs-H_Roots_P Parameter: Treatment Value: 1mM KNO3 vs. 50mM KNO3
  misc_feature: MA Experiment ID: 20000436 Result: Up-regulated in Transcription
  misc_feature: MA Experiment 20000436 PARAMETER Experiment Name: At_Drought_P Parameter: Age (day) Value: 7
  misc_feature: MA Experiment 20000436 PARAMETER Experiment Name: At_Drought_P Parameter: Organism Value: A. thaliana
  misc_feature: MA Experiment 20000436 PARAMETER Experiment Name: At_Drought_P Parameter: Plant Line Value: WS
  misc_feature: MA Experiment 20000436 PARAMETER Experiment Name: At_Drought_P Parameter: Timepoint (hr) Value: 12
  misc_feature: MA Experiment 20000436 PARAMETER Experiment Name: At_Drought_P Parameter: Tissue Value: Whole Plant
  misc_feature: MA Experiment 20000436 PARAMETER Experiment Name: At_Drought_P Parameter: Treatment Value: Drought vs. No Drought
  misc_feature: MA Experiment ID: 20000437 Result: Up-regulated in Transcription
  misc_feature: MA Experiment 20000437 PARAMETER Experiment Name: At_Drought_P Parameter: Age (day) Value: 8
  misc_feature: MA Experiment 20000437 PARAMETER Experiment Name: At_Drought_P Parameter: Organism Value: A. thaliana
  misc_feature: MA Experiment 20000437 PARAMETER Experiment Name: At_Drought_P Parameter: Plant Line Value: WS
  misc_feature: MA Experiment 20000437 PARAMETER Experiment Name: At_Drought_P Parameter: Timepoint (hr) Value: 24
  misc_feature: MA Experiment 20000437 PARAMETER Experiment Name: At_Drought_P Parameter: Tissue Value: Whole Plant
  misc_feature: MA Experiment 20000437 PARAMETER Experiment Name: At_Drought_P Parameter: Treatment Value: Drought vs. No Drought
  misc_feature: MA Experiment ID: 20000438 Result: Down-regulated in Transcription
  misc_feature: MA Experiment 20000438 PARAMETER Experiment Name: At_Shoots__P Parameter: Age (day) Value: 14
  misc_feature: MA Experiment 20000438 PARAMETER Experiment Name: At_Shoots__P Parameter: Tissue Value: Shoots vs. Whole Plant
  misc_feature: MA Experiment ID: 20000439 Result: Down-regulated in Transcription
  misc_feature: MA Experiment 20000439 PARAMETER Experiment Name: At_Roots__P Parameter: Age (day) Value: 14 vs. 21
  misc_feature: MA Experiment 20000439 PARAMETER Experiment Name: At_Roots__P Parameter: Organism Value: A. thaliana
  misc_feature: MA Experiment 20000439 PARAMETER Experiment Name: At_Roots__P Parameter: Tissue Value: Roots vs. Whole Plant
  misc_feature: MA Experiment ID: 20000460 Result: Down-regulated in Transcription
  misc_feature: MA Experiment 20000460 PARAMETER Experiment Name: At_10percent_PEG_P Parameter: Age (day) Value: 12
  misc_feature: MA Experiment 20000460 PARAMETER Experiment Name: At_10percent_PEG_P Parameter: Organism Value: A. thaliana
  misc_feature: MA Experiment 20000460 PARAMETER Experiment Name: At_10percent_PEG_P Parameter: Plant Line Value: WS
  misc_feature: MA Experiment 20000460 PARAMETER Experiment Name: At_10percent_PEG_P Parameter: Timepoint (day) Value: 12
  misc_feature: MA Experiment 20000460 PARAMETER Experiment Name: At_10percent_PEG_P Parameter: Tissue Value: Whole Plant
  misc_feature: MA Experiment 20000460 PARAMETER Experiment Name: At_10percent_PEG_P Parameter: Treatment Value: 10percent PEG vs. No Treatment
  misc_feature: MA Experiment ID: 20000527 Result: Down-regulated in Transcription
  misc_feature: MA Experiment 20000527 PARAMETER Experiment Name: At_10percent_PEG_P Parameter: Age (day) Value: 20
  misc_feature: MA Experiment 20000527 PARAMETER Experiment Name: At_10percent_PEG_P Parameter: Organism Value: A. thaliana
  misc_feature: MA Experiment 20000527 PARAMETER Experiment Name: At_10percent_PEG_P Parameter: Plant Line Value: WS
  misc_feature: MA Experiment 20000527 PARAMETER Experiment Name: At_10percent_PEG_P Parameter: Timepoint (day) Value: 20
  misc_feature: MA Experiment 20000527 PARAMETER Experiment Name: At_10percent_PEG_P Parameter: Tissue Value: Whole Plant
  misc_feature: MA Experiment 20000527 PARAMETER Experiment Name: At_10percent_PEG_P Parameter: Treatment Value: 10percent PEG vs. No Treatment
  misc_feature: MA Experiment ID: 20000573 Result: Down-regulated in Transcription
  misc_feature: MA Experiment 20000573 PARAMETER Experiment Name: At_100uM_ABA_Mutants__P Parameter: Organism Value: A. thaliana
  misc_feature: MA Experiment 20000573 PARAMETER Experiment Name: At_100uM_ABA_Mutants__P Parameter: Plant Line Value: CS22 vs. Ler wt
  misc_feature: MA Experiment 20000573 PARAMETER Experiment Name: At_100uM_ABA_Mutants__P Parameter: Timepoint (hr) Value: N/A
  misc_feature: MA Experiment 20000573 PARAMETER Experiment Name: At_100uM_ABA_Mutants__P Parameter: Tissue Value: Whole Plant
  misc_feature: MA Experiment 20000573 PARAMETER Experiment Name: At_100uM_ABA_Mutants__P Parameter: Treatment Value: None
  misc_feature: MA Experiment ID: 20000574 Result: Down-regulated in Transcription
  misc_feature: MA Experiment 20000574 PARAMETER Experiment Name: At_100uM_ABA_Mutants__P Parameter: Organism Value: A. thaliana
  misc_feature: MA Experiment 20000574 PARAMETER Experiment Name: At_100uM_ABA_Mutants__P Parameter: Plant Line Value: CS23 vs. Ler wt
  misc_feature: MA Experiment 20000574 PARAMETER Experiment Name: At_100uM_ABA_Mutants__P Parameter: Timepoint (hr) Value: N/A
  misc_feature: MA Experiment 20000574 PARAMETER Experiment Name: At_100uM_ABA_Mutants__P Parameter: Tissue Value: Whole Plant
  misc_feature: MA Experiment 20000574 PARAMETER Experiment Name: At_100uM_ABA_Mutants__P Parameter: Treatment Value: None
  misc_feature: MA Experiment ID: 20001247 Result: Down-regulated in Transcription
  misc_feature: MA Experiment 20001247 PARAMETER Experiment Name: At_Far-red-induction_P Parameter: Age (day) Value: 7
  misc_feature: MA Experiment 20001247 PARAMETER Experiment Name: At_Far-red-induction_P Parameter: Light Value: Far-red vs. White
  misc_feature: MA Experiment 20001247 PARAMETER Experiment Name: At_Far-red-induction_P Parameter: Organism Value: A. thaliana
  misc_feature: MA Experiment 20001247 PARAMETER Experiment Name: At_Far-red-induction_P Parameter: Plant Line Value: Columbia
  misc_feature: MA Experiment 20001247 PARAMETER Experiment Name: At_Far-red-induction_P Parameter: Timepoint (hr) Value: 1
  misc_feature: MA Experiment 20001247 PARAMETER Experiment Name: At_Far-red-induction_P Parameter: Tissue Value: Whole Plant
  misc_feature: MA Experiment ID: 20001248 Result: Down-regulated in Transcription
  misc_feature: MA Experiment 20001248 PARAMETER Experiment Name: At_Far-red-induction_P Parameter: Age (day) Value: 7
  misc_feature: MA Experiment 20001248 PARAMETER Experiment Name: At_Far-red-induction_P Parameter: Light Value: Far-red vs. White
  misc_feature: MA Experiment 20001248 PARAMETER Experiment Name: At_Far-red-induction_P Parameter: Organism Value: A. thaliana
  misc_feature: MA Experiment 20001248 PARAMETER Experiment Name: At_Far-red-induction_P Parameter: Plant Line Value: Columbia
  misc_feature: MA Experiment 20001248 PARAMETER Experiment Name: At_Far-red-induction_P Parameter: Timepoint (hr) Value: 4
  misc_feature: MA Experiment 20001248 PARAMETER Experiment Name: At_Far-red-induction_P Parameter: Tissue Value: Whole Plant
  misc_feature: MA Experiment ID: 20001451 Result: Down-regulated in Transcription
  misc_feature: MA Experiment 20001451 PARAMETER Experiment Name: At_Far-red-induction_P Parameter: Age (day) Value: 7
  misc_feature: MA Experiment 20001451 PARAMETER Experiment Name: At_Far-red-induction_P Parameter: Light Value: Far-red vs. White
  misc_feature: MA Experiment 20001451 PARAMETER Experiment Name: At_Far-red-induction_P Parameter: Organism Value: A. thaliana
  misc_feature: MA Experiment 20001451 PARAMETER Experiment Name: At_Far-red-induction_P Parameter: Plant Line Value: Columbia
  misc_feature: MA Experiment 20001451 PARAMETER Experiment Name: At_Far-red-induction_P Parameter: Timepoint (hr) Value: 24
  misc_feature: MA Experiment 20001451 PARAMETER Experiment Name: At_Far-red-induction_P Parameter: Tissue Value: Whole Plant
  misc_feature: MA Experiment ID: 20001554 Result: Up-regulated in Transcription
  misc_feature: MA Experiment 20001554 PARAMETER Experiment Name: At_Drought_Soil_Dry_P Parameter: Age (day) Value: 21
  misc_feature: MA Experiment 20001554 PARAMETER Experiment Name: At_Drought_Soil_Dry_P Parameter: Organism Value: A. thaliana
  misc_feature: MA Experiment 20001554 PARAMETER Experiment Name: At_Drought_Soil_Dry_P Parameter: Plant Line Value: WS
  misc_feature: MA Experiment 20001554 PARAMETER Experiment Name: At_Drought_Soil_Dry_P Parameter: Post Timepoint (hr) Value: None
  misc_feature: MA Experiment 20001554 PARAMETER Experiment Name: At_Drought_Soil_Dry_P Parameter: Post-Treatment Value: None
  misc_feature: MA Experiment 20001554 PARAMETER Experiment Name: At_Drought_Soil_Dry_P Parameter: Timepoint (day) Value: 7
  misc_feature: MA Experiment 20001554 PARAMETER Experiment Name: At_Drought_Soil_Dry_P Parameter: Treatment Value: Drought vs. No Drought
  misc_feature: MA Experiment ID: 20001555 Result: Up-regulated in Transcription
  misc_feature: MA Experiment 20001555 PARAMETER Experiment Name: At_Drought_Soil_Dry_P Parameter: Age (day) Value: 24
  misc_feature: MA Experiment 20001555 PARAMETER Experiment Name: At_Drought_Soil_Dry_P Parameter: Organism Value: A. thaliana
  misc_feature: MA Experiment 20001555 PARAMETER Experiment Name: At_Drought_Soil_Dry_P Parameter: Plant Line Value: WS
  misc_feature: MA Experiment 20001555 PARAMETER Experiment Name: At_Drought_Soil_Dry_P Parameter: Post Timepoint (hr) Value: None
  misc_feature: MA Experiment 20001555 PARAMETER Experiment Name: At_Drought_Soil_Dry_P Parameter: Post-Treatment Value: None
  misc_feature: MA Experiment 20001555 PARAMETER Experiment Name: At_Drought_Soil_Dry_P Parameter: Timepoint (day) Value: 10
  misc_feature: MA Experiment 20001555 PARAMETER Experiment Name: At_Drought_Soil_Dry_P Parameter: Treatment Value: Drought vs. No Drought
  misc_feature: MA Experiment ID: 20001558 Result: Down-regulated in Transcription
  misc_feature: MA Experiment 20001558 PARAMETER Experiment Name: At_Drought_Soil_Dry_P Parameter: Age (day) Value: 27
  misc_feature: MA Experiment 20001558 PARAMETER Experiment Name: At_Drought_Soil_Dry_P Parameter: Organism Value: A. thaliana
  misc_feature: MA Experiment 20001558 PARAMETER Experiment Name: At_Drought_Soil_Dry_P Parameter: Plant Line Value: WS
  misc_feature: MA Experiment 20001558 PARAMETER Experiment Name: At_Drought_Soil_Dry_P Parameter: Post Timepoint (hr) Value: 6
  misc_feature: MA Experiment 20001558 PARAMETER Experiment Name: At_Drought_Soil_Dry_P Parameter: Post-Treatment Value: Re-Water vs. No Drought
  misc_feature: MA Experiment 20001558 PARAMETER Experiment Name: At_Drought_Soil_Dry_P Parameter: Timepoint (day) Value: 13
  misc_feature: MA Experiment 20001558 PARAMETER Experiment Name: At_Drought_Soil_Dry_P Parameter: Treatment Value: Drought vs. No Drought
  misc_feature: MA Experiment ID: 20001560 Result: Down-regulated in Transcription
  misc_feature: MA Experiment 20001560 PARAMETER Experiment Name: At_Drought_Soil_Dry_P Parameter: Age (day) Value: 28
  misc_feature: MA Experiment 20001560 PARAMETER Experiment Name: At_Drought_Soil_Dry_P Parameter: Organism Value: A. thaliana
  misc_feature: MA Experiment 20001560 PARAMETER Experiment Name: At_Drought_Soil_Dry_P Parameter: Plant Line Value: WS
  misc_feature: MA Experiment 20001560 PARAMETER Experiment Name: At_Drought_Soil_Dry_P Parameter: Post Timepoint (hr) Value: None
  misc_feature: MA Experiment 20001560 PARAMETER Experiment Name: At_Drought_Soil_Dry_P Parameter: Post-Treatment Value: None
  misc_feature: MA Experiment 20001560 PARAMETER Experiment Name: At_Drought_Soil_Dry_P Parameter: Timepoint (day) Value: 14
  misc_feature: MA Experiment 20001560 PARAMETER Experiment Name: At_Drought_Soil_Dry_P Parameter: Treatment Value: Drought vs. No Drought
ccttatctctctctctctttctctcttatataaagagagaaatatacaaaacctccaagtacgtttcatcgatcctacctaattcatcaaaaaattgtgtgaggcttatttgatcaataattatgaattctggtcgtcgatcgttaatgtccgccacggcgagtctgagtttgctgttgtgtatcttcaccaccttcgtcgtggtgtcgaacggtgagcttcagagatttatagagccggctaaaagcgacggttccgttagttttatagtcatcggagattggggtcgtcgtggctccttcaatcagtctctcgttgcttatcagatgggaaaaattggagagaagattgacttagatttcgtggtgtctacgggagataacttctacgacaatggattgtttagtgaacatgatccaaacttcgaacaatctttctctaacatctacactgctccaagtcttcagaaacagtggtacagtgttttgggaaaccatgactatagaggtgacgcagaagctcagctgagttctgttctccgggaaatcgacagccgttggatttgtcttcgatcatttgtcgttgatgcagagttggtagagatgttctttgttgacacgactcctttcgtgaaagaatactacacagaagcagatggtcactcatatgattggcgcgcagttccatctcgcaactcttatgtcaaagctcttctccgtgatcttgaagtttccttaaagagttctaaagcaagatggaagattgttgttggtcaccatgcaatgagaagcattggacatcatggagatactaaagagctcaacgaagagcttcttccgattcttaaagagaacggtgttgatctctacatgaatggacatgatcattgtcttcaacatatgagtgatgaagacagtcctattcagtttctaactagtggtgctggatccaaggcttggagaggagatattaacccagtgaccatcaatcccaagctactgaaattctattatgatggtcaaggattcatgtctgctcggttcactcactcggacgcagagatcgtcttctacgatgtctttggtgagattttgcacaaatgggtcacttctaaacaacttcttcattcctctgtttgaagataaaaagccttaataaatttggcttcctttgtaattttgtaacatacatttaagattcttaagtcctattgcaggctaggtaggcttcctgcttagtttagcatccctatcatttttagcaatagcttattccatcacaataacatataaaatgtacgatcttttcctcaaatttttgatacaagtgtaatgatacccttaatgggtatcttcttaatgctacataagttagtc

SEQ ID NO: 40283 - protein, 338 aa, Arabidopsis thaliana
  peptide (1)..(338): Ceres Seq. ID no. 13489322
  misc_feature (46)..(257): Pfam Name: Calcineurin-like phosphoesterase Pfam Description: Calcineurin-like phosphoesterase
  misc_feature (14)..(333): Homolog of NCBI NO: 22329781 NR Description: calcineurin-like phosphoesterase family
  misc_feature (15)..(338): Homolog of NCBI NO: 22325419 NR Description: calcineurin-like phosphoesterase family
  misc_feature (18)..(335): Homolog of NCBI NO: 25752249 NR Description: probable acid phosphatase (EC 3.1.3.2) F10B6.10
  misc_feature (18)..(335): Homolog of NCBI NO: 30911094 NR Description: putative purple acid phosphatase [Arabidopsis
  misc_feature (18)..(335): Homolog of NCBI NO: 30683951 NR Description: calcineurin-like phosphoesterase family
  misc_feature (16)..(336): Homolog of NCBI NO: 39918795 NR Description: putative acid phosphatase [Lupinus luteus]
  misc_feature (1)..(338): Homolog of NCBI NO: 21536860 NR Description: acid phosphatase type 5 [Arabidopsis thaliana]
  misc_feature (1)..(338): Homolog of NCBI NO: 18401643 NR Description: calcineurin-like phosphoesterase family
MNSGRRSLMSATASLSLLLCIFTTFVVVSNGELQRFIEPAKSDGSVSFIVIGDWGRRGSFNQSLVAYQMGKIGEKIDLDFVVSTGDNFYDNGLFSEHDPNFEQSFSNIYTAPSLQKQWYSVLGNHDYRGDAEAQLSSVLREIDSRWICLRSFVVDAELVEMFFVDTTPFVKEYYTEADGHSYDWRAVPSRNSYVKALLRDLEVSLKSSKARWKIVVGHHAMRSIGHHGDTKELNEELLPILKENGVDLYMNGHDHCLQHMSDEDSPIQFLTSGAGSKAWRGDINPVTINPKLLKFYYDGQGFMSARFTHSDAEIVFYDVFGEILHKWVTSKQLLHSSV

SEQ ID NO: 40284 - protein, 330 aa, Arabidopsis thaliana
  peptide (1)..(330): Ceres Seq. ID no. 13489323
  misc_feature (38)..(249): Pfam Name: Calcineurin-like phosphoesterase Pfam Description: Calcineurin-like phosphoesterase
  misc_feature (6)..(325): Homolog of NCBI NO: 22329781 NR Description: calcineurin-like phosphoesterase family
  misc_feature (7)..(330): Homolog of NCBI NO: 22325419 NR Description: calcineurin-like phosphoesterase family
  misc_feature (10)..(327): Homolog of NCBI NO: 25752249 NR Description: probable acid phosphatase (EC 3.1.3.2) F10B6.10
  misc_feature (10)..(327): Homolog of NCBI NO: 30911094 NR Description: putative purple acid phosphatase [Arabidopsis
  misc_feature (10)..(327): Homolog of NCBI NO: 30683951 NR Description: calcineurin-like phosphoesterase family
  misc_feature (8)..(328): Homolog of NCBI NO: 39918795 NR Description: putative acid phosphatase [Lupinus luteus]
  misc_feature (1)..(330): Homolog of NCBI NO: 21536860 NR Description: acid phosphatase type 5 [Arabidopsis thaliana]
  misc_feature (1)..(330): Homolog of NCBI NO: 18401643 NR Description: calcineurin-like phosphoesterase family
MSATASLSLLLCIFTTFVVVSNGELQRFIEPAKSDGSVSFIVIGDWGRRGSFNQSLVAYQMGKIGEKIDLDFVVSTGDNFYDNGLFSEHDPNFEQSFSNIYTAPSLQKQWYSVLGNHDYRGDAEAQLSSVLREIDSRWICLRSFVVDAELVEMFFVDTTPFVKEYYTEADGHSYDWRAVPSRNSYVKALLRDLEVSLKSSKARWKIVVGHHAMRSIGHHGDTKELNEELLPILKENGVDLYMNGHDHCLQHMSDEDSPIQFLTSGAGSKAWRGDINPVTINPKLLKFYYDGQGFMSARFTHSDAEIVFYDVFGEILHKWVTSKQLLHSSV

SEQ ID NO: 40285 - protein, 270 aa, Arabidopsis thaliana
  peptide (1)..(270): Ceres Seq. ID no. 13489324
  misc_feature (1)..(189): Pfam Name: Calcineurin-like phosphoesterase Pfam Description: Calcineurin-like phosphoesterase
  misc_feature (1)..(265): Homolog of NCBI NO: 22329781 NR Description: calcineurin-like phosphoesterase family
  misc_feature (1)..(270): Homolog of NCBI NO: 22325419 NR Description: calcineurin-like phosphoesterase family
  misc_feature (1)..(267): Homolog of NCBI NO: 25752249 NR Description: probable acid phosphatase (EC 3.1.3.2) F10B6.10
  misc_feature (1)..(267): Homolog of NCBI NO: 30911094 NR Description: putative purple acid phosphatase [Arabidopsis
  misc_feature (1)..(267): Homolog of NCBI NO: 30683951 NR Description: calcineurin-like phosphoesterase family
  misc_feature (1)..(268): Homolog of NCBI NO: 39918795 NR Description: putative acid phosphatase [Lupinus luteus]
  misc_feature (1)..(270): Homolog of NCBI NO: 21536860 NR Description: acid phosphatase type 5 [Arabidopsis thaliana]
  misc_feature (1)..(270): Homolog of NCBI NO: 18401643 NR Description: calcineurin-like phosphoesterase family
MGKIGEKIDLDFVVSTGDNFYDNGLFSEHDPNFEQSFSNIYTAPSLQKQWYSVLGNHDYRGDAEAQLSSVLREIDSRWICLRSFVVDAELVEMFFVDTTPFVKEYYTEADGHSYDWRAVPSRNSYVKALLRDLEVSLKSSKARWKIVVGHHAMRSIGHHGDTKELNEELLPILKENGVDLYMNGHDHCLQHMSDEDSPIQFLTSGAGSKAWRGDINPVTINPKLLKFYYDGQGFMSARFTHSDAEIVFYDVFGEILHKWVTSKQLLHSSV

SEQ ID NO: 40286 - DNA, 1159 bp, Arabidopsis thaliana
  misc_feature (1)..(1159): Ceres Seq. ID no. 13580377
  misc_feature: MA Experiment ID: 108461 Result: Down-regulated in Transcription
  misc_feature: MA Experiment 108461 PARAMETER Experiment Name: At_Germinating_Seeds_cDNA_P Parameter: Age (day) Value: 1 vs. 0
  misc_feature: MA Experiment 108461 PARAMETER Experiment Name: At_Germinating_Seeds_cDNA_P Parameter: Tissue Value: Germinating Seeds
  misc_feature: MA Experiment ID: 108462 Result: Down-regulated in Transcription
  misc_feature: MA Experiment 108462 PARAMETER Experiment Name: At_Germinating_Seeds_cDNA_P Parameter: Age (day) Value: 2 vs. 0
  misc_feature: MA Experiment 108462 PARAMETER Experiment Name: At_Germinating_Seeds_cDNA_P Parameter: Tissue Value: Germinating Seeds
  misc_feature: MA Experiment ID: 108463 Result: Down-regulated in Transcription
  misc_feature: MA Experiment 108463 PARAMETER Experiment Name: At_Germinating_Seeds_cDNA_P Parameter: Age (day) Value: 3 vs. 0
  misc_feature: MA Experiment 108463 PARAMETER Experiment Name: At_Germinating_Seeds_cDNA_P Parameter: Tissue Value: Germinating Seeds
  misc_feature: MA Experiment ID: 108464 Result: Down-regulated in Transcription
  misc_feature: MA Experiment 108464 PARAMETER Experiment Name: At_Germinating_Seeds_cDNA_P Parameter: Age (day) Value: 4 vs. 0
  misc_feature: MA Experiment 108464 PARAMETER Experiment Name: At_Germinating_Seeds_cDNA_P Parameter: Tissue Value: Germinating Seeds
  misc_feature: MA Experiment ID: 108501 Result: Down-regulated in Transcription
  misc_feature: MA Experiment 108501 PARAMETER Experiment Name: At_ap2_floral_buds_cDNA_P Parameter: Plant Line Value: ap2 (Ler.)
  misc_feature: MA Experiment 108501 PARAMETER Experiment Name: At_ap2_floral_buds_cDNA_P Parameter: Tissue Value: Closed Flower
  misc_feature: MA Experiment ID: 108572 Result: Up-regulated in Transcription
  misc_feature: MA Experiment 108572 PARAMETER Experiment Name: At_Drought_cDNA_P Parameter: Timepoint (hr) Value: 1
  misc_feature: MA Experiment 108572 PARAMETER Experiment Name: At_Drought_cDNA_P Parameter: Tissue Value: Aerial
  misc_feature: MA Experiment 108572 PARAMETER Experiment Name: At_Drought_cDNA_P Parameter: Treatment Value: Drought vs. No Drought
  misc_feature: MA Experiment ID: 20000265 Result: Up-regulated in Transcription
  misc_feature: MA Experiment 20000265 PARAMETER Experiment Name: At_Open_Flower_P Parameter: Age (day) Value: 21
  misc_feature: MA Experiment 20000265 PARAMETER Experiment Name: At_Open_Flower_P Parameter: Plant Line Value: WS
  misc_feature: MA Experiment 20000265 PARAMETER Experiment Name: At_Open_Flower_P Parameter: Tissue Value: Closed Flower vs. Whole Plant
  misc_feature: MA Experiment ID: 20001555 Result: Up-regulated in Transcription
  misc_feature: MA Experiment 20001555 PARAMETER Experiment Name: At_Drought_Soil_Dry_P Parameter: Age (day) Value: 24
  misc_feature: MA Experiment 20001555 PARAMETER Experiment Name: At_Drought_Soil_Dry_P Parameter: Organism Value: A. thaliana
  misc_feature: MA Experiment 20001555 PARAMETER Experiment Name: At_Drought_Soil_Dry_P Parameter: Plant Line Value: WS
  misc_feature: MA Experiment 20001555 PARAMETER Experiment Name: At_Drought_Soil_Dry_P Parameter: Post Timepoint (hr) Value: None
  misc_feature: MA Experiment 20001555 PARAMETER Experiment Name: At_Drought_Soil_Dry_P Parameter: Post-Treatment Value: None
  misc_feature: MA Experiment 20001555 PARAMETER Experiment Name: At_Drought_Soil_Dry_P Parameter: Timepoint (day) Value: 10
  misc_feature: MA Experiment 20001555 PARAMETER Experiment Name: At_Drought_Soil_Dry_P Parameter: Treatment Value: Drought vs. No Drought
  misc_feature: MA Experiment ID: 20001904 Result: Up-regulated in Transcription
  misc_feature: MA Experiment 20001904 PARAMETER Experiment Name: At_Drought_Reproduction_P Parameter: Age (day) Value: 37
  misc_feature: MA Experiment 20001904 PARAMETER Experiment Name: At_Drought_Reproduction_P Parameter: Organism Value: A. thaliana
  misc_feature: MA Experiment 20001904 PARAMETER Experiment Name: At_Drought_Reproduction_P Parameter: Plant Line Value: WS
  misc_feature: MA Experiment 20001904 PARAMETER Experiment Name: At_Drought_Reproduction_P Parameter: Timepoint (day) Value: 7
  misc_feature: MA Experiment 20001904 PARAMETER Experiment Name: At_Drought_Reproduction_P Parameter: Tissue Value: Rosettes
  misc_feature: MA Experiment 20001904 PARAMETER Experiment Name: At_Drought_Reproduction_P Parameter: Treatment Value: Drought vs. No Drought
  misc_feature: MA Experiment ID: 20001905 Result: Up-regulated in Transcription
  misc_feature: MA Experiment 20001905 PARAMETER Experiment Name: At_Drought_Reproduction_P Parameter: Age (day) Value: 40
  misc_feature: MA Experiment 20001905 PARAMETER Experiment Name: At_Drought_Reproduction_P Parameter: Organism Value: A. thaliana
  misc_feature: MA Experiment 20001905 PARAMETER Experiment Name: At_Drought_Reproduction_P Parameter: Plant Line Value: WS
  misc_feature: MA Experiment 20001905 PARAMETER Experiment Name: At_Drought_Reproduction_P Parameter: Timepoint (day) Value: 10
  misc_feature: MA Experiment 20001905 PARAMETER Experiment Name: At_Drought_Reproduction_P Parameter: Tissue Value: Rosettes
  misc_feature: MA Experiment 20001905 PARAMETER Experiment Name: At_Drought_Reproduction_P Parameter: Treatment Value: Drought vs. No Drought
atataaacacaaaagcctttagtatcattctcgaaaaccaccaaaaacctctttataacccaacaaacaaagtctctacttcttcttcaatcactgaaacacaacaccaaaaaagaaaaaagtatgtctcttcttccccatctcatcctctacctaacacttttgacggtggttgttactggagaaactctccgaccaagaatctacagcgagacatgccctgaagctgaatccatagtaagaagagaaatgaagaaagcatgatcaaagaagcaagaagcgtcgcttccgtcatgcgtttccaatttcacgactgtttcgtcaatggatgtgacgcatctctgttgcttgacgacacaccaaacatgcttggtgaaaaactatcactttccaacatcgattcactaagatctttcgaagtcgttgacgacattaaagaagctctagagaaagcttgtccagctactgtttcttgtgccgatatcgttatcatggccgctcgtgacgccgttgctcttacaggaggaccagattgggaagtgaagctagggaggaaagacagtttaacagcgagtcagcaagattccgacgatataatgccaagtccaagagccaacgcaactttcttgattgatctcttcgaaagattcaatctttctgtaaaagacatggttgctttatcagggtcacactcaataggtcaaggtcggtgtttttcaatcatgttcagactttataaccaatccggttctggtaaaccggatccagctcttgaaccgacttaccgtaagaagcttgacaacctttgtcctttgggtggagatgagaatgtgactggagatctagatgcaacacctcaggtttttgataatcagtatttcaaagacttggtttcagggagagggtttcttaactctgatcagactttgtacacgaatctagtgacgagagagtatgtgaagatgtttagtgaggatcaagatgagttcttcagggcttttgcagaaggcatggtgaagttgggtgatttgcaatctgggagagatggtgagattaggtttaattgtagagttgttaatagaaggcctattgatgtattgcttgtatcttgaattatcattagtaaagagaagaaatcttaattatgacttctaaattg

SEQ ID NO: 40287 - protein, 283 aa, Arabidopsis thaliana
  peptide (1)..(283): Ceres Seq. ID no. 13580378
  misc_feature (1)..(239): Pfam Name: Peroxidase Pfam Description: Peroxidase
  misc_feature (3)..(273): Homolog of NCBI NO: 15224114 NR Description: peroxidase, putative [Arabidopsis thaliana]
  misc_feature (4)..(273): Homolog of NCBI NO: 18420061 NR Description: peroxidase, putative [Arabidopsis thaliana]
  misc_feature (4)..(273): Homolog of NCBI NO: 21593604 NR Description: peroxidase ATP N [Arabidopsis thaliana]
  misc_feature (4)..(273): Homolog of NCBI NO: 7245406 NR Description: Chain A, Arabidopsis Thaliana Peroxidase N
  misc_feature (4)..(273): Homolog of NCBI NO: 1403134 NR Description: peroxidase [Arabidopsis thaliana]
  misc_feature (1)..(273): Homolog of NCBI NO: 15234394 NR Description: peroxidase, putative [Arabidopsis thaliana]
  misc_feature (1)..(273): Homolog of NCBI NO: 21537275 NR Description: putative peroxidase [Arabidopsis thaliana]
  misc_feature (1)..(273): Homolog of NCBI NO: 15224116 NR Description: peroxidase, putative [Arabidopsis thaliana]
  misc_feature (1)..(281): Homolog of NCBI NO: 19698448 NR Description: gaiacol peroxidase [Gossypium hirsutum]
  misc_feature (1)..(283): Homolog of NCBI NO: 15227200 NR Description: putative peroxidase [Arabidopsis thaliana]
MIKEARSVASVMRFQFHDCFVNGCDASLLLDDTPNMLGEKLSLSNIDSLRSFEVVDDIKEALEKACPATVSCADIVIMAARDAVALTGGPDWEVKLGRKDSLTASQQDSDDIMPSPRANATFLIDLFERFNLSVKDMVALSGSHSIGQGRCFSIMFRLYNQSGSGKPDPALEPTYRKKLDNLCPLGGDENVTGDLDATPQVFDNQYFKDLVSGRGFLNSDQTLYTNLVTREYVKMFSEDQDEFFRAFAEGMVKLGDLQSGRDGEIRFNCRVVNRRPIDVLLVS

SEQ ID NO: 40288 - protein, 272 aa, Arabidopsis thaliana
  peptide (1)..(272): Ceres Seq. ID no. 13580379
  misc_feature (1)..(228): Pfam Name: Peroxidase Pfam Description: Peroxidase
  misc_feature (1)..(262): Homolog of NCBI NO: 15224114 NR Description: peroxidase, putative [Arabidopsis thaliana]
  misc_feature (1)..(262): Homolog of NCBI NO: 18420061 NR Description: peroxidase, putative [Arabidopsis thaliana]
  misc_feature (1)..(262): Homolog of NCBI NO: 7245406 NR Description: Chain A, Arabidopsis Thaliana Peroxidase N
  misc_feature (1)..(262): Homolog of NCBI NO: 21593604 NR Description: peroxidase ATP N [Arabidopsis thaliana]
  misc_feature (1)..(262): Homolog of NCBI NO: 1403134 NR Description: peroxidase [Arabidopsis thaliana]
  misc_feature (1)..(262): Homolog of NCBI NO: 15234394 NR Description: peroxidase, putative [Arabidopsis thaliana]
  misc_feature (1)..(262): Homolog of NCBI NO: 21537275 NR Description: putative peroxidase [Arabidopsis thaliana]
  misc_feature (1)..(262): Homolog of NCBI NO: 15224116 NR Description: peroxidase, putative [Arabidopsis thaliana]
  misc_feature (1)..(270): Homolog of NCBI NO: 19698448 NR Description: gaiacol peroxidase [Gossypium hirsutum]
  misc_feature (1)..(272): Homolog of NCBI NO: 15227200 NR Description: putative peroxidase [Arabidopsis thaliana]
MRFQFHDCFVNGCDASLLLDDTPNMLGEKLSLSNIDSLRSFEVVDDIKEALEKACPATVSCADIVIMAARDAVALTGGPDWEVKLGRKDSLTASQQDSDDIMPSPRANATFLIDLFERFNLSVKDMVALSGSHSIGQGRCFSIMFRLYNQSGSGKPDPALEPTYRKKLDNLCPLGGDENVTGDLDATPQVFDNQYFKDLVSGRGFLNSDQTLYTNLVTREYVKMFSEDQDEFFRAFAEGMVKLGDLQSGRDGEIRFNCRVVNRRPIDVLLVS

SEQ ID NO: 40289 - protein, 248 aa, Arabidopsis thaliana
  peptide (1)..(248): Ceres Seq. ID no. 13580380
  misc_feature (1)..(204): Pfam Name: Peroxidase Pfam Description: Peroxidase
  misc_feature (1)..(238): Homolog of NCBI NO: 15224114 NR Description: peroxidase, putative [Arabidopsis thaliana]
  misc_feature (1)..(238): Homolog of NCBI NO: 18420061 NR Description: peroxidase, putative [Arabidopsis thaliana]
  misc_feature (1)..(238): Homolog of NCBI NO: 7245406 NR Description: Chain A, Arabidopsis Thaliana Peroxidase N
  misc_feature (1)..(238): Homolog of NCBI NO: 21593604 NR Description: peroxidase ATP N [Arabidopsis thaliana]
  misc_feature (1)..(238): Homolog of NCBI NO: 1403134 NR Description: peroxidase [Arabidopsis thaliana]
  misc_feature (1)..(238): Homolog of NCBI NO: 15234394 NR Description: peroxidase, putative [Arabidopsis thaliana]
  misc_feature (1)..(238): Homolog of NCBI NO: 21537275 NR Description: putative peroxidase [Arabidopsis thaliana]
  misc_feature (1)..(238): Homolog of NCBI NO: 15224116 NR Description: peroxidase, putative [Arabidopsis thaliana]
  misc_feature (1)..(246): Homolog of NCBI NO: 19698448 NR Description: gaiacol peroxidase [Gossypium hirsutum]
  misc_feature (1)..(248): Homolog of NCBI NO: 15227200 NR Description: putative peroxidase [Arabidopsis thaliana]
MLGEKLSLSNIDSLRSFEVVDDIKEALEKACPATVSCADIVIMAARDAVALTGGPDWEVKLGRKDSLTASQQDSDDIMPSPRANATFLIDLFERFNLSVKDMVALSGSHSIGQGRCFSIMFRLYNQSGSGKPDPALEPTYRKKLDNLCPLGGDENVTGDLDATPQVFDNQYFKDLVSGRGFLNSDQTLYTNLVTREYVKMFSEDQDEFFRAFAEGMVKLGDLQSGRDGEIRFNCRVVNRRPIDVLLVS

SEQ ID NO: 40290 - DNA, 1839 bp, Arabidopsis thaliana
  misc_feature (1)..(1839): Ceres Seq. ID no. 12327921
  misc_feature: MA Experiment ID: 108573 Result: Up-regulated in Transcription
  misc_feature: MA Experiment 108573 PARAMETER Experiment Name: At_Drought_cDNA_P Parameter: Timepoint (hr) Value: 6
  misc_feature: MA Experiment 108573 PARAMETER Experiment Name: At_Drought_cDNA_P Parameter: Tissue Value: Aerial
  misc_feature: MA Experiment 108573 PARAMETER Experiment Name: At_Drought_cDNA_P Parameter: Treatment Value: Drought vs. No Drought
  misc_feature: MA Experiment ID: 108585 Result: Up-regulated in Transcription
  misc_feature: MA Experiment 108585 PARAMETER Experiment Name: At_5mM_NaNP_cDNA_P Parameter: Timepoint (hr) Value: 6
  misc_feature: MA Experiment 108585 PARAMETER Experiment Name: At_5mM_NaNP_cDNA_P Parameter: Tissue Value: Aerial
  misc_feature: MA Experiment 108585 PARAMETER Experiment Name: At_5mM_NaNP_cDNA_P Parameter: Treatment Value: null
  misc_feature: MA Experiment ID: 20000111 Result: Up-regulated in Transcription
  misc_feature: MA Experiment 20000111 PARAMETER Experiment Name: At_42deg_Heat_cDNA_P Parameter: Temperature (deg C) Value: 42 vs. 22
  misc_feature: MA Experiment 20000111 PARAMETER Experiment Name: At_42deg_Heat_cDNA_P Parameter: Timepoint (hr) Value: 6
  misc_feature: MA Experiment 20000111 PARAMETER Experiment Name: At_42deg_Heat_cDNA_P Parameter: Tissue Value: Aerial
  misc_feature: MA Experiment ID: 20000180 Result: Down-regulated in Transcription
  misc_feature: MA Experiment 20000180 PARAMETER Experiment Name: At_Germinating_Seeds_P Parameter: Age (hr) Value: 24 vs. 0
  misc_feature: MA Experiment 20000180 PARAMETER Experiment Name: At_Germinating_Seeds_P Parameter: Tissue Value: Germinating Seeds
  misc_feature: MA Experiment ID: 20000224 Result: Down-regulated in Transcription
  misc_feature: MA Experiment ID: 20001248 Result: Up-regulated in Transcription
  misc_feature: MA Experiment 20001248 PARAMETER Experiment Name: At_Far-red-induction_P Parameter: Age (day) Value: 7
  misc_feature: MA Experiment 20001248 PARAMETER Experiment Name: At_Far-red-induction_P Parameter: Light Value: Far-red vs. White
  misc_feature: MA Experiment 20001248 PARAMETER Experiment Name: At_Far-red-induction_P Parameter: Organism Value: A. thaliana
  misc_feature: MA Experiment 20001248 PARAMETER Experiment Name: At_Far-red-induction_P Parameter: Plant Line Value: Columbia
  misc_feature: MA Experiment 20001248 PARAMETER Experiment Name: At_Far-red-induction_P Parameter: Timepoint (hr) Value: 4
  misc_feature: MA Experiment 20001248 PARAMETER Experiment Name: At_Far-red-induction_P Parameter: Tissue Value: Whole Plant
  misc_feature: MA Experiment ID: 20001450 Result: Up-regulated in Transcription
  misc_feature: MA Experiment 20001450 PARAMETER Experiment Name: At_Far-red-induction_P Parameter: Age (day) Value: 7
  misc_feature: MA Experiment 20001450 PARAMETER Experiment Name: At_Far-red-induction_P Parameter: Light Value: Far-red vs. White
  misc_feature: MA Experiment 20001450 PARAMETER Experiment Name: At_Far-red-induction_P Parameter: Organism Value: A. thaliana
  misc_feature: MA Experiment 20001450 PARAMETER Experiment Name: At_Far-red-induction_P Parameter: Plant Line Value: Columbia
  misc_feature: MA Experiment 20001450 PARAMETER Experiment Name: At_Far-red-induction_P Parameter: Timepoint (hr) Value: 8
  misc_feature: MA Experiment 20001450 PARAMETER Experiment Name: At_Far-red-induction_P Parameter: Tissue Value: Whole Plant
  misc_feature: MA Experiment ID: 20001451 Result: Up-regulated in Transcription
  misc_feature: MA Experiment 20001451 PARAMETER Experiment Name: At_Far-red-induction_P Parameter: Age (day) Value: 7
  misc_feature: MA Experiment 20001451 PARAMETER Experiment Name: At_Far-red-induction_P Parameter: Light Value: Far-red vs. White
  misc_feature: MA Experiment 20001451 PARAMETER Experiment Name: At_Far-red-induction_P Parameter: Organism Value: A. thaliana
  misc_feature: MA Experiment 20001451 PARAMETER Experiment Name: At_Far-red-induction_P Parameter: Plant Line Value: Columbia
  misc_feature: MA Experiment 20001451 PARAMETER Experiment Name: At_Far-red-induction_P Parameter: Timepoint (hr) Value: 24
  misc_feature: MA Experiment 20001451 PARAMETER Experiment Name: At_Far-red-induction_P Parameter: Tissue Value: Whole Plant
  misc_feature: MA Experiment ID: 20001911 Result: Up-regulated in Transcription
  misc_feature: MA Experiment 20001911 PARAMETER Experiment Name: At_Drought_Reproduction_P Parameter: Age (day) Value: 40
  misc_feature: MA Experiment 20001911 PARAMETER Experiment Name: At_Drought_Reproduction_P Parameter: Organism Value: A. thaliana
  misc_feature: MA Experiment 20001911 PARAMETER Experiment Name: At_Drought_Reproduction_P Parameter: Plant Line Value: WS
  misc_feature: MA Experiment 20001911 PARAMETER Experiment Name: At_Drought_Reproduction_P Parameter: Timepoint (day) Value: 10
  misc_feature: MA Experiment 20001911 PARAMETER Experiment Name: At_Drought_Reproduction_P Parameter: Tissue Value: Flowers
  misc_feature: MA Experiment 20001911 PARAMETER Experiment Name: At_Drought_Reproduction_P Parameter: Treatment Value: Drought vs. No Drought
  misc_feature: Phenotype: ROSETTE LEAVES Shape-Oval
  misc_feature: Phenotype: WHOLE PLANT Size-Small
  misc_feature: Phenotype: WHOLE PLANT Other
  misc_feature: Phenotype: ROSETTE LEAVES Shape-Oval
  misc_feature: Phenotype: WHOLE PLANT Color-Yellow-Green Viable 1
  misc_feature: Phenotype: WHOLE PLANT Size-Small
  misc_feature: Phenotype: ROSETTE LEAVES Shape-Oval
  misc_feature: Phenotype: WHOLE PLANT Size-Small
aaaaacttaaaccgatctatcaagcaagtggttcctctctctctctacctctcgtttttggccaacgtcgtcgtcttcacgatccacgacgattcagttcttgagttccggcgattatcggtctctcacttctggttccgttgaacccctcatttctcttctcgcccgtgctctcaaattccgatatttgcccctgtgattcgaaaccctaatttcgcctatcaatctggaaaatctctcaattcgaagactttagcagcgcaaagatactctatccgggtaataagatcgaagaaaccatcaatttcttaccaaagtcgtgattcttggatctcgtctttgtttgatggacacaattagggtttccaaggaggttcctggatcttcgaaatcgaccgcacagtcgctcacggagtcgacctctcgcacggaaaccatcaatggctcccacgaattcaagatcagcggctactctttggtcaaaggcatggggattggcaaatacgttgcctcggatactttcatggtcggtggatactcctgggccatctacttctacccagatggaaagagtccagaggataattctgtctacgtgtctctcttcatagcccttgcgagtgaaggagccgatgttagggctttgtttgagcttaccctcgtggatcagagcggtaacgaaaggcacaaagttcatagccattttggtagaactctcgaaagcggaccctatactcttaaatatcgagggagtatgtggggatacaaacgatttttcaagaggtctcttttggagtcatcggactatctgaaggacaatggtctcttggtccggtgttgtgttggagtggtgaagtcacgcacagaaggaccgaggtgttacaatatcccggtgccggtttctggcttgggtcagcagtttggaaagcttttggaaagtgggaaaggagctgacgttactttcgaagttgatggagaaacatttcctgctcacaaattggttcttgcagcacgttctgcagttttcagggcacagctttttggcccgttgagaagtgaaaataccaattgtataatcatagaagacgtacaagcccctattttcaagatgttgcttcattttatctactgggatgaaatgcctgatatgcaagacttaatcggcacagacttgaaatgggcatcaactcttgtggctcagcatctgcttgcagctgcagaccgttatgctcttgagcggcttagaacaatatgcgagtcaaaactctgtgaaggaatcagcataaatacggtagcaaccaccttggctcttgcagagcagcatcattgtttccagctgaaagccgcctgcctcaaatttatagctttgccagaaaacctgaaagctgtgatggaaacggatgggtttgattatctgaaggaaagctgcccgtccctactaagtgagctattggagtatgtggctaggctgagtgagcactctttaacatcatcagggcatcgaaaggagttatttgctgatggttgtgacttaaatgggagacgtgtgaagcaacggttacattagcaactaattgagagagagagagagagagaggtcacttcgagagcctgagaagatgatggtgaagtaaacagaattttagaagagtaaagatttgtgtatttgtcattgtaaaaggattagtggttgatctgtgttgttcagctagctaatagagtgaaatgttgggtttttttcttttcttttctcttttgttttcccaggattttatgaccagaaccggttctctcaaggaaaaagtttcatgtgacttcattgataaatttggacttgcc

SEQ ID NO: 40291 - protein, 406 aa, Arabidopsis thaliana
  peptide (1)..(406): Ceres Seq. ID no. 12327922
  misc_feature (192)..(311): Pfam Name: BTB/POZ domain Pfam Description: BTB/POZ domain
  misc_feature (22)..(402): Homolog of NCBI NO: 30678912 NR Description: expressed protein [Arabidopsis thaliana]
  misc_feature (22)..(402): Homolog of NCBI NO: 21536509 NR Description: unknown [Arabidopsis thaliana]
  misc_feature (1)..(373): Homolog of NCBI NO: 15239625 NR Description: putative protein; protein id: At5g19000.1
  misc_feature (14)..(404): Homolog of NCBI NO: 34900034 NR Description: OJ1641_C04.24 [Oryza sativa (japonica
  misc_feature (24)..(404): Homolog of NCBI NO: 18405153 NR Description: expressed protein
  misc_feature (24)..(404): Homolog of NCBI NO: 21595740 NR Description: unknown [Arabidopsis thaliana]
  misc_feature (24)..(387): Homolog of NCBI NO: 34394164 NR Description: putative speckle-type POZ protein
  misc_feature (7)..(405): Homolog of NCBI NO: 23617108 NR Description: contains ESTs
  misc_feature (1)..(406): Homolog of NCBI NO: 22531225 NR Description: putative protein [Arabidopsis thaliana]
  misc_feature (1)..(406): Homolog of NCBI NO: 18397497 NR Description: expressed protein
MDTIRVSKEVPGSSKSTAQSLTESTSRTETINGSHEFKISGYSLVKGMGIGKYVASDTFMVGGYSWAIYFYPDGKSPEDNSVYVSLFIALASEGADVRALFELTLVDQSGNERHKVHSHFGRTLESGPYTLKYRGSMWGYKRFFKRSLLESSDYLKDNGLLVRCCVGVVKSRTEGPRCYNIPVPVSGLGQQFGKLLESGKGADVTFEVDGETFPAHKLVLAARSAVFRAQLFGPLRSENTNCIIIEDVQAPIFKMLLHFIYWDEMPDMQDLIGTDLKWASTLVAQHLLAAADRYALERLRTICESKLCEGISINTVATTLALAEQHHCFQLKAACLKFIALPENLKAVMETDGFDYLKESCPSLLSELLEYVARLSEHSLTSSGHRKELFADGCDLNGRRVKQRLH

SEQ ID NO: 40292 - protein, 359 aa, Arabidopsis thaliana
  peptide (1)..(359): Ceres Seq. ID no. 12327923
  misc_feature (145)..(264): Pfam Name: BTB/POZ domain Pfam Description: BTB/POZ domain
  misc_feature (1)..(355): Homolog of NCBI NO: 30678912 NR Description: expressed protein [Arabidopsis thaliana]
  misc_feature (1)..(355): Homolog of NCBI NO: 21536509 NR Description: unknown [Arabidopsis thaliana]
  misc_feature (1)..(326): Homolog of NCBI NO: 15239625 NR Description: putative protein; protein id: At5g19000.1
  misc_feature (1)..(357): Homolog of NCBI NO: 34900034 NR Description: OJ1641_C04.24 [Oryza sativa (japonica
  misc_feature (1)..(357): Homolog of NCBI NO: 18405153 NR Description: expressed protein
  misc_feature (1)..(357): Homolog of NCBI NO: 21595740 NR Description: unknown [Arabidopsis thaliana]
  misc_feature (1)..(340): Homolog of NCBI NO: 34394164 NR Description: putative speckle-type POZ protein
  misc_feature (1)..(358): Homolog of NCBI NO: 23617108 NR Description: contains ESTs
  misc_feature (1)..(359): Homolog of NCBI NO: 22531225 NR Description: putative protein [Arabidopsis thaliana]
  misc_feature (1)..(359): Homolog of NCBI NO: 18397497 NR Description: expressed protein
MGIGKYVASDTFMVGGYSWAIYFYPDGKSPEDNSVYVSLFIALASEGADVRALFELTLVDQSGNERHKVHSHFGRTLESGPYTLKYRGSMWGYKRFFKRSLLESSDYLKDNGLLVRCCVGVVKSRTEGPRCYNIPVPVSGLGQQFGKLLESGKGADVTFEVDGETFPAHKLVLAARSAVFRAQLFGPLRSENTNCIIIEDVQAPIFKMLLHFIYWDEMPDMQDLIGTDLKWASTLVAQHLLAAADRYALERLRTICESKLCEGISINTVATTLALAEQHHCFQLKAACLKFIALPENLKAVMETDGFDYLKESCPSLLSELLEYVARLSEHSLTSSGHRKELFADGCDLNGRRVKQRLH

SEQ ID NO: 40293 - protein, 347 aa, Arabidopsis thaliana
  peptide (1)..(347): Ceres Seq. ID no. 12327924
  misc_feature (133)..(252): Pfam Name: BTB/POZ domain Pfam Description: BTB/POZ domain
  misc_feature (1)..(343): Homolog of NCBI NO: 30678912 NR Description: expressed protein [Arabidopsis thaliana]
  misc_feature (1)..(343): Homolog of NCBI NO: 21536509 NR Description: unknown [Arabidopsis thaliana]
  misc_feature (1)..(314): Homolog of NCBI NO: 15239625 NR Description: putative protein; protein id: At5g19000.1
  misc_feature (1)..(345): Homolog of NCBI NO: 34900034 NR Description: OJ1641_C04.24 [Oryza sativa (japonica
  misc_feature (1)..(345): Homolog of NCBI NO: 18405153 NR Description: expressed protein
  misc_feature (1)..(345): Homolog of NCBI NO: 21595740 NR Description: unknown [Arabidopsis thaliana]
  misc_feature (1)..(328): Homolog of NCBI NO: 34394164 NR Description: putative speckle-type POZ protein
  misc_feature (1)..(346): Homolog of NCBI NO: 23617108 NR Description: contains ESTs
  misc_feature (1)..(347): Homolog of NCBI NO: 22531225 NR Description: putative protein [Arabidopsis thaliana]
  misc_feature (1)..(347): Homolog of NCBI NO: 18397497 NR Description: expressed protein
MVGGYSWAIYFYPDGKSPEDNSVYVSLFIALASEGADVRALFELTLVDQSGNERHKVHSHFGRTLESGPYTLKYRGSMWGYKRFFKRSLLESSDYLKDNGLLVRCCVGVVKSRTEGPRCYNIPVPVSGLGQQFGKLLESGKGADVTFEVDGETFPAHKLVLAARSAVFRAQLFGPLRSENTNCIIIEDVQAPIFKMLLHFIYWDEMPDMQDLIGTDLKWASTLVAQHLLAAADRYALERLRTICESKLCEGISINTVATTLALAEQHHCFQLKAACLKFIALPENLKAVMETDGFDYLKESCPSLLSELLEYVARLSEHSLTSSGHRKELFADGCDLNGRRVKQRLH

SEQ ID NO: 40294 - DNA, 1117 bp, Arabidopsis thaliana; identical to SEQ ID NO: 39595
  misc_feature (1)..(1117): Ceres Seq. ID no. 12325040
  misc_feature: MA Experiment ID: 108461 Result: Up-regulated in Transcription
  misc_feature: MA Experiment 108461 PARAMETER Experiment Name: At_Germinating_Seeds_cDNA_P Parameter: Age (day) Value: 1 vs. 0
  misc_feature: MA Experiment 108461 PARAMETER Experiment Name: At_Germinating_Seeds_cDNA_P Parameter: Tissue Value: Germinating Seeds
  misc_feature: MA Experiment ID: 108488 Result: Down-regulated in Transcription
  misc_feature: MA Experiment ID: 108561 Result: Up-regulated in Transcription
  misc_feature: MA Experiment 108561 PARAMETER Experiment Name: At_100uM_ABA_cDNA_P Parameter: Timepoint (hr) Value: 6
  misc_feature: MA Experiment 108561 PARAMETER Experiment Name: At_100uM_ABA_cDNA_P Parameter: Tissue Value: Aerial
  misc_feature: MA Experiment 108561 PARAMETER Experiment Name: At_100uM_ABA_cDNA_P Parameter: Treatment Value: 100uM ABA vs. No Treatment
  misc_feature: MA Experiment ID: 108572 Result: Up-regulated in Transcription
  misc_feature: MA Experiment 108572 PARAMETER Experiment Name: At_Drought_cDNA_P Parameter: Timepoint (hr) Value: 1
  misc_feature: MA Experiment 108572 PARAMETER Experiment Name: At_Drought_cDNA_P Parameter: Tissue Value: Aerial
  misc_feature: MA Experiment 108572 PARAMETER Experiment Name: At_Drought_cDNA_P Parameter: Treatment Value: Drought vs. No Drought
  misc_feature: MA Experiment ID: 108573 Result: Up-regulated in Transcription
  misc_feature: MA Experiment 108573 PARAMETER Experiment Name: At_Drought_cDNA_P Parameter: Timepoint (hr) Value: 6
  misc_feature: MA Experiment 108573 PARAMETER Experiment Name: At_Drought_cDNA_P Parameter: Tissue Value: Aerial
  misc_feature: MA Experiment 108573 PARAMETER Experiment Name: At_Drought_cDNA_P Parameter: Treatment Value: Drought vs. No Drought
  misc_feature: MA Experiment ID: 108605 Result: Up-regulated in Transcription
  misc_feature: MA Experiment 108605 PARAMETER Experiment Name: At_100uM_ABA_cDNA_P Parameter: Timepoint (hr) Value: 6
  misc_feature: MA Experiment 108605 PARAMETER Experiment Name: At_100uM_ABA_cDNA_P Parameter: Tissue Value: Aerial
  misc_feature: MA Experiment 108605 PARAMETER Experiment Name: At_100uM_ABA_cDNA_P Parameter: Treatment Value: 100uM ABA vs. No Treatment
  misc_feature: MA Experiment ID: 108607 Result: Up-regulated in Transcription
  misc_feature: MA Experiment 108607 PARAMETER Experiment Name: At_100uM_ABA_cDNA_P Parameter: Timepoint (hr) Value: 4
  misc_feature: MA Experiment 108607 PARAMETER Experiment Name: At_100uM_ABA_cDNA_P Parameter: Tissue Value: Aerial
  misc_feature: MA Experiment 108607 PARAMETER Experiment Name: At_100uM_ABA_cDNA_P Parameter: Treatment Value: 100uM ABA vs. No Treatment
  misc_feature: MA Experiment ID: 20000070 Result: Up-regulated in Transcription
  misc_feature: MA Experiment 20000070 PARAMETER Experiment Name: At_100uM_ABA_Mutants_cDNA_P Parameter: Plant Line Value: CS24
  misc_feature: MA Experiment 20000070 PARAMETER Experiment Name: At_100uM_ABA_Mutants_cDNA_P Parameter: Timepoint (hr) Value: 6
  misc_feature: MA Experiment 20000070 PARAMETER Experiment Name: At_100uM_ABA_Mutants_cDNA_P Parameter: Tissue Value: Aerial
  misc_feature: MA Experiment 20000070 PARAMETER Experiment Name: At_100uM_ABA_Mutants_cDNA_P Parameter: Treatment Value: 100uM ABA vs. No Treatment
  misc_feature: MA Experiment ID: 20000072 Result: Up-regulated in Transcription
  misc_feature: MA Experiment 20000072 PARAMETER Experiment Name: At_100uM_ABA_Mutants_cDNA_P Parameter: Plant Line Value: CS8105
  misc_feature: MA Experiment 20000072 PARAMETER Experiment Name: At_100uM_ABA_Mutants_cDNA_P Parameter: Timepoint (hr) Value: 6
  misc_feature: MA Experiment 20000072 PARAMETER Experiment Name: At_100uM_ABA_Mutants_cDNA_P Parameter: Tissue Value: Aerial
  misc_feature: MA Experiment 20000072 PARAMETER Experiment Name: At_100uM_ABA_Mutants_cDNA_P Parameter: Treatment Value: 100uM ABA vs. No Treatment
  misc_feature: MA Experiment ID: 20000086 Result: Up-regulated in Transcription
  misc_feature: MA Experiment 20000086 PARAMETER Experiment Name: At_100uM_ABA_Mutants_cDNA_P Parameter: Plant Line Value: CS22
  misc_feature: MA Experiment 20000086 PARAMETER Experiment Name: At_100uM_ABA_Mutants_cDNA_P Parameter: Timepoint (hr) Value: 6
  misc_feature: MA Experiment 20000086 PARAMETER Experiment Name: At_100uM_ABA_Mutants_cDNA_P Parameter: Tissue Value: Aerial
  misc_feature: MA Experiment 20000086 PARAMETER Experiment Name: At_100uM_ABA_Mutants_cDNA_P Parameter: Treatment Value: 100uM ABA vs. No Treatment
  misc_feature: MA Experiment ID: 20000087 Result: Up-regulated in Transcription
  misc_feature: MA Experiment 20000087 PARAMETER Experiment Name: At_100uM_ABA_Mutants_cDNA_P Parameter: Plant Line Value: WS
  misc_feature: MA Experiment 20000087 PARAMETER Experiment Name: At_100uM_ABA_Mutants_cDNA_P Parameter: Timepoint (hr) Value: 6
  misc_feature: MA Experiment 20000087 PARAMETER Experiment Name: At_100uM_ABA_Mutants_cDNA_P Parameter: Tissue Value: Aerial
  misc_feature: MA Experiment 20000087 PARAMETER Experiment Name: At_100uM_ABA_Mutants_cDNA_P Parameter: Treatment Value: 100uM ABA vs. No Treatment
  misc_feature: MA Experiment ID: 20000111 Result: Down-regulated in Transcription
  misc_feature: MA Experiment 20000111 PARAMETER Experiment Name: At_42deg_Heat_cDNA_P Parameter: Temperature (deg C) Value: 42 vs. 22
  misc_feature: MA Experiment 20000111 PARAMETER Experiment Name: At_42deg_Heat_cDNA_P Parameter: Timepoint (hr) Value: 6
  misc_feature: MA Experiment 20000111 PARAMETER Experiment Name: At_42deg_Heat_cDNA_P Parameter: Tissue Value: Aerial
  misc_feature: MA Experiment ID: 20000180 Result: Up-regulated in Transcription
  misc_feature: MA Experiment 20000180 PARAMETER Experiment Name: At_Germinating_Seeds_P Parameter: Age (hr) Value: 24 vs. 0
  misc_feature: MA Experiment 20000180 PARAMETER Experiment Name: At_Germinating_Seeds_P Parameter: Tissue Value: Germinating Seeds
  misc_feature: MA Experiment ID: 20000227 Result: Up-regulated in Transcription
  misc_feature: MA Experiment 20000227 PARAMETER Experiment Name: At_Root-Tips-vs-Tops_P Parameter: Tissue Value: Root Tips vs. Root Tops
  misc_feature: MA Experiment ID: 20001757 Result: Down-regulated in Transcription
  misc_feature: MA Experiment 20001757 PARAMETER Experiment Name: At_50mM_NH4NO3_L-to-H_P Parameter: Timepoint (hr) Value: 6
  misc_feature: MA Experiment 20001757 PARAMETER Experiment Name: At_50mM_NH4NO3_L-to-H_P Parameter: Tissue Value: Leaf
  misc_feature: MA Experiment 20001757 PARAMETER Experiment Name: At_50mM_NH4NO3_L-to-H_P Parameter: Treatment Value: 50mM NH4NO3 vs 100mM Mannitol

SEQ ID NO: 40295 - protein, 312 aa, Arabidopsis thaliana; identical to SEQ ID NO: 39596
  peptide (1)..(312): Ceres Seq. ID no. 12325041
  misc_feature (4)..(304): Homolog of NCBI NO: 22984963 NR Description: hypothetical protein [Burkholderia fungorum]
  misc_feature (4)..(305): Homolog of NCBI NO: 17935486 NR Description: inosine-uridine preferring nucleoside hydrolase
  misc_feature (4)..(305): Homolog of NCBI NO: 15888904 NR Description: AGR_C_2923p [Agrobacterium tumefaciens]
  misc_feature (230)..(278): Homolog of NCBI NO: 25321061 NR Description: hypothetical protein At2g36310 [imported] -
  misc_feature (11)..(234): Homolog of NCBI NO: 25321061 NR Description: hypothetical protein At2g36310 [imported] -
  misc_feature (4)..(311): Homolog of NCBI NO: 18404099 NR Description: expressed protein
  misc_feature (4)..(309): Homolog of NCBI NO: 30089728 NR Description: putative inosine-uridine preferring nucleoside
  misc_feature (4)..(312): Homolog of NCBI NO: 18390550 NR Description: expressed protein
  misc_feature (196)..(312): Homolog of NCBI NO: 25321071 NR Description: hypothetical protein [imported] - Arabidopsis
  misc_feature (1)..(195): Homolog of NCBI NO: 25321071 NR Description: hypothetical protein [imported] - Arabidopsis
  misc_feature (4)..(304): Homolog of NCBI NO: 22984963 NR Description: hypothetical protein [Burkholderia fungorum]
  misc_feature (4)..(305): Homolog of NCBI NO: 17935486 NR Description: inosine-uridine preferring nucleoside hydrolase
  misc_feature (4)..(305): Homolog of NCBI NO: 15888904 NR Description: AGR_C_2923p [Agrobacterium tumefaciens]
  misc_feature (230)..(278): Homolog of NCBI NO: 25321061 NR Description: hypothetical protein At2g36310 [imported] -
  misc_feature (11)..(234): Homolog of NCBI NO: 25321061 NR Description: hypothetical protein At2g36310 [imported] -
  misc_feature (4)..(311): Homolog of NCBI NO: 18404099 NR Description: expressed protein
  misc_feature (4)..(309): Homolog of NCBI NO: 30089728 NR Description: putative inosine-uridine preferring nucleoside
  misc_feature (4)..(312): Homolog of NCBI NO: 18390550 NR Description: expressed protein
  misc_feature (196)..(312): Homolog of NCBI NO: 25321071 NR Description: hypothetical protein [imported] - Arabidopsis
  misc_feature (1)..(195): Homolog of NCBI NO: 25321071 NR Description: hypothetical protein [imported] - Arabidopsis

SEQ ID NO: 40296 - protein, 302 aa, Arabidopsis thaliana; identical to SEQ ID NO: 39597
  peptide (1)..(302): Ceres Seq. ID no. 12325042
  misc_feature (1)..(294): Homolog of NCBI NO: 22984963 NR Description: hypothetical protein [Burkholderia fungorum]
  misc_feature (1)..(295): Homolog of NCBI NO: 17935486 NR Description: inosine-uridine preferring nucleoside hydrolase
  misc_feature (1)..(295): Homolog of NCBI NO: 15888904 NR Description: AGR_C_2923p [Agrobacterium tumefaciens]
  misc_feature (220)..(268): Homolog of NCBI NO: 25321061 NR Description: hypothetical protein At2g36310 [imported] -
  misc_feature (1)..(224): Homolog of NCBI NO: 25321061 NR Description: hypothetical protein At2g36310 [imported] -
  misc_feature (1)..(301): Homolog of NCBI NO: 18404099 NR Description: expressed protein
  misc_feature (1)..(299): Homolog of NCBI NO: 30089728 NR Description: putative inosine-uridine preferring nucleoside
  misc_feature (1)..(302): Homolog of NCBI NO: 18390550 NR Description: expressed protein
  misc_feature (186)..(302): Homolog of NCBI NO: 25321071 NR Description: hypothetical protein [imported] - Arabidopsis
  misc_feature (1)..(185): Homolog of NCBI NO: 25321071 NR Description: hypothetical protein [imported] - Arabidopsis
  misc_feature (1)..(294): Homolog of NCBI NO: 22984963 NR Description: hypothetical protein [Burkholderia fungorum]
  misc_feature (1)..(295): Homolog of NCBI NO: 17935486 NR Description: inosine-uridine preferring nucleoside hydrolase
  misc_feature (1)..(295): Homolog of NCBI NO: 15888904 NR Description: AGR_C_2923p [Agrobacterium tumefaciens]
  misc_feature (220)..(268): Homolog of NCBI NO: 25321061 NR Description: hypothetical protein At2g36310 [imported] -
  misc_feature (1)..(224): Homolog of NCBI NO: 25321061 NR Description: hypothetical protein At2g36310 [imported] -
  misc_feature (1)..(301): Homolog of NCBI NO: 18404099 NR Description: expressed protein
  misc_feature (1)..(299): Homolog of NCBI NO: 30089728 NR Description: putative inosine-uridine preferring nucleoside
  misc_feature (1)..(302): Homolog of NCBI NO: 18390550 NR Description: expressed protein
  misc_feature (186)..(302): Homolog of NCBI NO: 25321071 NR Description: hypothetical protein [imported] - Arabidopsis
  misc_feature (1)..(185): Homolog of NCBI NO: 25321071 NR Description: hypothetical protein [imported] - Arabidopsis

SEQ ID NO: 40297 - DNA, 1534 bp, Arabidopsis thaliana
  misc_feature (1)..(1534): Ceres Seq. ID no. 12558430
  misc_feature: MA Experiment ID: 20000171 Result: Up-regulated in Transcription
  misc_feature: MA Experiment 20000171 PARAMETER Experiment Name: At_42deg_Heat_P Parameter: Age (day) Value: 14
  misc_feature: MA Experiment 20000171 PARAMETER Experiment Name: At_42deg_Heat_P Parameter: Organism Value: A. thaliana
  misc_feature: MA Experiment 20000171 PARAMETER Experiment Name: At_42deg_Heat_P Parameter: Plant Line Value: WS
  misc_feature: MA Experiment 20000171 PARAMETER Experiment Name: At_42deg_Heat_P Parameter: Temperature (deg C) Value: 42 vs. 22
  misc_feature: MA Experiment 20000171 PARAMETER Experiment Name: At_42deg_Heat_P Parameter: Timepoint (hr) Value: 1
  misc_feature: MA Experiment 20000171 PARAMETER Experiment Name: At_42deg_Heat_P Parameter: Tissue Value: Aerial
  misc_feature: MA Experiment ID: 20000173 Result: Up-regulated in Transcription
  misc_feature: MA Experiment 20000173 PARAMETER Experiment Name: At_42deg_Heat_P Parameter: Age (day) Value: 14
  misc_feature: MA Experiment 20000173 PARAMETER Experiment Name: At_42deg_Heat_P Parameter: Organism Value: A. thaliana
  misc_feature: MA Experiment 20000173 PARAMETER Experiment Name: At_42deg_Heat_P Parameter: Plant Line Value: WS
  misc_feature: MA Experiment 20000173 PARAMETER Experiment Name: At_42deg_Heat_P Parameter: Temperature (deg C) Value: 42 vs. 22
  misc_feature: MA Experiment 20000173 PARAMETER Experiment Name: At_42deg_Heat_P Parameter: Timepoint (hr) Value: 6
  misc_feature: MA Experiment 20000173 PARAMETER Experiment Name: At_42deg_Heat_P Parameter: Tissue Value: Aerial
  misc_feature: MA Experiment ID: 20000575 Result: Down-regulated in Transcription
  misc_feature: MA Experiment 20000575 PARAMETER Experiment Name: At_100uM_ABA_Mutants__P Parameter: Organism Value: A. thaliana
  misc_feature: MA Experiment 20000575 PARAMETER Experiment Name: At_100uM_ABA_Mutants__P Parameter: Plant Line Value: CS22
  misc_feature: MA Experiment 20000575 PARAMETER Experiment Name: At_100uM_ABA_Mutants__P Parameter: Timepoint (hr) Value: 6
  misc_feature: MA Experiment 20000575 PARAMETER Experiment Name: At_100uM_ABA_Mutants__P Parameter: Tissue Value: Whole Plant
  misc_feature: MA Experiment 20000575 PARAMETER Experiment Name: At_100uM_ABA_Mutants__P Parameter: Treatment Value: 1uM ABA vs. No Treatment
  misc_feature: MA Experiment ID: 20001450 Result: Up-regulated in Transcription
  misc_feature: MA Experiment 20001450 PARAMETER Experiment Name: At_Far-red-induction_P Parameter: Age (day) Value: 7
  misc_feature: MA Experiment 20001450 PARAMETER Experiment Name: At_Far-red-induction_P Parameter: Light Value: Far-red vs. White
  misc_feature: MA Experiment 20001450 PARAMETER Experiment Name: At_Far-red-induction_P Parameter: Organism Value: A. thaliana
  misc_feature: MA Experiment 20001450 PARAMETER Experiment Name: At_Far-red-induction_P Parameter: Plant Line Value: Columbia
  misc_feature: MA Experiment 20001450 PARAMETER Experiment Name: At_Far-red-induction_P Parameter: Timepoint (hr) Value: 8
  misc_feature: MA Experiment 20001450 PARAMETER Experiment Name: At_Far-red-induction_P Parameter: Tissue Value: Whole Plant
  misc_feature: MA Experiment ID: 20001451 Result: Up-regulated in Transcription
  misc_feature: MA Experiment 20001451 PARAMETER Experiment Name: At_Far-red-induction_P Parameter: Age (day) Value: 7
  misc_feature: MA Experiment 20001451 PARAMETER Experiment Name: At_Far-red-induction_P Parameter: Light Value: Far-red vs. White
  misc_feature: MA Experiment 20001451 PARAMETER Experiment Name: At_Far-red-induction_P Parameter: Organism Value: A. thaliana
  misc_feature: MA Experiment 20001451 PARAMETER Experiment Name: At_Far-red-induction_P Parameter: Plant Line Value: Columbia
  misc_feature: MA Experiment 20001451 PARAMETER Experiment Name: At_Far-red-induction_P Parameter: Timepoint (hr) Value: 24
  misc_feature: MA Experiment 20001451 PARAMETER Experiment Name: At_Far-red-induction_P Parameter: Tissue Value: Whole Plant
  misc_feature: MA Experiment ID: 20001458 Result: Up-regulated in Transcription
  misc_feature: MA Experiment 20001458 PARAMETER Experiment Name: At_50mM_NH4NO3_L-to-H_P Parameter: Age (day) Value: Undefined
  misc_feature: MA Experiment 20001458 PARAMETER Experiment Name: At_50mM_NH4NO3_L-to-H_P Parameter: Organism Value: Undefined
  misc_feature: MA Experiment 20001458 PARAMETER Experiment Name: At_50mM_NH4NO3_L-to-H_P Parameter: Plant Line Value: Undefined
  misc_feature: MA Experiment 20001458 PARAMETER Experiment Name: At_50mM_NH4NO3_L-to-H_P Parameter: Timepoint (hr) Value: 2
  misc_feature: MA Experiment 20001458 PARAMETER Experiment Name: At_50mM_NH4NO3_L-to-H_P Parameter: Tissue Value: Siliques
  misc_feature: MA Experiment 20001458 PARAMETER Experiment Name: At_50mM_NH4NO3_L-to-H_P Parameter: Treatment Value: 50mM NH4NO3 vs. 100mM Manitol
  misc_feature: MA Experiment ID: 20001761 Result: Down-regulated in Transcription
  misc_feature: MA Experiment 20001761 PARAMETER Experiment Name: At_50mM_NH4NO3_L-to-H_P Parameter: Timepoint (hr) Value: 4
  misc_feature: MA Experiment 20001761 PARAMETER Experiment Name: At_50mM_NH4NO3_L-to-H_P Parameter: Tissue Value: Siliques
  misc_feature: MA Experiment 20001761 PARAMETER Experiment Name: At_50mM_NH4NO3_L-to-H_P Parameter: Treatment Value: 50mM NH4NO3 vs 100mM Mannitol
aaaaaccagacgcttcaacttatccccatttctctgaaaaccctaacaaatcctcctcttgttccgccactgccgccgccgctactcaacggtggtgaattttctatacggtcagttcgatcctctttttatcgacaatcctacacaaatccataatcatggccgccactgcttcctccgaagcttctgaaggaccagtgatgggtctcatcaacaagcgtctccgtgctctccgtaagaaatacaaccgaatcactcaaatggaagaatcgatttctcaaggcaaaaccctaaacaaggagcaagaagaagtcctccgctctaaacctgccgtcgtcatcctaatcgacgagcttgaaaagatccgtgctcctctctccgccgctgtgacagaggaaatcagcctcgctactcagcttaaccgtgcttcatccgatcaaaccaccgcatctgagcaaaaggaagtcactgatatcccgcaggaagttagcggcggcgatgatggcgctaagttggaggatctggtgaatttcctctactttggttcactcttcgacgtcaagtcacagaacgagttcacttcgataatgttgaccaggactcatgagagaagttgctgcttgtcttacgattacgttaccgatgatgccactgatctcctcggcgatcgggatttggattctatttctcagctttggagcctgatggtttctcgtccggtggattcaagcttatctcacaagaacgctttggagcgttgtgttgagcacgctaagctatggttagctaattccgagcagccaatcgaatcaaactgcaatacttcatatgctgcattgagagagaagttgaagaagattatggcgtctgactatttcaccactactccggaaatgaaagctccggttgatgtggcggctgcagctggtaactatacttcttaccaggtgcctgtggacgtggaggcttcagggcattaccagcaaaaggaagaagatgcatcaaattccaaagaagtagaatcagttgttaatgatcaatctcaacaagatgagcatcaaaaggttgagttagtgaccgaaggagaggtggtccatggacagcaagaacagggctatactcaggtgggaggagcagagaatgctaaaagagactatgtgccacgtgggtcttaccagaaccaaagaggtcgtcgaggtgctcgaagaggtggtggtggctatcagaatgggcgaggaggacgaggtggtggtggtggctaccagaatgggcggtacgaatcttatgatcaatctggtggaaacggttatcaaaggaactactacaacaacagaggaaggggacgtggtggtggtggtggtggaggaaatggccattcatacaacaactaccaagaccccaatgttgctgttgcgtcttagcttttgtgcctctgtcttttgggtgcgtctctttcattatcttgcgtttatgctataacgcatataagcctaatctcgtgtttgaaacgtttgacaatggctcggttattgct

SEQ ID NO: 40298 - protein, 420 aa, Arabidopsis thaliana
  peptide (1)..(420): Ceres Seq. ID no. 12558431
  misc_feature (318)..(409): Homolog of NCBI NO: 122785 NR Description: GLYCINE-RICH PROTEIN HC1
  misc_feature (347)..(408): Homolog of NCBI NO: 1346181 NR Description: Glycine-rich RNA-binding protein GRP2A
  misc_feature (313)..(409): Homolog of NCBI NO: 7440064 NR Description: fus-like protein - human (fragment)
  misc_feature (337)..(407): Homolog of NCBI NO: 21388660 NR Description: glycine-rich RNA-binding protein [Physcomitrella
  misc_feature (308)..(411): Homolog of NCBI NO: 37534930 NR Description: putative glycine-rich protein
  misc_feature (314)..(408): Homolog of NCBI NO: 1170023 NR Description: ABSCISIC ACID AND ENVIRONMENTAL STRESS INDUCIBLE
  misc_feature (284)..(410): Homolog of NCBI NO: 1170023 NR Description: ABSCISIC ACID AND ENVIRONMENTAL STRESS INDUCIBLE
  misc_feature (304)..(410): Homolog of NCBI NO: 7488799 NR Description: dormancy-associated protein 2 - garden pea
  misc_feature (9)..(120): Homolog of NCBI NO: 15230159 NR Description: unknown protein; protein id: At3g24690.1
  misc_feature (1)..(420): Homolog of NCBI NO: 15223426 NR Description: unknown protein
  misc_feature (318)..(409): Homolog of NCBI NO: 122785 NR Description: GLYCINE-RICH PROTEIN HC1
  misc_feature (347)..(408): Homolog of NCBI NO: 1346181 NR Description: Glycine-rich RNA-binding protein GRP2A
  misc_feature (313)..(409): Homolog of NCBI NO: 7440064 NR Description: fus-like protein - human (fragment)
  misc_feature (337)..(407): Homolog of NCBI NO: 21388660 NR Description: glycine-rich RNA-binding protein [Physcomitrella
  misc_feature (308)..(411): Homolog of NCBI NO: 37534930 NR Description: putative glycine-rich protein
  misc_feature (314)..(408): Homolog of NCBI NO: 1170023 NR Description: ABSCISIC ACID AND ENVIRONMENTAL STRESS INDUCIBLE
  misc_feature (284)..(410): Homolog of NCBI NO: 1170023 NR Description: ABSCISIC ACID AND ENVIRONMENTAL STRESS INDUCIBLE
  misc_feature (304)..(410): Homolog of NCBI NO: 7488799 NR Description: dormancy-associated protein 2 - garden pea
  misc_feature (9)..(120): Homolog of NCBI NO: 15230159 NR Description: unknown protein; protein id: At3g24690.1
  misc_feature (1)..(420): Homolog of NCBI NO: 15223426 NR Description: unknown protein
MAATASSEASEGPVMGLINKRLRALRKKYNRITQMEESISQGKTLNKEQEEVLRSKPAVVILIDELEKIRAPLSAAVTEEISLATQLNRASSDQTTASEQKEVTDIPQEVSGGDDGAKLEDLVNFLYFGSLFDVKSQNEFTSIMLTRTHERSCCLSYDYVTDDATDLLGDRDLDSISQLWSLMVSRPVDSSLSHKNALERCVEHAKLWLANSEQPIESNCNTSYAALREKLKKIMASDYFTTTPEMKAPVDVAAAAGNYTSYQVPVDVEASGHYQQKEEDASNSKEVESVVNDQSQQDEHQKVELVTEGEVVHGQQEQGYTQVGGAENAKRDYVPRGSYQNQRGRRGARRGGGGYQNGRGGRGGGGGYQNGRYESYDQSGGNGYQRNYYNNRGRGRGGGGGGGNGHSYNNYQDPNVAVAS

SEQ ID NO: 40299 - protein, 406 aa, Arabidopsis thaliana
  peptide (1)..(406): Ceres Seq. ID no. 12558432
  misc_feature (304)..(395): Homolog of NCBI NO: 122785 NR Description: GLYCINE-RICH PROTEIN HC1
  misc_feature (333)..(394): Homolog of NCBI NO: 1346181 NR Description: Glycine-rich RNA-binding protein GRP2A
  misc_feature (299)..(395): Homolog of NCBI NO: 7440064 NR Description: fus-like protein - human (fragment)
  misc_feature (323)..(393): Homolog of NCBI NO: 21388660 NR Description: glycine-rich RNA-binding protein [Physcomitrella
  misc_feature (294)..(397): Homolog of NCBI NO: 37534930 NR Description: putative glycine-rich protein
  misc_feature (300)..(394): Homolog of NCBI NO: 1170023 NR Description: ABSCISIC ACID AND ENVIRONMENTAL STRESS INDUCIBLE
  misc_feature (270)..(396): Homolog of NCBI NO: 1170023 NR Description: ABSCISIC ACID AND ENVIRONMENTAL STRESS INDUCIBLE
  misc_feature (290)..(396): Homolog of NCBI NO: 7488799 NR Description: dormancy-associated protein 2 - garden pea
  misc_feature (1)..(106): Homolog of NCBI NO: 15230159 NR Description: unknown protein; protein id: At3g24690.1
  misc_feature (1)..(406): Homolog of NCBI NO: 15223426 NR Description: unknown protein
  misc_feature (304)..(395): Homolog of NCBI NO: 122785 NR Description: GLYCINE-RICH PROTEIN HC1
  misc_feature (333)..(394): Homolog of NCBI NO: 1346181 NR Description: Glycine-rich RNA-binding protein GRP2A
  misc_feature (299)..(395): Homolog of NCBI NO: 7440064 NR Description: fus-like protein - human (fragment)
  misc_feature (323)..(393): Homolog of NCBI NO: 21388660 NR Description: glycine-rich RNA-binding protein [Physcomitrella
  misc_feature (294)..(397): Homolog of NCBI NO: 37534930 NR Description: putative glycine-rich protein
  misc_feature (300)..(394): Homolog of NCBI NO: 1170023 NR Description: ABSCISIC ACID AND ENVIRONMENTAL STRESS INDUCIBLE
  misc_feature (270)..(396): Homolog of NCBI NO: 1170023 NR Description: ABSCISIC ACID AND ENVIRONMENTAL STRESS INDUCIBLE
  misc_feature (290)..(396): Homolog of NCBI NO: 7488799 NR Description: dormancy-associated protein 2 - garden pea
  misc_feature (1)..(106): Homolog of NCBI NO: 15230159 NR Description: unknown protein; protein id: At3g24690.1
  misc_feature (1)..(406): Homolog of NCBI NO: 15223426 NR Description: unknown protein
MGLINKRLRALRKKYNRITQMEESISQGKTLNKEQEEVLRSKPAVVILIDELEKIRAPLSAAVTEEISLATQLNRASSDQTTASEQKEVTDIPQEVSGGDDGAKLEDLVNFLYFGSLFDVKSQNEFTSIMLTRTHERSCCLSYDYVTDDATDLLGDRDLDSISQLWSLMVSRPVDSSLSHKNALERCVEHAKLWLANSEQPIESNCNTSYAALREKLKKIMASDYFTTTPEMKAPVDVAAAAGNYTSYQVPVDVEASGHYQQKEEDASNSKEVESVVNDQSQQDEHQKVELVTEGEVVHGQQEQGYTQVGGAENAKRDYVPRGSYQNQRGRRGARRGGGGYQNGRGGRGGGGGYQNGRYESYDQSGGNGYQRNYYNNRGRGRGGGGGGGNGHSYNNYQDPNVAVAS

SEQ ID NO: 40300 - protein, 386 aa, Arabidopsis thaliana
  peptide (1)..(386): Ceres Seq. ID no. 12558433
  misc_feature (284)..(375): Homolog of NCBI NO: 122785 NR Description: GLYCINE-RICH PROTEIN HC1
  misc_feature (313)..(374): Homolog of NCBI NO: 1346181 NR Description: Glycine-rich RNA-binding protein GRP2A
  misc_feature (279)..(375): Homolog of NCBI NO: 7440064 NR Description: fus-like protein - human (fragment)
  misc_feature (303)..(373): Homolog of NCBI NO: 21388660 NR Description: glycine-rich RNA-binding protein [Physcomitrella
  misc_feature (274)..(377): Homolog of NCBI NO: 37534930 NR Description: putative glycine-rich protein
  misc_feature (280)..(374): Homolog of NCBI NO: 1170023 NR Description: ABSCISIC ACID AND ENVIRONMENTAL STRESS INDUCIBLE
  misc_feature (250)..(376): Homolog of NCBI NO: 1170023 NR Description: ABSCISIC ACID AND ENVIRONMENTAL STRESS INDUCIBLE
  misc_feature (270)..(376): Homolog of NCBI NO: 7488799 NR Description: dormancy-associated protein 2 - garden pea
  misc_feature (1)..(86): Homolog of NCBI NO: 15230159 NR Description: unknown protein; protein id: At3g24690.1
  misc_feature (1)..(386): Homolog of NCBI NO: 15223426 NR Description: unknown protein
  misc_feature (284)..(375): Homolog of NCBI NO: 122785 NR Description: GLYCINE-RICH PROTEIN HC1
  misc_feature (313)..(374): Homolog of NCBI NO: 1346181 NR Description: Glycine-rich RNA-binding protein GRP2A
  misc_feature (279)..(375): Homolog of NCBI NO: 7440064 NR Description: fus-like protein - human (fragment)
  misc_feature (303)..(373): Homolog of NCBI NO: 21388660 NR Description: glycine-rich RNA-binding protein [Physcomitrella
  misc_feature (274)..(377): Homolog of NCBI NO: 37534930 NR Description: putative glycine-rich protein
  misc_feature (280)..(374): Homolog of NCBI NO: 1170023 NR Description: ABSCISIC ACID AND ENVIRONMENTAL STRESS INDUCIBLE
  misc_feature (250)..(376): Homolog of NCBI NO: 1170023 NR Description: ABSCISIC ACID AND ENVIRONMENTAL STRESS INDUCIBLE
  misc_feature (270)..(376): Homolog of NCBI NO: 7488799 NR Description: dormancy-associated protein 2 - garden pea
  misc_feature (1)..(86): Homolog of NCBI NO: 15230159 NR Description: unknown protein; protein id: At3g24690.1
  misc_feature (1)..(386): Homolog of NCBI NO: 15223426 NR Description: unknown protein
MEESISQGKTLNKEQEEVLRSKPAVVILIDELEKIRAPLSAAVTEEISLATQLNRASSDQTTASEQKEVTDIPQEVSGGDDGAKLEDLVNFLYFGSLFDVKSQNEFTSIMLTRTHERSCCLSYDYVTDDATDLLGDRDLDSISQLWSLMVSRPVDSSLSHKNALERCVEHAKLWLANSEQPIESNCNTSYAALREKLKKIMASDYFTTTPEMKAPVDVAAAAGNYTSYQVPVDVEASGHYQQKEEDASNSKEVESVVNDQSQQDEHQKVELVTEGEVVHGQQEQGYTQVGGAENAKRDYVPRGSYQNQRGRRGARRGGGGYQNGRGGRGGGGGYQNGRYESYDQSGGNGYQRNYYNNRGRGRGGGGGGGNGHSYNNYQDPNVAVAS

SEQ ID NO: 40301 - DNA, 1124 bp, Arabidopsis thaliana
  misc_feature (1)..(1124): Ceres Seq. ID no. 12421812
  misc_feature: MA Experiment ID: 108433 Result: Up-regulated in Transcription
  misc_feature: MA Experiment 108433 PARAMETER Experiment Name: At_rhl_Mutant2_cDNA_P Parameter: Age (day) Value: 7
  misc_feature: MA Experiment 108433 PARAMETER Experiment Name: At_rhl_Mutant2_cDNA_P Parameter: Organism Value: A. thaliana
  misc_feature: MA Experiment 108433 PARAMETER Experiment Name: At_rhl_Mutant2_cDNA_P Parameter: Plant Line Value: rhl Mutant vs. wt landsburg
  misc_feature: MA Experiment 108433 PARAMETER Experiment Name: At_rhl_Mutant2_cDNA_P Parameter: Tissue Value: Roots
  misc_feature: MA Experiment ID: 108434 Result: Down-regulated in Transcription
  misc_feature: MA Experiment 108434 PARAMETER Experiment Name: At_Root_Tips_cDNA_P Parameter: Tissue Value: Root Tips
  misc_feature: MA Experiment ID: 108573 Result: Up-regulated in Transcription
  misc_feature: MA Experiment 108573 PARAMETER Experiment Name: At_Drought_cDNA_P Parameter: Timepoint (hr) Value: 6
  misc_feature: MA Experiment 108573 PARAMETER Experiment Name: At_Drought_cDNA_P Parameter: Tissue Value: Aerial
  misc_feature: MA Experiment 108573 PARAMETER Experiment Name: At_Drought_cDNA_P Parameter: Treatment Value: Drought vs. No Drought
  misc_feature: MA Experiment ID: 108594 Result: Down-regulated in Transcription
  misc_feature: MA Experiment 108594 PARAMETER Experiment Name: At_Ler-rhl_Root_cDNA_P Parameter: Plant Line Value: null
  misc_feature: MA Experiment ID: 108595 Result: Down-regulated in Transcription
  misc_feature: MA Experiment 108595 PARAMETER Experiment Name: At_Ler-pi_Ovule_cDNA_P Parameter: Plant Line Value: null
  misc_feature: MA Experiment ID: 108605 Result: Up-regulated in Transcription
  misc_feature: MA Experiment 108605 PARAMETER Experiment Name: At_100uM_ABA_cDNA_P Parameter: Timepoint (hr) Value: 6
  misc_feature: MA Experiment 108605 PARAMETER Experiment Name: At_100uM_ABA_cDNA_P Parameter: Tissue Value: Aerial
  misc_feature: MA Experiment 108605 PARAMETER Experiment Name: At_100uM_ABA_cDNA_P Parameter: Treatment Value: 100uM ABA vs. No Treatment
  misc_feature: MA Experiment ID: 20000185 Result: Down-regulated in Transcription
  misc_feature: MA Experiment 20000185 PARAMETER Experiment Name: At_Roots__P Parameter: Age (day) Value: 7 vs. 21
  misc_feature: MA Experiment 20000185 PARAMETER Experiment Name: At_Roots__P Parameter: Organism Value: A. thaliana
  misc_feature: MA Experiment 20000185 PARAMETER Experiment Name: At_Roots__P Parameter: Tissue Value: Roots vs. Whole Plant
  misc_feature: MA Experiment ID: 20000437 Result: Down-regulated in Transcription
  misc_feature: MA Experiment 20000437 PARAMETER Experiment Name: At_Drought_P Parameter: Age (day) Value: 8
  misc_feature: MA Experiment 20000437 PARAMETER Experiment Name: At_Drought_P Parameter: Organism Value: A. thaliana
  misc_feature: MA Experiment 20000437 PARAMETER Experiment Name: At_Drought_P Parameter: Plant Line Value: WS
  misc_feature: MA Experiment 20000437 PARAMETER Experiment Name: At_Drought_P Parameter: Timepoint (hr) Value: 24
  misc_feature: MA Experiment 20000437 PARAMETER Experiment Name: At_Drought_P Parameter: Tissue Value: Whole Plant
  misc_feature: MA Experiment 20000437 PARAMETER Experiment Name: At_Drought_P Parameter: Treatment Value: Drought vs. No Drought
  misc_feature: MA Experiment ID: 20000439 Result: Down-regulated in Transcription
  misc_feature: MA Experiment 20000439 PARAMETER Experiment Name: At_Roots__P Parameter: Age (day) Value: 14 vs. 21
  misc_feature: MA Experiment 20000439 PARAMETER Experiment Name: At_Roots__P Parameter: Organism Value: A. thaliana
  misc_feature: MA Experiment 20000439 PARAMETER Experiment Name: At_Roots__P Parameter: Tissue Value: Roots vs. Whole Plant
  misc_feature: MA Experiment ID: 20000573 Result: Down-regulated in Transcription
  misc_feature: MA Experiment 20000573 PARAMETER Experiment Name: At_100uM_ABA_Mutants__P Parameter: Organism Value: A. thaliana
  misc_feature: MA Experiment 20000573 PARAMETER Experiment Name: At_100uM_ABA_Mutants__P Parameter: Plant Line Value: CS22 vs. Ler wt
  misc_feature: MA Experiment 20000573 PARAMETER Experiment Name: At_100uM_ABA_Mutants__P Parameter: Timepoint (hr) Value: N/A
  misc_feature: MA Experiment 20000573 PARAMETER Experiment Name: At_100uM_ABA_Mutants__P Parameter: Tissue Value: Whole Plant
  misc_feature: MA Experiment 20000573 PARAMETER Experiment Name: At_100uM_ABA_Mutants__P Parameter: Treatment Value: None
  misc_feature: MA Experiment ID: 20000574 Result: Down-regulated in Transcription
  misc_feature: MA Experiment 20000574 PARAMETER Experiment Name: At_100uM_ABA_Mutants__P Parameter: Organism Value: A. thaliana
  misc_feature: MA Experiment 20000574 PARAMETER Experiment Name: At_100uM_ABA_Mutants__P Parameter: Plant Line Value: CS23 vs. Ler wt
  misc_feature: MA Experiment 20000574 PARAMETER Experiment Name: At_100uM_ABA_Mutants__P Parameter: Timepoint (hr) Value: N/A
  misc_feature: MA Experiment 20000574 PARAMETER Experiment Name: At_100uM_ABA_Mutants__P Parameter: Tissue Value: Whole Plant
  misc_feature: MA Experiment 20000574 PARAMETER Experiment Name: At_100uM_ABA_Mutants__P Parameter: Treatment Value: None
  misc_feature: MA Experiment ID: 20000794 Result: Up-regulated in Transcription
  misc_feature: MA Experiment 20000794 PARAMETER Experiment Name: At_Petals_P Parameter: Age (day) Value: 23-25 days
  misc_feature: MA Experiment 20000794 PARAMETER Experiment Name: At_Petals_P Parameter: Plant Line Value: WS
  misc_feature: MA Experiment 20000794 PARAMETER Experiment Name: At_Petals_P Parameter: Tissue Value: Petals vs. Whole plant
  misc_feature: MA Experiment ID: 20001248 Result: Down-regulated in Transcription
  misc_feature: MA Experiment 20001248 PARAMETER Experiment Name: At_Far-red-induction_P Parameter: Age (day) Value: 7
  misc_feature: MA Experiment 20001248 PARAMETER Experiment Name: At_Far-red-induction_P Parameter: Light Value: Far-red vs. White
  misc_feature: MA Experiment 20001248 PARAMETER Experiment Name: At_Far-red-induction_P Parameter: Organism Value: A. thaliana
  misc_feature: MA Experiment 20001248 PARAMETER Experiment Name: At_Far-red-induction_P Parameter: Plant Line Value: Columbia
  misc_feature: MA Experiment 20001248 PARAMETER Experiment Name: At_Far-red-induction_P Parameter: Timepoint (hr) Value: 4
  misc_feature: MA Experiment 20001248 PARAMETER Experiment Name: At_Far-red-induction_P Parameter: Tissue Value: Whole Plant
attttttgatatgtaaaatttatcgaaaacgttccatttcaatatgtagacaaagcggagaagtatattgtggcaggcggcaagcaagggagcagagctagtgttgttcccggaggggtttatcggtgtctatcctcgaggttttaggttcggtttagcggttggcgttcataacgaagaagggcgtgatgagtttcggaagtaccatgcttctgctattcatgttcctggccctgaagtagcaagattggctgacgtggctaggaaaaaccatgtgtacttggtaatgggagccatagagaaggaagggtataccctctattgcacagttcttttctttagtccacagggtcagttcttgggcaagcaccgtaaactcatgcccacaagtttggaacgttgcatttggggccaaggggacgggatcaaccatccccgtttacgacactcccattggaaaactcggtgctgctatttgctgggagaataggatgcccctctacagaactgcattgtacgccaaaggcattgagctttattgtgcacctactgctgatggttcgaaagaatggcaatcgtcgatgcttcacattgcgatcgaaggtggatgtttcgtcttgtcggcttgccaattctgccagcgtaaacatttccctgatcatcctgactacttgtttaccgattggtacgacgacaaagaacatgattctattgtctcccaaggtggaagtgtcattatttcacctttgggacaagttctcgccggaccaaactttgaatcagagggtctcgtcacagctgatattgatcttggtgatatagcaagagccaagttatacttcgattcggttggacattactcgagaccagatgttttacacttgaccgtaaatgagcacccgaggaaatcggttacattcgtgacgaaggtggagaaagctgaggatgactcaaacaaatagtaagagacttgaagttcgtatctgctggagttatgtcaatcgtatggagtcaagtccaaaatgttctgttgcgttttcattttatgttcaagtttatttatcttttctcttcaatggtaagatctatggagtcaagtaataatggtaagacttatgttgttg

SEQ ID NO: 40302 - protein, 156 aa, Arabidopsis thaliana
  peptide (1)..(156): Ceres Seq. ID no. 12421813
  misc_feature (1)..(156): Homolog of NCBI NO: 30692072 NR Description: nitrilase 1 [Arabidopsis thaliana]
  misc_feature (1)..(154): Homolog of NCBI NO: 14211396 NR Description: nitrilase-like protein [Brassica napus]
  misc_feature (1)..(156): Homolog of NCBI NO: 21593107 NR Description: nitrilase 3 [Arabidopsis thaliana]
  misc_feature (1)..(156): Homolog of NCBI NO: 15229936 NR Description: nitrilase 3
  misc_feature (1)..(156): Homolog of NCBI NO: 25290266 NR Description: nitrilase (EC 3.5.5.1) 2 [imported] - Arabidopsis
  misc_feature (1)..(156): Homolog of NCBI NO: 25290267 NR Description: nitrilase (EC 3.5.5.1) 2 [imported] - Arabidopsis
  misc_feature (1)..(156): Homolog of NCBI NO: 15229932 NR Description: nitrilase 2
  misc_feature (1)..(156): Homolog of NCBI NO: 16226740 NR Description: AT3g44310/T10D17_100 [Arabidopsis thaliana]
  misc_feature (1)..(156): Homolog of NCBI NO: 417381 NR Description: Nitrilase 1
  misc_feature (1)..(156): Homolog of NCBI NO: 30692067 NR Description: nitrilase 1 [Arabidopsis thaliana]
MPLYRTALYAKGIELYCAPTADGSKEWQSSMLHIAIEGGCFVLSACQFCQRKHFPDHPDYLFTDWYDDKEHDSIVSQGGSVIISPLGQVLAGPNFESEGLVTADIDLGDIARAKLYFDSVGHYSRPDVLHLTVNEHPRKSVTFVTKVEKAEDDSNK

SEQ ID NO: 40303 - protein, 126 aa, Arabidopsis thaliana
  peptide (1)..(126): Ceres Seq. ID no. 12421814
  misc_feature (1)..(126): Homolog of NCBI NO: 30692072 NR Description: nitrilase 1 [Arabidopsis thaliana]
  misc_feature (1)..(124): Homolog of NCBI NO: 14211396 NR Description: nitrilase-like protein [Brassica napus]
  misc_feature (1)..(126): Homolog of NCBI NO: 21593107 NR Description: nitrilase 3 [Arabidopsis thaliana]
  misc_feature (1)..(126): Homolog of NCBI NO: 15229936 NR Description: nitrilase 3
  misc_feature (1)..(126): Homolog of NCBI NO: 25290266 NR Description: nitrilase (EC 3.5.5.1) 2 [imported] - Arabidopsis
  misc_feature (1)..(126): Homolog of NCBI NO: 25290267 NR Description: nitrilase (EC 3.5.5.1) 2 [imported] - Arabidopsis
  misc_feature (1)..(126): Homolog of NCBI NO: 15229932 NR Description: nitrilase 2
  misc_feature (1)..(126): Homolog of NCBI NO: 16226740 NR Description: AT3g44310/T10D17_100 [Arabidopsis thaliana]
  misc_feature (1)..(126): Homolog of NCBI NO: 417381 NR Description: Nitrilase 1
  misc_feature (1)..(126): Homolog of NCBI NO: 30692067 NR Description: nitrilase 1 [Arabidopsis thaliana]
MLHIAIEGGCFVLSACQFCQRKHFPDHPDYLFTDWYDDKEHDSIVSQGGSVIISPLGQVLAGPNFESEGLVTADIDLGDIARAKLYFDSVGHYSRPDVLHLTVNEHPRKSVTFVTKVEKAEDDSNK

SEQ ID NO: 40304 - protein, 88 aa, Arabidopsis thaliana
  peptide (1)..(88): Ceres Seq. ID no. 12421815
MVRKNGNRRCFTLRSKVDVSSCRLANSASVNISLIILTTCLPIGTTTKNMILLSPKVEVSLFHLWDKFSPDQTLNQRVSSQLILILVI

SEQ ID NO: 40305 - DNA, 1403 bp, Arabidopsis thaliana
  misc_feature (1)..(1403): Ceres Seq. ID no. 12330825
  misc_feature: MA Experiment ID: 108576 Result: Up-regulated in Transcription
  misc_feature: MA Experiment 108576 PARAMETER Experiment Name: At_42deg_Heat_cDNA_P Parameter: Temperature (deg C) Value: 42 vs. 22
  misc_feature: MA Experiment 108576 PARAMETER Experiment Name: At_42deg_Heat_cDNA_P Parameter: Timepoint (hr) Value: 1
  misc_feature: MA Experiment 108576 PARAMETER Experiment Name: At_42deg_Heat_cDNA_P Parameter: Tissue Value: Aerial
  misc_feature: MA Experiment ID: 20000180 Result: Up-regulated in Transcription
  misc_feature: MA Experiment 20000180 PARAMETER Experiment Name: At_Germinating_Seeds_P Parameter: Age (hr) Value: 24 vs. 0
  misc_feature: MA Experiment 20000180 PARAMETER Experiment Name: At_Germinating_Seeds_P Parameter: Tissue Value: Germinating Seeds
  misc_feature: MA Experiment ID: 20000184 Result: Up-regulated in Transcription
  misc_feature: MA Experiment 20000184 PARAMETER Experiment Name: At_Shoots__P Parameter: Age (day) Value: 7
  misc_feature: MA Experiment 20000184 PARAMETER Experiment Name: At_Shoots__P Parameter: Tissue Value: Shoots vs. Whole Plant
  misc_feature: MA Experiment ID: 20001248 Result: Down-regulated in Transcription
  misc_feature: MA Experiment 20001248 PARAMETER Experiment Name: At_Far-red-induction_P Parameter: Age (day) Value: 7
  misc_feature: MA Experiment 20001248 PARAMETER Experiment Name: At_Far-red-induction_P Parameter: Light Value: Far-red vs. White
  misc_feature: MA Experiment 20001248 PARAMETER Experiment Name: At_Far-red-induction_P Parameter: Organism Value: A. thaliana
  misc_feature: MA Experiment 20001248 PARAMETER Experiment Name: At_Far-red-induction_P Parameter: Plant Line Value: Columbia
  misc_feature: MA Experiment 20001248 PARAMETER Experiment Name: At_Far-red-induction_P Parameter: Timepoint (hr) Value: 4
  misc_feature: MA Experiment 20001248 PARAMETER Experiment Name: At_Far-red-induction_P Parameter: Tissue Value: Whole Plant
tttcctctaacccctccacaatcggaggaagacgattcctgggagcaagagaaacgatgggacttcccatcggaaaatctcttagagtgagagaattatggtgtgttcttaatgcttaataatcaccgacacagccattgttcttcatcatctccatggattttgattccatttctcgggaaagcacttttctttccccattgcttaaccaaaatgcaatgtggcaaatgaacttgggatcagatgatacaatgggtgttgatgggtcttatccggaacgtcacggagagccagattgtgcttattatataaggactggactttgtaggtttggttcaacttgccgattcaatcatcctcacgaccggaaactggttatagcaactgcaaggattaaaggagaataccctgaaagaattggtcagcctgaatgtgagttttatctgaagacagggacctgcaaattcggagtgacttgcaagtttcatcatcctaggaacaaagctggtattgatggaagtgtatcagttaatgtcttaagctatcctctacgtccgaacgaagatgattgctcttactttttgagaattggacaatgtaaatttgggggaacttgtaaattcaatcaccctcagactcaatcaaccaacttgatggtttctgttcgtggctctccggtttactctgctcttcaatctctaactggtcaaccgtcttattcttggtcgagaacatcttttgttgcaaaccctcctcgtttgcaagatccttctggtttcgcttcaggatctcaaggaggtctcttctcatccgggtttcattcgggaaattctgttccgctcgggttctatgcattacctagagagaatgtattcccggaaagaccaggccaacctgaatgccaattctacatgaagacaggagattgcaaatttggaacagtctgcaaatttcatcatcctagagacaggcaaacccctcctcctgattgtgtcttaagctcggttggccttcctttacgcccgggagaaccactgtgcgtgttctattctcggtatgggatctgcaagtttggtccaagctgtaaatttgatcacccgatgcgagtcttcacttacaacaacaatactgcatctccttctccttcatcatctctgcatcaagagactgcaatcaccacagagctcaggaatctcctagtctcttcttctgtggaagcaaaacccacatcactccctgaaacaacctctgctaaagacaccattgttgatgcacagcactgaaaaccctgtgttttgtctatcttgaaacaatatgtaacatttgttttgctttatcttgtaagcatttatgtacagagatgatatctgatctaatctgattcgccttttgttgtaattttc

SEQ ID NO: 40306 - protein, 375 aa, Arabidopsis thaliana
  peptide (1)..(375): Ceres Seq. ID no. 12330826
  misc_feature (43)..(69): Pfam Name: Zinc finger C-x8-C-x5-C-x3-H type (and similar) Pfam Description: Zinc finger C-x8-C-x5-C-x3-H type (and similar)
  misc_feature (32)..(363): Homolog of NCBI NO: 11288368 NR Description: zinc finger protein [imported] - garden pea
  misc_feature (19)..(315): Homolog of NCBI NO: 11288368 NR Description: zinc finger protein [imported] - garden pea
  misc_feature (32)..(372): Homolog of NCBI NO: 11288371 NR Description: zinc finger protein 1 [imported] - Arabidopsis
  misc_feature (32)..(372): Homolog of NCBI NO: 18396338 NR Description: zinc finger protein 1 (zfn1)
  misc_feature (32)..(372): Homolog of NCBI NO: 6728979 NR Description: zinc finger protein 1 (zfn1) [Arabidopsis
  misc_feature (220)..(368): Homolog of NCBI NO: 30690809 NR Description: expressed protein [Arabidopsis thaliana]
  misc_feature (19)..(189): Homolog of NCBI NO: 30690809 NR Description: expressed protein [Arabidopsis thaliana]
  misc_feature (22)..(375): Homolog of NCBI NO: 21536865 NR Description: zinc finger protein 3 [Arabidopsis thaliana]
  misc_feature (1)..(375): Homolog of NCBI NO: 22326848 NR Description: zinc finger protein 3 (gb|AAD27875.1)
  misc_feature (1)..(375): Homolog of NCBI NO: 30685903 NR Description: zinc finger protein 3 (gb|AAD27875.1)
MDFDSISRESTFLSPLLNQNAMWQMNLGSDDTMGVDGSYPERHGEPDCAYYIRTGLCRFGSTCRFNHPHDRKLVIATARIKGEYPERIGQPECEFYLKTGTCKFGVTCKFHHPRNKAGIDGSVSVNVLSYPLRPNEDDCSYFLRIGQCKFGGTCKFNHPQTQSTNLMVSVRGSPVYSALQSLTGQPSYSWSRTSFVANPPRLQDPSGFASGSQGGLFSSGFHSGNSVPLGFYALPRENVFPERPGQPECQFYMKTGDCKFGTVCKFHHPRDRQTPPPDCVLSSVGLPLRPGEPLCVFYSRYGICKFGPSCKFDHPMRVFTYNNNTASPSPSSSLHQETAITTELRNLLVSSSVEAKPTSLPETTSAKDTIVDAQH

SEQ ID NO: 40307 - protein, 354 aa, Arabidopsis thaliana
  peptide (1)..(354): Ceres Seq. ID no. 12330827
  misc_feature (22)..(48): Pfam Name: Zinc finger C-x8-C-x5-C-x3-H type (and similar) Pfam Description: Zinc finger C-x8-C-x5-C-x3-H type (and similar)
  misc_feature (11)..(342): Homolog of NCBI NO: 11288368 NR Description: zinc finger protein [imported] - garden pea
  misc_feature (1)..(294): Homolog of NCBI NO: 11288368 NR Description: zinc finger protein [imported] - garden pea
  misc_feature (11)..(351): Homolog of NCBI NO: 11288371 NR Description: zinc finger protein 1 [imported] - Arabidopsis
  misc_feature (11)..(351): Homolog of NCBI NO: 18396338 NR Description: zinc finger protein 1 (zfn1)
  misc_feature (11)..(351): Homolog of NCBI NO: 6728979 NR Description: zinc finger protein 1 (zfn1) [Arabidopsis
  misc_feature (199)..(347): Homolog of NCBI NO: 30690809 NR Description: expressed protein [Arabidopsis thaliana]
  misc_feature (1)..(168): Homolog of NCBI NO: 30690809 NR Description: expressed protein [Arabidopsis thaliana]
  misc_feature (1)..(354): Homolog of NCBI NO: 21536865 NR Description: zinc finger protein 3 [Arabidopsis thaliana]
  misc_feature (1)..(354): Homolog of NCBI NO: 22326848 NR Description: zinc finger protein 3 (gb|AAD27875.1)
  misc_feature (1)..(354): Homolog of NCBI NO: 30685903 NR Description: zinc finger protein 3 (gb|AAD27875.1)
MWQMNLGSDDTMGVDGSYPERHGEPDCAYYIRTGLCRFGSTCRFNHPHDRKLVIATARIKGEYPERIGQPECEFYLKTGTCKFGVTCKFHHPRNKAGIDGSVSVNVLSYPLRPNEDDCSYFLRIGQCKFGGTCKFNHPQTQSTNLMVSVRGSPVYSALQSLTGQPSYSWSRTSFVANPPRLQDPSGFASGSQGGLFSSGFHSGNSVPLGFYALPRENVFPERPGQPECQFYMKTGDCKFGTVCKFHHPRDRQTPPPDCVLSSVGLPLRPGEPLCVFYSRYGICKFGPSCKFDHPMRVFTYNNNTASPSPSSSLHQETAITTELRNLLVSSSVEAKPTSLPETTSAKDTIVDAQH

SEQ ID NO: 40308 - protein, 351 aa, Arabidopsis thaliana
  peptide (1)..(351): Ceres Seq. ID no. 12330828
  misc_feature (19)..(45): Pfam Name: Zinc finger C-x8-C-x5-C-x3-H type (and similar) Pfam Description: Zinc finger C-x8-C-x5-C-x3-H type (and similar)
  misc_feature (8)..(339): Homolog of NCBI NO: 11288368 NR Description: zinc finger protein [imported] - garden pea
  misc_feature (1)..(291): Homolog of NCBI NO: 11288368 NR Description: zinc finger protein [imported] - garden pea
  misc_feature (8)..(348): Homolog of NCBI NO: 11288371 NR Description: zinc finger protein 1 [imported] - Arabidopsis
  misc_feature (8)..(348): Homolog of NCBI NO: 18396338 NR Description: zinc finger protein 1 (zfn1)
  misc_feature (8)..(348): Homolog of NCBI NO: 6728979 NR Description: zinc finger protein 1 (zfn1) [Arabidopsis
  misc_feature (196)..(344): Homolog of NCBI NO: 30690809 NR Description: expressed protein [Arabidopsis thaliana]
  misc_feature (1)..(165): Homolog of NCBI NO: 30690809 NR Description: expressed protein [Arabidopsis thaliana]
  misc_feature (1)..(351): Homolog of NCBI NO: 21536865 NR Description: zinc finger protein 3 [Arabidopsis thaliana]
  misc_feature (1)..(351): Homolog of NCBI NO: 22326848 NR Description: zinc finger protein 3 (gb|AAD27875.1)
  misc_feature (1)..(351): Homolog of NCBI NO: 30685903 NR Description: zinc finger protein 3 (gb|AAD27875.1)
MNLGSDDTMGVDGSYPERHGEPDCAYYIRTGLCRFGSTCRFNHPHDRKLVIATARIKGEYPERIGQPECEFYLKTGTCKFGVTCKFHHPRNKAGIDGSVSVNVLSYPLRPNEDDCSYFLRIGQCKFGGTCKFNHPQTQSTNLMVSVRGSPVYSALQSLTGQPSYSWSRTSFVANPPRLQDPSGFASGSQGGLFSSGFHSGNSVPLGFYALPRENVFPERPGQPECQFYMKTGDCKFGTVCKFHHPRDRQTPPPDCVLSSVGLPLRPGEPLCVFYSRYGICKFGPSCKFDHPMRVFTYNNNTASPSPSSSLHQETAITTELRNLLVSSSVEAKPTSLPETTSAKDTIVDAQH

SEQ ID NO: 40309 - DNA, 1374 bp, Arabidopsis thaliana
  misc_feature (1)..(1374): Ceres Seq. ID no. 12328837
  misc_feature: MA Experiment ID: 108434 Result: Up-regulated in Transcription
  misc_feature: MA Experiment 108434 PARAMETER Experiment Name: At_Root_Tips_cDNA_P Parameter: Tissue Value: Root Tips
  misc_feature: MA Experiment ID: 108464 Result: Down-regulated in Transcription
  misc_feature: MA Experiment 108464 PARAMETER Experiment Name: At_Germinating_Seeds_cDNA_P Parameter: Age (day) Value: 4 vs. 0
  misc_feature: MA Experiment 108464 PARAMETER Experiment Name: At_Germinating_Seeds_cDNA_P Parameter: Tissue Value: Germinating Seeds
  misc_feature: MA Experiment ID: 20000171 Result: Up-regulated in Transcription
  misc_feature: MA Experiment 20000171 PARAMETER Experiment Name: At_42deg_Heat_P Parameter: Age (day) Value: 14
  misc_feature: MA Experiment 20000171 PARAMETER Experiment Name: At_42deg_Heat_P Parameter: Organism Value: A. thaliana
  misc_feature: MA Experiment 20000171 PARAMETER Experiment Name: At_42deg_Heat_P Parameter: Plant Line Value: WS
  misc_feature: MA Experiment 20000171 PARAMETER Experiment Name: At_42deg_Heat_P Parameter: Temperature (deg C) Value: 42 vs. 22
  misc_feature: MA Experiment 20000171 PARAMETER Experiment Name: At_42deg_Heat_P Parameter: Timepoint (hr) Value: 1
  misc_feature: MA Experiment 20000171 PARAMETER Experiment Name: At_42deg_Heat_P Parameter: Tissue Value: Aerial
  misc_feature: MA Experiment ID: 20000224 Result: Down-regulated in Transcription
  misc_feature: MA Experiment ID: 20000264 Result: Down-regulated in Transcription
  misc_feature: MA Experiment 20000264 PARAMETER Experiment Name: At_Open_Flower_P Parameter: Age (day) Value: 21
  misc_feature: MA Experiment 20000264 PARAMETER Experiment Name: At_Open_Flower_P Parameter: Plant Line Value: WS
  misc_feature: MA Experiment 20000264 PARAMETER Experiment Name: At_Open_Flower_P Parameter: Tissue Value: Open Flower vs. Whole Plant
  misc_feature: MA Experiment ID: 20000451 Result: Up-regulated in Transcription
  misc_feature: MA Experiment 20000451 PARAMETER Experiment Name: At_CS6879_Shoots-Roots_P Parameter: Age (day) Value: 14
  misc_feature: MA Experiment 20000451 PARAMETER Experiment Name: At_CS6879_Shoots-Roots_P Parameter: Organism Value: A. thaliana
  misc_feature: MA Experiment 20000451 PARAMETER Experiment Name: At_CS6879_Shoots-Roots_P Parameter: Plant Line Value: CS6879 vs. WS
  misc_feature: MA Experiment 20000451 PARAMETER Experiment Name: At_CS6879_Shoots-Roots_P Parameter: Tissue Value: Roots
  misc_feature: MA Experiment ID: 20000794 Result: Down-regulated in Transcription
  misc_feature: MA Experiment 20000794 PARAMETER Experiment Name: At_Petals_P Parameter: Age (day) Value: 23-25 days
  misc_feature: MA Experiment 20000794 PARAMETER Experiment Name: At_Petals_P Parameter: Plant Line Value: WS
  misc_feature: MA Experiment 20000794 PARAMETER Experiment Name: At_Petals_P Parameter: Tissue Value: Petals vs. Whole plant
cgctccggcattgagctccgtcgagagaatggcgagtaatcaacaaccaccgtcgaatctacagacctacggtgtaccaatttacgccgtcgactggattctagaggaagctgtcagatccaaaatcactaaggatcaggatgatgatgatgatgatggatcgtcgtcgtcgtcgtacatcgttttatccggcggaggaggagaaggacgaagtggaatacctaatgtcatcttaatctgtcgtgttgatctccacaccaattctctctctgaacaacctattggtaggcgtgtgattggcactgatctaccttatcgtatggctattcatcctcgtcaaggtggtcttatttgtgcattgcctaacagttgcagactgtttgattgggaaaacattatagaggatgataatgaggaagagtcagagaaagttgttaaagagttaaaagatgttggacaacagttgtctctctcgtttaatcaggatgggactgttctagctactggtgcagaggatgggactttgagggtttttgaatggccaagcatgaagactttacttaatgagtctaaggcacatgcatcagttaaaagcctaactttcagcgaaagtggtaagtttcttgtatctcttggagctccactttgtcgggtttgggatgtgaatgcttctgctgctattgccagtctatcaaaagagaaggacgagatgtttgcctcgtgtagattctctgtagacaattcaggcagtgaagttctttatgttgctgcaaacactgaacgtggtgggagtattataacatgggatacaacatcatggagaagaagaagttcaaagcttattaaaagaaacaactctatatctgcctttaatgtctcagctgatgggaagcttcttgcagtaggaaccctcgaaggagatgttttaataattgattcgacaaagatgcaaactaaccaaatcgtcaagaaagctcatctcggtttggtcaccgcactgactttctcccctgattcaaggtgcttagtgtcagtatcttttgactcaagggcaaggctaaccgtgatcaaacaaaagggtgaaaaacgtcgagtatatctgtgggtggcggcattgttgtttgtgttggtatacgtggttttgtattatttgatggtggcaatggggatcatacattagacatacgtaaagaaagcctctaagtaaatccacacgacaatacatggaatggcttgaagaaaccaacatacagatttataccctcgttaagttttcttagactttgtgttttgagtaggtcgtagagattcttcacagaaactttcatgcttttattagtttacatcatatattcatattctcgtttctatctt

SEQ ID NO: 40310 - protein, 392 aa, Arabidopsis thaliana
  peptide (1)..(392): Ceres Seq. ID no. 12328838
  misc_feature (157)..(376): Homolog of NCBI NO: 26450470 NR Description: unknown protein [Arabidopsis thaliana]
  misc_feature (74)..(376): Homolog of NCBI NO: 18409509 NR Description: expressed protein
  misc_feature (81)..(382): Homolog of NCBI NO: 34897162 NR Description: putative membrane protein
  misc_feature (69)..(384): Homolog of NCBI NO: 34394605 NR Description: transducin / WD-40 repeat protein-like
  misc_feature (12)..(270): Homolog of NCBI NO: 17473926 NR Description: putative protein transport protein SEC12p
  misc_feature (12)..(362): Homolog of NCBI NO: 322598 NR Description: St12p protein - Arabidopsis thaliana
  misc_feature (12)..(391): Homolog of NCBI NO: 15226281 NR Description: putative protein transport protein SEC12p
  misc_feature (12)..(391): Homolog of NCBI NO: 11358859 NR Description: St12p protein [imported] - Arabidopsis thaliana
  misc_feature (10)..(368): Homolog of NCBI NO: 8777388 NR Description: protein transport protein SEC12p-like
  misc_feature (10)..(392): Homolog of NCBI NO: 18423177 NR Description: St12p protein; protein id: At5g50550.1
APALSSVERMASNQQPPSNLQTYGVPIYAVDWILEEAVRSKITKDQDDDDDDGSSSSSYIVLSGGGGEGRSGIPNVILICRVDLHTNSLSEQPIGRRVIGTDLPYRMAIHPRQGGLICALPNSCRLFDWENIIEDDNEEESEKVVKELKDVGQQLSLSFNQDGTVLATGAEDGTLRVFEWPSMKTLLNESKAHASVKSLTFSESGKFLVSLGAPLCRVWDVNASAAIASLSKEKDEMFASCRFSVDNSGSEVLYVAANTERGGSIITWDTTSWRRRSSKLIKRNNSISAFNVSADGKLLAVGTLEGDVLIIDSTKMQTNQIVKKAHLGLVTALTFSPDSRCLVSVSFDSRARLTVIKQKGEKRRVYLWVAALLFVLVYVVLYYLMVAMGIIH

SEQ ID NO: 40311 - protein, 383 aa, Arabidopsis thaliana
  peptide (1)..(383): Ceres Seq. ID no. 12328839
  misc_feature (148)..(367): Homolog of NCBI NO: 26450470 NR Description: unknown protein [Arabidopsis thaliana]
  misc_feature (65)..(367): Homolog of NCBI NO: 18409509 NR Description: expressed protein
  misc_feature (72)..(373): Homolog of NCBI NO: 34897162 NR Description: putative membrane protein
  misc_feature (60)..(375): Homolog of NCBI NO: 34394605 NR Description: transducin / WD-40 repeat protein-like
  misc_feature (3)..(261): Homolog of NCBI NO: 17473926 NR Description: putative protein transport protein SEC12p
  misc_feature (3)..(353): Homolog of NCBI NO: 322598 NR Description: St12p protein - Arabidopsis thaliana
  misc_feature (3)..(382): Homolog of NCBI NO: 15226281 NR Description: putative protein transport protein SEC12p
  misc_feature (3)..(382): Homolog of NCBI NO: 11358859 NR Description: St12p protein [imported] - Arabidopsis thaliana
  misc_feature (1)..(359): Homolog of NCBI NO: 8777388 NR Description: protein transport protein SEC12p-like
  misc_feature (1)..(383): Homolog of NCBI NO: 18423177 NR Description: St12p protein; protein id: At5g50550.1
MASNQQPPSNLQTYGVPIYAVDWILEEAVRSKITKDQDDDDDDGSSSSSYIVLSGGGGEGRSGIPNVILICRVDLHTNSLSEQPIGRRVIGTDLPYRMAIHPRQGGLICALPNSCRLFDWENIIEDDNEEESEKVVKELKDVGQQLSLSFNQDGTVLATGAEDGTLRVFEWPSMKTLLNESKAHASVKSLTFSESGKFLVSLGAPLCRVWDVNASAAIASLSKEKDEMFASCRFSVDNSGSEVLYVAANTERGGSIITWDTTSWRRRSSKLIKRNNSISAFNVSADGKLLAVGTLEGDVLIIDSTKMQTNQIVKKAHLGLVTALTFSPDSRCLVSVSFDSRARLTVIKQKGEKRRVYLWVAALLFVLVYVVLYYLMVAMGIIH

SEQ ID NO: 40312 - protein, 286 aa, Arabidopsis thaliana
  peptide (1)..(286): Ceres Seq. ID no. 12328840
  misc_feature (51)..(270): Homolog of NCBI NO: 26450470 NR Description: unknown protein [Arabidopsis thaliana]
  misc_feature (1)..(270): Homolog of NCBI NO: 18409509 NR Description: expressed protein
  misc_feature (1)..(276): Homolog of NCBI NO: 34897162 NR Description: putative membrane protein
  misc_feature (1)..(278): Homolog of NCBI NO: 34394605 NR Description: transducin / WD-40 repeat protein-like
  misc_feature (1)..(164): Homolog of NCBI NO: 17473926 NR Description: putative protein transport protein SEC12p
  misc_feature (1)..(256): Homolog of NCBI NO: 322598 NR Description: St12p protein - Arabidopsis thaliana
  misc_feature (1)..(285): Homolog of NCBI NO: 15226281 NR Description: putative protein transport protein SEC12p
  misc_feature (1)..(285): Homolog of NCBI NO: 11358859 NR Description: St12p protein [imported] - Arabidopsis thaliana
  misc_feature (1)..(262): Homolog of NCBI NO: 8777388 NR Description: protein transport protein SEC12p-like
  misc_feature (1)..(286): Homolog of NCBI NO: 18423177 NR Description: St12p protein; protein id: At5g50550.1
MAIHPRQGGLICALPNSCRLFDWENIIEDDNEEESEKVVKELKDVGQQLSLSFNQDGTVLATGAEDGTLRVFEWPSMKTLLNESKAHASVKSLTFSESGKFLVSLGAPLCRVWDVNASAAIASLSKEKDEMFASCRFSVDNSGSEVLYVAANTERGGSIITWDTTSWRRRSSKLIKRNNSISAFNVSADGKLLAVGTLEGDVLIIDSTKMQTNQIVKKAHLGLVTALTFSPDSRCLVSVSFDSRARLTVIKQKGEKRRVYLWVAALLFVLVYVVLYYLMVAMGIIH

SEQ ID NO: 40313 - DNA, 1182 bp, Arabidopsis thaliana
  misc_feature (1)..(1182): Ceres Seq. ID no. 12328359
  misc_feature: MA Experiment ID: 108434 Result: Down-regulated in Transcription
  misc_feature: MA Experiment 108434 PARAMETER Experiment Name: At_Root_Tips_cDNA_P Parameter: Tissue Value: Root Tips
  misc_feature: MA Experiment ID: 108464 Result: Up-regulated in Transcription
  misc_feature: MA Experiment 108464 PARAMETER Experiment Name: At_Germinating_Seeds_cDNA_P Parameter: Age (day) Value: 4 vs. 0
  misc_feature: MA Experiment 108464 PARAMETER Experiment Name: At_Germinating_Seeds_cDNA_P Parameter: Tissue Value: Germinating Seeds
  misc_feature: MA Experiment ID: 108488 Result: Down-regulated in Transcription
  misc_feature: MA Experiment ID: 108501 Result: Down-regulated in Transcription
  misc_feature: MA Experiment 108501 PARAMETER Experiment Name: At_ap2_floral_buds_cDNA_P Parameter: Plant Line Value: ap2 (Ler.)
  misc_feature: MA Experiment 108501 PARAMETER Experiment Name: At_ap2_floral_buds_cDNA_P Parameter: Tissue Value: Closed Flower
  misc_feature: MA Experiment ID: 108561 Result: Up-regulated in Transcription
  misc_feature: MA Experiment 108561 PARAMETER Experiment Name: At_100uM_ABA_cDNA_P Parameter: Timepoint (hr) Value: 6
  misc_feature: MA Experiment 108561 PARAMETER Experiment Name: At_100uM_ABA_cDNA_P Parameter: Tissue Value: Aerial
  misc_feature: MA Experiment 108561 PARAMETER Experiment Name: At_100uM_ABA_cDNA_P Parameter: Treatment Value: 100uM ABA vs. No Treatment
  misc_feature: MA Experiment ID: 108572 Result: Up-regulated in Transcription
  misc_feature: MA Experiment 108572 PARAMETER Experiment Name: At_Drought_cDNA_P Parameter: Timepoint (hr) Value: 1
  misc_feature: MA Experiment 108572 PARAMETER Experiment Name: At_Drought_cDNA_P Parameter: Tissue Value: Aerial
  misc_feature: MA Experiment 108572 PARAMETER Experiment Name: At_Drought_cDNA_P Parameter: Treatment Value: Drought vs. No Drought
  misc_feature: MA Experiment ID: 108573 Result: Up-regulated in Transcription
  misc_feature: MA Experiment 108573 PARAMETER Experiment Name: At_Drought_cDNA_P Parameter: Timepoint (hr) Value: 6
  misc_feature: MA Experiment 108573 PARAMETER Experiment Name: At_Drought_cDNA_P Parameter: Tissue Value: Aerial
  misc_feature: MA Experiment 108573 PARAMETER Experiment Name: At_Drought_cDNA_P Parameter: Treatment Value: Drought vs. No Drought
  misc_feature: MA Experiment ID: 108574 Result: Down-regulated in Transcription
  misc_feature: MA Experiment 108574 PARAMETER Experiment Name: At_Wounding__cDNA_P Parameter: Timepoint (hr) Value: 1
  misc_feature: MA Experiment 108574 PARAMETER Experiment Name: At_Wounding__cDNA_P Parameter: Tissue Value: Aerial
  misc_feature: MA Experiment 108574 PARAMETER Experiment Name: At_Wounding__cDNA_P Parameter: Treatment Value: Wounding vs. No Wounding
  misc_feature: MA Experiment ID: 108579 Result: Down-regulated in Transcription
  misc_feature: MA Experiment 108579 PARAMETER Experiment Name: At_4deg_Cold_cDNA_P Parameter: Temperature (deg C) Value: 4 vs. 22
  misc_feature: MA Experiment 108579 PARAMETER Experiment Name: At_4deg_Cold_cDNA_P Parameter: Timepoint (hr) Value: 6
  misc_feature: MA Experiment 108579 PARAMETER Experiment Name: At_4deg_Cold_cDNA_P Parameter: Tissue Value: Aerial
  misc_feature: MA Experiment ID: 108585 Result: Up-regulated in Transcription
  misc_feature: MA Experiment 108585 PARAMETER Experiment Name: At_5mM_NaNP_cDNA_P Parameter: Timepoint (hr) Value: 6
  misc_feature: MA Experiment 108585 PARAMETER Experiment Name: At_5mM_NaNP_cDNA_P Parameter: Tissue Value: Aerial
  misc_feature: MA Experiment 108585 PARAMETER Experiment Name: At_5mM_NaNP_cDNA_P Parameter: Treatment Value: null
  misc_feature: MA Experiment ID: 108605 Result: Up-regulated in Transcription
  misc_feature: MA Experiment 108605 PARAMETER Experiment Name: At_100uM_ABA_cDNA_P Parameter: Timepoint (hr) Value: 6
  misc_feature: MA Experiment 108605 PARAMETER Experiment Name: At_100uM_ABA_cDNA_P Parameter: Tissue Value: Aerial
  misc_feature: MA Experiment 108605 PARAMETER Experiment Name: At_100uM_ABA_cDNA_P Parameter: Treatment Value: 100uM ABA vs. No Treatment
  misc_feature: MA Experiment ID: 108607 Result: Up-regulated in Transcription
  misc_feature: MA Experiment 108607 PARAMETER Experiment Name: At_100uM_ABA_cDNA_P Parameter: Timepoint (hr) Value: 4
  misc_feature: MA Experiment 108607 PARAMETER Experiment Name: At_100uM_ABA_cDNA_P Parameter: Tissue Value: Aerial
  misc_feature: MA Experiment 108607 PARAMETER Experiment Name: At_100uM_ABA_cDNA_P Parameter: Treatment Value: 100uM ABA vs. No Treatment
  misc_feature: MA Experiment ID: 108608 Result: Up-regulated in Transcription
  misc_feature: MA Experiment 108608 PARAMETER Experiment Name: At_100uM_ABA_cDNA_P Parameter: Timepoint (hr) Value: 1
  misc_feature: MA Experiment 108608 PARAMETER Experiment Name: At_100uM_ABA_cDNA_P Parameter: Tissue Value: Aerial
  misc_feature: MA Experiment 108608 PARAMETER Experiment Name: At_100uM_ABA_cDNA_P Parameter: Treatment Value: 100uM ABA vs. No Treatment
  misc_feature: MA Experiment ID: 108609 Result: Up-regulated in Transcription
  misc_feature: MA Experiment 108609 PARAMETER Experiment Name: At_100uM_ABA_cDNA_P Parameter: Timepoint (hr) Value: 24
  misc_feature: MA Experiment 108609 PARAMETER Experiment Name: At_100uM_ABA_cDNA_P Parameter: Tissue Value: Aerial
  misc_feature: MA Experiment 108609 PARAMETER Experiment Name: At_100uM_ABA_cDNA_P Parameter: Treatment Value: 100uM ABA vs. No Treatment
  misc_feature: MA Experiment ID: 20000070 Result: Up-regulated in Transcription
  misc_feature: MA Experiment 20000070 PARAMETER Experiment Name: At_100uM_ABA_Mutants_cDNA_P Parameter: Plant Line Value: CS24
  misc_feature: MA Experiment 20000070 PARAMETER Experiment Name: At_100uM_ABA_Mutants_cDNA_P Parameter: Timepoint (hr) Value: 6
  misc_feature: MA Experiment 20000070 PARAMETER Experiment Name: At_100uM_ABA_Mutants_cDNA_P Parameter: Tissue Value: Aerial
  misc_feature: MA Experiment 20000070 PARAMETER Experiment Name: At_100uM_ABA_Mutants_cDNA_P Parameter: Treatment Value: 100uM ABA vs. No Treatment
  misc_feature: MA Experiment ID: 20000072 Result: Up-regulated in Transcription
  misc_feature: MA Experiment 20000072 PARAMETER Experiment Name: At_100uM_ABA_Mutants_cDNA_P Parameter: Plant Line Value: CS8105
  misc_feature: MA Experiment 20000072 PARAMETER Experiment Name: At_100uM_ABA_Mutants_cDNA_P Parameter: Timepoint (hr) Value: 6
  misc_feature: MA Experiment 20000072 PARAMETER Experiment Name: At_100uM_ABA_Mutants_cDNA_P Parameter: Tissue Value: Aerial
  misc_feature: MA Experiment 20000072 PARAMETER Experiment Name: At_100uM_ABA_Mutants_cDNA_P Parameter: Treatment Value: 100uM ABA vs. No Treatment
  misc_feature: MA Experiment ID: 20000086 Result: Up-regulated in Transcription
  misc_feature: MA Experiment 20000086 PARAMETER Experiment Name: At_100uM_ABA_Mutants_cDNA_P Parameter: Plant Line Value: CS22
  misc_feature: MA Experiment 20000086 PARAMETER Experiment Name: At_100uM_ABA_Mutants_cDNA_P Parameter: Timepoint (hr) Value: 6
  misc_feature: MA Experiment 20000086 PARAMETER Experiment Name: At_100uM_ABA_Mutants_cDNA_P Parameter: Tissue Value: Aerial
  misc_feature: MA Experiment 20000086 PARAMETER Experiment Name: At_100uM_ABA_Mutants_cDNA_P Parameter: Treatment Value: 100uM ABA vs. No Treatment
  misc_feature: MA Experiment ID: 20000087 Result: Up-regulated in Transcription
  misc_feature: MA Experiment 20000087 PARAMETER Experiment Name: At_100uM_ABA_Mutants_cDNA_P Parameter: Plant Line Value: WS
  misc_feature: MA Experiment 20000087 PARAMETER Experiment Name: At_100uM_ABA_Mutants_cDNA_P Parameter: Timepoint (hr) Value: 6
  misc_feature: MA Experiment 20000087 PARAMETER Experiment Name: At_100uM_ABA_Mutants_cDNA_P Parameter: Tissue Value: Aerial
  misc_feature: MA Experiment 20000087 PARAMETER Experiment Name: At_100uM_ABA_Mutants_cDNA_P Parameter: Treatment Value: 100uM ABA vs. No Treatment
  misc_feature: MA Experiment ID: 20000088 Result: Up-regulated in Transcription
  misc_feature: MA Experiment 20000088 PARAMETER Experiment Name: At_100uM_ABA_Mutants_cDNA_P Parameter: Plant Line Value: Landsberg
  misc_feature: MA Experiment 20000088 PARAMETER Experiment Name: At_100uM_ABA_Mutants_cDNA_P Parameter: Timepoint (hr) Value: 6
  misc_feature: MA Experiment 20000088 PARAMETER Experiment Name: At_100uM_ABA_Mutants_cDNA_P Parameter: Tissue Value: Aerial
  misc_feature: MA Experiment 20000088 PARAMETER Experiment Name: At_100uM_ABA_Mutants_cDNA_P Parameter: Treatment Value: 100uM ABA vs. No Treatment
  misc_feature: MA Experiment ID: 20000111 Result: Down-regulated in Transcription
  misc_feature: MA Experiment 20000111 PARAMETER Experiment Name: At_42deg_Heat_cDNA_P Parameter: Temperature (deg C) Value: 42 vs. 22
  misc_feature: MA Experiment 20000111 PARAMETER Experiment Name: At_42deg_Heat_cDNA_P Parameter: Timepoint (hr) Value: 6
  misc_feature: MA Experiment 20000111 PARAMETER Experiment Name: At_42deg_Heat_cDNA_P Parameter: Tissue Value: Aerial
  misc_feature: MA Experiment ID: 20000113 Result: Down-regulated in Transcription
  misc_feature: MA Experiment 20000113 PARAMETER Experiment Name: At_42deg_Heat_cDNA_P Parameter: Temperature (deg C) Value: 42 vs. 22
  misc_feature: MA Experiment 20000113 PARAMETER Experiment Name: At_42deg_Heat_cDNA_P Parameter: Timepoint (hr) Value: 8
  misc_feature: MA Experiment 20000113 PARAMETER Experiment Name: At_42deg_Heat_cDNA_P Parameter: Tissue Value: Aerial
  misc_feature: MA Experiment ID: 20000117 Result: Up-regulated in Transcription
  misc_feature: MA Experiment 20000117 PARAMETER Experiment Name: At_100uM_ABA_Mutants_cDNA_P Parameter: Plant Line Value: Columbia
  misc_feature: MA Experiment 20000117 PARAMETER Experiment Name: At_100uM_ABA_Mutants_cDNA_P Parameter: Timepoint (hr) Value: 6
  misc_feature: MA Experiment 20000117 PARAMETER Experiment Name: At_100uM_ABA_Mutants_cDNA_P Parameter: Tissue Value: Aerial
  misc_feature: MA Experiment 20000117 PARAMETER Experiment Name: At_100uM_ABA_Mutants_cDNA_P Parameter: Treatment Value: 100uM ABA vs. No Treatment
  misc_feature: MA Experiment ID: 20000144 Result: Down-regulated in Transcription
  misc_feature: MA Experiment 20000144 PARAMETER Experiment Name: At_42deg_Heat_cDNA_P Parameter: Temperature (deg C) Value: 42 vs. 22
  misc_feature: MA Experiment 20000144 PARAMETER Experiment Name: At_42deg_Heat_cDNA_P Parameter: Timepoint (hr) Value: 1
  misc_feature: MA Experiment 20000144 PARAMETER Experiment Name: At_42deg_Heat_cDNA_P Parameter: Tissue Value: Aerial
  misc_feature: MA Experiment ID: 20000329 Result: Down-regulated in Transcription
  misc_feature: MA Experiment 20000329 PARAMETER Experiment Name: At_4deg_Cold_Sub_P Parameter: Age (day) Value: 14
  misc_feature: MA Experiment 20000329 PARAMETER Experiment Name: At_4deg_Cold_Sub_P Parameter: Organism Value: A. thaliana
  misc_feature: MA Experiment 20000329 PARAMETER Experiment Name: At_4deg_Cold_Sub_P Parameter: Plant Line Value: WS
  misc_feature: MA Experiment 20000329 PARAMETER Experiment Name: At_4deg_Cold_Sub_P Parameter: Temperature (deg C) Value: 4 vs. 22
  misc_feature: MA Experiment 20000329 PARAMETER Experiment Name: At_4deg_Cold_Sub_P Parameter: Timepoint (hr) Value: 6
  misc_feature: MA Experiment 20000329 PARAMETER Experiment Name: At_4deg_Cold_Sub_P Parameter: Tissue Value: Aerial
  misc_feature: MA Experiment ID: 20000347 Result: Up-regulated in Transcription
  misc_feature: MA Experiment 20000347 PARAMETER Experiment Name: At_2mM_SA_Sub_P Parameter: Age (day) Value: 14
  misc_feature: MA Experiment 20000347 PARAMETER Experiment Name: At_2mM_SA_Sub_P Parameter: Organism Value: A. thaliana
  misc_feature: MA Experiment 20000347 PARAMETER Experiment Name: At_2mM_SA_Sub_P Parameter: Plant Line Value: WS
  misc_feature: MA Experiment 20000347 PARAMETER Experiment Name: At_2mM_SA_Sub_P Parameter: Timepoint (hr) Value: 6
  misc_feature: MA Experiment 20000347 PARAMETER Experiment Name: At_2mM_SA_Sub_P Parameter: Tissue Value: Aerial
  misc_feature: MA Experiment 20000347 PARAMETER Experiment Name: At_2mM_SA_Sub_P Parameter: Treatment Value: 2mM SA vs. No Treatment
  misc_feature: MA Experiment ID: 20000355 Result: Down-regulated in Transcription
  misc_feature: MA Experiment 20000355 PARAMETER Experiment Name: At_Siliques_Sub_P Parameter: Age (day) Value: 21
  misc_feature: MA Experiment 20000355 PARAMETER Experiment Name: At_Siliques_Sub_P Parameter: Organism Value: A. thaliana
  misc_feature: MA Experiment 20000355 PARAMETER Experiment Name: At_Siliques_Sub_P Parameter: Plant Line Value: WS
  misc_feature: MA Experiment 20000355 PARAMETER Experiment Name: At_Siliques_Sub_P Parameter: Tissue Value: Less Than 5mm Siliques vs. Whole Plant
  misc_feature: MA Experiment ID: 20000440 Result: Down-regulated in Transcription
  misc_feature: MA Experiment 20000440 PARAMETER Experiment Name: At_Closed-Flower__Sub_P Parameter: Tissue Value: Closed Flower vs. Whole Plant
  misc_feature: MA Experiment ID: 20001807 Result: Down-regulated in Transcription
  misc_feature: MA Experiment 20001807 PARAMETER Experiment Name: At_50mM_NH4NO3_L-to-H_Sub_P Parameter: Timepoint (hr) Value: 6
  misc_feature: MA Experiment 20001807 PARAMETER Experiment Name: At_50mM_NH4NO3_L-to-H_Sub_P Parameter: Tissue Value: Leaf
  misc_feature: MA Experiment 20001807 PARAMETER Experiment Name: At_50mM_NH4NO3_L-to-H_Sub_P Parameter: Treatment Value: 50mM NH4NO3 vs 100mM Mannitol
cctctctcttaaaaacctcaactttcttctctcttctcaaaaacccttccctcttcgtctccaaacaacaacaaacacaacaacaacaaaaatcttacaagaagatcatttttagaaaccctattaggataaaatggattacgaggcatcaagaatcgtcgaaatggtagaagatgaagaacatatagatctaccaccaggattcagatttcaccctactgatgaagaactcataactcactacctcaaaccaaaggttttcaacactttcttctctgctactgccattggtgaagttgatctcaacaagattgagccttgggacttaccatggaaggctaagatgggagaaaaagaatggtatttcttctgtgtgagagaccggaaatacccgaccggtttaaggacaaaccgggcgacagaagccggttattggaaagccacaggaaaagacaaagagatattcaagggaaaatcacttgtgggtatgaagaaaactttggttttctataaaggaagagctcctaaaggagttaaaaccaattgggttatgcatgaatatcgtttagaaggcaaatattgtattgaaaatcttccccaaacagctaagaacgaatgggttatatgtcgtgttttccaaaaacgtgccgatggtacaaaggttccaatgtcaatgcttgatccacacattaaccgaatggaaccagccggtttaccttcgttaatggattgttctcaacgagactccttcaccggttcgtcgtctcacgtgacctgcttctccgaccaagaaaccgaagacaaaagacttgtccacgagtccaaagacggttttggttctctgttttactcggatcctctgtttttacaagacaattattcgctaatgaagctgttgcttgacggtcaagaaactcaattctccggcaaacctttcgacggtcgtgattcgtccggtacagaagaattggattgcgtttggaatttctgagttgtataagttatgttgtagacttgtagtagtcatgtgttcgtgtgtgtgaatgaatattcttgttacatttttttgtaaaaaaggagaaaaaaatatgctagaaagtcaattgcttttgttatgtagcattagtgttttttatgtactcaatagacttcctaattaaataaaaatcttaatttatttgc

SEQ ID NO: 40314 - protein, 285 aa, Arabidopsis thaliana
  peptide (1)..(285): Ceres Seq. ID no. 12328360
  misc_feature (20)..(146): Pfam Name: No apical meristem (NAM) protein Pfam Description: No apical meristem (NAM) protein
  misc_feature (18)..(246): Homolog of NCBI NO: 30682054 NR Description: NAM (no apical meristem)-related protein
  misc_feature (13)..(246): Homolog of NCBI NO: 30682048 NR Description: NAM (no apical meristem)-related protein
  misc_feature (18)..(224): Homolog of NCBI NO: 21537315 NR Description: NAM, no apical meristem,-like protein
  misc_feature (13)..(224): Homolog of NCBI NO: 15240252 NR Description: NAM, no apical meristem, - like protein
  misc_feature (1)..(283): Homolog of NCBI NO: 15228570 NR Description: hypothetical protein
  misc_feature (11)..(285): Homolog of NCBI NO: 21536866 NR Description: NAM / CUC2-like protein [Arabidopsis thaliana]
  misc_feature (1)..(285): Homolog of NCBI NO: 15241819 NR Description: NAM / CUC2 - like protein
MDYEASRIVEMVEDEEHIDLPPGFRFHPTDEELITHYLKPKVFNTFFSATAIGEVDLNKIEPWDLPWKAKMGEKEWYFFCVRDRKYPTGLRTNRATEAGYWKATGKDKEIFKGKSLVGMKKTLVFYKGRAPKGVKTNWVMHEYRLEGKYCIENLPQTAKNEWVICRVFQKRADGTKVPMSMLDPHINRMEPAGLPSLMDCSQRDSFTGSSSHVTCFSDQETEDKRLVHESKDGFGSLFYSDPLFLQDNYSLMKLLLDGQETQFSGKPFDGRDSSGTEELDCVWNF

SEQ ID NO: 40315 - protein, 275 aa, Arabidopsis thaliana
  peptide (1)..(275): Ceres Seq. ID no. 12328361
  misc_feature (10)..(136): Pfam Name: No apical meristem (NAM) protein Pfam Description: No apical meristem (NAM) protein
  misc_feature (8)..(236): Homolog of NCBI NO: 30682054 NR Description: NAM (no apical meristem)-related protein
  misc_feature (3)..(236): Homolog of NCBI NO: 30682048 NR Description: NAM (no apical meristem)-related protein
  misc_feature (8)..(214): Homolog of NCBI NO: 21537315 NR Description: NAM, no apical meristem,-like protein
  misc_feature (3)..(214): Homolog of NCBI NO: 15240252 NR Description: NAM, no apical meristem, - like protein
  misc_feature (1)..(273): Homolog of NCBI NO: 15228570 NR Description: hypothetical protein
  misc_feature (1)..(275): Homolog of NCBI NO: 21536866 NR Description: NAM / CUC2-like protein [Arabidopsis thaliana]
  misc_feature (1)..(275): Homolog of NCBI NO: 15241819 NR Description: NAM / CUC2 - like protein
MVEDEEHIDLPPGFRFHPTDEELITHYLKPKVFNTFFSATAIGEVDLNKIEPWDLPWKAKMGEKEWYFFCVRDRKYPTGLRTNRATEAGYWKATGKDKEIFKGKSLVGMKKTLVFYKGRAPKGVKTNWVMHEYRLEGKYCIENLPQTAKNEWVICRVFQKRADGTKVPMSMLDPHINRMEPAGLPSLMDCSQRDSFTGSSSHVTCFSDQETEDKRLVHESKDGFGSLFYSDPLFLQDNYSLMKLLLDGQETQFSGKPFDGRDSSGTEELDCVWNF

SEQ ID NO: 40316 - protein, 215 aa, Arabidopsis thaliana
  peptide (1)..(215): Ceres Seq. ID no. 12328362
  misc_feature (1)..(76): Pfam Name: No apical meristem (NAM) protein Pfam Description: No apical meristem (NAM) protein
  misc_feature (1)..(176): Homolog of NCBI NO: 30682054 NR Description: NAM (no apical meristem)-related protein
  misc_feature (1)..(176): Homolog of NCBI NO: 30682048 NR Description: NAM (no apical meristem)-related protein
  misc_feature (1)..(154): Homolog of NCBI NO: 21537315 NR Description: NAM, no apical meristem,-like protein
  misc_feature (1)..(154): Homolog of NCBI NO: 15240252 NR Description: NAM, no apical meristem, - like protein
  misc_feature (1)..(213): Homolog of NCBI NO: 15228570 NR Description: hypothetical protein
  misc_feature (1)..(215): Homolog of NCBI NO: 21536866 NR Description: NAM / CUC2-like protein [Arabidopsis thaliana]
  misc_feature (1)..(215): Homolog of NCBI NO: 15241819 NR Description: NAM / CUC2 - like protein
MGEKEWYFFCVRDRKYPTGLRTNRATEAGYWKATGKDKEIFKGKSLVGMKKTLVFYKGRAPKGVKTNWVMHEYRLEGKYCIENLPQTAKNEWVICRVFQKRADGTKVPMSMLDPHINRMEPAGLPSLMDCSQRDSFTGSSSHVTCFSDQETEDKRLVHESKDGFGSLFYSDPLFLQDNYSLMKLLLDGQETQFSGKPFDGRDSSGTEELDCVWNF

SEQ ID NO: 40317 - DNA, 1930 bp, Arabidopsis thaliana
  misc_feature (1)..(1930): Ceres Seq. ID no. 12701320
  misc_feature: MA Experiment ID: 108561 Result: Up-regulated in Transcription
  misc_feature: MA Experiment 108561 PARAMETER Experiment Name: At_100uM_ABA_cDNA_P Parameter: Timepoint (hr) Value: 6
  misc_feature: MA Experiment 108561 PARAMETER Experiment Name: At_100uM_ABA_cDNA_P Parameter: Tissue Value: Aerial
  misc_feature: MA Experiment 108561 PARAMETER Experiment Name: At_100uM_ABA_cDNA_P Parameter: Treatment Value: 100uM ABA vs. No Treatment
  misc_feature: MA Experiment ID: 108573 Result: Up-regulated in Transcription
  misc_feature: MA Experiment 108573 PARAMETER Experiment Name: At_Drought_cDNA_P Parameter: Timepoint (hr) Value: 6
  misc_feature: MA Experiment 108573 PARAMETER Experiment Name: At_Drought_cDNA_P Parameter: Tissue Value: Aerial
  misc_feature: MA Experiment 108573 PARAMETER Experiment Name: At_Drought_cDNA_P Parameter: Treatment Value: Drought vs. No Drought
  misc_feature: MA Experiment ID: 20000093 Result: Up-regulated in Transcription
  misc_feature: MA Experiment 20000093 PARAMETER Experiment Name: At_42deg_Heat_cDNA_P Parameter: Temperature (deg C) Value: 42 vs. 22
  misc_feature: MA Experiment 20000093 PARAMETER Experiment Name: At_42deg_Heat_cDNA_P Parameter: Timepoint (hr) Value: 0.5
  misc_feature: MA Experiment 20000093 PARAMETER Experiment Name: At_42deg_Heat_cDNA_P Parameter: Tissue Value: Aerial
  misc_feature: MA Experiment ID: 20000113 Result: Up-regulated in Transcription
  misc_feature: MA Experiment 20000113 PARAMETER Experiment Name: At_42deg_Heat_cDNA_P Parameter: Temperature (deg C) Value: 42 vs. 22
  misc_feature: MA Experiment 20000113 PARAMETER Experiment Name: At_42deg_Heat_cDNA_P Parameter: Timepoint (hr) Value: 8
  misc_feature: MA Experiment 20000113 PARAMETER Experiment Name: At_42deg_Heat_cDNA_P Parameter: Tissue Value: Aerial
  misc_feature: MA Experiment ID: 20000234 Result: Up-regulated in Transcription
  misc_feature: MA Experiment 20000234 PARAMETER Experiment Name: At_Siliques_P Parameter: Age (day) Value: 21
  misc_feature: MA Experiment 20000234 PARAMETER Experiment Name: At_Siliques_P Parameter: Organism Value: A. thaliana
  misc_feature: MA Experiment 20000234 PARAMETER Experiment Name: At_Siliques_P Parameter: Plant Line Value: WS
  misc_feature: MA Experiment 20000234 PARAMETER Experiment Name: At_Siliques_P Parameter: Tissue Value: Less Than 5mm Siliques vs. Whole Plant
  misc_feature: MA Experiment ID: 20000265 Result: Up-regulated in Transcription
  misc_feature: MA Experiment 20000265 PARAMETER Experiment Name: At_Open_Flower_P Parameter: Age (day) Value: 21
  misc_feature: MA Experiment 20000265 PARAMETER Experiment Name: At_Open_Flower_P Parameter: Plant Line Value: WS
  misc_feature: MA Experiment 20000265 PARAMETER Experiment Name: At_Open_Flower_P Parameter: Tissue Value: Closed Flower vs. Whole Plant
  misc_feature: MA Experiment ID: 20000286 Result: Up-regulated in Transcription
  misc_feature: MA Experiment 20000286 PARAMETER Experiment Name: At_Open_Flower_P Parameter: Age (day) Value: 21
  misc_feature: MA Experiment 20000286 PARAMETER Experiment Name: At_Open_Flower_P Parameter: Plant Line Value: WS
  misc_feature: MA Experiment 20000286 PARAMETER Experiment Name: At_Open_Flower_P Parameter: Tissue Value: Half Open vs. Whole Plant
  misc_feature: MA Experiment ID: 20000437 Result: Up-regulated in Transcription
  misc_feature: MA Experiment 20000437 PARAMETER Experiment Name: At_Drought_P Parameter: Age (day) Value: 8
  misc_feature: MA Experiment 20000437 PARAMETER Experiment Name: At_Drought_P Parameter: Organism Value: A. thaliana
  misc_feature: MA Experiment 20000437 PARAMETER Experiment Name: At_Drought_P Parameter: Plant Line Value: WS
  misc_feature: MA Experiment 20000437 PARAMETER Experiment Name: At_Drought_P Parameter: Timepoint (hr) Value: 24
  misc_feature: MA Experiment 20000437 PARAMETER Experiment Name: At_Drought_P Parameter: Tissue Value: Whole Plant
  misc_feature: MA Experiment 20000437 PARAMETER Experiment Name: At_Drought_P Parameter: Treatment Value: Drought vs. No Drought
  misc_feature: MA Experiment ID: 20000794 Result: Up-regulated in Transcription
  misc_feature: MA Experiment 20000794 PARAMETER Experiment Name: At_Petals_P Parameter: Age (day) Value: 23-25 days
  misc_feature: MA Experiment 20000794 PARAMETER Experiment Name: At_Petals_P Parameter: Plant Line Value: WS
  misc_feature: MA Experiment 20000794 PARAMETER Experiment Name: At_Petals_P Parameter: Tissue Value: Petals vs. Whole plant
  misc_feature: MA Experiment ID: 20001757 Result: Down-regulated in Transcription
  misc_feature: MA Experiment 20001757 PARAMETER Experiment Name: At_50mM_NH4NO3_L-to-H_P Parameter: Timepoint (hr) Value: 6
  misc_feature: MA Experiment 20001757 PARAMETER Experiment Name: At_50mM_NH4NO3_L-to-H_P Parameter: Tissue Value: Leaf
  misc_feature: MA Experiment 20001757 PARAMETER Experiment Name: At_50mM_NH4NO3_L-to-H_P Parameter: Treatment Value: 50mM NH4NO3 vs 100mM Mannitol
  misc_feature: MA Experiment ID: 20001904 Result: Up-regulated in Transcription
  misc_feature: MA Experiment 20001904 PARAMETER Experiment Name: At_Drought_Reproduction_P Parameter: Age (day) Value: 37
  misc_feature: MA Experiment 20001904 PARAMETER Experiment Name: At_Drought_Reproduction_P Parameter: Organism Value: A. thaliana
  misc_feature: MA Experiment 20001904 PARAMETER Experiment Name: At_Drought_Reproduction_P Parameter: Plant Line Value: WS
  misc_feature: MA Experiment 20001904 PARAMETER Experiment Name: At_Drought_Reproduction_P Parameter: Timepoint (day) Value: 7
  misc_feature: MA Experiment 20001904 PARAMETER Experiment Name: At_Drought_Reproduction_P Parameter: Tissue Value: Rosettes
  misc_feature: MA Experiment 20001904 PARAMETER Experiment Name: At_Drought_Reproduction_P Parameter: Treatment Value: Drought vs. No Drought
cctacgctattctctcctctcctcttcttcctcgatcccacccagcttctacttcgttttccaattctgggtttcgattcttccaatctaaccatctcttctcttcacagtctggttcactcatggaagtgtttaaagcagctttttcagaagcgtctaattcttgtgataggattgcgattaaagccgatggaaagagttactcttatggccagctaacatcgtctgctttgaggatatctaaattgttcttaaaagatgatacgacaaatggaggtcaagaaactaagaagtatgaagggtttggtagtctaaaaggagctagaatcggaattgtggcaaaaccttcagctgagtttgttgcaggagtcctggggacatggtttagcggtggtgtagcggttccacttgcactcagctatcctgaggctgaactcttacatgtcatgaatgattcggatatatctctgttattgagcacagaggaccatagtgaaactatgaaaaccatcgcagcaaagagtggtgctcgatttcatcttattcctcctgttgttaactcaacttcggaaactgttgcttgcaatcagtttcaggatgacagttttgaagcagaaggaaagtttctagatgatccagcattgatcgtctacactagtggtacaactggtaagccaaaaggagttgttcatactcacaacagcatcaattcccaggttagaatgctcactgaagcttgggagtacacatctgctgatcattttctccactgcctcccactacatcatgttcatgggcttttcaacgctttatttgctcctctttacgcacggtctttggtggagtttttgcccaaatttagtgttagtggaatctggcgtagatggcgtgaatcatatccggtgaatgatgaaaaaaccaacgactccataactgtatttactggagttccaaccatgtacactcggttgatacaaggttatgaagcaatggataaagagatgcaggactcgagcgcttttgctgcacggaagcttcgcctaatgatgtctggctcctctgctctccctcgacctgtcatgcatcaatgggaaagtatcacaggtcatcgtcttttggaaagatatggcatgactgagtttgtaatggcaatgtcaaaccccttacggggtgcacgaaatgcaggtactgtcggcaaaccgcttcctggtgtggaggctaaaataaaagaagatgaaaatgacgcaaatggagtgggtgagatatgtgttaaaagcccatctttgttcaaggagtactggaatcttccagaggtgactaaagaatcatttacggaagatggatacttcaagacgggagatgctggaagagtggatgaggatggatattacgtgattctaggacgtaatagcgctgacattatgaaggttggaggatacaagttatctgccttagaaatcgaatcaacccttctcgagcaccctactgttgcagaatgttgcgtgttggggttaacagacaacgactatggagaagccgtgactgcgataattatagcagagagtgcagcaaagaagagaagagaggatgagtcaaaacctgtaataaccttagaagaactgtgcggttgggctaaagacaagcttgctccttacaagctaccaacaagattgctgatatgggagagcttgcctcgcaacgccatgggaaaggtgaacaaaaaagagctaaagaaatctctggaaaatcaagaataaagacaaccatggatttcattgctactccttgttcttttgattatatgacacgtatgcataaaatgtaatttccttctttcctgtatcatgtactttgactcaataatgtcaagaatcaataccaaattaactatttgagaagtaaatctttgttatatactatttctttgttt

SEQ ID NO: 40318 - protein, 584 aa, Arabidopsis thaliana
  peptide (1)..(584): Ceres Seq. ID no. 12701321
  misc_feature (105)..(501): Pfam Name: AMP-binding enzyme Pfam Description: AMP-binding enzyme
  misc_feature (41)..(576): Homolog of NCBI NO: 40747505 NR Description: hypothetical protein AN0562.2 [Aspergillus
  misc_feature (213)..(573): Homolog of NCBI NO: 23127962 NR Description: hypothetical protein [Nostoc punctiforme]
  misc_feature (419)..(576): Homolog of NCBI NO: 28372537 NR Description: hypothetical protein LOC197322 [Homo sapiens]
  misc_feature (48)..(408): Homolog of NCBI NO: 28372537 NR Description: hypothetical protein LOC197322 [Homo sapiens]
  misc_feature (435)..(580): Homolog of NCBI NO: 34909750 NR Description: hypothetical protein~similar to Arabidopsis
  misc_feature (37)..(239): Homolog of NCBI NO: 34909750 NR Description: hypothetical protein~similar to Arabidopsis
  misc_feature (41)..(282): Homolog of NCBI NO: 15215700 NR Description: AT3g16170/MSL1_21 [Arabidopsis thaliana]
  misc_feature (41)..(584): Homolog of NCBI NO: 21536867 NR Description: putative long-chain acyl-CoA synthetase
  misc_feature (41)..(584): Homolog of NCBI NO: 18401035 NR Description: putative long-chain acyl-CoA synthetase
  misc_feature (1)..(584): Homolog of NCBI NO: 9294464 NR Description: long-chain-fatty-acid-CoA ligase-like protein
YAILSSPLLPRSHPASTSFSNSGFRFFQSNHLFSSQSGSLMEVFKAAFSEASNSCDRIAIKADGKSYSYGQLTSSALRISKLFLKDDTTNGGQETKKYEGFGSLKGARIGIVAKPSAEFVAGVLGTWFSGGVAVPLALSYPEAELLHVMNDSDISLLLSTEDHSETMKTIAAKSGARFHLIPPVVNSTSETVACNQFQDDSFEAEGKFLDDPALIVYTSGTTGKPKGVVHTHNSINSQVRMLTEAWEYTSADHFLHCLPLHHVHGLFNALFAPLYARSLVEFLPKFSVSGIWRRWRESYPVNDEKTNDSITVFTGVPTMYTRLIQGYEAMDKEMQDSSAFAARKLRLMMSGSSALPRPVMHQWESITGHRLLERYGMTEFVMAMSNPLRGARNAGTVGKPLPGVEAKIKEDENDANGVGEICVKSPSLFKEYWNLPEVTKESFTEDGYFKTGDAGRVDEDGYYVILGRNSADIMKVGGYKLSALEIESTLLEHPTVAECCVLGLTDNDYGEAVTAIIIAESAAKKRREDESKPVITLEELCGWAKDKLAPYKLPTRLLIWESLPRNAMGKVNKKELKKSLENQE

SEQ ID NO: 40319 - protein, 544 aa, Arabidopsis thaliana
  peptide (1)..(544): Ceres Seq. ID no. 12701322
  misc_feature (65)..(461): Pfam Name: AMP-binding enzyme Pfam Description: AMP-binding enzyme
  misc_feature (1)..(536): Homolog of NCBI NO: 40747505 NR Description: hypothetical protein AN0562.2 [Aspergillus
  misc_feature (173)..(533): Homolog of NCBI NO: 23127962 NR Description: hypothetical protein [Nostoc punctiforme]
  misc_feature (379)..(536): Homolog of NCBI NO: 28372537 NR Description: hypothetical protein LOC197322 [Homo sapiens]
  misc_feature (8)..(368): Homolog of NCBI NO: 28372537 NR Description: hypothetical protein LOC197322 [Homo sapiens]
  misc_feature (395)..(540): Homolog of NCBI NO: 34909750 NR Description: hypothetical protein~similar to Arabidopsis
  misc_feature (1)..(199): Homolog of NCBI NO: 34909750 NR Description: hypothetical protein~similar to Arabidopsis
  misc_feature (1)..(242): Homolog of NCBI NO: 15215700 NR Description: AT3g16170/MSL1_21 [Arabidopsis thaliana]
  misc_feature (1)..(544): Homolog of NCBI NO: 21536867 NR Description: putative long-chain acyl-CoA synthetase
  misc_feature (1)..(544): Homolog of NCBI NO: 18401035 NR Description: putative long-chain acyl-CoA synthetase
  misc_feature (1)..(544): Homolog of NCBI NO: 9294464 NR Description: long-chain-fatty-acid-CoA ligase-like protein
MEVFKAAFSEASNSCDRIAIKADGKSYSYGQLTSSALRISKLFLKDDTTNGGQETKKYEGFGSLKGARIGIVAKPSAEFVAGVLGTWFSGGVAVPLALSYPEAELLHVMNDSDISLLLSTEDHSETMKTIAAKSGARFHLIPPVVNSTSETVACNQFQDDSFEAEGKFLDDPALIVYTSGTTGKPKGVVHTHNSINSQVRMLTEAWEYTSADHFLHCLPLHHVHGLFNALFAPLYARSLVEFLPKFSVSGIWRRWRESYPVNDEKTNDSITVFTGVPTMYTRLIQGYEAMDKEMQDSSAFAARKLRLMMSGSSALPRPVMHQWESITGHRLLERYGMTEFVMAMSNPLRGARNAGTVGKPLPGVEAKIKEDENDANGVGEICVKSPSLFKEYWNLPEVTKESFTEDGYFKTGDAGRVDEDGYYVILGRNSADIMKVGGYKLSALEIESTLLEHPTVAECCVLGLTDNDYGEAVTAIIIAESAAKKRREDESKPVITLEELCGWAKDKLAPYKLPTRLLIWESLPRNAMGKVNKKELKKSLENQE

SEQ ID NO: 40320 - protein, 436 aa, Arabidopsis thaliana
  peptide (1)..(436): Ceres Seq. ID no. 12701323
  misc_feature (1)..(353): Pfam Name: AMP-binding enzyme Pfam Description: AMP-binding enzyme
  misc_feature (1)..(428): Homolog of NCBI NO: 40747505 NR Description: hypothetical protein AN0562.2 [Aspergillus
  misc_feature (65)..(425): Homolog of NCBI NO: 23127962 NR Description: hypothetical protein [Nostoc punctiforme]
  misc_feature (271)..(428): Homolog of NCBI NO: 28372537 NR Description: hypothetical protein LOC197322 [Homo sapiens]
  misc_feature (1)..(260): Homolog of NCBI NO: 28372537 NR Description: hypothetical protein LOC197322 [Homo sapiens]
  misc_feature (287)..(432): Homolog of NCBI NO: 34909750 NR Description: hypothetical protein~similar to Arabidopsis
  misc_feature (1)..(91): Homolog of NCBI NO: 34909750 NR Description: hypothetical protein~similar to Arabidopsis
  misc_feature (1)..(134): Homolog of NCBI NO: 15215700 NR Description: AT3g16170/MSL1_21 [Arabidopsis thaliana]
  misc_feature (1)..(436): Homolog of NCBI NO: 21536867 NR Description: putative long-chain acyl-CoA synthetase
  misc_feature (1)..(436): Homolog of NCBI NO: 18401035 NR Description: putative long-chain acyl-CoA synthetase
  misc_feature (1)..(436): Homolog of NCBI NO: 9294464 NR Description: long-chain-fatty-acid-CoA ligase-like protein
MNDSDISLLLSTEDHSETMKTIAAKSGARFHLIPPVVNSTSETVACNQFQDDSFEAEGKFLDDPALIVYTSGTTGKPKGVVHTHNSINSQVRMLTEAWEYTSADHFLHCLPLHHVHGLFNALFAPLYARSLVEFLPKFSVSGIWRRWRESYPVNDEKTNDSITVFTGVPTMYTRLIQGYEAMDKEMQDSSAFAARKLRLMMSGSSALPRPVMHQWESITGHRLLERYGMTEFVMAMSNPLRGARNAGTVGKPLPGVEAKIKEDENDANGVGEICVKSPSLFKEYWNLPEVTKESFTEDGYFKTGDAGRVDEDGYYVILGRNSADIMKVGGYKLSALEIESTLLEHPTVAECCVLGLTDNDYGEAVTAIIIAESAAKKRREDESKPVITLEELCGWAKDKLAPYKLPTRLLIWESLPRNAMGKVNKKELKKSLENQE

SEQ ID NO: 40321 - DNA, 1801 bp, Arabidopsis thaliana; identical to SEQ ID NO: 40047
  misc_feature (1)..(1801): Ceres Seq. ID no. 12579671
  misc_feature: MA Experiment ID: 108434 Result: Down-regulated in Transcription
  misc_feature: MA Experiment 108434 PARAMETER Experiment Name: At_Root_Tips_cDNA_P Parameter: Tissue Value: Root Tips
  misc_feature: MA Experiment ID: 108573 Result: Up-regulated in Transcription
  misc_feature: MA Experiment 108573 PARAMETER Experiment Name: At_Drought_cDNA_P Parameter: Timepoint (hr) Value: 6
  misc_feature: MA Experiment 108573 PARAMETER Experiment Name: At_Drought_cDNA_P Parameter: Tissue Value: Aerial
  misc_feature: MA Experiment 108573 PARAMETER Experiment Name: At_Drought_cDNA_P Parameter: Treatment Value: Drought vs. No Drought
  misc_feature: MA Experiment ID: 108609 Result: Up-regulated in Transcription
  misc_feature: MA Experiment 108609 PARAMETER Experiment Name: At_100uM_ABA_cDNA_P Parameter: Timepoint (hr) Value: 24
  misc_feature: MA Experiment 108609 PARAMETER Experiment Name: At_100uM_ABA_cDNA_P Parameter: Tissue Value: Aerial
  misc_feature: MA Experiment 108609 PARAMETER Experiment Name: At_100uM_ABA_cDNA_P Parameter: Treatment Value: 100uM ABA vs. No Treatment
  misc_feature: MA Experiment ID: 20000070 Result: Up-regulated in Transcription
  misc_feature: MA Experiment 20000070 PARAMETER Experiment Name: At_100uM_ABA_Mutants_cDNA_P Parameter: Plant Line Value: CS24
  misc_feature: MA Experiment 20000070 PARAMETER Experiment Name: At_100uM_ABA_Mutants_cDNA_P Parameter: Timepoint (hr) Value: 6
  misc_feature: MA Experiment 20000070 PARAMETER Experiment Name: At_100uM_ABA_Mutants_cDNA_P Parameter: Tissue Value: Aerial
  misc_feature: MA Experiment 20000070 PARAMETER Experiment Name: At_100uM_ABA_Mutants_cDNA_P Parameter: Treatment Value: 100uM ABA vs. No Treatment
  misc_feature: MA Experiment ID: 20000071 Result: Up-regulated in Transcription
  misc_feature: MA Experiment 20000071 PARAMETER Experiment Name: At_100uM_ABA_Mutants_cDNA_P Parameter: Plant Line Value: CS8104
  misc_feature: MA Experiment 20000071 PARAMETER Experiment Name: At_100uM_ABA_Mutants_cDNA_P Parameter: Timepoint (hr) Value: 6
  misc_feature: MA Experiment 20000071 PARAMETER Experiment Name: At_100uM_ABA_Mutants_cDNA_P Parameter: Tissue Value: Aerial
  misc_feature: MA Experiment 20000071 PARAMETER Experiment Name: At_100uM_ABA_Mutants_cDNA_P Parameter: Treatment Value: 100uM ABA vs. No Treatment
  misc_feature: MA Experiment ID: 20000072 Result: Up-regulated in Transcription
  misc_feature: MA Experiment 20000072 PARAMETER Experiment Name: At_100uM_ABA_Mutants_cDNA_P Parameter: Plant Line Value: CS8105
  misc_feature: MA Experiment 20000072 PARAMETER Experiment Name: At_100uM_ABA_Mutants_cDNA_P Parameter: Timepoint (hr) Value: 6
  misc_feature: MA Experiment 20000072 PARAMETER Experiment Name: At_100uM_ABA_Mutants_cDNA_P Parameter: Tissue Value: Aerial
  misc_feature: MA Experiment 20000072 PARAMETER Experiment Name: At_100uM_ABA_Mutants_cDNA_P Parameter: Treatment Value: 100uM ABA vs. No Treatment
  misc_feature: MA Experiment ID: 20000086 Result: Up-regulated in Transcription
  misc_feature: MA Experiment 20000086 PARAMETER Experiment Name: At_100uM_ABA_Mutants_cDNA_P Parameter: Plant Line Value: CS22
  misc_feature: MA Experiment 20000086 PARAMETER Experiment Name: At_100uM_ABA_Mutants_cDNA_P Parameter: Timepoint (hr) Value: 6
  misc_feature: MA Experiment 20000086 PARAMETER Experiment Name: At_100uM_ABA_Mutants_cDNA_P Parameter: Tissue Value: Aerial
  misc_feature: MA Experiment 20000086 PARAMETER Experiment Name: At_100uM_ABA_Mutants_cDNA_P Parameter: Treatment Value: 100uM ABA vs. No Treatment
  misc_feature: MA Experiment ID: 20000088 Result: Up-regulated in Transcription
  misc_feature: MA Experiment 20000088 PARAMETER Experiment Name: At_100uM_ABA_Mutants_cDNA_P Parameter: Plant Line Value: Landsberg
  misc_feature: MA Experiment 20000088 PARAMETER Experiment Name: At_100uM_ABA_Mutants_cDNA_P Parameter: Timepoint (hr) Value: 6
  misc_feature: MA Experiment 20000088 PARAMETER Experiment Name: At_100uM_ABA_Mutants_cDNA_P Parameter: Tissue Value: Aerial
  misc_feature: MA Experiment 20000088 PARAMETER Experiment Name: At_100uM_ABA_Mutants_cDNA_P Parameter: Treatment Value: 100uM ABA vs. No Treatment
  misc_feature: MA Experiment ID: 20000111 Result: Down-regulated in Transcription
  misc_feature: MA Experiment 20000111 PARAMETER Experiment Name: At_42deg_Heat_cDNA_P Parameter: Temperature (deg C) Value: 42 vs. 22
  misc_feature: MA Experiment 20000111 PARAMETER Experiment Name: At_42deg_Heat_cDNA_P Parameter: Timepoint (hr) Value: 6
  misc_feature: MA Experiment 20000111 PARAMETER Experiment Name: At_42deg_Heat_cDNA_P Parameter: Tissue Value: Aerial
  misc_feature: MA Experiment ID: 20000113 Result: Down-regulated in Transcription
  misc_feature: MA Experiment 20000113 PARAMETER Experiment Name: At_42deg_Heat_cDNA_P Parameter: Temperature (deg C) Value: 42 vs. 22
  misc_feature: MA Experiment 20000113 PARAMETER Experiment Name: At_42deg_Heat_cDNA_P Parameter: Timepoint (hr) Value: 8
  misc_feature: MA Experiment 20000113 PARAMETER Experiment Name: At_42deg_Heat_cDNA_P Parameter: Tissue Value: Aerial
  misc_feature: MA Experiment ID: 20000117 Result: Up-regulated in Transcription
  misc_feature: MA Experiment 20000117 PARAMETER Experiment Name: At_100uM_ABA_Mutants_cDNA_P Parameter: Plant Line Value: Columbia
  misc_feature: MA Experiment 20000117 PARAMETER Experiment Name: At_100uM_ABA_Mutants_cDNA_P Parameter: Timepoint (hr) Value: 6
  misc_feature: MA Experiment 20000117 PARAMETER Experiment Name: At_100uM_ABA_Mutants_cDNA_P Parameter: Tissue Value: Aerial
  misc_feature: MA Experiment 20000117 PARAMETER Experiment Name: At_100uM_ABA_Mutants_cDNA_P Parameter: Treatment Value: 100uM ABA vs. No Treatment
  misc_feature: MA Experiment ID: 20000179 Result: Up-regulated in Transcription
  misc_feature: MA Experiment 20000179 PARAMETER Experiment Name: At_Germinating_Seeds_P Parameter: Age (hr) Value: 6 vs. 0
  misc_feature: MA Experiment 20000179 PARAMETER Experiment Name: At_Germinating_Seeds_P Parameter: Tissue Value: Germinating Seeds
  misc_feature: MA Experiment ID: 20000436 Result: Up-regulated in Transcription
  misc_feature: MA Experiment 20000436 PARAMETER Experiment Name: At_Drought_P Parameter: Age (day) Value: 7
  misc_feature: MA Experiment 20000436 PARAMETER Experiment Name: At_Drought_P Parameter: Organism Value: A. thaliana
  misc_feature: MA Experiment 20000436 PARAMETER Experiment Name: At_Drought_P Parameter: Plant Line Value: WS
  misc_feature: MA Experiment 20000436 PARAMETER Experiment Name: At_Drought_P Parameter: Timepoint (hr) Value: 12
  misc_feature: MA Experiment 20000436 PARAMETER Experiment Name: At_Drought_P Parameter: Tissue Value: Whole Plant
  misc_feature: MA Experiment 20000436 PARAMETER Experiment Name: At_Drought_P Parameter: Treatment Value: Drought vs. No Drought
  misc_feature: MA Experiment ID: 20000437 Result: Up-regulated in Transcription
  misc_feature: MA Experiment 20000437 PARAMETER Experiment Name: At_Drought_P Parameter: Age (day) Value: 8
  misc_feature: MA Experiment 20000437 PARAMETER Experiment Name: At_Drought_P Parameter: Organism Value: A. thaliana
  misc_feature: MA Experiment 20000437 PARAMETER Experiment Name: At_Drought_P Parameter: Plant Line Value: WS
  misc_feature: MA Experiment 20000437 PARAMETER Experiment Name: At_Drought_P Parameter: Timepoint (hr) Value: 24
  misc_feature: MA Experiment 20000437 PARAMETER Experiment Name: At_Drought_P Parameter: Tissue Value: Whole Plant
  misc_feature: MA Experiment 20000437 PARAMETER Experiment Name: At_Drought_P Parameter: Treatment Value: Drought vs. No Drought
  misc_feature: MA Experiment ID: 20000453 Result: Up-regulated in Transcription
  misc_feature: MA Experiment 20000453 PARAMETER Experiment Name: At_100uM_ABA_P Parameter: Age (day) Value: 15
  misc_feature: MA Experiment 20000453 PARAMETER Experiment Name: At_100uM_ABA_P Parameter: Organism Value: A. thaliana
  misc_feature: MA Experiment 20000453 PARAMETER Experiment Name: At_100uM_ABA_P Parameter: Plant Line Value: WS
  misc_feature: MA Experiment 20000453 PARAMETER Experiment Name: At_100uM_ABA_P Parameter: Timepoint (hr) Value: 24
  misc_feature: MA Experiment 20000453 PARAMETER Experiment Name: At_100uM_ABA_P Parameter: Tissue Value: Aerial
  misc_feature: MA Experiment 20000453 PARAMETER Experiment Name: At_100uM_ABA_P Parameter: Treatment Value: 100uM ABA vs. No Treatment
  misc_feature: MA Experiment ID: 20000794 Result: Up-regulated in Transcription
  misc_feature: MA Experiment 20000794 PARAMETER Experiment Name: At_Petals_P Parameter: Age (day) Value: 23-25 days
  misc_feature: MA Experiment 20000794 PARAMETER Experiment Name: At_Petals_P Parameter: Plant Line Value: WS
  misc_feature: MA Experiment 20000794 PARAMETER Experiment Name: At_Petals_P Parameter: Tissue Value: Petals vs. Whole plant
  misc_feature: MA Experiment ID: 20001560 Result: Down-regulated in Transcription
  misc_feature: MA Experiment 20001560 PARAMETER Experiment Name: At_Drought_Soil_Dry_P Parameter: Age (day) Value: 28
  misc_feature: MA Experiment 20001560 PARAMETER Experiment Name: At_Drought_Soil_Dry_P Parameter: Organism Value: A. thaliana
  misc_feature: MA Experiment 20001560 PARAMETER Experiment Name: At_Drought_Soil_Dry_P Parameter: Plant Line Value: WS
  misc_feature: MA Experiment 20001560 PARAMETER Experiment Name: At_Drought_Soil_Dry_P Parameter: Post Timepoint (hr) Value: None
  misc_feature: MA Experiment 20001560 PARAMETER Experiment Name: At_Drought_Soil_Dry_P Parameter: Post-Treatment Value: None
  misc_feature: MA Experiment 20001560 PARAMETER Experiment Name: At_Drought_Soil_Dry_P Parameter: Timepoint (day) Value: 14
  misc_feature: MA Experiment 20001560 PARAMETER Experiment Name: At_Drought_Soil_Dry_P Parameter: Treatment Value: Drought vs. No Drought
  misc_feature: MA Experiment ID: 20001905 Result: Down-regulated in Transcription
  misc_feature: MA Experiment 20001905 PARAMETER Experiment Name: At_Drought_Reproduction_P Parameter: Age (day) Value: 40
  misc_feature: MA Experiment 20001905 PARAMETER Experiment Name: At_Drought_Reproduction_P Parameter: Organism Value: A. thaliana
  misc_feature: MA Experiment 20001905 PARAMETER Experiment Name: At_Drought_Reproduction_P Parameter: Plant Line Value: WS
  misc_feature: MA Experiment 20001905 PARAMETER Experiment Name: At_Drought_Reproduction_P Parameter: Timepoint (day) Value: 10
  misc_feature: MA Experiment 20001905 PARAMETER Experiment Name: At_Drought_Reproduction_P Parameter: Tissue Value: Rosettes
  misc_feature: MA Experiment 20001905 PARAMETER Experiment Name: At_Drought_Reproduction_P Parameter: Treatment Value: Drought vs. No Drought

SEQ ID NO: 40322 - protein, 256 aa, Arabidopsis thaliana; identical to SEQ ID NO: 40048
  peptide (1)..(256): Ceres Seq. ID no. 12579672
  misc_feature (1)..(60): Pfam Name: Glycosyl hydrolase family 79, N-terminal domain Pfam Description: Glycosyl hydrolase family 79, N-terminal domain
  misc_feature (1)..(60): Pfam Name: Glycosyl hydrolase family 79, N-terminal domain Pfam Description: Glycosyl hydrolase family 79, N-terminal domain
  misc_feature (1)..(256): Homolog of NCBI NO: 10177640 NR Description: contains similarity to heparanase~gene_id:MGG23.2
  misc_feature (1)..(256): Homolog of NCBI NO: 30692670 NR Description: expressed protein [Arabidopsis thaliana]
  misc_feature (1)..(256): Homolog of NCBI NO: 24413987 NR Description: contains ESTs
  misc_feature (189)..(256): Homolog of NCBI NO: 34393590 NR Description: putative beta-glucuronidase precursor
  misc_feature (1)..(152): Homolog of NCBI NO: 34393590 NR Description: putative beta-glucuronidase precursor
  misc_feature (1)..(256): Homolog of NCBI NO: 10177640 NR Description: contains similarity to heparanase~gene_id:MGG23.2
  misc_feature (1)..(256): Homolog of NCBI NO: 24413987 NR Description: contains ESTs
  misc_feature (1)..(152): Homolog of NCBI NO: 34393590 NR Description: putative beta-glucuronidase precursor
  misc_feature (1)..(256): Homolog of NCBI NO: 10176717 NR Description: contains similarity to heparanase~gene_id:MXM12.7
  misc_feature (1)..(256): Homolog of NCBI NO: 15240869 NR Description: glycosyl hydrolase family 79
  misc_feature (1)..(256): Homolog of NCBI NO: 22327999 NR Description: glycosyl hydrolase family 79
  misc_feature (1)..(256): Homolog of NCBI NO: 9757846 NR Description: contains similarity to heparanase~gene_id:MFB13.2
  misc_feature (1)..(255): Homolog of NCBI NO: 38174813 NR Description: putative heparanase [Hordeum vulgare subsp.
  misc_feature (189)..(256): Homolog of NCBI NO: 34393590 NR Description: putative beta-glucuronidase precursor
  misc_feature (1)..(256): Homolog of NCBI NO: 30692670 NR Description: expressed protein [Arabidopsis thaliana]
  misc_feature (1)..(255): Homolog of NCBI NO: 38174813 NR Description: putative heparanase [Hordeum vulgare subsp.
  misc_feature (1)..(256): Homolog of NCBI NO: 9757846 NR Description: contains similarity to heparanase~gene_id:MFB13.2
  misc_feature (1)..(256): Homolog of NCBI NO: 22327999 NR Description: glycosyl hydrolase family 79
  misc_feature (1)..(256): Homolog of NCBI NO: 15240869 NR Description: glycosyl hydrolase family 79
  misc_feature (1)..(256): Homolog of NCBI NO: 10176717 NR Description: contains similarity to heparanase~gene_id:MXM12.7

SEQ ID NO: 40323 - protein, 247 aa, Arabidopsis thaliana; identical to SEQ ID NO: 40049
  peptide (1)..(247): Ceres Seq. ID no. 12579673
  misc_feature (27)..(241): Pfam Name: Glycosyl hydrolase family 79, N-terminal domain Pfam Description: Glycosyl hydrolase family 79, N-terminal domain
  misc_feature (27)..(241): Pfam Name: Glycosyl hydrolase family 79, N-terminal domain Pfam Description: Glycosyl hydrolase family 79, N-terminal domain
  misc_feature (1)..(233): Homolog of NCBI NO: 10177640 NR Description: contains similarity to heparanase~gene_id:MGG23.2
  misc_feature (1)..(233): Homolog of NCBI NO: 30692670 NR Description: expressed protein [Arabidopsis thaliana]
  misc_feature (11)..(75): Homolog of NCBI NO: 24413987 NR Description: contains ESTs
  misc_feature (76)..(241): Homolog of NCBI NO: 24413987 NR Description: contains ESTs
  misc_feature (7)..(231): Homolog of NCBI NO: 34393590 NR Description: putative beta-glucuronidase precursor
  misc_feature (1)..(233): Homolog of NCBI NO: 10177640 NR Description: contains similarity to heparanase~gene_id:MGG23.2
  misc_feature (11)..(75): Homolog of NCBI NO: 24413987 NR Description: contains ESTs
  misc_feature (7)..(231): Homolog of NCBI NO: 34393590 NR Description: putative beta-glucuronidase precursor
  misc_feature (1)..(241): Homolog of NCBI NO: 10176717 NR Description: contains similarity to heparanase~gene_id:MXM12.7
  misc_feature (23)..(241): Homolog of NCBI NO: 15240869 NR Description: glycosyl hydrolase family 79
  misc_feature (1)..(241): Homolog of NCBI NO: 22327999 NR Description: glycosyl hydrolase family 79
  misc_feature (27)..(241): Homolog of NCBI NO: 9757846 NR Description: contains similarity to heparanase~gene_id:MFB13.2
  misc_feature (4)..(241): Homolog of NCBI NO: 38174813 NR Description: putative heparanase [Hordeum vulgare subsp.
  misc_feature (76)..(241): Homolog of NCBI NO: 24413987 NR Description: contains ESTs
  misc_feature (1)..(233): Homolog of NCBI NO: 30692670 NR Description: expressed protein [Arabidopsis thaliana]
  misc_feature (4)..(241): Homolog of NCBI NO: 38174813 NR Description: putative heparanase [Hordeum vulgare subsp.
  misc_feature (27)..(241): Homolog of NCBI NO: 9757846 NR Description: contains similarity to heparanase~gene_id:MFB13.2
  misc_feature (1)..(241): Homolog of NCBI NO: 22327999 NR Description: glycosyl hydrolase family 79
  misc_feature (23)..(241): Homolog of NCBI NO: 15240869 NR Description: glycosyl hydrolase family 79
  misc_feature (1)..(241): Homolog of NCBI NO: 10176717 NR Description: contains similarity to heparanase~gene_id:MXM12.7

SEQ ID NO: 40324 - protein, 225 aa, Arabidopsis thaliana; identical to SEQ ID NO: 40050
  peptide (1)..(225): Ceres Seq. ID no. 12579674
  misc_feature (5)..(219): Pfam Name: Glycosyl hydrolase family 79, N-terminal domain Pfam Description: Glycosyl hydrolase family 79, N-terminal domain
  misc_feature (5)..(219): Pfam Name: Glycosyl hydrolase family 79, N-terminal domain Pfam Description: Glycosyl hydrolase family 79, N-terminal domain
  misc_feature (1)..(211): Homolog of NCBI NO: 10177640 NR Description: contains similarity to heparanase~gene_id:MGG23.2
  misc_feature (1)..(211): Homolog of NCBI NO: 30692670 NR Description: expressed protein [Arabidopsis thaliana]
  misc_feature (1)..(53): Homolog of NCBI NO: 24413987 NR Description: contains ESTs
  misc_feature (54)..(219): Homolog of NCBI NO: 24413987 NR Description: contains ESTs
  misc_feature (1)..(209): Homolog of NCBI NO: 34393590 NR Description: putative beta-glucuronidase precursor
  misc_feature (1)..(211): Homolog of NCBI NO: 10177640 NR Description: contains similarity to heparanase~gene_id:MGG23.2
  misc_feature (1)..(53): Homolog of NCBI NO: 24413987 NR Description: contains ESTs
  misc_feature (1)..(209): Homolog of NCBI NO: 34393590 NR Description: putative beta-glucuronidase precursor
  misc_feature (1)..(219): Homolog of NCBI NO: 10176717 NR Description: contains similarity to heparanase~gene_id:MXM12.7
  misc_feature (1)..(219): Homolog of NCBI NO: 15240869 NR Description: glycosyl hydrolase family 79
  misc_feature (1)..(219): Homolog of NCBI NO: 22327999 NR Description: glycosyl hydrolase family 79
  misc_feature (5)..(219): Homolog of NCBI NO: 9757846 NR Description: contains similarity to heparanase~gene_id:MFB13.2
  misc_feature (1)..(219): Homolog of NCBI NO: 38174813 NR Description: putative heparanase [Hordeum vulgare subsp.
  misc_feature (54)..(219): Homolog of NCBI NO: 24413987 NR Description: contains ESTs
  misc_feature (1)..(211): Homolog of NCBI NO: 30692670 NR Description: expressed protein [Arabidopsis thaliana]
  misc_feature (1)..(219): Homolog of NCBI NO: 38174813 NR Description: putative heparanase [Hordeum vulgare subsp.
  misc_feature (5)..(219): Homolog of NCBI NO: 9757846 NR Description: contains similarity to heparanase~gene_id:MFB13.2
  misc_feature (1)..(219): Homolog of NCBI NO: 22327999 NR Description: glycosyl hydrolase family 79
  misc_feature (1)..(219): Homolog of NCBI NO: 15240869 NR Description: glycosyl hydrolase family 79
  misc_feature (1)..(219): Homolog of NCBI NO: 10176717 NR Description: contains similarity to heparanase~gene_id:MXM12.7

SEQ ID NO: 40325 - DNA, 1489 bp, Arabidopsis thaliana
  misc_feature (1)..(1489): Ceres Seq. ID no. 13491706
  misc_feature: MA Experiment ID: 108461 Result: Down-regulated in Transcription
  misc_feature: MA Experiment 108461 PARAMETER Experiment Name: At_Germinating_Seeds_cDNA_P Parameter: Age (day) Value: 1 vs. 0
  misc_feature: MA Experiment 108461 PARAMETER Experiment Name: At_Germinating_Seeds_cDNA_P Parameter: Tissue Value: Germinating Seeds
  misc_feature: MA Experiment ID: 108462 Result: Down-regulated in Transcription
  misc_feature: MA Experiment 108462 PARAMETER Experiment Name: At_Germinating_Seeds_cDNA_P Parameter: Age (day) Value: 2 vs. 0
  misc_feature: MA Experiment 108462 PARAMETER Experiment Name: At_Germinating_Seeds_cDNA_P Parameter: Tissue Value: Germinating Seeds
  misc_feature: MA Experiment ID: 108463 Result: Down-regulated in Transcription
  misc_feature: MA Experiment 108463 PARAMETER Experiment Name: At_Germinating_Seeds_cDNA_P Parameter: Age (day) Value: 3 vs. 0
  misc_feature: MA Experiment 108463 PARAMETER Experiment Name: At_Germinating_Seeds_cDNA_P Parameter: Tissue Value: Germinating Seeds
  misc_feature: MA Experiment ID: 108464 Result: Down-regulated in Transcription
  misc_feature: MA Experiment 108464 PARAMETER Experiment Name: At_Germinating_Seeds_cDNA_P Parameter: Age (day) Value: 4 vs. 0
  misc_feature: MA Experiment 108464 PARAMETER Experiment Name: At_Germinating_Seeds_cDNA_P Parameter: Tissue Value: Germinating Seeds
agaagccgcaaagaaagcggcggtggaagctgagacatgcaacaatggcgttcgtgtcattctcttcttctccttctctctctcttacactcgcgattcaacattaatttcgttcttcttcatacacatatatagatagtgtcttcattttccaaccatgaccggtagagaaatcctccacaagatgaaggaatccgtcaaggagaaagttgggcttggtgcatctgcttcatctgcagattcagggaaaggtaagagcaagatgttgaagcagatcacacatggttttcatttggtgaaagggaaagcttttcacgagatggaagattatgtggttgccaaattcaaggaagttgatgataatgagcttggtctgtttgctatcttcgatggccatcttagccacgagattccggactacttgtgctcccatttgtttgagaacatcttgaaagagccgaatttctggcaagaacctgagaaagcgataaagaaagcttactatataacggatacaacgattctagacaaggcagatgatttgggaaaaggaggttctactgctgtgactgcgatattgatcaattgccagaagctggtggttgctaatgttggtgactctcgagctgttatttgccaaaatggtgttgcgaagccactctcagttgatcatgagccgaacatggagaaggatgaaatcgagaacagaggaggattcgtttctaactttcctggggatgttcctcgagttgatggtcaactggctgtggcaagggcatttggtgataagagtttaaagatgcatttgagttcagaaccatatgttacggtggagataattgatgatgatgcagaatttcttatcctagcaagtgatggactatggaaggtcatgtcaaaccaagaagccgttgactcaatcaagggaataaaagatgcgaaggctgcagcaaagcaccttgcagaggaggctgttgcaaggaaaagctcagacgatatctcagtcgtcgtcgtgaaatttcagtgacattagctttcggagaagagacctctgcagactgcagatccctttcatcgcaagtcttactggtcacttaaacaagtaaagagtctttgagattggaccagctaaagaaagaatcacaagtatgggcgtttcctctgtaagatgcaattatcacctctatgttactcttttctttttttccttttcaactctgtgattatctctaagtctgtttctttctgggaataaaattttaacagtgaaaaactttctttgcttctccttttttttgttgtaaatgttttttgttatacaatagggcagtgtaagaaagatgaaatagttagaattagtgggtagtgaaagagacaggacataaaaggtttcacatgccaaactgtactcatgtctcgagtctatgacctaagcttttgggattgttatttacaataacagaataaataagtgttgtcccttttttcc

SEQ ID NO: 40326 - protein, 289 aa, Arabidopsis thaliana
  peptide (1)..(289): Ceres Seq. ID no. 13491707
  misc_feature (40)..(281): Pfam Name: Protein phosphatase 2C Pfam Description: Protein phosphatase 2C
  misc_feature (13)..(289): Homolog of NCBI NO: 21537096 NR Description: protein phosphatase type 2C, putative
  misc_feature (13)..(289): Homolog of NCBI NO: 18395099 NR Description: protein phosphatase 2C (PP2C), putative
  misc_feature (36)..(288): Homolog of NCBI NO: 7488280 NR Description: protein phosphatase 2C homolog F20O9.80 -
  misc_feature (1)..(289): Homolog of NCBI NO: 25411985 NR Description: probable protein phosphatase 2C [imported] -
  misc_feature (1)..(289): Homolog of NCBI NO: 18399423 NR Description: protein phosphatase 2C (PP2C), putative
  misc_feature (1)..(288): Homolog of NCBI NO: 23307574 NR Description: putative protein phosphatase 2C homolog
  misc_feature (1)..(288): Homolog of NCBI NO: 18417190 NR Description: protein phosphatase 2C (PP2C), putative
  misc_feature (1)..(289): Homolog of NCBI NO: 4336436 NR Description: protein phosphatase type 2C [Lotus japonicus]
  misc_feature (1)..(289): Homolog of NCBI NO: 21539551 NR Description: putative protein phosphatase type 2C [Arabidopsis
  misc_feature (1)..(289): Homolog of NCBI NO: 15232538 NR Description: protein phosphatase 2C (PP2C), putative
MTGREILHKMKESVKEKVGLGASASSADSGKGKSKMLKQITHGFHLVKGKAFHEMEDYVVAKFKEVDDNELGLFAIFDGHLSHEIPDYLCSHLFENILKEPNFWQEPEKAIKKAYYITDTTILDKADDLGKGGSTAVTAILINCQKLVVANVGDSRAVICQNGVAKPLSVDHEPNMEKDEIENRGGFVSNFPGDVPRVDGQLAVARAFGDKSLKMHLSSEPYVTVEIIDDDAEFLILASDGLWKVMSNQEAVDSIKGIKDAKAAAKHLAEEAVARKSSDDISVVVVKFQ

SEQ ID NO: 40327 - protein, 280 aa, Arabidopsis thaliana
  peptide (1)..(280): Ceres Seq. ID no. 13491708
  misc_feature (31)..(272): Pfam Name: Protein phosphatase 2C Pfam Description: Protein phosphatase 2C
  misc_feature (4)..(280): Homolog of NCBI NO: 21537096 NR Description: protein phosphatase type 2C, putative
  misc_feature (4)..(280): Homolog of NCBI NO: 18395099 NR Description: protein phosphatase 2C (PP2C), putative
  misc_feature (27)..(279): Homolog of NCBI NO: 7488280 NR Description: protein phosphatase 2C homolog F20O9.80 -
  misc_feature (1)..(280): Homolog of NCBI NO: 25411985 NR Description: probable protein phosphatase 2C [imported] -
  misc_feature (1)..(280): Homolog of NCBI NO: 18399423 NR Description: protein phosphatase 2C (PP2C), putative
  misc_feature (1)..(279): Homolog of NCBI NO: 23307574 NR Description: putative protein phosphatase 2C homolog
  misc_feature (1)..(279): Homolog of NCBI NO: 18417190 NR Description: protein phosphatase 2C (PP2C), putative
  misc_feature (1)..(280): Homolog of NCBI NO: 4336436 NR Description: protein phosphatase type 2C [Lotus japonicus]
  misc_feature (1)..(280): Homolog of NCBI NO: 21539551 NR Description: putative protein phosphatase type 2C [Arabidopsis
  misc_feature (1)..(280): Homolog of NCBI NO: 15232538 NR Description: protein phosphatase 2C (PP2C), putative
MKESVKEKVGLGASASSADSGKGKSKMLKQITHGFHLVKGKAFHEMEDYVVAKFKEVDDNELGLFAIFDGHLSHEIPDYLCSHLFENILKEPNFWQEPEKAIKKAYYITDTTILDKADDLGKGGSTAVTAILINCQKLVVANVGDSRAVICQNGVAKPLSVDHEPNMEKDEIENRGGFVSNFPGDVPRVDGQLAVARAFGDKSLKMHLSSEPYVTVEIIDDDAEFLILASDGLWKVMSNQEAVDSIKGIKDAKAAAKHLAEEAVARKSSDDISVVVVKFQ

SEQ ID NO: 40328 - protein, 254 aa, Arabidopsis thaliana
  peptide (1)..(254): Ceres Seq. ID no. 13491709
  misc_feature (5)..(246): Pfam Name: Protein phosphatase 2C Pfam Description: Protein phosphatase 2C
  misc_feature (1)..(254): Homolog of NCBI NO: 21537096 NR Description: protein phosphatase type 2C, putative
  misc_feature (1)..(254): Homolog of NCBI NO: 18395099 NR Description: protein phosphatase 2C (PP2C), putative
  misc_feature (1)..(253): Homolog of NCBI NO: 7488280 NR Description: protein phosphatase 2C homolog F20O9.80 -
  misc_feature (1)..(254): Homolog of NCBI NO: 25411985 NR Description: probable protein phosphatase 2C [imported] -
  misc_feature (1)..(254): Homolog of NCBI NO: 18399423 NR Description: protein phosphatase 2C (PP2C), putative
  misc_feature (1)..(253): Homolog of NCBI NO: 23307574 NR Description: putative protein phosphatase 2C homolog
  misc_feature (1)..(253): Homolog of NCBI NO: 18417190 NR Description: protein phosphatase 2C (PP2C), putative
  misc_feature (1)..(254): Homolog of NCBI NO: 4336436 NR Description: protein phosphatase type 2C [Lotus japonicus]
  misc_feature (1)..(254): Homolog of NCBI NO: 21539551 NR Description: putative protein phosphatase type 2C [Arabidopsis
  misc_feature (1)..(254): Homolog of NCBI NO: 15232538 NR Description: protein phosphatase 2C (PP2C), putative
MLKQITHGFHLVKGKAFHEMEDYVVAKFKEVDDNELGLFAIFDGHLSHEIPDYLCSHLFENILKEPNFWQEPEKAIKKAYYITDTTILDKADDLGKGGSTAVTAILINCQKLVVANVGDSRAVICQNGVAKPLSVDHEPNMEKDEIENRGGFVSNFPGDVPRVDGQLAVARAFGDKSLKMHLSSEPYVTVEIIDDDAEFLILASDGLWKVMSNQEAVDSIKGIKDAKAAAKHLAEEAVARKSSDDISVVVVKFQ

SEQ ID NO: 40329 - DNA, 1762 bp, Arabidopsis thaliana
  misc_feature (1)..(1762): Ceres Seq. ID no. 13576748
  misc_feature: MA Experiment ID: 108434 Result: Up-regulated in Transcription
  misc_feature: MA Experiment 108434 PARAMETER Experiment Name: At_Root_Tips_cDNA_P Parameter: Tissue Value: Root Tips
  misc_feature: MA Experiment ID: 108462 Result: Down-regulated in Transcription
  misc_feature: MA Experiment 108462 PARAMETER Experiment Name: At_Germinating_Seeds_cDNA_P Parameter: Age (day) Value: 2 vs. 0
  misc_feature: MA Experiment 108462 PARAMETER Experiment Name: At_Germinating_Seeds_cDNA_P Parameter: Tissue Value: Germinating Seeds
  misc_feature: MA Experiment ID: 108463 Result: Down-regulated in Transcription
  misc_feature: MA Experiment 108463 PARAMETER Experiment Name: At_Germinating_Seeds_cDNA_P Parameter: Age (day) Value: 3 vs. 0
  misc_feature: MA Experiment 108463 PARAMETER Experiment Name: At_Germinating_Seeds_cDNA_P Parameter: Tissue Value: Germinating Seeds
  misc_feature: MA Experiment ID: 108464 Result: Down-regulated in Transcription
  misc_feature: MA Experiment 108464 PARAMETER Experiment Name: At_Germinating_Seeds_cDNA_P Parameter: Age (day) Value: 4 vs. 0
  misc_feature: MA Experiment 108464 PARAMETER Experiment Name: At_Germinating_Seeds_cDNA_P Parameter: Tissue Value: Germinating Seeds
  misc_feature: MA Experiment ID: 20000087 Result: Down-regulated in Transcription
  misc_feature: MA Experiment 20000087 PARAMETER Experiment Name: At_100uM_ABA_Mutants_cDNA_P Parameter: Plant Line Value: WS
  misc_feature: MA Experiment 20000087 PARAMETER Experiment Name: At_100uM_ABA_Mutants_cDNA_P Parameter: Timepoint (hr) Value: 6
  misc_feature: MA Experiment 20000087 PARAMETER Experiment Name: At_100uM_ABA_Mutants_cDNA_P Parameter: Tissue Value: Aerial
  misc_feature: MA Experiment 20000087 PARAMETER Experiment Name: At_100uM_ABA_Mutants_cDNA_P Parameter: Treatment Value: 100uM ABA vs. No Treatment
  misc_feature: MA Experiment ID: 20000173 Result: Down-regulated in Transcription
  misc_feature: MA Experiment 20000173 PARAMETER Experiment Name: At_42deg_Heat_P Parameter: Age (day) Value: 14
  misc_feature: MA Experiment 20000173 PARAMETER Experiment Name: At_42deg_Heat_P Parameter: Organism Value: A. thaliana
  misc_feature: MA Experiment 20000173 PARAMETER Experiment Name: At_42deg_Heat_P Parameter: Plant Line Value: WS
  misc_feature: MA Experiment 20000173 PARAMETER Experiment Name: At_42deg_Heat_P Parameter: Temperature (deg C) Value: 42 vs. 22
  misc_feature: MA Experiment 20000173 PARAMETER Experiment Name: At_42deg_Heat_P Parameter: Timepoint (hr) Value: 6
  misc_feature: MA Experiment 20000173 PARAMETER Experiment Name: At_42deg_Heat_P Parameter: Tissue Value: Aerial
  misc_feature: MA Experiment ID: 20000185 Result: Up-regulated in Transcription
  misc_feature: MA Experiment 20000185 PARAMETER Experiment Name: At_Roots__P Parameter: Age (day) Value: 7 vs. 21
  misc_feature: MA Experiment 20000185 PARAMETER Experiment Name: At_Roots__P Parameter: Organism Value: A. thaliana
  misc_feature: MA Experiment 20000185 PARAMETER Experiment Name: At_Roots__P Parameter: Tissue Value: Roots vs. Whole Plant
aagtccaagcccgaaaacaagggttcttgctccgacacgacaacaaatccagattttgagcttagggaaacttgagaaggagaaaaaaatgtcgaacatagacatagaagggatcttgaaggagctacctaatgatgggaggatcccaaagacgaagatagtttgcacattaggaccagcttctcgcactgtttccatgatcgaaaagcttttgaaagccggtatgaatgtggctcgcttcaacttctcacatggaagccatgaataccatcaagagacactcgacaacctccgctctgctatgcataataccggcattctcgctgctgtcatgcttgatactaaggggcctgagattcgtactggtttcttgaaagatgggaaccctatacaactgaaggaaggtcaagagattactataaccactgattatgacattcaaggagacgaatcaacgatatccatgagctataaaaagctgcctttggatgtgaagcccggaaacaccatactctgtgcagatggaagcataagtctagctgtcttgtcatgtgatcctgagtctggaactgttaggtgccggtgtgaaaactcggcgatgcttggtgaaagaaagaatgtgaatcttcctggcgttgttgttgatcttcccactttgacagataaggatattgaagatattctcggttggggtgttccgaacagcattgatatgattgctctttcgtttgtccgtaaaggttcggatcttgttaatgtccgcaaggttcttggatctcatgctaaaagcataatgctcatgtcaaaggttgagaaccaggaaggtgtgattaactttgatgagatcttgcgtgaaacagatgcgttcatggttgcccgtggtgatctcgggatggagattccgatagagaagatcttcttggctcaaaagttgatgatctacaagtgtaaccttgcgggtaaaccggtggtcacagccactcagatgctggagtcaatgatcaaatcacctcggccaacccgagctgaagccacagatgttgcaaatgctgttcttgatggtactgactgtgtgatgcttagcggtgagagtgcagcaggagcttatccggaaatagctgtgaaagtcatggctaagatctgcattgaagccgaatcctcgcttgattacaacacaatctttaaagagatgatccgagcaactccacttccaatgagcccactcgagagtcttgcatcatccgctgtacggactgctaacaaagcgagggcaaaactcatcattgtgttgacacgtggaggttcaactgctaatctcgtggctaaatacagaccggctgttccgattctgtcagtggttgtcccggttatgaccactgattcctttgactggtcttgtagtgacgagtcacctgcaaggcatagtctgatatacagaggtctaatccctatgttggctgaaggatctgcaaaggcaacagatagtgaagccaccgaagttatcattgaagctgctctgaagtcggctactcagagaggactgtgcaaccgtggtgatgcaatcgtggcgctgcaccgtattggagctgcctcagttattaagatctgtgtggttaagtgagattacagacttctttcaatacctcaaatcttggattgttggtaatcgtaactgagattttgctttgtagcatgaaataaagaaaacaggtcacaatagttcctgaaactctgttacttttaagatatctctctctctttt

SEQ ID NO: 40330 - protein, 539 aa, Arabidopsis thaliana
  peptide (1)..(539): Ceres Seq. ID no. 13576749
  misc_feature (408)..(539): Pfam Name: Pyruvate kinase, alpha/beta domain Pfam Description: Pyruvate kinase, alpha/beta domain
  misc_feature (30)..(539): Homolog of NCBI NO: 15242863 NR Description: pyruvate kinase, putative [Arabidopsis thaliana]
  misc_feature (30)..(539): Homolog of NCBI NO: 15242313 NR Description: pyruvate kinase, putative [Arabidopsis thaliana]
SPSPKTRVLAPTRQQIQILSLGKLEKEKKMSNIDIEGILKELPNDGRIPKTKIVCTLGPASRTVSMIEKLLKAGMNVARFNFSHGSHEYHQETLDNLRSAMHNTGILAAVMLDTKGPEIRTGFLKDGNPIQLKEGQEITITTDYDIQGDESTISMSYKKLPLDVKPGNTILCADGSISLAVLSCDPESGTVRCRCENSAMLGERKNVNLPGVVVDLPTLTDKDIEDILGWGVPNSIDMIALSFVRKGSDLVNVRKVLGSHAKSIMLMSKVENQEGVINFDEILRETDAFMVARGDLGMEIPIEKIFLAQKLMIYKCNLAGKPVVTATQMLESMIKSPRPTRAEATDVANAVLDGTDCVMLSGESAAGAYPEIAVKVMAKICIEAESSLDYNTIFKEMIRATPLPMSPLESLASSAVRTANKARAKLIIVLTRGGSTANLVAKYRPAVPILSVVVPVMTTDSFDWSCSDESPARHSLIYRGLIPMLAEGSAKATDSEATEVIIEAALKSATQRGLCNRGDAIVALHRIGAASVIKICVVK

SEQ ID NO: 40331 - protein, 510 aa, Arabidopsis thaliana
  peptide (1)..(510): Ceres Seq. ID no. 13576750
  misc_feature (379)..(510): Pfam Name: Pyruvate kinase, alpha/beta domain Pfam Description: Pyruvate kinase, alpha/beta domain
  misc_feature (1)..(510): Homolog of NCBI NO: 15242863 NR Description: pyruvate kinase, putative [Arabidopsis thaliana]
  misc_feature (1)..(510): Homolog of NCBI NO: 15242313 NR Description: pyruvate kinase, putative [Arabidopsis thaliana]
MSNIDIEGILKELPNDGRIPKTKIVCTLGPASRTVSMIEKLLKAGMNVARFNFSHGSHEYHQETLDNLRSAMHNTGILAAVMLDTKGPEIRTGFLKDGNPIQLKEGQEITITTDYDIQGDESTISMSYKKLPLDVKPGNTILCADGSISLAVLSCDPESGTVRCRCENSAMLGERKNVNLPGVVVDLPTLTDKDIEDILGWGVPNSIDMIALSFVRKGSDLVNVRKVLGSHAKSIMLMSKVENQEGVINFDEILRETDAFMVARGDLGMEIPIEKIFLAQKLMIYKCNLAGKPVVTATQMLESMIKSPRPTRAEATDVANAVLDGTDCVMLSGESAAGAYPEIAVKVMAKICIEAESSLDYNTIFKEMIRATPLPMSPLESLASSAVRTANKARAKLIIVLTRGGSTANLVAKYRPAVPILSVVVPVMTTDSFDWSCSDESPARHSLIYRGLIPMLAEGSAKATDSEATEVIIEAALKSATQRGLCNRGDAIVALHRIGAASVIKICVVK

SEQ ID NO: 40332 - protein, 474 aa, Arabidopsis thaliana
  peptide (1)..(474): Ceres Seq. ID no. 13576751
  misc_feature (343)..(474): Pfam Name: Pyruvate kinase, alpha/beta domain Pfam Description: Pyruvate kinase, alpha/beta domain
  misc_feature (1)..(474): Homolog of NCBI NO: 15242863 NR Description: pyruvate kinase, putative [Arabidopsis thaliana]
  misc_feature (1)..(474): Homolog of NCBI NO: 15242313 NR Description: pyruvate kinase, putative [Arabidopsis thaliana]
MIEKLLKAGMNVARFNFSHGSHEYHQETLDNLRSAMHNTGILAAVMLDTKGPEIRTGFLKDGNPIQLKEGQEITITTDYDIQGDESTISMSYKKLPLDVKPGNTILCADGSISLAVLSCDPESGTVRCRCENSAMLGERKNVNLPGVVVDLPTLTDKDIEDILGWGVPNSIDMIALSFVRKGSDLVNVRKVLGSHAKSIMLMSKVENQEGVINFDEILRETDAFMVARGDLGMEIPIEKIFLAQKLMIYKCNLAGKPVVTATQMLESMIKSPRPTRAEATDVANAVLDGTDCVMLSGESAAGAYPEIAVKVMAKICIEAESSLDYNTIFKEMIRATPLPMSPLESLASSAVRTANKARAKLIIVLTRGGSTANLVAKYRPAVPILSVVVPVMTTDSFDWSCSDESPARHSLIYRGLIPMLAEGSAKATDSEATEVIIEAALKSATQRGLCNRGDAIVALHRIGAASVIKICVVK

SEQ ID NO: 40333 - DNA, 1561 bp, Arabidopsis thaliana; identical to SEQ ID NO: 24591
  misc_feature (1)..(1561): Ceres Seq. ID no. 13491567
  misc_feature: MA Experiment ID: 108462 Result: Down-regulated in Transcription
  misc_feature: MA Experiment 108462 PARAMETER Experiment Name: At_Germinating_Seeds_cDNA_P Parameter: Age (day) Value: 2 vs. 0
  misc_feature: MA Experiment 108462 PARAMETER Experiment Name: At_Germinating_Seeds_cDNA_P Parameter: Tissue Value: Germinating Seeds
  misc_feature: MA Experiment ID: 108463 Result: Down-regulated in Transcription
  misc_feature: MA Experiment 108463 PARAMETER Experiment Name: At_Germinating_Seeds_cDNA_P Parameter: Age (day) Value: 3 vs. 0
  misc_feature: MA Experiment 108463 PARAMETER Experiment Name: At_Germinating_Seeds_cDNA_P Parameter: Tissue Value: Germinating Seeds
  misc_feature: MA Experiment ID: 108464 Result: Down-regulated in Transcription
  misc_feature: MA Experiment 108464 PARAMETER Experiment Name: At_Germinating_Seeds_cDNA_P Parameter: Age (day) Value: 4 vs. 0
  misc_feature: MA Experiment 108464 PARAMETER Experiment Name: At_Germinating_Seeds_cDNA_P Parameter: Tissue Value: Germinating Seeds
  misc_feature: MA Experiment ID: 20001560 Result: Up-regulated in Transcription
  misc_feature: MA Experiment 20001560 PARAMETER Experiment Name: At_Drought_Soil_Dry_P Parameter: Age (day) Value: 28
  misc_feature: MA Experiment 20001560 PARAMETER Experiment Name: At_Drought_Soil_Dry_P Parameter: Organism Value: A. thaliana
  misc_feature: MA Experiment 20001560 PARAMETER Experiment Name: At_Drought_Soil_Dry_P Parameter: Plant Line Value: WS
  misc_feature: MA Experiment 20001560 PARAMETER Experiment Name: At_Drought_Soil_Dry_P Parameter: Post Timepoint (hr) Value: None
  misc_feature: MA Experiment 20001560 PARAMETER Experiment Name: At_Drought_Soil_Dry_P Parameter: Post-Treatment Value: None
  misc_feature: MA Experiment 20001560 PARAMETER Experiment Name: At_Drought_Soil_Dry_P Parameter: Timepoint (day) Value: 14
  misc_feature: MA Experiment 20001560 PARAMETER Experiment Name: At_Drought_Soil_Dry_P Parameter: Treatment Value: Drought vs. No Drought

SEQ ID NO: 40334 - protein, 466 aa, Arabidopsis thaliana; identical to SEQ ID NO: 24592
  peptide (1)..(466): Ceres Seq. ID no. 13491568
  misc_feature (312)..(341): Pfam Name: Zn-finger in Ran binding protein and others Pfam Description: Zn-finger in Ran binding protein and others
  misc_feature (312)..(341): Pfam Name: Zn-finger in Ran binding protein and others Pfam Description: Zn-finger in Ran binding protein and others
  misc_feature (30)..(63): Homolog of NCBI NO: 15293147 NR Description: unknown protein [Arabidopsis thaliana]
  misc_feature (48)..(305): Homolog of NCBI NO: 18405190 NR Description: expressed protein [Arabidopsis thaliana]
  misc_feature (48)..(305): Homolog of NCBI NO: 15293147 NR Description: unknown protein [Arabidopsis thaliana]
  misc_feature (31)..(73): Homolog of NCBI NO: 13702809 NR Description: putative ARP protein [Oryza sativa]
  misc_feature (72)..(401): Homolog of NCBI NO: 13702809 NR Description: putative ARP protein [Oryza sativa]
  misc_feature (1)..(305): Homolog of NCBI NO: 25372841 NR Description: hypothetical protein F5A18.17 [imported] -
  misc_feature (30)..(63): Homolog of NCBI NO: 15293147 NR Description: unknown protein [Arabidopsis thaliana]
  misc_feature (271)..(466): Homolog of NCBI NO: 25372841 NR Description: hypothetical protein F5A18.17 [imported] -
  misc_feature (29)..(451): Homolog of NCBI NO: 13324787 NR Description: hypothetical protein [Oryza sativa]
  misc_feature (72)..(401): Homolog of NCBI NO: 13702809 NR Description: putative ARP protein [Oryza sativa]
  misc_feature (31)..(73): Homolog of NCBI NO: 13702809 NR Description: putative ARP protein [Oryza sativa]
  misc_feature (48)..(305): Homolog of NCBI NO: 15293147 NR Description: unknown protein [Arabidopsis thaliana]
  misc_feature (48)..(305): Homolog of NCBI NO: 18405190 NR Description: expressed protein [Arabidopsis thaliana]
  misc_feature (1)..(466): Homolog of NCBI NO: 18409643 NR Description: expressed protein [Arabidopsis thaliana]
  misc_feature (1)..(466): Homolog of NCBI NO: 21593408 NR Description: unknown [Arabidopsis thaliana]
  misc_feature (29)..(451): Homolog of NCBI NO: 13324787 NR Description: hypothetical protein [Oryza sativa]
  misc_feature (271)..(466): Homolog of NCBI NO: 25372841 NR Description: hypothetical protein F5A18.17 [imported] -
  misc_feature (1)..(305): Homolog of NCBI NO: 25372841 NR Description: hypothetical protein F5A18.17 [imported] -
  misc_feature (1)..(466): Homolog of NCBI NO: 21593408 NR Description: unknown [Arabidopsis thaliana]
  misc_feature (1)..(466): Homolog of NCBI NO: 18409643 NR Description: expressed protein [Arabidopsis thaliana]

SEQ ID NO: 40335 - protein, 465 aa, Arabidopsis thaliana; identical to SEQ ID NO: 24593
  peptide (1)..(465): Ceres Seq. ID no. 13491569
  misc_feature (311)..(340): Pfam Name: Zn-finger in Ran binding protein and others Pfam Description: Zn-finger in Ran binding protein and others
  misc_feature (311)..(340): Pfam Name: Zn-finger in Ran binding protein and others Pfam Description: Zn-finger in Ran binding protein and others
  misc_feature (29)..(62): Homolog of NCBI NO: 15293147 NR Description: unknown protein [Arabidopsis thaliana]
  misc_feature (47)..(304): Homolog of NCBI NO: 18405190 NR Description: expressed protein [Arabidopsis thaliana]
  misc_feature (47)..(304): Homolog of NCBI NO: 15293147 NR Description: unknown protein [Arabidopsis thaliana]
  misc_feature (30)..(72): Homolog of NCBI NO: 13702809 NR Description: putative ARP protein [Oryza sativa]
  misc_feature (71)..(400): Homolog of NCBI NO: 13702809 NR Description: putative ARP protein [Oryza sativa]
  misc_feature (29)..(62): Homolog of NCBI NO: 15293147 NR Description: unknown protein [Arabidopsis thaliana]
  misc_feature (47)..(304): Homolog of NCBI NO: 15293147 NR Description: unknown protein [Arabidopsis thaliana]
  misc_feature (71)..(400): Homolog of NCBI NO: 13702809 NR Description: putative ARP protein [Oryza sativa]
  misc_feature (1)..(465): Homolog of NCBI NO: 18409643 NR Description: expressed protein [Arabidopsis thaliana]
  misc_feature (1)..(465): Homolog of NCBI NO: 21593408 NR Description: unknown [Arabidopsis thaliana]
  misc_feature (1)..(304): Homolog of NCBI NO: 25372841 NR Description: hypothetical protein F5A18.17 [imported] -
  misc_feature (270)..(465): Homolog of NCBI NO: 25372841 NR Description: hypothetical protein F5A18.17 [imported] -
  misc_feature (28)..(450): Homolog of NCBI NO: 13324787 NR Description: hypothetical protein [Oryza sativa]
  misc_feature (30)..(72): Homolog of NCBI NO: 13702809 NR Description: putative ARP protein [Oryza sativa]
  misc_feature (47)..(304): Homolog of NCBI NO: 18405190 NR Description: expressed protein [Arabidopsis thaliana]
  misc_feature (28)..(450): Homolog of NCBI NO: 13324787 NR Description: hypothetical protein [Oryza sativa]
  misc_feature (270)..(465): Homolog of NCBI NO: 25372841 NR Description: hypothetical protein F5A18.17 [imported] -
  misc_feature (1)..(304): Homolog of NCBI NO: 25372841 NR Description: hypothetical protein F5A18.17 [imported] -
  misc_feature (1)..(465): Homolog of NCBI NO: 21593408 NR Description: unknown [Arabidopsis thaliana]
  misc_feature (1)..(465): Homolog of NCBI NO: 18409643 NR Description: expressed protein [Arabidopsis thaliana]

SEQ ID NO: 40336 - protein, 414 aa, Arabidopsis thaliana; identical to SEQ ID NO: 24594
  peptide (1)..(414): Ceres Seq. ID no. 13491570
  misc_feature (260)..(289): Pfam Name: Zn-finger in Ran binding protein and others Pfam Description: Zn-finger in Ran binding protein and others
  misc_feature (260)..(289): Pfam Name: Zn-finger in Ran binding protein and others Pfam Description: Zn-finger in Ran binding protein and others
  misc_feature (1)..(11): Homolog of NCBI NO: 15293147 NR Description: unknown protein [Arabidopsis thaliana]
  misc_feature (1)..(253): Homolog of NCBI NO: 18405190 NR Description: expressed protein [Arabidopsis thaliana]
  misc_feature (1)..(253): Homolog of NCBI NO: 15293147 NR Description: unknown protein [Arabidopsis thaliana]
  misc_feature (1)..(21): Homolog of NCBI NO: 13702809 NR Description: putative ARP protein [Oryza sativa]
  misc_feature (20)..(349): Homolog of NCBI NO: 13702809 NR Description: putative ARP protein [Oryza sativa]
  misc_feature (1)..(11): Homolog of NCBI NO: 15293147 NR Description: unknown protein [Arabidopsis thaliana]
  misc_feature (1)..(253): Homolog of NCBI NO: 15293147 NR Description: unknown protein [Arabidopsis thaliana]
  misc_feature (20)..(349): Homolog of NCBI NO: 13702809 NR Description: putative ARP protein [Oryza sativa]
  misc_feature (1)..(414): Homolog of NCBI NO: 18409643 NR Description: expressed protein [Arabidopsis thaliana]
  misc_feature (1)..(414): Homolog of NCBI NO: 21593408 NR Description: unknown [Arabidopsis thaliana]
  misc_feature (1)..(253): Homolog of NCBI NO: 25372841 NR Description: hypothetical protein F5A18.17 [imported] -
  misc_feature (219)..(414): Homolog of NCBI NO: 25372841 NR Description: hypothetical protein F5A18.17 [imported] -
  misc_feature (1)..(399): Homolog of NCBI NO: 13324787 NR Description: hypothetical protein [Oryza sativa]
  misc_feature (1)..(21): Homolog of NCBI NO: 13702809 NR Description: putative ARP protein [Oryza sativa]
  misc_feature (1)..(253): Homolog of NCBI NO: 18405190 NR Description: expressed protein [Arabidopsis thaliana]
  misc_feature (1)..(399): Homolog of NCBI NO: 13324787 NR Description: hypothetical protein [Oryza sativa]
  misc_feature (219)..(414): Homolog of NCBI NO: 25372841 NR Description: hypothetical protein F5A18.17 [imported] -
  misc_feature (1)..(253): Homolog of NCBI NO: 25372841 NR Description: hypothetical protein F5A18.17 [imported] -
  misc_feature (1)..(414): Homolog of NCBI NO: 21593408 NR Description: unknown [Arabidopsis thaliana]
  misc_feature (1)..(414): Homolog of NCBI NO: 18409643 NR Description: expressed protein [Arabidopsis thaliana]

SEQ ID NO: 40337 - DNA, 712 bp, Arabidopsis thaliana
  misc_feature (1)..(712): Ceres Seq. ID no. 13488083
  misc_feature: MA Experiment ID: 108435 Result: Down-regulated in Transcription
  misc_feature: MA Experiment 108435 PARAMETER Experiment Name: At_stm_Mutants_cDNA_P Parameter: Plant Line Value: wt Landsburg vs stm
  misc_feature: MA Experiment 108435 PARAMETER Experiment Name: At_stm_Mutants_cDNA_P Parameter: Tissue Value: Shoot Apical Meristem Region
  misc_feature: MA Experiment ID: 108461 Result: Up-regulated in Transcription
  misc_feature: MA Experiment 108461 PARAMETER Experiment Name: At_Germinating_Seeds_cDNA_P Parameter: Age (day) Value: 1 vs. 0
  misc_feature: MA Experiment 108461 PARAMETER Experiment Name: At_Germinating_Seeds_cDNA_P Parameter: Tissue Value: Germinating Seeds
  misc_feature: MA Experiment ID: 108462 Result: Up-regulated in Transcription
  misc_feature: MA Experiment 108462 PARAMETER Experiment Name: At_Germinating_Seeds_cDNA_P Parameter: Age (day) Value: 2 vs. 0
  misc_feature: MA Experiment 108462 PARAMETER Experiment Name: At_Germinating_Seeds_cDNA_P Parameter: Tissue Value: Germinating Seeds
  misc_feature: MA Experiment ID: 108463 Result: Up-regulated in Transcription
  misc_feature: MA Experiment 108463 PARAMETER Experiment Name: At_Germinating_Seeds_cDNA_P Parameter: Age (day) Value: 3 vs. 0
  misc_feature: MA Experiment 108463 PARAMETER Experiment Name: At_Germinating_Seeds_cDNA_P Parameter: Tissue Value: Germinating Seeds
  misc_feature: MA Experiment ID: 108464 Result: Up-regulated in Transcription
  misc_feature: MA Experiment 108464 PARAMETER Experiment Name: At_Germinating_Seeds_cDNA_P Parameter: Age (day) Value: 4 vs. 0
  misc_feature: MA Experiment 108464 PARAMETER Experiment Name: At_Germinating_Seeds_cDNA_P Parameter: Tissue Value: Germinating Seeds
  misc_feature: MA Experiment ID: 108488 Result: Up-regulated in Transcription
  misc_feature: MA Experiment ID: 20000069 Result: Down-regulated in Transcription
  misc_feature: MA Experiment 20000069 PARAMETER Experiment Name: At_100uM_ABA_Mutants_cDNA_P Parameter: Plant Line Value: CS23
  misc_feature: MA Experiment 20000069 PARAMETER Experiment Name: At_100uM_ABA_Mutants_cDNA_P Parameter: Timepoint (hr) Value: 6
  misc_feature: MA Experiment 20000069 PARAMETER Experiment Name: At_100uM_ABA_Mutants_cDNA_P Parameter: Tissue Value: Aerial
  misc_feature: MA Experiment 20000069 PARAMETER Experiment Name: At_100uM_ABA_Mutants_cDNA_P Parameter: Treatment Value: 100uM ABA vs. No Treatment
  misc_feature: MA Experiment ID: 20000070 Result: Down-regulated in Transcription
  misc_feature: MA Experiment 20000070 PARAMETER Experiment Name: At_100uM_ABA_Mutants_cDNA_P Parameter: Plant Line Value: CS24
  misc_feature: MA Experiment 20000070 PARAMETER Experiment Name: At_100uM_ABA_Mutants_cDNA_P Parameter: Timepoint (hr) Value: 6
  misc_feature: MA Experiment 20000070 PARAMETER Experiment Name: At_100uM_ABA_Mutants_cDNA_P Parameter: Tissue Value: Aerial
  misc_feature: MA Experiment 20000070 PARAMETER Experiment Name: At_100uM_ABA_Mutants_cDNA_P Parameter: Treatment Value: 100uM ABA vs. No Treatment
  misc_feature: MA Experiment ID: 20000071 Result: Down-regulated in Transcription
  misc_feature: MA Experiment 20000071 PARAMETER Experiment Name: At_100uM_ABA_Mutants_cDNA_P Parameter: Plant Line Value: CS8104
  misc_feature: MA Experiment 20000071 PARAMETER Experiment Name: At_100uM_ABA_Mutants_cDNA_P Parameter: Timepoint (hr) Value: 6
  misc_feature: MA Experiment 20000071 PARAMETER Experiment Name: At_100uM_ABA_Mutants_cDNA_P Parameter: Tissue Value: Aerial
  misc_feature: MA Experiment 20000071 PARAMETER Experiment Name: At_100uM_ABA_Mutants_cDNA_P Parameter: Treatment Value: 100uM ABA vs. No Treatment
  misc_feature: MA Experiment ID: 20000072 Result: Down-regulated in Transcription
  misc_feature: MA Experiment 20000072 PARAMETER Experiment Name: At_100uM_ABA_Mutants_cDNA_P Parameter: Plant Line Value: CS8105
  misc_feature: MA Experiment 20000072 PARAMETER Experiment Name: At_100uM_ABA_Mutants_cDNA_P Parameter: Timepoint (hr) Value: 6
  misc_feature: MA Experiment 20000072 PARAMETER Experiment Name: At_100uM_ABA_Mutants_cDNA_P Parameter: Tissue Value: Aerial
  misc_feature: MA Experiment 20000072 PARAMETER Experiment Name: At_100uM_ABA_Mutants_cDNA_P Parameter: Treatment Value: 100uM ABA vs. No Treatment
  misc_feature: MA Experiment ID: 20000086 Result: Down-regulated in Transcription
  misc_feature: MA Experiment 20000086 PARAMETER Experiment Name: At_100uM_ABA_Mutants_cDNA_P Parameter: Plant Line Value: CS22
  misc_feature: MA Experiment 20000086 PARAMETER Experiment Name: At_100uM_ABA_Mutants_cDNA_P Parameter: Timepoint (hr) Value: 6
  misc_feature: MA Experiment 20000086 PARAMETER Experiment Name: At_100uM_ABA_Mutants_cDNA_P Parameter: Tissue Value: Aerial
  misc_feature: MA Experiment 20000086 PARAMETER Experiment Name: At_100uM_ABA_Mutants_cDNA_P Parameter: Treatment Value: 100uM ABA vs. No Treatment
  misc_feature: MA Experiment ID: 20000087 Result: Down-regulated in Transcription
  misc_feature: MA Experiment 20000087 PARAMETER Experiment Name: At_100uM_ABA_Mutants_cDNA_P Parameter: Plant Line Value: WS
  misc_feature: MA Experiment 20000087 PARAMETER Experiment Name: At_100uM_ABA_Mutants_cDNA_P Parameter: Timepoint (hr) Value: 6
  misc_feature: MA Experiment 20000087 PARAMETER Experiment Name: At_100uM_ABA_Mutants_cDNA_P Parameter: Tissue Value: Aerial
  misc_feature: MA Experiment 20000087 PARAMETER Experiment Name: At_100uM_ABA_Mutants_cDNA_P Parameter: Treatment Value: 100uM ABA vs. No Treatment
  misc_feature: MA Experiment ID: 20000088 Result: Down-regulated in Transcription
  misc_feature: MA Experiment 20000088 PARAMETER Experiment Name: At_100uM_ABA_Mutants_cDNA_P Parameter: Plant Line Value: Landsberg
  misc_feature: MA Experiment 20000088 PARAMETER Experiment Name: At_100uM_ABA_Mutants_cDNA_P Parameter: Timepoint (hr) Value: 6
  misc_feature: MA Experiment 20000088 PARAMETER Experiment Name: At_100uM_ABA_Mutants_cDNA_P Parameter: Tissue Value: Aerial
  misc_feature: MA Experiment 20000088 PARAMETER Experiment Name: At_100uM_ABA_Mutants_cDNA_P Parameter: Treatment Value: 100uM ABA vs. No Treatment
  misc_feature: MA Experiment ID: 20000090 Result: Down-regulated in Transcription
  misc_feature: MA Experiment ID: 20000117 Result: Down-regulated in Transcription
  misc_feature: MA Experiment 20000117 PARAMETER Experiment Name: At_100uM_ABA_Mutants_cDNA_P Parameter: Plant Line Value: Columbia
  misc_feature: MA Experiment 20000117 PARAMETER Experiment Name: At_100uM_ABA_Mutants_cDNA_P Parameter: Timepoint (hr) Value: 6
  misc_feature: MA Experiment 20000117 PARAMETER Experiment Name: At_100uM_ABA_Mutants_cDNA_P Parameter: Tissue Value: Aerial
  misc_feature: MA Experiment 20000117 PARAMETER Experiment Name: At_100uM_ABA_Mutants_cDNA_P Parameter: Treatment Value: 100uM ABA vs. No Treatment
  misc_feature: MA Experiment ID: 20000264 Result: Up-regulated in Transcription
  misc_feature: MA Experiment 20000264 PARAMETER Experiment Name: At_Open_Flower_P Parameter: Age (day) Value: 21
  misc_feature: MA Experiment 20000264 PARAMETER Experiment Name: At_Open_Flower_P Parameter: Plant Line Value: WS
  misc_feature: MA Experiment 20000264 PARAMETER Experiment Name: At_Open_Flower_P Parameter: Tissue Value: Open Flower vs. Whole Plant
  misc_feature: MA Experiment ID: 20000265 Result: Up-regulated in Transcription
  misc_feature: MA Experiment 20000265 PARAMETER Experiment Name: At_Open_Flower_P Parameter: Age (day) Value: 21
  misc_feature: MA Experiment 20000265 PARAMETER Experiment Name: At_Open_Flower_P Parameter: Plant Line Value: WS
  misc_feature: MA Experiment 20000265 PARAMETER Experiment Name: At_Open_Flower_P Parameter: Tissue Value: Closed Flower vs. Whole Plant
  misc_feature: MA Experiment ID: 20000286 Result: Up-regulated in Transcription
  misc_feature: MA Experiment 20000286 PARAMETER Experiment Name: At_Open_Flower_P Parameter: Age (day) Value: 21
  misc_feature: MA Experiment 20000286 PARAMETER Experiment Name: At_Open_Flower_P Parameter: Plant Line Value: WS
  misc_feature: MA Experiment 20000286 PARAMETER Experiment Name: At_Open_Flower_P Parameter: Tissue Value: Half Open vs. Whole Plant
  misc_feature: MA Experiment ID: 20000496 Result: Down-regulated in Transcription
  misc_feature: MA Experiment 20000496 PARAMETER Experiment Name: At_Guard_Cells_P Parameter: Harvest Date Value: 7/19/2002
  misc_feature: MA Experiment 20000496 PARAMETER Experiment Name: At_Guard_Cells_P Parameter: Organism Value: Canola
  misc_feature: MA Experiment 20000496 PARAMETER Experiment Name: At_Guard_Cells_P Parameter: Tissue Value: Guard Cells vs. Leaves
  misc_feature: MA Experiment ID: 20000794 Result: Up-regulated in Transcription
  misc_feature: MA Experiment 20000794 PARAMETER Experiment Name: At_Petals_P Parameter: Age (day) Value: 23-25 days
  misc_feature: MA Experiment 20000794 PARAMETER Experiment Name: At_Petals_P Parameter: Plant Line Value: WS
  misc_feature: MA Experiment 20000794 PARAMETER Experiment Name: At_Petals_P Parameter: Tissue Value: Petals vs. Whole plant
  misc_feature: MA Experiment ID: 20001905 Result: Up-regulated in Transcription
  misc_feature: MA Experiment 20001905 PARAMETER Experiment Name: At_Drought_Reproduction_P Parameter: Age (day) Value: 40
  misc_feature: MA Experiment 20001905 PARAMETER Experiment Name: At_Drought_Reproduction_P Parameter: Organism Value: A. thaliana
  misc_feature: MA Experiment 20001905 PARAMETER Experiment Name: At_Drought_Reproduction_P Parameter: Plant Line Value: WS
  misc_feature: MA Experiment 20001905 PARAMETER Experiment Name: At_Drought_Reproduction_P Parameter: Timepoint (day) Value: 10
  misc_feature: MA Experiment 20001905 PARAMETER Experiment Name: At_Drought_Reproduction_P Parameter: Tissue Value: Rosettes
  misc_feature: MA Experiment 20001905 PARAMETER Experiment Name: At_Drought_Reproduction_P Parameter: Treatment Value: Drought vs. No Drought
  misc_feature: MA Experiment ID: 20001910 Result: Up-regulated in Transcription
  misc_feature: MA Experiment 20001910 PARAMETER Experiment Name: At_Drought_Reproduction_P Parameter: Age (day) Value: 37
  misc_feature: MA Experiment 20001910 PARAMETER Experiment Name: At_Drought_Reproduction_P Parameter: Organism Value: A. thaliana
  misc_feature: MA Experiment 20001910 PARAMETER Experiment Name: At_Drought_Reproduction_P Parameter: Plant Line Value: WS
  misc_feature: MA Experiment 20001910 PARAMETER Experiment Name: At_Drought_Reproduction_P Parameter: Timepoint (day) Value: 7
  misc_feature: MA Experiment 20001910 PARAMETER Experiment Name: At_Drought_Reproduction_P Parameter: Tissue Value: Flowers
  misc_feature: MA Experiment 20001910 PARAMETER Experiment Name: At_Drought_Reproduction_P Parameter: Treatment Value: Drought vs. No Drought
  misc_feature: MA Experiment ID: 20001911 Result: Up-regulated in Transcription
  misc_feature: MA Experiment 20001911 PARAMETER Experiment Name: At_Drought_Reproduction_P Parameter: Age (day) Value: 40
  misc_feature: MA Experiment 20001911 PARAMETER Experiment Name: At_Drought_Reproduction_P Parameter: Organism Value: A. thaliana
  misc_feature: MA Experiment 20001911 PARAMETER Experiment Name: At_Drought_Reproduction_P Parameter: Plant Line Value: WS
  misc_feature: MA Experiment 20001911 PARAMETER Experiment Name: At_Drought_Reproduction_P Parameter: Timepoint (day) Value: 10
  misc_feature: MA Experiment 20001911 PARAMETER Experiment Name: At_Drought_Reproduction_P Parameter: Tissue Value: Flowers
  misc_feature: MA Experiment 20001911 PARAMETER Experiment Name: At_Drought_Reproduction_P Parameter: Treatment Value: Drought vs. No Drought
attgttgcctagagaaaaaaaggaaaagagagaaagagttaccccaaaaaatgagcgaagaacagctgcagaaacctatagattgtgctgatgtaaaaggagaggcagagaagatttcgacaacggagggaggcattaaggcggcggaggacaaagagaaaggtgttgtagccgaggcctccggtgaacaggcggagggagaagttaaccagaaaaaggtggtagctaatcctctgaaatcggaaggaaccataacaattggagaggctctagaggcagcggttctcacggcagggaataagccggtggagtggagtgacgcagccgccattcaagcggccgaggttagagctacggggcggaccaatatcatgcccggcggtgttgcggcttcagctcaatcagccgccactcttaatgctcgtatcggctctgacgataccaagactacgctagccgacgttctcactggagcgagtagcaaattaccatcggataaagcagcaacgagaaaggacgcagagggagtgactggcgccgagatgaggaacgatcctcatctcactacatacccaaccggtgtggctgcctctgtcgctgccgccgctcggatcaatcagtccaaatgatgcaattcttctttcttgttattgagaagcaagtttatataaacttaaacaaatgtatatatgttgatctatataagattccc

SEQ ID NO: 40338 - protein, 208 aa, Arabidopsis thaliana
  peptide (1)..(208): Ceres Seq. ID no. 13488084
  misc_feature (82)..(144): Pfam Name: Seed maturation protein Pfam Description: Seed maturation protein
  misc_feature (34)..(206): Homolog of NCBI NO: 82045 NR Description: embryonic protein ecp31 - carrot
  misc_feature (35)..(206): Homolog of NCBI NO: 1526422 NR Description: LEA protein in group 5 [Arabidopsis thaliana]
  misc_feature (35)..(206): Homolog of NCBI NO: 15228770 NR Description: LEA protein -related [Arabidopsis thaliana]
  misc_feature (42)..(206): Homolog of NCBI NO: 15228768 NR Description: LEA protein -related [Arabidopsis thaliana]
  misc_feature (42)..(207): Homolog of NCBI NO: 126078 NR Description: LATE EMBRYOGENESIS ABUNDANT PROTEIN D-34 (LEA
  misc_feature (17)..(208): Homolog of NCBI NO: 15241107 NR Description: embryonic abundant protein - like [Arabidopsis
CCLEKKRKREKELPQKMSEEQLQKPIDCADVKGEAEKISTTEGGIKAAEDKEKGVVAEASGEQAEGEVNQKKVVANPLKSEGTITIGEALEAAVLTAGNKPVEWSDAAAIQAAEVRATGRTNIMPGGVAASAQSAATLNARIGSDDTKTTLADVLTGASSKLPSDKAATRKDAEGVTGAEMRNDPHLTTYPTGVAASVAAAARINQSK

SEQ ID NO: 40339 - protein, 192 aa, Arabidopsis thaliana
  peptide (1)..(192): Ceres Seq. ID no. 13488085
  misc_feature (66)..(128): Pfam Name: Seed maturation protein Pfam Description: Seed maturation protein
  misc_feature (18)..(190): Homolog of NCBI NO: 82045 NR Description: embryonic protein ecp31 - carrot
  misc_feature (19)..(190): Homolog of NCBI NO: 1526422 NR Description: LEA protein in group 5 [Arabidopsis thaliana]
  misc_feature (19)..(190): Homolog of NCBI NO: 15228770 NR Description: LEA protein -related [Arabidopsis thaliana]
  misc_feature (26)..(190): Homolog of NCBI NO: 15228768 NR Description: LEA protein -related [Arabidopsis thaliana]
  misc_feature (26)..(191): Homolog of NCBI NO: 126078 NR Description: LATE EMBRYOGENESIS ABUNDANT PROTEIN D-34 (LEA
  misc_feature (1)..(192): Homolog of NCBI NO: 15241107 NR Description: embryonic abundant protein - like [Arabidopsis
MSEEQLQKPIDCADVKGEAEKISTTEGGIKAAEDKEKGVVAEASGEQAEGEVNQKKVVANPLKSEGTITIGEALEAAVLTAGNKPVEWSDAAAIQAAEVRATGRTNIMPGGVAASAQSAATLNARIGSDDTKTTLADVLTGASSKLPSDKAATRKDAEGVTGAEMRNDPHLTTYPTGVAASVAAAARINQSK

SEQ ID NO: 40340 - DNA, 1381 bp, Arabidopsis thaliana
  misc_feature (1)..(1381): Ceres Seq. ID no. 12395571
  misc_feature: MA Experiment ID: 108434 Result: Down-regulated in Transcription
  misc_feature: MA Experiment 108434 PARAMETER Experiment Name: At_Root_Tips_cDNA_P Parameter: Tissue Value: Root Tips
  misc_feature: MA Experiment ID: 108461 Result: Up-regulated in Transcription
  misc_feature: MA Experiment 108461 PARAMETER Experiment Name: At_Germinating_Seeds_cDNA_P Parameter: Age (day) Value: 1 vs. 0
  misc_feature: MA Experiment 108461 PARAMETER Experiment Name: At_Germinating_Seeds_cDNA_P Parameter: Tissue Value: Germinating Seeds
  misc_feature: MA Experiment ID: 108462 Result: Up-regulated in Transcription
  misc_feature: MA Experiment 108462 PARAMETER Experiment Name: At_Germinating_Seeds_cDNA_P Parameter: Age (day) Value: 2 vs. 0
  misc_feature: MA Experiment 108462 PARAMETER Experiment Name: At_Germinating_Seeds_cDNA_P Parameter: Tissue Value: Germinating Seeds
  misc_feature: MA Experiment ID: 108463 Result: Up-regulated in Transcription
  misc_feature: MA Experiment 108463 PARAMETER Experiment Name: At_Germinating_Seeds_cDNA_P Parameter: Age (day) Value: 3 vs. 0
  misc_feature: MA Experiment 108463 PARAMETER Experiment Name: At_Germinating_Seeds_cDNA_P Parameter: Tissue Value: Germinating Seeds
  misc_feature: MA Experiment ID: 108464 Result: Up-regulated in Transcription
  misc_feature: MA Experiment 108464 PARAMETER Experiment Name: At_Germinating_Seeds_cDNA_P Parameter: Age (day) Value: 4 vs. 0
  misc_feature: MA Experiment 108464 PARAMETER Experiment Name: At_Germinating_Seeds_cDNA_P Parameter: Tissue Value: Germinating Seeds
  misc_feature: MA Experiment ID: 108595 Result: Down-regulated in Transcription
  misc_feature: MA Experiment 108595 PARAMETER Experiment Name: At_Ler-pi_Ovule_cDNA_P Parameter: Plant Line Value: null
  misc_feature: MA Experiment ID: 20000069 Result: Down-regulated in Transcription
  misc_feature: MA Experiment 20000069 PARAMETER Experiment Name: At_100uM_ABA_Mutants_cDNA_P Parameter: Plant Line Value: CS23
  misc_feature: MA Experiment 20000069 PARAMETER Experiment Name: At_100uM_ABA_Mutants_cDNA_P Parameter: Timepoint (hr) Value: 6
  misc_feature: MA Experiment 20000069 PARAMETER Experiment Name: At_100uM_ABA_Mutants_cDNA_P Parameter: Tissue Value: Aerial
  misc_feature: MA Experiment 20000069 PARAMETER Experiment Name: At_100uM_ABA_Mutants_cDNA_P Parameter: Treatment Value: 100uM ABA vs. No Treatment
  misc_feature: MA Experiment ID: 20000070 Result: Down-regulated in Transcription
  misc_feature: MA Experiment 20000070 PARAMETER Experiment Name: At_100uM_ABA_Mutants_cDNA_P Parameter: Plant Line Value: CS24
  misc_feature: MA Experiment 20000070 PARAMETER Experiment Name: At_100uM_ABA_Mutants_cDNA_P Parameter: Timepoint (hr) Value: 6
  misc_feature: MA Experiment 20000070 PARAMETER Experiment Name: At_100uM_ABA_Mutants_cDNA_P Parameter: Tissue Value: Aerial
  misc_feature: MA Experiment 20000070 PARAMETER Experiment Name: At_100uM_ABA_Mutants_cDNA_P Parameter: Treatment Value: 100uM ABA vs. No Treatment
  misc_feature: MA Experiment ID: 20000071 Result: Down-regulated in Transcription
  misc_feature: MA Experiment 20000071 PARAMETER Experiment Name: At_100uM_ABA_Mutants_cDNA_P Parameter: Plant Line Value: CS8104
  misc_feature: MA Experiment 20000071 PARAMETER Experiment Name: At_100uM_ABA_Mutants_cDNA_P Parameter: Timepoint (hr) Value: 6
  misc_feature: MA Experiment 20000071 PARAMETER Experiment Name: At_100uM_ABA_Mutants_cDNA_P Parameter: Tissue Value: Aerial
  misc_feature: MA Experiment 20000071 PARAMETER Experiment Name: At_100uM_ABA_Mutants_cDNA_P Parameter: Treatment Value: 100uM ABA vs. No Treatment
  misc_feature: MA Experiment ID: 20000072 Result: Down-regulated in Transcription
  misc_feature: MA Experiment 20000072 PARAMETER Experiment Name: At_100uM_ABA_Mutants_cDNA_P Parameter: Plant Line Value: CS8105
  misc_feature: MA Experiment 20000072 PARAMETER Experiment Name: At_100uM_ABA_Mutants_cDNA_P Parameter: Timepoint (hr) Value: 6
  misc_feature: MA Experiment 20000072 PARAMETER Experiment Name: At_100uM_ABA_Mutants_cDNA_P Parameter: Tissue Value: Aerial
  misc_feature: MA Experiment 20000072 PARAMETER Experiment Name: At_100uM_ABA_Mutants_cDNA_P Parameter: Treatment Value: 100uM ABA vs. No Treatment
  misc_feature: MA Experiment ID: 20000086 Result: Down-regulated in Transcription
  misc_feature: MA Experiment 20000086 PARAMETER Experiment Name: At_100uM_ABA_Mutants_cDNA_P Parameter: Plant Line Value: CS22
  misc_feature: MA Experiment 20000086 PARAMETER Experiment Name: At_100uM_ABA_Mutants_cDNA_P Parameter: Timepoint (hr) Value: 6
  misc_feature: MA Experiment 20000086 PARAMETER Experiment Name: At_100uM_ABA_Mutants_cDNA_P Parameter: Tissue Value: Aerial
  misc_feature: MA Experiment 20000086 PARAMETER Experiment Name: At_100uM_ABA_Mutants_cDNA_P Parameter: Treatment Value: 100uM ABA vs. No Treatment
  misc_feature: MA Experiment ID: 20000087 Result: Down-regulated in Transcription
  misc_feature: MA Experiment 20000087 PARAMETER Experiment Name: At_100uM_ABA_Mutants_cDNA_P Parameter: Plant Line Value: WS
  misc_feature: MA Experiment 20000087 PARAMETER Experiment Name: At_100uM_ABA_Mutants_cDNA_P Parameter: Timepoint (hr) Value: 6
  misc_feature: MA Experiment 20000087 PARAMETER Experiment Name: At_100uM_ABA_Mutants_cDNA_P Parameter: Tissue Value: Aerial
  misc_feature: MA Experiment 20000087 PARAMETER Experiment Name: At_100uM_ABA_Mutants_cDNA_P Parameter: Treatment Value: 100uM ABA vs. No Treatment
  misc_feature: MA Experiment ID: 20000089 Result: Down-regulated in Transcription
  misc_feature: MA Experiment ID: 20000090 Result: Down-regulated in Transcription
  misc_feature: MA Experiment ID: 20000117 Result: Down-regulated in Transcription
  misc_feature: MA Experiment 20000117 PARAMETER Experiment Name: At_100uM_ABA_Mutants_cDNA_P Parameter: Plant Line Value: Columbia
  misc_feature: MA Experiment 20000117 PARAMETER Experiment Name: At_100uM_ABA_Mutants_cDNA_P Parameter: Timepoint (hr) Value: 6
  misc_feature: MA Experiment 20000117 PARAMETER Experiment Name: At_100uM_ABA_Mutants_cDNA_P Parameter: Tissue Value: Aerial
  misc_feature: MA Experiment 20000117 PARAMETER Experiment Name: At_100uM_ABA_Mutants_cDNA_P Parameter: Treatment Value: 100uM ABA vs. No Treatment
  misc_feature: MA Experiment ID: 20000180 Result: Up-regulated in Transcription
  misc_feature: MA Experiment 20000180 PARAMETER Experiment Name: At_Germinating_Seeds_P Parameter: Age (hr) Value: 24 vs. 0
  misc_feature: MA Experiment 20000180 PARAMETER Experiment Name: At_Germinating_Seeds_P Parameter: Tissue Value: Germinating Seeds
  misc_feature: MA Experiment ID: 20000184 Result: Up-regulated in Transcription
  misc_feature: MA Experiment 20000184 PARAMETER Experiment Name: At_Shoots__P Parameter: Age (day) Value: 7
  misc_feature: MA Experiment 20000184 PARAMETER Experiment Name: At_Shoots__P Parameter: Tissue Value: Shoots vs. Whole Plant
  misc_feature: MA Experiment ID: 20000234 Result: Up-regulated in Transcription
  misc_feature: MA Experiment 20000234 PARAMETER Experiment Name: At_Siliques_P Parameter: Age (day) Value: 21
  misc_feature: MA Experiment 20000234 PARAMETER Experiment Name: At_Siliques_P Parameter: Organism Value: A. thaliana
  misc_feature: MA Experiment 20000234 PARAMETER Experiment Name: At_Siliques_P Parameter: Plant Line Value: WS
  misc_feature: MA Experiment 20000234 PARAMETER Experiment Name: At_Siliques_P Parameter: Tissue Value: Less Than 5mm Siliques vs. Whole Plant
  misc_feature: MA Experiment ID: 20000265 Result: Up-regulated in Transcription
  misc_feature: MA Experiment 20000265 PARAMETER Experiment Name: At_Open_Flower_P Parameter: Age (day) Value: 21
  misc_feature: MA Experiment 20000265 PARAMETER Experiment Name: At_Open_Flower_P Parameter: Plant Line Value: WS
  misc_feature: MA Experiment 20000265 PARAMETER Experiment Name: At_Open_Flower_P Parameter: Tissue Value: Closed Flower vs. Whole Plant
  misc_feature: MA Experiment ID: 20000438 Result: Up-regulated in Transcription
  misc_feature: MA Experiment 20000438 PARAMETER Experiment Name: At_Shoots__P Parameter: Age (day) Value: 14
  misc_feature: MA Experiment 20000438 PARAMETER Experiment Name: At_Shoots__P Parameter: Tissue Value: Shoots vs. Whole Plant
  misc_feature: MA Experiment ID: 20000452 Result: Up-regulated in Transcription
  misc_feature: MA Experiment 20000452 PARAMETER Experiment Name: At_CS6879_Shoots-Roots_P Parameter: Age (day) Value: 14
  misc_feature: MA Experiment 20000452 PARAMETER Experiment Name: At_CS6879_Shoots-Roots_P Parameter: Organism Value: A. thaliana
  misc_feature: MA Experiment 20000452 PARAMETER Experiment Name: At_CS6879_Shoots-Roots_P Parameter: Plant Line Value: CS6879 vs. WS
  misc_feature: MA Experiment 20000452 PARAMETER Experiment Name: At_CS6879_Shoots-Roots_P Parameter: Tissue Value: Shoots
  misc_feature: MA Experiment ID: 20001248 Result: Down-regulated in Transcription
  misc_feature: MA Experiment 20001248 PARAMETER Experiment Name: At_Far-red-induction_P Parameter: Age (day) Value: 7
  misc_feature: MA Experiment 20001248 PARAMETER Experiment Name: At_Far-red-induction_P Parameter: Light Value: Far-red vs. White
  misc_feature: MA Experiment 20001248 PARAMETER Experiment Name: At_Far-red-induction_P Parameter: Organism Value: A. thaliana
  misc_feature: MA Experiment 20001248 PARAMETER Experiment Name: At_Far-red-induction_P Parameter: Plant Line Value: Columbia
  misc_feature: MA Experiment 20001248 PARAMETER Experiment Name: At_Far-red-induction_P Parameter: Timepoint (hr) Value: 4
  misc_feature: MA Experiment 20001248 PARAMETER Experiment Name: At_Far-red-induction_P Parameter: Tissue Value: Whole Plant
  misc_feature: MA Experiment ID: 20001557 Result: Down-regulated in Transcription
  misc_feature: MA Experiment 20001557 PARAMETER Experiment Name: At_Drought_Soil_Dry_P Parameter: Age (day) Value: 27
  misc_feature: MA Experiment 20001557 PARAMETER Experiment Name: At_Drought_Soil_Dry_P Parameter: Organism Value: A. thaliana
  misc_feature: MA Experiment 20001557 PARAMETER Experiment Name: At_Drought_Soil_Dry_P Parameter: Plant Line Value: WS
  misc_feature: MA Experiment 20001557 PARAMETER Experiment Name: At_Drought_Soil_Dry_P Parameter: Post Timepoint (hr) Value: 3
  misc_feature: MA Experiment 20001557 PARAMETER Experiment Name: At_Drought_Soil_Dry_P Parameter: Post-Treatment Value: Re-Water vs. No Drought
  misc_feature: MA Experiment 20001557 PARAMETER Experiment Name: At_Drought_Soil_Dry_P Parameter: Timepoint (day) Value: 13
  misc_feature: MA Experiment 20001557 PARAMETER Experiment Name: At_Drought_Soil_Dry_P Parameter: Treatment Value: Drought vs. No Drought
  misc_feature: MA Experiment ID: 20001905 Result: Down-regulated in Transcription
  misc_feature: MA Experiment 20001905 PARAMETER Experiment Name: At_Drought_Reproduction_P Parameter: Age (day) Value: 40
  misc_feature: MA Experiment 20001905 PARAMETER Experiment Name: At_Drought_Reproduction_P Parameter: Organism Value: A. thaliana
  misc_feature: MA Experiment 20001905 PARAMETER Experiment Name: At_Drought_Reproduction_P Parameter: Plant Line Value: WS
  misc_feature: MA Experiment 20001905 PARAMETER Experiment Name: At_Drought_Reproduction_P Parameter: Timepoint (day) Value: 10
  misc_feature: MA Experiment 20001905 PARAMETER Experiment Name: At_Drought_Reproduction_P Parameter: Tissue Value: Rosettes
  misc_feature: MA Experiment 20001905 PARAMETER Experiment Name: At_Drought_Reproduction_P Parameter: Treatment Value: Drought vs. No Drought
attttgaatacatatccaccacttgtcttgttcttgaaacacacggtcgtggccatgtctgttctgcttccgatctatcctctccaatccttggccagaagcaagagattgtttccggttcgaaccagatcaaaaccggtttgtttagcactgaccaatgctcaaacaaacggtggtgaccaagaggagaaagtagtgattgttggcgccgggattggcggacttgccactgccgtttcacttcacaggcttggaatccggtcggtggtgttggagcaggcagagtcgcttcgtactggaggaacatcgctgacgctattcaagaatgggtggcgcgttcttgatgccatctccgtggggcctcaactccgaacgcagtttcttgaaatcgaagggatggtagtgaagaaggaagatggaagagagcttcgttctttcaaattcaaagacgatgatcaaagccaagaagttcgggccgtggagaggcgagtactcttggaaacacttgcaagccagcttcctccacaaaccattcggttttcctcaaaactggaaagtatacaaagcaatgccaatggtgacactctccttcaacttggagatggaacccggttgcttgcacagattgttattggttgtgacggtatccggtctaaggttgcaacttggatggggttcagtgagccgaaatatgttggccattgcgcttaccgtggtcttgggttctatccaaatggacagccatttcagaaaaaggtgaactacatatacggtaaagggattagagctggatatgtacctgtatctacaacaaaagtctactggttcatctgtttcaacagcccatctctagggcccaaaattacggatccagcgatcctaaaaaaacaagccaaagaactggttagtacatggccagaagatctgcaaaacctcatcgatttaacacctgatgaaactatcagcagaactcctctagtagaccggtggctatggcctggcattgctcctccagcatcaaaaggccgagtggttctcgttggagatgcttggcacccaatgactccaaatcttggacaaggtgcttgttgtgccttggaagattcagtagttctggcaaataaactagccaatgcaataaatggaggaaccgaatcaattgaagtagcaatggaatcatacgggagtgagagatggtctcgagcattcccgttgacagtacgcgcaaacctagttggcgcacttctgcaatgggagaatcctctagtgtgttccattagaaacaatattgtcataccaaagttactgaggcttggaccaatgcttgaacacacaaactttgagtgtgaacctctctttgtttctaaaagctgaatttcgt

SEQ ID NO: 40341 - protein, 457 aa, Arabidopsis thaliana
  peptide (1)..(457): Ceres Seq. ID no. 12395572
  misc_feature (206)..(410): Pfam Name: Monooxygenase Pfam Description: Monooxygenase
  misc_feature (30)..(449): Homolog of NCBI NO: 34393624 NR Description: putative monooxygenase 2 [Oryza sativa (japonica
  misc_feature (19)..(431): Homolog of NCBI NO: 21592928 NR Description: putative monooxygenase [Arabidopsis thaliana]
  misc_feature (19)..(431): Homolog of NCBI NO: 25453535 NR Description: CTF2B protein [imported] - Arabidopsis thaliana
  misc_feature (19)..(431): Homolog of NCBI NO: 18402126 NR Description: monooxygenase family
  misc_feature (25)..(143): Homolog of NCBI NO: 25408403 NR Description: probable monooxygenase [imported] - Arabidopsis
  misc_feature (140)..(457): Homolog of NCBI NO: 25408403 NR Description: probable monooxygenase [imported] - Arabidopsis
  misc_feature (19)..(457): Homolog of NCBI NO: 25453534 NR Description: CTF2A protein [imported] - Arabidopsis thaliana
  misc_feature (19)..(457): Homolog of NCBI NO: 18403916 NR Description: monooxygenase family
  misc_feature (19)..(457): Homolog of NCBI NO: 21536869 NR Description: putative monooxygenase [Arabidopsis thaliana]
  misc_feature (9)..(457): Homolog of NCBI NO: 4164576 NR Description: CTF2A [Arabidopsis thaliana]
ILNTYPPLVLFLKHTVVAMSVLLPIYPLQSLARSKRLFPVRTRSKPVCLALTNAQTNGGDQEEKVVIVGAGIGGLATAVSLHRLGIRSVVLEQAESLRTGGTSLTLFKNGWRVLDAISVGPQLRTQFLEIEGMVVKKEDGRELRSFKFKDDDQSQEVRAVERRVLLETLASQLPPQTIRFSSKLESIQSNANGDTLLQLGDGTRLLAQIVIGCDGIRSKVATWMGFSEPKYVGHCAYRGLGFYPNGQPFQKKVNYIYGKGIRAGYVPVSTTKVYWFICFNSPSLGPKITDPAILKKQAKELVSTWPEDLQNLIDLTPDETISRTPLVDRWLWPGIAPPASKGRVVLVGDAWHPMTPNLGQGACCALEDSVVLANKLANAINGGTESIEVAMESYGSERWSRAFPLTVRANLVGALLQWENPLVCSIRNNIVIPKLLRLGPMLEHTNFECEPLFVSKS

SEQ ID NO: 40342 - protein, 439 aa, Arabidopsis thaliana
  peptide (1)..(439): Ceres Seq. ID no. 12395573
  misc_feature (188)..(392): Pfam Name: Monooxygenase Pfam Description: Monooxygenase
  misc_feature (12)..(431): Homolog of NCBI NO: 34393624 NR Description: putative monooxygenase 2 [Oryza sativa (japonica
  misc_feature (1)..(413): Homolog of NCBI NO: 21592928 NR Description: putative monooxygenase [Arabidopsis thaliana]
  misc_feature (1)..(413): Homolog of NCBI NO: 25453535 NR Description: CTF2B protein [imported] - Arabidopsis thaliana
  misc_feature (1)..(413): Homolog of NCBI NO: 18402126 NR Description: monooxygenase family
  misc_feature (7)..(125): Homolog of NCBI NO: 25408403 NR Description: probable monooxygenase [imported] - Arabidopsis
  misc_feature (122)..(439): Homolog of NCBI NO: 25408403 NR Description: probable monooxygenase [imported] - Arabidopsis
  misc_feature (1)..(439): Homolog of NCBI NO: 25453534 NR Description: CTF2A protein [imported] - Arabidopsis thaliana
  misc_feature (1)..(439): Homolog of NCBI NO: 18403916 NR Description: monooxygenase family
  misc_feature (1)..(439): Homolog of NCBI NO: 21536869 NR Description: putative monooxygenase [Arabidopsis thaliana]
  misc_feature (1)..(439): Homolog of NCBI NO: 4164576 NR Description: CTF2A [Arabidopsis thaliana]
MSVLLPIYPLQSLARSKRLFPVRTRSKPVCLALTNAQTNGGDQEEKVVIVGAGIGGLATAVSLHRLGIRSVVLEQAESLRTGGTSLTLFKNGWRVLDAISVGPQLRTQFLEIEGMVVKKEDGRELRSFKFKDDDQSQEVRAVERRVLLETLASQLPPQTIRFSSKLESIQSNANGDTLLQLGDGTRLLAQIVIGCDGIRSKVATWMGFSEPKYVGHCAYRGLGFYPNGQPFQKKVNYIYGKGIRAGYVPVSTTKVYWFICFNSPSLGPKITDPAILKKQAKELVSTWPEDLQNLIDLTPDETISRTPLVDRWLWPGIAPPASKGRVVLVGDAWHPMTPNLGQGACCALEDSVVLANKLANAINGGTESIEVAMESYGSERWSRAFPLTVRANLVGALLQWENPLVCSIRNNIVIPKLLRLGPMLEHTNFECEPLFVSKS

SEQ ID NO: 40343 - protein, 325 aa, Arabidopsis thaliana
  peptide (1)..(325): Ceres Seq. ID no. 12395574
  misc_feature (74)..(278): Pfam Name: Monooxygenase Pfam Description: Monooxygenase
  misc_feature (1)..(317): Homolog of NCBI NO: 34393624 NR Description: putative monooxygenase 2 [Oryza sativa (japonica
  misc_feature (1)..(299): Homolog of NCBI NO: 21592928 NR Description: putative monooxygenase [Arabidopsis thaliana]
  misc_feature (1)..(299): Homolog of NCBI NO: 25453535 NR Description: CTF2B protein [imported] - Arabidopsis thaliana
  misc_feature (1)..(299): Homolog of NCBI NO: 18402126 NR Description: monooxygenase family
  misc_feature (1)..(11): Homolog of NCBI NO: 25408403 NR Description: probable monooxygenase [imported] - Arabidopsis
  misc_feature (8)..(325): Homolog of NCBI NO: 25408403 NR Description: probable monooxygenase [imported] - Arabidopsis
  misc_feature (1)..(325): Homolog of NCBI NO: 25453534 NR Description: CTF2A protein [imported] - Arabidopsis thaliana
  misc_feature (1)..(325): Homolog of NCBI NO: 18403916 NR Description: monooxygenase family
  misc_feature (1)..(325): Homolog of NCBI NO: 21536869 NR Description: putative monooxygenase [Arabidopsis thaliana]
  misc_feature (1)..(325): Homolog of NCBI NO: 4164576 NR Description: CTF2A [Arabidopsis thaliana]
MVVKKEDGRELRSFKFKDDDQSQEVRAVERRVLLETLASQLPPQTIRFSSKLESIQSNANGDTLLQLGDGTRLLAQIVIGCDGIRSKVATWMGFSEPKYVGHCAYRGLGFYPNGQPFQKKVNYIYGKGIRAGYVPVSTTKVYWFICFNSPSLGPKITDPAILKKQAKELVSTWPEDLQNLIDLTPDETISRTPLVDRWLWPGIAPPASKGRVVLVGDAWHPMTPNLGQGACCALEDSVVLANKLANAINGGTESIEVAMESYGSERWSRAFPLTVRANLVGALLQWENPLVCSIRNNIVIPKLLRLGPMLEHTNFECEPLFVSKS

SEQ ID NO: 40344 - DNA, 1535 bp, Arabidopsis thaliana
  misc_feature (1)..(1535): Ceres Seq. ID no. 12348672
  misc_feature: MA Experiment ID: 108434 Result: Down-regulated in Transcription
  misc_feature: MA Experiment 108434 PARAMETER Experiment Name: At_Root_Tips_cDNA_P Parameter: Tissue Value: Root Tips
  misc_feature: MA Experiment ID: 108461 Result: Up-regulated in Transcription
  misc_feature: MA Experiment 108461 PARAMETER Experiment Name: At_Germinating_Seeds_cDNA_P Parameter: Age (day) Value: 1 vs. 0
  misc_feature: MA Experiment 108461 PARAMETER Experiment Name: At_Germinating_Seeds_cDNA_P Parameter: Tissue Value: Germinating Seeds
  misc_feature: MA Experiment ID: 108464 Result: Up-regulated in Transcription
  misc_feature: MA Experiment 108464 PARAMETER Experiment Name: At_Germinating_Seeds_cDNA_P Parameter: Age (day) Value: 4 vs. 0
  misc_feature: MA Experiment 108464 PARAMETER Experiment Name: At_Germinating_Seeds_cDNA_P Parameter: Tissue Value: Germinating Seeds
  misc_feature: MA Experiment ID: 108569 Result: Up-regulated in Transcription
  misc_feature: MA Experiment 108569 PARAMETER Experiment Name: At_0.001%_MeJA__cDNA_P Parameter: Timepoint (hr) Value: 6
  misc_feature: MA Experiment 108569 PARAMETER Experiment Name: At_0.001%_MeJA__cDNA_P Parameter: Tissue Value: Aerial
  misc_feature: MA Experiment 108569 PARAMETER Experiment Name: At_0.001%_MeJA__cDNA_P Parameter: Treatment Value: 0.001% MeJA vs. No Treatment
  misc_feature: MA Experiment ID: 108574 Result: Up-regulated in Transcription
  misc_feature: MA Experiment 108574 PARAMETER Experiment Name: At_Wounding__cDNA_P Parameter: Timepoint (hr) Value: 1
  misc_feature: MA Experiment 108574 PARAMETER Experiment Name: At_Wounding__cDNA_P Parameter: Tissue Value: Aerial
  misc_feature: MA Experiment 108574 PARAMETER Experiment Name: At_Wounding__cDNA_P Parameter: Treatment Value: Wounding vs. No Wounding
  misc_feature: MA Experiment ID: 108594 Result: Up-regulated in Transcription
  misc_feature: MA Experiment 108594 PARAMETER Experiment Name: At_Ler-rhl_Root_cDNA_P Parameter: Plant Line Value: null
  misc_feature: MA Experiment ID: 20000173 Result: Up-regulated in Transcription
  misc_feature: MA Experiment 20000173 PARAMETER Experiment Name: At_42deg_Heat_P Parameter: Age (day) Value: 14
  misc_feature: MA Experiment 20000173 PARAMETER Experiment Name: At_42deg_Heat_P Parameter: Organism Value: A. thaliana
  misc_feature: MA Experiment 20000173 PARAMETER Experiment Name: At_42deg_Heat_P Parameter: Plant Line Value: WS
  misc_feature: MA Experiment 20000173 PARAMETER Experiment Name: At_42deg_Heat_P Parameter: Temperature (deg C) Value: 42 vs. 22
  misc_feature: MA Experiment 20000173 PARAMETER Experiment Name: At_42deg_Heat_P Parameter: Timepoint (hr) Value: 6
  misc_feature: MA Experiment 20000173 PARAMETER Experiment Name: At_42deg_Heat_P Parameter: Tissue Value: Aerial
  misc_feature: MA Experiment ID: 20000180 Result: Up-regulated in Transcription
  misc_feature: MA Experiment 20000180 PARAMETER Experiment Name: At_Germinating_Seeds_P Parameter: Age (hr) Value: 24 vs. 0
  misc_feature: MA Experiment 20000180 PARAMETER Experiment Name: At_Germinating_Seeds_P Parameter: Tissue Value: Germinating Seeds
  misc_feature: MA Experiment ID: 20000185 Result: Up-regulated in Transcription
  misc_feature: MA Experiment 20000185 PARAMETER Experiment Name: At_Roots__P Parameter: Age (day) Value: 7 vs. 21
  misc_feature: MA Experiment 20000185 PARAMETER Experiment Name: At_Roots__P Parameter: Organism Value: A. thaliana
  misc_feature: MA Experiment 20000185 PARAMETER Experiment Name: At_Roots__P Parameter: Tissue Value: Roots vs. Whole Plant
  misc_feature: MA Experiment ID: 20000211 Result: Up-regulated in Transcription
  misc_feature: MA Experiment 20000211 PARAMETER Experiment Name: At_0.001percent_MeJA__P Parameter: Age (day) Value: 14
  misc_feature: MA Experiment 20000211 PARAMETER Experiment Name: At_0.001percent_MeJA__P Parameter: Organism Value: A. thaliana
  misc_feature: MA Experiment 20000211 PARAMETER Experiment Name: At_0.001percent_MeJA__P Parameter: Plant Line Value: WS
  misc_feature: MA Experiment 20000211 PARAMETER Experiment Name: At_0.001percent_MeJA__P Parameter: Timepoint (hr) Value: 1
  misc_feature: MA Experiment 20000211 PARAMETER Experiment Name: At_0.001percent_MeJA__P Parameter: Tissue Value: Aerial
  misc_feature: MA Experiment 20000211 PARAMETER Experiment Name: At_0.001percent_MeJA__P Parameter: Treatment Value: 0.001percent MeJA vs. No Treatment
  misc_feature: MA Experiment ID: 20000227 Result: Up-regulated in Transcription
  misc_feature: MA Experiment 20000227 PARAMETER Experiment Name: At_Root-Tips-vs-Tops_P Parameter: Tissue Value: Root Tips vs. Root Tops
  misc_feature: MA Experiment ID: 20000308 Result: Up-regulated in Transcription
  misc_feature: MA Experiment 20000308 PARAMETER Experiment Name: At_100mM_NaCl__P Parameter: Age (day) Value: 17
  misc_feature: MA Experiment 20000308 PARAMETER Experiment Name: At_100mM_NaCl__P Parameter: Organism Value: A. thaliana
  misc_feature: MA Experiment 20000308 PARAMETER Experiment Name: At_100mM_NaCl__P Parameter: Plant Line Value: WS
  misc_feature: MA Experiment 20000308 PARAMETER Experiment Name: At_100mM_NaCl__P Parameter: Timepoint (hr) Value: 72
  misc_feature: MA Experiment 20000308 PARAMETER Experiment Name: At_100mM_NaCl__P Parameter: Tissue Value: Whole Plant
  misc_feature: MA Experiment 20000308 PARAMETER Experiment Name: At_100mM_NaCl__P Parameter: Treatment Value: 100mM NaCl vs. No Treatment
  misc_feature: MA Experiment ID: 20000439 Result: Up-regulated in Transcription
  misc_feature: MA Experiment 20000439 PARAMETER Experiment Name: At_Roots__P Parameter: Age (day) Value: 14 vs. 21
  misc_feature: MA Experiment 20000439 PARAMETER Experiment Name: At_Roots__P Parameter: Organism Value: A. thaliana
  misc_feature: MA Experiment 20000439 PARAMETER Experiment Name: At_Roots__P Parameter: Tissue Value: Roots vs. Whole Plant
  misc_feature: MA Experiment ID: 20000456 Result: Up-regulated in Transcription
  misc_feature: MA Experiment 20000456 PARAMETER Experiment Name: At_100uM_BA_P Parameter: Age (day) Value: 14
  misc_feature: MA Experiment 20000456 PARAMETER Experiment Name: At_100uM_BA_P Parameter: Organism Value: A. thaliana
  misc_feature: MA Experiment 20000456 PARAMETER Experiment Name: At_100uM_BA_P Parameter: Plant Line Value: WS
  misc_feature: MA Experiment 20000456 PARAMETER Experiment Name: At_100uM_BA_P Parameter: Timepoint (hr) Value: 6
  misc_feature: MA Experiment 20000456 PARAMETER Experiment Name: At_100uM_BA_P Parameter: Tissue Value: Aerial
  misc_feature: MA Experiment 20000456 PARAMETER Experiment Name: At_100uM_BA_P Parameter: Treatment Value: 100uM BA vs. No Treatment
  misc_feature: MA Experiment ID: 20000527 Result: Down-regulated in Transcription
  misc_feature: MA Experiment 20000527 PARAMETER Experiment Name: At_10percent_PEG_P Parameter: Age (day) Value: 20
  misc_feature: MA Experiment 20000527 PARAMETER Experiment Name: At_10percent_PEG_P Parameter: Organism Value: A. thaliana
  misc_feature: MA Experiment 20000527 PARAMETER Experiment Name: At_10percent_PEG_P Parameter: Plant Line Value: WS
  misc_feature: MA Experiment 20000527 PARAMETER Experiment Name: At_10percent_PEG_P Parameter: Timepoint (day) Value: 20
  misc_feature: MA Experiment 20000527 PARAMETER Experiment Name: At_10percent_PEG_P Parameter: Tissue Value: Whole Plant
  misc_feature: MA Experiment 20000527 PARAMETER Experiment Name: At_10percent_PEG_P Parameter: Treatment Value: 10percent PEG vs. No Treatment
acaaacaatcacattcatcatttcatttaccaaaaaaaattataacctgaatataatagagatgggtagtagcctcacgcgcctactagtcttcctttccattttcgcagccatagctctgaaatcaaactctcaataccttcttccgatcaccaagcacgaacccaccaatctattctacaccactttcaacgtcggatccgccgcaaaatctcccgtaaacctcctcctcgacctcggaacaaacctcacgtggctcgactgccgcaaacttaaatctttatcatctctccgcctagtcacttgccagagctccacatgcaagtctatccccggtaatggatgcgctggcaaatcttgtctttacaagcaaccaaacccactcggacaaaaccccgttgtaaccggccgtgtcgtccaagacagagcttccatctacaccacagacggcggcaagttcctctctcaagtctccgtccgccacttcacattctcatgcgccggtgagaaagccctccaaggccttcctcctccagtcgacggagttctggctctttctcccggatcttcgtcgttcacgaaacaagtgacgtcagcgtttaacgtcatccctaaattctctctctgcttgccttcttccggtaccggtcatttctatatcgccggcattcactactttatcccaccattcaatagtagcgataatccgattccaaggactttaactcccattaaaggcactgactcaggagattatctaatcactgtaaaatctatctacgttggtggaactgctttgaagttgaaccctgatttgctaaccggcggagccaaactcagtacggtggttcactacaccgtacttcaaaccgatatctacaatgctcttgctcagtcttttacactcaaggctaaggctatgggaatagctaaggttccatcggtggcgccgtttaaacattgttttgattcacgcaccgctggaaagaatttgacggcggggcctaacgtgcccgtgatagagattggtctgccggggaggataggggaggtaaagtgggggttctacggtgcgaatacggtggtgaaagtgaaggaaacggtgatgtgtttggcgtttatcgacggtggaaagacaccgaaggatttgatggtgattgggacacatcagcttcaagatcatatgctcgagttcgatttcagcgggacggttctcgcttttagtgagtcactcttgctccataacacaagctgctccacttggccttcccaaaaatagaatcatcagtcactcatgatagtatcacagtttttggtcttgtatgacacgttttcagcgacacatgtgttctaatcgaaattttaagaaattatcacccgtttctcataaatatcgtctatgttattttattcaaatttgatattcgcttgttttgataaaaaatattgtctgaggattttgcacattaataattatctaaagtattctgtatttcttattagaaattgcaatttagatttgaaattcaaaagtt

SEQ ID NO: 40345 - protein, 425 aa, Arabidopsis thaliana
  peptide (1)..(425): Ceres Seq. ID no. 12348673
  misc_feature (101)..(410): Pfam Name: Eukaryotic aspartyl protease Pfam Description: Eukaryotic aspartyl protease
  misc_feature (49)..(421): Homolog of NCBI NO: 34907230 NR Description: putative dermal glycoprotein precursor
  misc_feature (114)..(419): Homolog of NCBI NO: 10334495 NR Description: putative extracellular dermal glycoprotein [Cicer
  misc_feature (100)..(421): Homolog of NCBI NO: 18379072 NR Description: expressed protein
  misc_feature (28)..(418): Homolog of NCBI NO: 23954367 NR Description: xylanase inhibitor [Triticum aestivum]
  misc_feature (106)..(421): Homolog of NCBI NO: 21537233 NR Description: EDGP precursor [Arabidopsis thaliana]
  misc_feature (106)..(421): Homolog of NCBI NO: 15218740 NR Description: unknown protein
  misc_feature (88)..(421): Homolog of NCBI NO: 7488910 NR Description: dermal glycoprotein precursor, extracellular -
  misc_feature (107)..(421): Homolog of NCBI NO: 27372527 NR Description: xyloglucan-specific fungal endoglucanase
  misc_feature (107)..(421): Homolog of NCBI NO: 32482806 NR Description: putative xyloglucanase inhibitor [Solanum
  misc_feature (21)..(425): Homolog of NCBI NO: 15239655 NR Description: dermal glycoprotein - like; protein id:
QTITFIISFTKKNYNLNIIEMGSSLTRLLVFLSIFAAIALKSNSQYLLPITKHEPTNLFYTTFNVGSAAKSPVNLLLDLGTNLTWLDCRKLKSLSSLRLVTCQSSTCKSIPGNGCAGKSCLYKQPNPLGQNPVVTGRVVQDRASIYTTDGGKFLSQVSVRHFTFSCAGEKALQGLPPPVDGVLALSPGSSSFTKQVTSAFNVIPKFSLCLPSSGTGHFYIAGIHYFIPPFNSSDNPIPRTLTPIKGTDSGDYLITVKSIYVGGTALKLNPDLLTGGAKLSTVVHYTVLQTDIYNALAQSFTLKAKAMGIAKVPSVAPFKHCFDSRTAGKNLTAGPNVPVIEIGLPGRIGEVKWGFYGANTVVKVKETVMCLAFIDGGKTPKDLMVIGTHQLQDHMLEFDFSGTVLAFSESLLLHNTSCSTWPSQK

SEQ ID NO: 40346 - protein, 405 aa, Arabidopsis thaliana
  peptide (1)..(405): Ceres Seq. ID no. 12348674
  misc_feature (81)..(390): Pfam Name: Eukaryotic aspartyl protease Pfam Description: Eukaryotic aspartyl protease
  misc_feature (29)..(401): Homolog of NCBI NO: 34907230 NR Description: putative dermal glycoprotein precursor
  misc_feature (94)..(399): Homolog of NCBI NO: 10334495 NR Description: putative extracellular dermal glycoprotein [Cicer
  misc_feature (80)..(401): Homolog of NCBI NO: 18379072 NR Description: expressed protein
  misc_feature (8)..(398): Homolog of NCBI NO: 23954367 NR Description: xylanase inhibitor [Triticum aestivum]
  misc_feature (86)..(401): Homolog of NCBI NO: 21537233 NR Description: EDGP precursor [Arabidopsis thaliana]
  misc_feature (86)..(401): Homolog of NCBI NO: 15218740 NR Description: unknown protein
  misc_feature (68)..(401): Homolog of NCBI NO: 7488910 NR Description: dermal glycoprotein precursor, extracellular -
  misc_feature (87)..(401): Homolog of NCBI NO: 27372527 NR Description: xyloglucan-specific fungal endoglucanase
  misc_feature (87)..(401): Homolog of NCBI NO: 32482806 NR Description: putative xyloglucanase inhibitor [Solanum
  misc_feature (1)..(405): Homolog of NCBI NO: 15239655 NR Description: dermal glycoprotein - like; protein id:
MGSSLTRLLVFLSIFAAIALKSNSQYLLPITKHEPTNLFYTTFNVGSAAKSPVNLLLDLGTNLTWLDCRKLKSLSSLRLVTCQSSTCKSIPGNGCAGKSCLYKQPNPLGQNPVVTGRVVQDRASIYTTDGGKFLSQVSVRHFTFSCAGEKALQGLPPPVDGVLALSPGSSSFTKQVTSAFNVIPKFSLCLPSSGTGHFYIAGIHYFIPPFNSSDNPIPRTLTPIKGTDSGDYLITVKSIYVGGTALKLNPDLLTGGAKLSTVVHYTVLQTDIYNALAQSFTLKAKAMGIAKVPSVAPFKHCFDSRTAGKNLTAGPNVPVIEIGLPGRIGEVKWGFYGANTVVKVKETVMCLAFIDGGKTPKDLMVIGTHQLQDHMLEFDFSGTVLAFSESLLLHNTSCSTWPSQK

SEQ ID NO: 40347 - DNA, 1370 bp, Arabidopsis thaliana
  misc_feature (1)..(1370): Ceres Seq. ID no. 12385146
  misc_feature: MA Experiment ID: 108461 Result: Up-regulated in Transcription
  misc_feature: MA Experiment 108461 PARAMETER Experiment Name: At_Germinating_Seeds_cDNA_P Parameter: Age (day) Value: 1 vs. 0
  misc_feature: MA Experiment 108461 PARAMETER Experiment Name: At_Germinating_Seeds_cDNA_P Parameter: Tissue Value: Germinating Seeds
  misc_feature: MA Experiment ID: 108462 Result: Up-regulated in Transcription
  misc_feature: MA Experiment 108462 PARAMETER Experiment Name: At_Germinating_Seeds_cDNA_P Parameter: Age (day) Value: 2 vs. 0
  misc_feature: MA Experiment 108462 PARAMETER Experiment Name: At_Germinating_Seeds_cDNA_P Parameter: Tissue Value: Germinating Seeds
  misc_feature: MA Experiment ID: 108463 Result: Up-regulated in Transcription
  misc_feature: MA Experiment 108463 PARAMETER Experiment Name: At_Germinating_Seeds_cDNA_P Parameter: Age (day) Value: 3 vs. 0
  misc_feature: MA Experiment 108463 PARAMETER Experiment Name: At_Germinating_Seeds_cDNA_P Parameter: Tissue Value: Germinating Seeds
  misc_feature: MA Experiment ID: 108561 Result: Down-regulated in Transcription
  misc_feature: MA Experiment 108561 PARAMETER Experiment Name: At_100uM_ABA_cDNA_P Parameter: Timepoint (hr) Value: 6
  misc_feature: MA Experiment 108561 PARAMETER Experiment Name: At_100uM_ABA_cDNA_P Parameter: Tissue Value: Aerial
  misc_feature: MA Experiment 108561 PARAMETER Experiment Name: At_100uM_ABA_cDNA_P Parameter: Treatment Value: 100uM ABA vs. No Treatment
  misc_feature: MA Experiment ID: 108573 Result: Down-regulated in Transcription
  misc_feature: MA Experiment 108573 PARAMETER Experiment Name: At_Drought_cDNA_P Parameter: Timepoint (hr) Value: 6
  misc_feature: MA Experiment 108573 PARAMETER Experiment Name: At_Drought_cDNA_P Parameter: Tissue Value: Aerial
  misc_feature: MA Experiment 108573 PARAMETER Experiment Name: At_Drought_cDNA_P Parameter: Treatment Value: Drought vs. No Drought
  misc_feature: MA Experiment ID: 108577 Result: Down-regulated in Transcription
  misc_feature: MA Experiment 108577 PARAMETER Experiment Name: At_42deg_Heat_cDNA_P Parameter: Temperature (deg C) Value: 42 vs. 22
  misc_feature: MA Experiment 108577 PARAMETER Experiment Name: At_42deg_Heat_cDNA_P Parameter: Timepoint (hr) Value: 6
  misc_feature: MA Experiment 108577 PARAMETER Experiment Name: At_42deg_Heat_cDNA_P Parameter: Tissue Value: Aerial
  misc_feature: MA Experiment ID: 108585 Result: Down-regulated in Transcription
  misc_feature: MA Experiment 108585 PARAMETER Experiment Name: At_5mM_NaNP_cDNA_P Parameter: Timepoint (hr) Value: 6
  misc_feature: MA Experiment 108585 PARAMETER Experiment Name: At_5mM_NaNP_cDNA_P Parameter: Tissue Value: Aerial
  misc_feature: MA Experiment 108585 PARAMETER Experiment Name: At_5mM_NaNP_cDNA_P Parameter: Treatment Value: null
  misc_feature: MA Experiment ID: 108595 Result: Down-regulated in Transcription
  misc_feature: MA Experiment 108595 PARAMETER Experiment Name: At_Ler-pi_Ovule_cDNA_P Parameter: Plant Line Value: null
  misc_feature: MA Experiment ID: 20000113 Result: Down-regulated in Transcription
  misc_feature: MA Experiment 20000113 PARAMETER Experiment Name: At_42deg_Heat_cDNA_P Parameter: Temperature (deg C) Value: 42 vs. 22
  misc_feature: MA Experiment 20000113 PARAMETER Experiment Name: At_42deg_Heat_cDNA_P Parameter: Timepoint (hr) Value: 8
  misc_feature: MA Experiment 20000113 PARAMETER Experiment Name: At_42deg_Heat_cDNA_P Parameter: Tissue Value: Aerial
  misc_feature: MA Experiment ID: 20000173 Result: Down-regulated in Transcription
  misc_feature: MA Experiment 20000173 PARAMETER Experiment Name: At_42deg_Heat_P Parameter: Age (day) Value: 14
  misc_feature: MA Experiment 20000173 PARAMETER Experiment Name: At_42deg_Heat_P Parameter: Organism Value: A. thaliana
  misc_feature: MA Experiment 20000173 PARAMETER Experiment Name: At_42deg_Heat_P Parameter: Plant Line Value: WS
  misc_feature: MA Experiment 20000173 PARAMETER Experiment Name: At_42deg_Heat_P Parameter: Temperature (deg C) Value: 42 vs. 22
  misc_feature: MA Experiment 20000173 PARAMETER Experiment Name: At_42deg_Heat_P Parameter: Timepoint (hr) Value: 6
  misc_feature: MA Experiment 20000173 PARAMETER Experiment Name: At_42deg_Heat_P Parameter: Tissue Value: Aerial
  misc_feature: MA Experiment ID: 20000179 Result: Up-regulated in Transcription
  misc_feature: MA Experiment 20000179 PARAMETER Experiment Name: At_Germinating_Seeds_P Parameter: Age (hr) Value: 6 vs. 0
  misc_feature: MA Experiment 20000179 PARAMETER Experiment Name: At_Germinating_Seeds_P Parameter: Tissue Value: Germinating Seeds
  misc_feature: MA Experiment ID: 20000180 Result: Up-regulated in Transcription
  misc_feature: MA Experiment 20000180 PARAMETER Experiment Name: At_Germinating_Seeds_P Parameter: Age (hr) Value: 24 vs. 0
  misc_feature: MA Experiment 20000180 PARAMETER Experiment Name: At_Germinating_Seeds_P Parameter: Tissue Value: Germinating Seeds
  misc_feature: MA Experiment ID: 20000227 Result: Up-regulated in Transcription
  misc_feature: MA Experiment 20000227 PARAMETER Experiment Name: At_Root-Tips-vs-Tops_P Parameter: Tissue Value: Root Tips vs. Root Tops
  misc_feature: MA Experiment ID: 20000234 Result: Up-regulated in Transcription
  misc_feature: MA Experiment 20000234 PARAMETER Experiment Name: At_Siliques_P Parameter: Age (day) Value: 21
  misc_feature: MA Experiment 20000234 PARAMETER Experiment Name: At_Siliques_P Parameter: Organism Value: A. thaliana
  misc_feature: MA Experiment 20000234 PARAMETER Experiment Name: At_Siliques_P Parameter: Plant Line Value: WS
  misc_feature: MA Experiment 20000234 PARAMETER Experiment Name: At_Siliques_P Parameter: Tissue Value: Less Than 5mm Siliques vs. Whole Plant
  misc_feature: MA Experiment ID: 20000437 Result: Down-regulated in Transcription
  misc_feature: MA Experiment 20000437 PARAMETER Experiment Name: At_Drought_P Parameter: Age (day) Value: 8
  misc_feature: MA Experiment 20000437 PARAMETER Experiment Name: At_Drought_P Parameter: Organism Value: A. thaliana
  misc_feature: MA Experiment 20000437 PARAMETER Experiment Name: At_Drought_P Parameter: Plant Line Value: WS
  misc_feature: MA Experiment 20000437 PARAMETER Experiment Name: At_Drought_P Parameter: Timepoint (hr) Value: 24
  misc_feature: MA Experiment 20000437 PARAMETER Experiment Name: At_Drought_P Parameter: Tissue Value: Whole Plant
  misc_feature: MA Experiment 20000437 PARAMETER Experiment Name: At_Drought_P Parameter: Treatment Value: Drought vs. No Drought
  misc_feature: MA Experiment ID: 20001911 Result: Down-regulated in Transcription
  misc_feature: MA Experiment 20001911 PARAMETER Experiment Name: At_Drought_Reproduction_P Parameter: Age (day) Value: 40
  misc_feature: MA Experiment 20001911 PARAMETER Experiment Name: At_Drought_Reproduction_P Parameter: Organism Value: A. thaliana
  misc_feature: MA Experiment 20001911 PARAMETER Experiment Name: At_Drought_Reproduction_P Parameter: Plant Line Value: WS
  misc_feature: MA Experiment 20001911 PARAMETER Experiment Name: At_Drought_Reproduction_P Parameter: Timepoint (day) Value: 10
  misc_feature: MA Experiment 20001911 PARAMETER Experiment Name: At_Drought_Reproduction_P Parameter: Tissue Value: Flowers
  misc_feature: MA Experiment 20001911 PARAMETER Experiment Name: At_Drought_Reproduction_P Parameter: Treatment Value: Drought vs. No Drought
acaaaggaaaacgttaatggtggatctgagcactgtcaatgtcatcaccaccgaagtagagttgactccactcaacagaaactgaaactggaaagtttgagacttttaagtgatgaaaagttctcagatgtcagaaacagaatttaaagtgttgcttgagacattcacatttcctgctgattctgctcccttcaagagttgtcatgcctctaccatagttgaggttgttaaagatcatttcttggctgcgtatttcggaggcaccagggaaggagcacctgatgtcaaaatctggttgcagcatttcaaggatggtcaatgggattcaccggttattgttgatgaagagccaggagttccaatgtataaccctgtcttgttcaaacttccatctcatgagctcttattgttctacaaaatcggccaggaggttcaaaaatggagtggttgcatgaaacgatcatatgataaaggtataacttggactgaaagagaacagcttcctcctgggattctcggtcctatcaaaaacaagcccattttgcttgaagacggtactctcctttgcggatcatctgttgagagttggaattcttggggagcatggatggaggtcacttcagatgcgggtagaacatggagaaagaaagggccaatatacattcaaggcaagagtcttagcgtgatccaaccagttccataccaaaccgcagctgggaacttacggattttactcagatcctttactggcattgacaaaatctgtatctcagagtctttggatggcggtgagaactggagttttgcagtaccaacggttctcccaaacccaaattcaggtattgatggagtcaagcttaaggatggtaggctagtgcttgcttacaacacagactcaagaggtgtgctcaaattaggagtttctttagacgacggtgattcatggaccgatattttaacgttggaggaatctccgggaatggagtattcgtacccggctgttatacaaagccggagacggcaatgtccacgtcacctatacatataacaggacacaaattaagcatgtggtgctcaagactgcgacagatatcgattcgaagccataccgacatggtgaagcaggaggaggacacgtgaacttggatttgtacgaaccaaacattaattaattagctatttgtctcttgaaccatcgatgtggagtgtgacttccttcttacggaagaacaaagaatgttctctttcttgtcttgtaagttattgattgatcgattcttgagtttgtaaaagttgccactagttgatgaatattattgagattgtttataatatatttattgtaatcatataagttagagatttacttt

SEQ ID NO: 40348 - protein, 311 aa, Arabidopsis thaliana
  peptide (1)..(311): Ceres Seq. ID no. 12385147
  misc_feature (20)..(301): Homolog of NCBI NO: 21232340 NR Description: conserved hypothetical protein
  misc_feature (20)..(301): Homolog of NCBI NO: 21243816 NR Description: conserved hypothetical protein
  misc_feature (10)..(300): Homolog of NCBI NO: 23617011 NR Description: hypothetial protein~similar to Arabidopsis
  misc_feature (1)..(300): Homolog of NCBI NO: 34393670 NR Description: alpha-rhamnosidase-like protein
  misc_feature (6)..(300): Homolog of NCBI NO: 26452755 NR Description: unknown protein [Arabidopsis thaliana]
  misc_feature (6)..(300): Homolog of NCBI NO: 30696919 NR Description: expressed protein [Arabidopsis thaliana]
  misc_feature (6)..(300): Homolog of NCBI NO: 21536870 NR Description: unknown [Arabidopsis thaliana]
  misc_feature (1)..(144): Homolog of NCBI NO: 9759267 NR Description: gene_id:MRI1.6~pir||D64592~similar to unknown
  misc_feature (142)..(300): Homolog of NCBI NO: 9759267 NR Description: gene_id:MRI1.6~pir||D64592~similar to unknown
  misc_feature (1)..(300): Homolog of NCBI NO: 30696915 NR Description: expressed protein [Arabidopsis thaliana]
MKSSQMSETEFKVLLETFTFPADSAPFKSCHASTIVEVVKDHFLAAYFGGTREGAPDVKIWLQHFKDGQWDSPVIVDEEPGVPMYNPVLFKLPSHELLLFYKIGQEVQKWSGCMKRSYDKGITWTEREQLPPGILGPIKNKPILLEDGTLLCGSSVESWNSWGAWMEVTSDAGRTWRKKGPIYIQGKSLSVIQPVPYQTAAGNLRILLRSFTGIDKICISESLDGGENWSFAVPTVLPNPNSGIDGVKLKDGRLVLAYNTDSRGVLKLGVSLDDGDSWTDILTLEESPGMEYSYPAVIQSRRRQCPRHLYI

SEQ ID NO: 40349 - protein, 306 aa, Arabidopsis thaliana
  peptide (1)..(306): Ceres Seq. ID no. 12385148
  misc_feature (15)..(296): Homolog of NCBI NO: 21232340 NR Description: conserved hypothetical protein
  misc_feature (15)..(296): Homolog of NCBI NO: 21243816 NR Description: conserved hypothetical protein
  misc_feature (5)..(295): Homolog of NCBI NO: 23617011 NR Description: hypothetial protein~similar to Arabidopsis
  misc_feature (1)..(295): Homolog of NCBI NO: 34393670 NR Description: alpha-rhamnosidase-like protein
  misc_feature (1)..(295): Homolog of NCBI NO: 26452755 NR Description: unknown protein [Arabidopsis thaliana]
  misc_feature (1)..(295): Homolog of NCBI NO: 30696919 NR Description: expressed protein [Arabidopsis thaliana]
  misc_feature (1)..(295): Homolog of NCBI NO: 21536870 NR Description: unknown [Arabidopsis thaliana]
  misc_feature (1)..(139): Homolog of NCBI NO: 9759267 NR Description: gene_id:MRI1.6~pir||D64592~similar to unknown
  misc_feature (137)..(295): Homolog of NCBI NO: 9759267 NR Description: gene_id:MRI1.6~pir||D64592~similar to unknown
  misc_feature (1)..(295): Homolog of NCBI NO: 30696915 NR Description: expressed protein [Arabidopsis thaliana]
MSETEFKVLLETFTFPADSAPFKSCHASTIVEVVKDHFLAAYFGGTREGAPDVKIWLQHFKDGQWDSPVIVDEEPGVPMYNPVLFKLPSHELLLFYKIGQEVQKWSGCMKRSYDKGITWTEREQLPPGILGPIKNKPILLEDGTLLCGSSVESWNSWGAWMEVTSDAGRTWRKKGPIYIQGKSLSVIQPVPYQTAAGNLRILLRSFTGIDKICISESLDGGENWSFAVPTVLPNPNSGIDGVKLKDGRLVLAYNTDSRGVLKLGVSLDDGDSWTDILTLEESPGMEYSYPAVIQSRRRQCPRHLYI

SEQ ID NO: 40350 - protein, 228 aa, Arabidopsis thaliana
  peptide (1)..(228): Ceres Seq. ID no. 12385149
  misc_feature (1)..(218): Homolog of NCBI NO: 21232340 NR Description: conserved hypothetical protein
  misc_feature (1)..(218): Homolog of NCBI NO: 21243816 NR Description: conserved hypothetical protein
  misc_feature (1)..(217): Homolog of NCBI NO: 23617011 NR Description: hypothetial protein~similar to Arabidopsis
  misc_feature (1)..(217): Homolog of NCBI NO: 34393670 NR Description: alpha-rhamnosidase-like protein
  misc_feature (1)..(217): Homolog of NCBI NO: 26452755 NR Description: unknown protein [Arabidopsis thaliana]
  misc_feature (1)..(217): Homolog of NCBI NO: 30696919 NR Description: expressed protein [Arabidopsis thaliana]
  misc_feature (1)..(217): Homolog of NCBI NO: 21536870 NR Description: unknown [Arabidopsis thaliana]
  misc_feature (1)..(61): Homolog of NCBI NO: 9759267 NR Description: gene_id:MRI1.6~pir||D64592~similar to unknown
  misc_feature (59)..(217): Homolog of NCBI NO: 9759267 NR Description: gene_id:MRI1.6~pir||D64592~similar to unknown
  misc_feature (1)..(217): Homolog of NCBI NO: 30696915 NR Description: expressed protein [Arabidopsis thaliana]
MYNPVLFKLPSHELLLFYKIGQEVQKWSGCMKRSYDKGITWTEREQLPPGILGPIKNKPILLEDGTLLCGSSVESWNSWGAWMEVTSDAGRTWRKKGPIYIQGKSLSVIQPVPYQTAAGNLRILLRSFTGIDKICISESLDGGENWSFAVPTVLPNPNSGIDGVKLKDGRLVLAYNTDSRGVLKLGVSLDDGDSWTDILTLEESPGMEYSYPAVIQSRRRQCPRHLYI

SEQ ID NO: 40351 - DNA, 1488 bp, Arabidopsis thaliana
  misc_feature (1)..(1488): Ceres Seq. ID no. 13492411
  misc_feature: MA Experiment ID: 108434 Result: Down-regulated in Transcription
  misc_feature: MA Experiment 108434 PARAMETER Experiment Name: At_Root_Tips_cDNA_P Parameter: Tissue Value: Root Tips
  misc_feature: MA Experiment ID: 108488 Result: Down-regulated in Transcription
  misc_feature: MA Experiment ID: 108579 Result: Up-regulated in Transcription
  misc_feature: MA Experiment 108579 PARAMETER Experiment Name: At_4deg_Cold_cDNA_P Parameter: Temperature (deg C) Value: 4 vs. 22
  misc_feature: MA Experiment 108579 PARAMETER Experiment Name: At_4deg_Cold_cDNA_P Parameter: Timepoint (hr) Value: 6
  misc_feature: MA Experiment 108579 PARAMETER Experiment Name: At_4deg_Cold_cDNA_P Parameter: Tissue Value: Aerial
  misc_feature: MA Experiment ID: 108594 Result: Down-regulated in Transcription
  misc_feature: MA Experiment 108594 PARAMETER Experiment Name: At_Ler-rhl_Root_cDNA_P Parameter: Plant Line Value: null
  misc_feature: MA Experiment ID: 20000069 Result: Up-regulated in Transcription
  misc_feature: MA Experiment 20000069 PARAMETER Experiment Name: At_100uM_ABA_Mutants_cDNA_P Parameter: Plant Line Value: CS23
  misc_feature: MA Experiment 20000069 PARAMETER Experiment Name: At_100uM_ABA_Mutants_cDNA_P Parameter: Timepoint (hr) Value: 6
  misc_feature: MA Experiment 20000069 PARAMETER Experiment Name: At_100uM_ABA_Mutants_cDNA_P Parameter: Tissue Value: Aerial
  misc_feature: MA Experiment 20000069 PARAMETER Experiment Name: At_100uM_ABA_Mutants_cDNA_P Parameter: Treatment Value: 100uM ABA vs. No Treatment
  misc_feature: MA Experiment ID: 20000070 Result: Up-regulated in Transcription
  misc_feature: MA Experiment 20000070 PARAMETER Experiment Name: At_100uM_ABA_Mutants_cDNA_P Parameter: Plant Line Value: CS24
  misc_feature: MA Experiment 20000070 PARAMETER Experiment Name: At_100uM_ABA_Mutants_cDNA_P Parameter: Timepoint (hr) Value: 6
  misc_feature: MA Experiment 20000070 PARAMETER Experiment Name: At_100uM_ABA_Mutants_cDNA_P Parameter: Tissue Value: Aerial
  misc_feature: MA Experiment 20000070 PARAMETER Experiment Name: At_100uM_ABA_Mutants_cDNA_P Parameter: Treatment Value: 100uM ABA vs. No Treatment
  misc_feature: MA Experiment ID: 20000071 Result: Up-regulated in Transcription
  misc_feature: MA Experiment 20000071 PARAMETER Experiment Name: At_100uM_ABA_Mutants_cDNA_P Parameter: Plant Line Value: CS8104
  misc_feature: MA Experiment 20000071 PARAMETER Experiment Name: At_100uM_ABA_Mutants_cDNA_P Parameter: Timepoint (hr) Value: 6
  misc_feature: MA Experiment 20000071 PARAMETER Experiment Name: At_100uM_ABA_Mutants_cDNA_P Parameter: Tissue Value: Aerial
  misc_feature: MA Experiment 20000071 PARAMETER Experiment Name: At_100uM_ABA_Mutants_cDNA_P Parameter: Treatment Value: 100uM ABA vs. No Treatment
  misc_feature: MA Experiment ID: 20000072 Result: Up-regulated in Transcription
  misc_feature: MA Experiment 20000072 PARAMETER Experiment Name: At_100uM_ABA_Mutants_cDNA_P Parameter: Plant Line Value: CS8105
  misc_feature: MA Experiment 20000072 PARAMETER Experiment Name: At_100uM_ABA_Mutants_cDNA_P Parameter: Timepoint (hr) Value: 6
  misc_feature: MA Experiment 20000072 PARAMETER Experiment Name: At_100uM_ABA_Mutants_cDNA_P Parameter: Tissue Value: Aerial
  misc_feature: MA Experiment 20000072 PARAMETER Experiment Name: At_100uM_ABA_Mutants_cDNA_P Parameter: Treatment Value: 100uM ABA vs. No Treatment
  misc_feature: MA Experiment ID: 20000086 Result: Up-regulated in Transcription
  misc_feature: MA Experiment 20000086 PARAMETER Experiment Name: At_100uM_ABA_Mutants_cDNA_P Parameter: Plant Line Value: CS22
  misc_feature: MA Experiment 20000086 PARAMETER Experiment Name: At_100uM_ABA_Mutants_cDNA_P Parameter: Timepoint (hr) Value: 6
  misc_feature: MA Experiment 20000086 PARAMETER Experiment Name: At_100uM_ABA_Mutants_cDNA_P Parameter: Tissue Value: Aerial
  misc_feature: MA Experiment 20000086 PARAMETER Experiment Name: At_100uM_ABA_Mutants_cDNA_P Parameter: Treatment Value: 100uM ABA vs. No Treatment
  misc_feature: MA Experiment ID: 20000088 Result: Up-regulated in Transcription
  misc_feature: MA Experiment 20000088 PARAMETER Experiment Name: At_100uM_ABA_Mutants_cDNA_P Parameter: Plant Line Value: Landsberg
  misc_feature: MA Experiment 20000088 PARAMETER Experiment Name: At_100uM_ABA_Mutants_cDNA_P Parameter: Timepoint (hr) Value: 6
  misc_feature: MA Experiment 20000088 PARAMETER Experiment Name: At_100uM_ABA_Mutants_cDNA_P Parameter: Tissue Value: Aerial
  misc_feature: MA Experiment 20000088 PARAMETER Experiment Name: At_100uM_ABA_Mutants_cDNA_P Parameter: Treatment Value: 100uM ABA vs. No Treatment
  misc_feature: MA Experiment ID: 20000089 Result: Up-regulated in Transcription
  misc_feature: MA Experiment ID: 20000090 Result: Up-regulated in Transcription
  misc_feature: MA Experiment ID: 20000093 Result: Up-regulated in Transcription
  misc_feature: MA Experiment 20000093 PARAMETER Experiment Name: At_42deg_Heat_cDNA_P Parameter: Temperature (deg C) Value: 42 vs. 22
  misc_feature: MA Experiment 20000093 PARAMETER Experiment Name: At_42deg_Heat_cDNA_P Parameter: Timepoint (hr) Value: 0.5
  misc_feature: MA Experiment 20000093 PARAMETER Experiment Name: At_42deg_Heat_cDNA_P Parameter: Tissue Value: Aerial
  misc_feature: MA Experiment ID: 20000112 Result: Up-regulated in Transcription
  misc_feature: MA Experiment 20000112 PARAMETER Experiment Name: At_42deg_Heat_cDNA_P Parameter: Temperature (deg C) Value: 42 vs. 22
  misc_feature: MA Experiment 20000112 PARAMETER Experiment Name: At_42deg_Heat_cDNA_P Parameter: Timepoint (hr) Value: 2
  misc_feature: MA Experiment 20000112 PARAMETER Experiment Name: At_42deg_Heat_cDNA_P Parameter: Tissue Value: Aerial
  misc_feature: MA Experiment ID: 20000117 Result: Up-regulated in Transcription
  misc_feature: MA Experiment 20000117 PARAMETER Experiment Name: At_100uM_ABA_Mutants_cDNA_P Parameter: Plant Line Value: Columbia
  misc_feature: MA Experiment 20000117 PARAMETER Experiment Name: At_100uM_ABA_Mutants_cDNA_P Parameter: Timepoint (hr) Value: 6
  misc_feature: MA Experiment 20000117 PARAMETER Experiment Name: At_100uM_ABA_Mutants_cDNA_P Parameter: Tissue Value: Aerial
  misc_feature: MA Experiment 20000117 PARAMETER Experiment Name: At_100uM_ABA_Mutants_cDNA_P Parameter: Treatment Value: 100uM ABA vs. No Treatment
  misc_feature: MA Experiment ID: 20000144 Result: Up-regulated in Transcription
  misc_feature: MA Experiment 20000144 PARAMETER Experiment Name: At_42deg_Heat_cDNA_P Parameter: Temperature (deg C) Value: 42 vs. 22
  misc_feature: MA Experiment 20000144 PARAMETER Experiment Name: At_42deg_Heat_cDNA_P Parameter: Timepoint (hr) Value: 1
  misc_feature: MA Experiment 20000144 PARAMETER Experiment Name: At_42deg_Heat_cDNA_P Parameter: Tissue Value: Aerial
  misc_feature: MA Experiment ID: 20000171 Result: Up-regulated in Transcription
  misc_feature: MA Experiment 20000171 PARAMETER Experiment Name: At_42deg_Heat_P Parameter: Age (day) Value: 14
  misc_feature: MA Experiment 20000171 PARAMETER Experiment Name: At_42deg_Heat_P Parameter: Organism Value: A. thaliana
  misc_feature: MA Experiment 20000171 PARAMETER Experiment Name: At_42deg_Heat_P Parameter: Plant Line Value: WS
  misc_feature: MA Experiment 20000171 PARAMETER Experiment Name: At_42deg_Heat_P Parameter: Temperature (deg C) Value: 42 vs. 22
  misc_feature: MA Experiment 20000171 PARAMETER Experiment Name: At_42deg_Heat_P Parameter: Timepoint (hr) Value: 1
  misc_feature: MA Experiment 20000171 PARAMETER Experiment Name: At_42deg_Heat_P Parameter: Tissue Value: Aerial
  misc_feature: MA Experiment ID: 20000184 Result: Down-regulated in Transcription
  misc_feature: MA Experiment 20000184 PARAMETER Experiment Name: At_Shoots__P Parameter: Age (day) Value: 7
  misc_feature: MA Experiment 20000184 PARAMETER Experiment Name: At_Shoots__P Parameter: Tissue Value: Shoots vs. Whole Plant
  misc_feature: MA Experiment ID: 20000438 Result: Down-regulated in Transcription
  misc_feature: MA Experiment 20000438 PARAMETER Experiment Name: At_Shoots__P Parameter: Age (day) Value: 14
  misc_feature: MA Experiment 20000438 PARAMETER Experiment Name: At_Shoots__P Parameter: Tissue Value: Shoots vs. Whole Plant
  misc_feature: MA Experiment ID: 20000794 Result: Up-regulated in Transcription
  misc_feature: MA Experiment 20000794 PARAMETER Experiment Name: At_Petals_P Parameter: Age (day) Value: 23-25 days
  misc_feature: MA Experiment 20000794 PARAMETER Experiment Name: At_Petals_P Parameter: Plant Line Value: WS
  misc_feature: MA Experiment 20000794 PARAMETER Experiment Name: At_Petals_P Parameter: Tissue Value: Petals vs. Whole plant
  misc_feature: MA Experiment ID: 20001757 Result: Down-regulated in Transcription
  misc_feature: MA Experiment 20001757 PARAMETER Experiment Name: At_50mM_NH4NO3_L-to-H_P Parameter: Timepoint (hr) Value: 6
  misc_feature: MA Experiment 20001757 PARAMETER Experiment Name: At_50mM_NH4NO3_L-to-H_P Parameter: Tissue Value: Leaf
  misc_feature: MA Experiment 20001757 PARAMETER Experiment Name: At_50mM_NH4NO3_L-to-H_P Parameter: Treatment Value: 50mM NH4NO3 vs 100mM Mannitol
gaagaaagcaaagaaatatcgaagaatttaaggaataaaaaataaaaacagaaagctggaggaagaaaaaataaaaattccttctttcctcctgaaggcaaaaaaggaagagaagagaagagaagagaaggaagcagaatctaattttggattataatcggagagagaatctattccgacgaatcttttcgggttgattttttggtctttaatttgaagggtttaggtgtggtttcgaagatgatggtagcgaatagtttcgatctatggcaaaaggatgtttttttctctgcagctgaggaggttcaagaatctgctgatataatggaatctgcgtataggttgtggtttaaagagaagagagacggtcgagtatccgtagaatcagacgagctctgcaaagaactccaagctgctttgagcactgctaaatggcagttggaagagtttgagagggcagtgagcttaagccatggaaattgtcgagatgacactaccttaactaggcataaacagtttgttaccgctattgaaaaccagatttatcaagtggaatctactctgctagagtcgttaagcgagaatgggaaacaacctttgcgttgggtggatcttaacaaagaagagcgtgatgatctcgccatgtttctatctggatcttctcagacgtcagagagtttaaacagtgatagcatcaacttgagagattcctcaacgagttctgtagctgagaatccacgtgggatcaatggcagaagagagggtagatgttatggcgacagtcctgattgtgtgatagacattgacgacataggaagtccggaaagtgcagataaaaaaggcggtacaagaagaacatggagttcaccaaatgtaccaaatatcagtgcgttgaggattaatgtccctgttaatgcaaaagaagaagagagggagaagttcctatcacatattgaagacactcctaaagagaaaggagctaaacctatgttttggctgcagagatgtcgtgattataaccagctctttgacagagtcaaggtttatcaaagacgatttcgcgttccattgagccgccctattaagctcattctttccttaacgctaatcttgattcttctattattcatcttgagaacttaaaaccgcggtttcagaaactctcaagaaacattgacaggttttttcacagattcttgcgtattgggttacacactcgttagatgctacatgattcaacatccttcgagggaaggaggagagattaaaagactttgtcaagattcaaatgaaggacaaagcctgatttattactctctcttaatcctcagggaacatataggaacctgtaaatttgtaagatcaatttgtaaaacttgaagctacgacgtttcgttaaactttagacgtgtacctaaaggaaaccaatgcgtgtttgtgctcaatgatatctccagtgtttgtttgtctctcagatatttgttttgg

SEQ ID NO: 40352 - protein, 300 aa, Arabidopsis thaliana
  peptide (1)..(300): Ceres Seq. ID no. 13492412
  misc_feature (3)..(68): Homolog of NCBI NO: 37533116 NR Description: unknown protein [Oryza sativa (japonica
  misc_feature (52)..(243): Homolog of NCBI NO: 37533116 NR Description: unknown protein [Oryza sativa (japonica
  misc_feature (3)..(141): Homolog of NCBI NO: 26006490 NR Description: Hypothetical protein [Oryza sativa (japonica
  misc_feature (3)..(146): Homolog of NCBI NO: 25403328 NR Description: protein T22C5.15 [imported] - Arabidopsis
  misc_feature (3)..(146): Homolog of NCBI NO: 18396454 NR Description: clathrin-coat assembly protein -related
  misc_feature (1)..(176): Homolog of NCBI NO: 40253501 NR Description: clathrin-coat assembly protein-like
  misc_feature (1)..(270): Homolog of NCBI NO: 7485788 NR Description: hypothetical protein At2g18860 [imported] -
  misc_feature (1)..(298): Homolog of NCBI NO: 30680486 NR Description: expressed protein [Arabidopsis thaliana]
  misc_feature (1)..(300): Homolog of NCBI NO: 18417554 NR Description: expressed protein [Arabidopsis thaliana]
  misc_feature (1)..(296): Homolog of NCBI NO: 7486766 NR Description: hypothetical protein F9N11.90 - Arabidopsis
MMVANSFDLWQKDVFFSAAEEVQESADIMESAYRLWFKEKRDGRVSVESDELCKELQAALSTAKWQLEEFERAVSLSHGNCRDDTTLTRHKQFVTAIENQIYQVESTLLESLSENGKQPLRWVDLNKEERDDLAMFLSGSSQTSESLNSDSINLRDSSTSSVAENPRGINGRREGRCYGDSPDCVIDIDDIGSPESADKKGGTRRTWSSPNVPNISALRINVPVNAKEEEREKFLSHIEDTPKEKGAKPMFWLQRCRDYNQLFDRVKVYQRRFRVPLSRPIKLILSLTLILILLLFILRT

SEQ ID NO: 40353 - protein, 299 aa, Arabidopsis thaliana
  peptide (1)..(299): Ceres Seq. ID no. 13492413
  misc_feature (2)..(67): Homolog of NCBI NO: 37533116 NR Description: unknown protein [Oryza sativa (japonica
  misc_feature (51)..(242): Homolog of NCBI NO: 37533116 NR Description: unknown protein [Oryza sativa (japonica
  misc_feature (2)..(140): Homolog of NCBI NO: 26006490 NR Description: Hypothetical protein [Oryza sativa (japonica
  misc_feature (2)..(145): Homolog of NCBI NO: 25403328 NR Description: protein T22C5.15 [imported] - Arabidopsis
  misc_feature (2)..(145): Homolog of NCBI NO: 18396454 NR Description: clathrin-coat assembly protein -related
  misc_feature (1)..(175): Homolog of NCBI NO: 40253501 NR Description: clathrin-coat assembly protein-like
  misc_feature (1)..(269): Homolog of NCBI NO: 7485788 NR Description: hypothetical protein At2g18860 [imported] -
  misc_feature (1)..(297): Homolog of NCBI NO: 30680486 NR Description: expressed protein [Arabidopsis thaliana]
  misc_feature (1)..(299): Homolog of NCBI NO: 18417554 NR Description: expressed protein [Arabidopsis thaliana]
  misc_feature (1)..(295): Homolog of NCBI NO: 7486766 NR Description: hypothetical protein F9N11.90 - Arabidopsis
MVANSFDLWQKDVFFSAAEEVQESADIMESAYRLWFKEKRDGRVSVESDELCKELQAALSTAKWQLEEFERAVSLSHGNCRDDTTLTRHKQFVTAIENQIYQVESTLLESLSENGKQPLRWVDLNKEERDDLAMFLSGSSQTSESLNSDSINLRDSSTSSVAENPRGINGRREGRCYGDSPDCVIDIDDIGSPESADKKGGTRRTWSSPNVPNISALRINVPVNAKEEEREKFLSHIEDTPKEKGAKPMFWLQRCRDYNQLFDRVKVYQRRFRVPLSRPIKLILSLTLILILLLFILRT

SEQ ID NO: 40354 - protein, 272 aa, Arabidopsis thaliana
  peptide (1)..(272): Ceres Seq. ID no. 13492414
  misc_feature (1)..(40): Homolog of NCBI NO: 37533116 NR Description: unknown protein [Oryza sativa (japonica
  misc_feature (24)..(215): Homolog of NCBI NO: 37533116 NR Description: unknown protein [Oryza sativa (japonica
  misc_feature (1)..(113): Homolog of NCBI NO: 26006490 NR Description: Hypothetical protein [Oryza sativa (japonica
  misc_feature (1)..(118): Homolog of NCBI NO: 25403328 NR Description: protein T22C5.15 [imported] - Arabidopsis
  misc_feature (1)..(118): Homolog of NCBI NO: 18396454 NR Description: clathrin-coat assembly protein -related
  misc_feature (1)..(148): Homolog of NCBI NO: 40253501 NR Description: clathrin-coat assembly protein-like
  misc_feature (1)..(242): Homolog of NCBI NO: 7485788 NR Description: hypothetical protein At2g18860 [imported] -
  misc_feature (1)..(270): Homolog of NCBI NO: 30680486 NR Description: expressed protein [Arabidopsis thaliana]
  misc_feature (1)..(272): Homolog of NCBI NO: 18417554 NR Description: expressed protein [Arabidopsis thaliana]
  misc_feature (1)..(268): Homolog of NCBI NO: 7486766 NR Description: hypothetical protein F9N11.90 - Arabidopsis
MESAYRLWFKEKRDGRVSVESDELCKELQAALSTAKWQLEEFERAVSLSHGNCRDDTTLTRHKQFVTAIENQIYQVESTLLESLSENGKQPLRWVDLNKEERDDLAMFLSGSSQTSESLNSDSINLRDSSTSSVAENPRGINGRREGRCYGDSPDCVIDIDDIGSPESADKKGGTRRTWSSPNVPNISALRINVPVNAKEEEREKFLSHIEDTPKEKGAKPMFWLQRCRDYNQLFDRVKVYQRRFRVPLSRPIKLILSLTLILILLLFILRT

SEQ ID NO: 40355 - DNA, 844 bp, Arabidopsis thaliana; identical to SEQ ID NO: 21187
  misc_feature (1)..(844): Ceres Seq. ID no. 12377524
  misc_feature: MA Experiment ID: 20000179 Result: Up-regulated in Transcription
  misc_feature: MA Experiment 20000179 PARAMETER Experiment Name: At_Germinating_Seeds_P Parameter: Age (hr) Value: 6 vs. 0
  misc_feature: MA Experiment 20000179 PARAMETER Experiment Name: At_Germinating_Seeds_P Parameter: Tissue Value: Germinating Seeds
  misc_feature: MA Experiment ID: 20000180 Result: Up-regulated in Transcription
  misc_feature: MA Experiment 20000180 PARAMETER Experiment Name: At_Germinating_Seeds_P Parameter: Age (hr) Value: 24 vs. 0
  misc_feature: MA Experiment 20000180 PARAMETER Experiment Name: At_Germinating_Seeds_P Parameter: Tissue Value: Germinating Seeds
  misc_feature: MA Experiment ID: 20000185 Result: Down-regulated in Transcription
  misc_feature: MA Experiment 20000185 PARAMETER Experiment Name: At_Roots__P Parameter: Age (day) Value: 7 vs. 21
  misc_feature: MA Experiment 20000185 PARAMETER Experiment Name: At_Roots__P Parameter: Organism Value: A. thaliana
  misc_feature: MA Experiment 20000185 PARAMETER Experiment Name: At_Roots__P Parameter: Tissue Value: Roots vs. Whole Plant
  misc_feature: MA Experiment ID: 20000286 Result: Down-regulated in Transcription
  misc_feature: MA Experiment 20000286 PARAMETER Experiment Name: At_Open_Flower_P Parameter: Age (day) Value: 21
  misc_feature: MA Experiment 20000286 PARAMETER Experiment Name: At_Open_Flower_P Parameter: Plant Line Value: WS
  misc_feature: MA Experiment 20000286 PARAMETER Experiment Name: At_Open_Flower_P Parameter: Tissue Value: Half Open vs. Whole Plant
  misc_feature: MA Experiment ID: 20000437 Result: Down-regulated in Transcription
  misc_feature: MA Experiment 20000437 PARAMETER Experiment Name: At_Drought_P Parameter: Age (day) Value: 8
  misc_feature: MA Experiment 20000437 PARAMETER Experiment Name: At_Drought_P Parameter: Organism Value: A. thaliana
  misc_feature: MA Experiment 20000437 PARAMETER Experiment Name: At_Drought_P Parameter: Plant Line Value: WS
  misc_feature: MA Experiment 20000437 PARAMETER Experiment Name: At_Drought_P Parameter: Timepoint (hr) Value: 24
  misc_feature: MA Experiment 20000437 PARAMETER Experiment Name: At_Drought_P Parameter: Tissue Value: Whole Plant
  misc_feature: MA Experiment 20000437 PARAMETER Experiment Name: At_Drought_P Parameter: Treatment Value: Drought vs. No Drought
  misc_feature: MA Experiment ID: 20000438 Result: Up-regulated in Transcription
  misc_feature: MA Experiment 20000438 PARAMETER Experiment Name: At_Shoots__P Parameter: Age (day) Value: 14
  misc_feature: MA Experiment 20000438 PARAMETER Experiment Name: At_Shoots__P Parameter: Tissue Value: Shoots vs. Whole Plant
  misc_feature: MA Experiment ID: 20000439 Result: Down-regulated in Transcription
  misc_feature: MA Experiment 20000439 PARAMETER Experiment Name: At_Roots__P Parameter: Age (day) Value: 14 vs. 21
  misc_feature: MA Experiment 20000439 PARAMETER Experiment Name: At_Roots__P Parameter: Organism Value: A. thaliana
  misc_feature: MA Experiment 20000439 PARAMETER Experiment Name: At_Roots__P Parameter: Tissue Value: Roots vs. Whole Plant
  misc_feature: MA Experiment ID: 20000496 Result: Down-regulated in Transcription
  misc_feature: MA Experiment 20000496 PARAMETER Experiment Name: At_Guard_Cells_P Parameter: Harvest Date Value: 7/19/2002
  misc_feature: MA Experiment 20000496 PARAMETER Experiment Name: At_Guard_Cells_P Parameter: Organism Value: Canola
  misc_feature: MA Experiment 20000496 PARAMETER Experiment Name: At_Guard_Cells_P Parameter: Tissue Value: Guard Cells vs. Leaves
  misc_feature: MA Experiment ID: 20000794 Result: Down-regulated in Transcription
  misc_feature: MA Experiment 20000794 PARAMETER Experiment Name: At_Petals_P Parameter: Age (day) Value: 23-25 days
  misc_feature: MA Experiment 20000794 PARAMETER Experiment Name: At_Petals_P Parameter: Plant Line Value: WS
  misc_feature: MA Experiment 20000794 PARAMETER Experiment Name: At_Petals_P Parameter: Tissue Value: Petals vs. Whole plant
  misc_feature: MA Experiment ID: 20001248 Result: Down-regulated in Transcription
  misc_feature: MA Experiment 20001248 PARAMETER Experiment Name: At_Far-red-induction_P Parameter: Age (day) Value: 7
  misc_feature: MA Experiment 20001248 PARAMETER Experiment Name: At_Far-red-induction_P Parameter: Light Value: Far-red vs. White
  misc_feature: MA Experiment 20001248 PARAMETER Experiment Name: At_Far-red-induction_P Parameter: Organism Value: A. thaliana
  misc_feature: MA Experiment 20001248 PARAMETER Experiment Name: At_Far-red-induction_P Parameter: Plant Line Value: Columbia
  misc_feature: MA Experiment 20001248 PARAMETER Experiment Name: At_Far-red-induction_P Parameter: Timepoint (hr) Value: 4
  misc_feature: MA Experiment 20001248 PARAMETER Experiment Name: At_Far-red-induction_P Parameter: Tissue Value: Whole Plant
  misc_feature: MA Experiment ID: 20001451 Result: Down-regulated in Transcription
  misc_feature: MA Experiment 20001451 PARAMETER Experiment Name: At_Far-red-induction_P Parameter: Age (day) Value: 7
  misc_feature: MA Experiment 20001451 PARAMETER Experiment Name: At_Far-red-induction_P Parameter: Light Value: Far-red vs. White
  misc_feature: MA Experiment 20001451 PARAMETER Experiment Name: At_Far-red-induction_P Parameter: Organism Value: A. thaliana
  misc_feature: MA Experiment 20001451 PARAMETER Experiment Name: At_Far-red-induction_P Parameter: Plant Line Value: Columbia
  misc_feature: MA Experiment 20001451 PARAMETER Experiment Name: At_Far-red-induction_P Parameter: Timepoint (hr) Value: 24
  misc_feature: MA Experiment 20001451 PARAMETER Experiment Name: At_Far-red-induction_P Parameter: Tissue Value: Whole Plant
  misc_feature: MA Experiment ID: 20001558 Result: Down-regulated in Transcription
  misc_feature: MA Experiment 20001558 PARAMETER Experiment Name: At_Drought_Soil_Dry_P Parameter: Age (day) Value: 27
  misc_feature: MA Experiment 20001558 PARAMETER Experiment Name: At_Drought_Soil_Dry_P Parameter: Organism Value: A. thaliana
  misc_feature: MA Experiment 20001558 PARAMETER Experiment Name: At_Drought_Soil_Dry_P Parameter: Plant Line Value: WS
  misc_feature: MA Experiment 20001558 PARAMETER Experiment Name: At_Drought_Soil_Dry_P Parameter: Post Timepoint (hr) Value: 6
  misc_feature: MA Experiment 20001558 PARAMETER Experiment Name: At_Drought_Soil_Dry_P Parameter: Post-Treatment Value: Re-Water vs. No Drought
  misc_feature: MA Experiment 20001558 PARAMETER Experiment Name: At_Drought_Soil_Dry_P Parameter: Timepoint (day) Value: 13
  misc_feature: MA Experiment 20001558 PARAMETER Experiment Name: At_Drought_Soil_Dry_P Parameter: Treatment Value: Drought vs. No Drought
  misc_feature: MA Experiment ID: 20001757 Result: Up-regulated in Transcription
  misc_feature: MA Experiment 20001757 PARAMETER Experiment Name: At_50mM_NH4NO3_L-to-H_P Parameter: Timepoint (hr) Value: 6
  misc_feature: MA Experiment 20001757 PARAMETER Experiment Name: At_50mM_NH4NO3_L-to-H_P Parameter: Tissue Value: Leaf
  misc_feature: MA Experiment 20001757 PARAMETER Experiment Name: At_50mM_NH4NO3_L-to-H_P Parameter: Treatment Value: 50mM NH4NO3 vs 100mM Mannitol
  misc_feature: MA Experiment ID: 20001905 Result: Down-regulated in Transcription
  misc_feature: MA Experiment 20001905 PARAMETER Experiment Name: At_Drought_Reproduction_P Parameter: Age (day) Value: 40
  misc_feature: MA Experiment 20001905 PARAMETER Experiment Name: At_Drought_Reproduction_P Parameter: Organism Value: A. thaliana
  misc_feature: MA Experiment 20001905 PARAMETER Experiment Name: At_Drought_Reproduction_P Parameter: Plant Line Value: WS
  misc_feature: MA Experiment 20001905 PARAMETER Experiment Name: At_Drought_Reproduction_P Parameter: Timepoint (day) Value: 10
  misc_feature: MA Experiment 20001905 PARAMETER Experiment Name: At_Drought_Reproduction_P Parameter: Tissue Value: Rosettes
  misc_feature: MA Experiment 20001905 PARAMETER Experiment Name: At_Drought_Reproduction_P Parameter: Treatment Value: Drought vs. No Drought
  misc_feature: MA Experiment ID: 20001906 Result: Down-regulated in Transcription
  misc_feature: MA Experiment 20001906 PARAMETER Experiment Name: At_Drought_Reproduction_P Parameter: Age (day) Value: 35
  misc_feature: MA Experiment 20001906 PARAMETER Experiment Name: At_Drought_Reproduction_P Parameter: Organism Value: A. thaliana
  misc_feature: MA Experiment 20001906 PARAMETER Experiment Name: At_Drought_Reproduction_P Parameter: Plant Line Value: WS
  misc_feature: MA Experiment 20001906 PARAMETER Experiment Name: At_Drought_Reproduction_P Parameter: Timepoint (day) Value: 5
  misc_feature: MA Experiment 20001906 PARAMETER Experiment Name: At_Drought_Reproduction_P Parameter: Tissue Value: Siliques
  misc_feature: MA Experiment 20001906 PARAMETER Experiment Name: At_Drought_Reproduction_P Parameter: Treatment Value: Drought vs. No Drought
  misc_feature: MA Experiment ID: 20001908 Result: Down-regulated in Transcription
  misc_feature: MA Experiment 20001908 PARAMETER Experiment Name: At_Drought_Reproduction_P Parameter: Age (day) Value: 40
  misc_feature: MA Experiment 20001908 PARAMETER Experiment Name: At_Drought_Reproduction_P Parameter: Organism Value: A. thaliana
  misc_feature: MA Experiment 20001908 PARAMETER Experiment Name: At_Drought_Reproduction_P Parameter: Plant Line Value: WS
  misc_feature: MA Experiment 20001908 PARAMETER Experiment Name: At_Drought_Reproduction_P Parameter: Timepoint (day) Value: 10
  misc_feature: MA Experiment 20001908 PARAMETER Experiment Name: At_Drought_Reproduction_P Parameter: Tissue Value: Siliques
  misc_feature: MA Experiment 20001908 PARAMETER Experiment Name: At_Drought_Reproduction_P Parameter: Treatment Value: Drought vs. No Drought

SEQ ID NO: 40356 - protein, 208 aa, Arabidopsis thaliana; identical to SEQ ID NO: 21188
  peptide (1)..(208): Ceres Seq. ID no. 12377525
  misc_feature (70)..(207): Pfam Name: PsaD Pfam Description: PsaD
  misc_feature (70)..(207): Pfam Name: PsaD Pfam Description: PsaD
  misc_feature (5)..(208): Homolog of NCBI NO: 1488649 NR Description: psaD [Spinacia oleracea]
  misc_feature (1)..(208): Homolog of NCBI NO: 34787117 NR Description: putative photosystem I reaction centre PSI-D
  misc_feature (1)..(208): Homolog of NCBI NO: 417544 NR Description: Photosystem I reaction center subunit II,
  misc_feature (1)..(208): Homolog of NCBI NO: 19855891 NR Description: Photosystem I reaction center subunit II,
  misc_feature (1)..(208): Homolog of NCBI NO: 21293 NR Description: 20 kDa protein (AA 1-212) [Spinacia oleracea]
  misc_feature (1)..(208): Homolog of NCBI NO: 21595031 NR Description: putative photosystem I reaction center subunit II
  misc_feature (1)..(208): Homolog of NCBI NO: 34787117 NR Description: putative photosystem I reaction centre PSI-D
  misc_feature (1)..(208): Homolog of NCBI NO: 15218708 NR Description: putative photosystem I reaction center subunit II
  misc_feature (1)..(208): Homolog of NCBI NO: 5732201 NR Description: photosystem I subunit II precursor [Arabidopsis
  misc_feature (1)..(208): Homolog of NCBI NO: 72680 NR Description: photosystem I chain II precursor - spinach
  misc_feature (1)..(208): Homolog of NCBI NO: 21293 NR Description: 20 kDa protein (AA 1-212) [Spinacia oleracea]
  misc_feature (1)..(208): Homolog of NCBI NO: 19855891 NR Description: Photosystem I reaction center subunit II,
  misc_feature (1)..(208): Homolog of NCBI NO: 417544 NR Description: Photosystem I reaction center subunit II,
  misc_feature (5)..(208): Homolog of NCBI NO: 1488649 NR Description: psaD [Spinacia oleracea]
  misc_feature (1)..(208): Homolog of NCBI NO: 15235503 NR Description: putative photosystem I reaction center subunit II
  misc_feature (1)..(208): Homolog of NCBI NO: 72680 NR Description: photosystem I chain II precursor - spinach
  misc_feature (1)..(208): Homolog of NCBI NO: 5732201 NR Description: photosystem I subunit II precursor [Arabidopsis
  misc_feature (1)..(208): Homolog of NCBI NO: 15218708 NR Description: putative photosystem I reaction center subunit II
  misc_feature (1)..(208): Homolog of NCBI NO: 21595031 NR Description: putative photosystem I reaction center subunit II
  misc_feature (1)..(208): Homolog of NCBI NO: 15235503 NR Description: putative photosystem I reaction center subunit II

SEQ ID NO: 40357 - DNA, 1205 bp, Arabidopsis thaliana
  misc_feature (1)..(1205): Ceres Seq. ID no. 12385178
  misc_feature: MA Experiment ID: 108435 Result: Down-regulated in Transcription
  misc_feature: MA Experiment 108435 PARAMETER Experiment Name: At_stm_Mutants_cDNA_P Parameter: Plant Line Value: wt Landsburg vs stm
  misc_feature: MA Experiment 108435 PARAMETER Experiment Name: At_stm_Mutants_cDNA_P Parameter: Tissue Value: Shoot Apical Meristem Region
  misc_feature: MA Experiment ID: 108462 Result: Up-regulated in Transcription
  misc_feature: MA Experiment 108462 PARAMETER Experiment Name: At_Germinating_Seeds_cDNA_P Parameter: Age (day) Value: 2 vs. 0
  misc_feature: MA Experiment 108462 PARAMETER Experiment Name: At_Germinating_Seeds_cDNA_P Parameter: Tissue Value: Germinating Seeds
  misc_feature: MA Experiment ID: 108463 Result: Up-regulated in Transcription
  misc_feature: MA Experiment 108463 PARAMETER Experiment Name: At_Germinating_Seeds_cDNA_P Parameter: Age (day) Value: 3 vs. 0
  misc_feature: MA Experiment 108463 PARAMETER Experiment Name: At_Germinating_Seeds_cDNA_P Parameter: Tissue Value: Germinating Seeds
  misc_feature: MA Experiment ID: 108464 Result: Up-regulated in Transcription
  misc_feature: MA Experiment 108464 PARAMETER Experiment Name: At_Germinating_Seeds_cDNA_P Parameter: Age (day) Value: 4 vs. 0
  misc_feature: MA Experiment 108464 PARAMETER Experiment Name: At_Germinating_Seeds_cDNA_P Parameter: Tissue Value: Germinating Seeds
  misc_feature: MA Experiment ID: 108488 Result: Up-regulated in Transcription
  misc_feature: MA Experiment ID: 20000113 Result: Down-regulated in Transcription
  misc_feature: MA Experiment 20000113 PARAMETER Experiment Name: At_42deg_Heat_cDNA_P Parameter: Temperature (deg C) Value: 42 vs. 22
  misc_feature: MA Experiment 20000113 PARAMETER Experiment Name: At_42deg_Heat_cDNA_P Parameter: Timepoint (hr) Value: 8
  misc_feature: MA Experiment 20000113 PARAMETER Experiment Name: At_42deg_Heat_cDNA_P Parameter: Tissue Value: Aerial
aaactttcgctctctcattcatcaaaaaaacttgcacatcttctcagatcttcaagtttctcctctggtttctcatcatgaccgttgatattatgcgtttacctaagatggaagatcaaacggctatacaagaagctgcatcacaaggcttaaaaagcatggaacacttgattcgtgtcctctctaaccgtcccgaagaacgtaacgttgattgctctgagatcactgatttcacagtttctaagttcaagaaagttatctctcttcttaaccgttccggtcacgcccggtttagacgtggtccggttcattcccctccttcctcctccgttcctccaccggtgaaagtgacaactccggctcccactcagatctctgctccagcaccggttagcttcgttcaggcaaatcaacaaagcgtgacgttagatttcactagaccgagcgtttttggcgctaaaaccaagagctcggaggttgttgagtttgctaaagagagctttagcgtatcttctaactcttctttcatgtcttctgcgatcaccggtgatggaagtgtctctaaaggctcttcgatctttcttgctccggctccagcggtgccagtgacttcctccgggaaaccgccgctttctggtcttccttacaggaagagatgctttgaacatgaccactctgaaggcttttccggcaagatctctggctccggcaacggcaagtgccattgcaagaaaagccgaaaaaatcggatgaagagaaccgtgagagtaccggcggtaagtgcaaagatcgccgatataccaccagacgaatattcatggagaaagtatggacaaaaaccgatcaaaggctcaccacatccacggggttattacaagtgtagtacatttagaggatgtccagcgaggaaacacgtggaaagagctttggatgattcaacgatgttgattgtgacgtacgaaggagagcaccgtcatcaccagtccacgatgcaggagcatgtaactcctagcgtgagtggtttggtgtttggttcggcttgaagaattaattagtttggtagttttgtaatattttgagaaatagaggggttggttttgtaattttttttctataacaaaattagttttagatttttttttagtagtcttttgaatggattttaatcttactaccgagaaagaaaaaattcttactacattttc

SEQ ID NO: 40358 - protein, 346 aa, Arabidopsis thaliana
  peptide (1)..(346): Ceres Seq. ID no. 12385179
  misc_feature (267)..(327): Pfam Name: WRKY DNA -binding domain Pfam Description: WRKY DNA -binding domain
  misc_feature (25)..(61): Homolog of NCBI NO: 4894963 NR Description: DNA-binding protein WRKY3 [Avena sativa]
  misc_feature (113)..(325): Homolog of NCBI NO: 4894963 NR Description: DNA-binding protein WRKY3 [Avena sativa]
  misc_feature (35)..(333): Homolog of NCBI NO: 38568048 NR Description: OSJNBa0065J03.18 [Oryza sativa (japonica
  misc_feature (26)..(345): Homolog of NCBI NO: 4760596 NR Description: DNA-binding protein NtWRKY3 [Nicotiana tabacum]
  misc_feature (26)..(346): Homolog of NCBI NO: 22329054 NR Description: WRKY family transcription factor
  misc_feature (26)..(346): Homolog of NCBI NO: 21537078 NR Description: putaive DNA-binding protein [Arabidopsis thaliana]
  misc_feature (26)..(346): Homolog of NCBI NO: 16604573 NR Description: putative putaive DNA-binding protein [Arabidopsis
  misc_feature (26)..(346): Homolog of NCBI NO: 30689072 NR Description: WRKY family transcription factor [Arabidopsis
  misc_feature (26)..(337): Homolog of NCBI NO: 25348152 NR Description: probable WRKY-type DNA binding protein
  misc_feature (26)..(346): Homolog of NCBI NO: 18400580 NR Description: WRKY family transcription factor
TFALSFIKKTCTSSQIFKFLLWFLIMTVDIMRLPKMEDQTAIQEAASQGLKSMEHLIRVLSNRPEERNVDCSEITDFTVSKFKKVISLLNRSGHARFRRGPVHSPPSSSVPPPVKVTTPAPTQISAPAPVSFVQANQQSVTLDFTRPSVFGAKTKSSEVVEFAKESFSVSSNSSFMSSAITGDGSVSKGSSIFLAPAPAVPVTSSGKPPLSGLPYRKRCFEHDHSEGFSGKISGSGNGKCHCKKSRKNRMKRTVRVPAVSAKIADIPPDEYSWRKYGQKPIKGSPHPRGYYKCSTFRGCPARKHVERALDDSTMLIVTYEGEHRHHQSTMQEHVTPSVSGLVFGSA

SEQ ID NO: 40359 - protein, 321 aa, Arabidopsis thaliana
  peptide (1)..(321): Ceres Seq. ID no. 12385180
  misc_feature (242)..(302): Pfam Name: WRKY DNA -binding domain Pfam Description: WRKY DNA -binding domain
  misc_feature (1)..(36): Homolog of NCBI NO: 4894963 NR Description: DNA-binding protein WRKY3 [Avena sativa]
  misc_feature (88)..(300): Homolog of NCBI NO: 4894963 NR Description: DNA-binding protein WRKY3 [Avena sativa]
  misc_feature (10)..(308): Homolog of NCBI NO: 38568048 NR Description: OSJNBa0065J03.18 [Oryza sativa (japonica
  misc_feature (1)..(320): Homolog of NCBI NO: 4760596 NR Description: DNA-binding protein NtWRKY3 [Nicotiana tabacum]
  misc_feature (1)..(321): Homolog of NCBI NO: 22329054 NR Description: WRKY family transcription factor
  misc_feature (1)..(321): Homolog of NCBI NO: 21537078 NR Description: putaive DNA-binding protein [Arabidopsis thaliana]
  misc_feature (1)..(321): Homolog of NCBI NO: 16604573 NR Description: putative putaive DNA-binding protein [Arabidopsis
  misc_feature (1)..(321): Homolog of NCBI NO: 30689072 NR Description: WRKY family transcription factor [Arabidopsis
  misc_feature (1)..(312): Homolog of NCBI NO: 25348152 NR Description: probable WRKY-type DNA binding protein
  misc_feature (1)..(321): Homolog of NCBI NO: 18400580 NR Description: WRKY family transcription factor
MTVDIMRLPKMEDQTAIQEAASQGLKSMEHLIRVLSNRPEERNVDCSEITDFTVSKFKKVISLLNRSGHARFRRGPVHSPPSSSVPPPVKVTTPAPTQISAPAPVSFVQANQQSVTLDFTRPSVFGAKTKSSEVVEFAKESFSVSSNSSFMSSAITGDGSVSKGSSIFLAPAPAVPVTSSGKPPLSGLPYRKRCFEHDHSEGFSGKISGSGNGKCHCKKSRKNRMKRTVRVPAVSAKIADIPPDEYSWRKYGQKPIKGSPHPRGYYKCSTFRGCPARKHVERALDDSTMLIVTYEGEHRHHQSTMQEHVTPSVSGLVFGSA

SEQ ID NO: 40360 - protein, 316 aa, Arabidopsis thaliana
  peptide (1)..(316): Ceres Seq. ID no. 12385181
  misc_feature (237)..(297): Pfam Name: WRKY DNA -binding domain Pfam Description: WRKY DNA -binding domain
  misc_feature (1)..(31): Homolog of NCBI NO: 4894963 NR Description: DNA-binding protein WRKY3 [Avena sativa]
  misc_feature (83)..(295): Homolog of NCBI NO: 4894963 NR Description: DNA-binding protein WRKY3 [Avena sativa]
  misc_feature (5)..(303): Homolog of NCBI NO: 38568048 NR Description: OSJNBa0065J03.18 [Oryza sativa (japonica
  misc_feature (1)..(315): Homolog of NCBI NO: 4760596 NR Description: DNA-binding protein NtWRKY3 [Nicotiana tabacum]
  misc_feature (1)..(316): Homolog of NCBI NO: 22329054 NR Description: WRKY family transcription factor
  misc_feature (1)..(316): Homolog of NCBI NO: 21537078 NR Description: putaive DNA-binding protein [Arabidopsis thaliana]
  misc_feature (1)..(316): Homolog of NCBI NO: 16604573 NR Description: putative putaive DNA-binding protein [Arabidopsis
  misc_feature (1)..(316): Homolog of NCBI NO: 30689072 NR Description: WRKY family transcription factor [Arabidopsis
  misc_feature (1)..(307): Homolog of NCBI NO: 25348152 NR Description: probable WRKY-type DNA binding protein
  misc_feature (1)..(316): Homolog of NCBI NO: 18400580 NR Description: WRKY family transcription factor
MRLPKMEDQTAIQEAASQGLKSMEHLIRVLSNRPEERNVDCSEITDFTVSKFKKVISLLNRSGHARFRRGPVHSPPSSSVPPPVKVTTPAPTQISAPAPVSFVQANQQSVTLDFTRPSVFGAKTKSSEVVEFAKESFSVSSNSSFMSSAITGDGSVSKGSSIFLAPAPAVPVTSSGKPPLSGLPYRKRCFEHDHSEGFSGKISGSGNGKCHCKKSRKNRMKRTVRVPAVSAKIADIPPDEYSWRKYGQKPIKGSPHPRGYYKCSTFRGCPARKHVERALDDSTMLIVTYEGEHRHHQSTMQEHVTPSVSGLVFGSA

SEQ ID NO: 40361 - DNA, 1121 bp, Arabidopsis thaliana
  misc_feature (1)..(1121): Ceres Seq. ID no. 13497353
  misc_feature: MA Experiment ID: 108462 Result: Up-regulated in Transcription
  misc_feature: MA Experiment 108462 PARAMETER Experiment Name: At_Germinating_Seeds_cDNA_P Parameter: Age (day) Value: 2 vs. 0
  misc_feature: MA Experiment 108462 PARAMETER Experiment Name: At_Germinating_Seeds_cDNA_P Parameter: Tissue Value: Germinating Seeds
  misc_feature: MA Experiment ID: 108464 Result: Up-regulated in Transcription
  misc_feature: MA Experiment 108464 PARAMETER Experiment Name: At_Germinating_Seeds_cDNA_P Parameter: Age (day) Value: 4 vs. 0
  misc_feature: MA Experiment 108464 PARAMETER Experiment Name: At_Germinating_Seeds_cDNA_P Parameter: Tissue Value: Germinating Seeds
  misc_feature: MA Experiment ID: 108585 Result: Down-regulated in Transcription
  misc_feature: MA Experiment 108585 PARAMETER Experiment Name: At_5mM_NaNP_cDNA_P Parameter: Timepoint (hr) Value: 6
  misc_feature: MA Experiment 108585 PARAMETER Experiment Name: At_5mM_NaNP_cDNA_P Parameter: Tissue Value: Aerial
  misc_feature: MA Experiment 108585 PARAMETER Experiment Name: At_5mM_NaNP_cDNA_P Parameter: Treatment Value: null
  misc_feature: MA Experiment ID: 108595 Result: Down-regulated in Transcription
  misc_feature: MA Experiment 108595 PARAMETER Experiment Name: At_Ler-pi_Ovule_cDNA_P Parameter: Plant Line Value: null
  misc_feature: MA Experiment ID: 108668 Result: Down-regulated in Transcription
  misc_feature: MA Experiment 108668 PARAMETER Experiment Name: At_2mM_SA_cDNA_P Parameter: Plant Line Value: WS
  misc_feature: MA Experiment 108668 PARAMETER Experiment Name: At_2mM_SA_cDNA_P Parameter: Timepoint (hr) Value: 6
  misc_feature: MA Experiment 108668 PARAMETER Experiment Name: At_2mM_SA_cDNA_P Parameter: Treatment Value: 2mM SA vs. No Treatment
  misc_feature: MA Experiment ID: 20000070 Result: Down-regulated in Transcription
  misc_feature: MA Experiment 20000070 PARAMETER Experiment Name: At_100uM_ABA_Mutants_cDNA_P Parameter: Plant Line Value: CS24
  misc_feature: MA Experiment 20000070 PARAMETER Experiment Name: At_100uM_ABA_Mutants_cDNA_P Parameter: Timepoint (hr) Value: 6
  misc_feature: MA Experiment 20000070 PARAMETER Experiment Name: At_100uM_ABA_Mutants_cDNA_P Parameter: Tissue Value: Aerial
  misc_feature: MA Experiment 20000070 PARAMETER Experiment Name: At_100uM_ABA_Mutants_cDNA_P Parameter: Treatment Value: 100uM ABA vs. No Treatment
  misc_feature: MA Experiment ID: 20000087 Result: Down-regulated in Transcription
  misc_feature: MA Experiment 20000087 PARAMETER Experiment Name: At_100uM_ABA_Mutants_cDNA_P Parameter: Plant Line Value: WS
  misc_feature: MA Experiment 20000087 PARAMETER Experiment Name: At_100uM_ABA_Mutants_cDNA_P Parameter: Timepoint (hr) Value: 6
  misc_feature: MA Experiment 20000087 PARAMETER Experiment Name: At_100uM_ABA_Mutants_cDNA_P Parameter: Tissue Value: Aerial
  misc_feature: MA Experiment 20000087 PARAMETER Experiment Name: At_100uM_ABA_Mutants_cDNA_P Parameter: Treatment Value: 100uM ABA vs. No Treatment
cccccggttccttccctcccatttgtcatcttatcttctgcgattactggtaaagtgagaaatccgttaatccctagagaaactgtaatcgtcgcggtgattcggagaaattcttctgcttccgcggaaaatgtcactaacccagatcgtgaatccaatcatatatccatctcgcacaattccacggcgtttcacggcgatctcgccttttaaaaccctaagtccccaattttcccgccacccacctcacgcactgtctcgtagactcttccttccttctgtttcctctatatgggatgccataaccggcggcggagattcgaaccctcgtgaggccatcgcagcggttcgacgcggaatgcagctcttcagacagggtgatgttgctggatcggtggcagagttcgatagagcaatcattttggatcccaggcaaaaggcatatctttggcaacgcgggctttctctttactatgtagataggtttgaagaaggtgcagagcagttccggatagatgttgctcagaatcctaatgacacagaggagtccatttggtgctttatctgcgaggcgaggctccatggtgttgatgttgcacgaacacagtttctcgaggttggtagagattctcggcctgtgatgcgagaagcttataatctattcaagaatggtggtgatcctgaaaagttagtaaatgacttctctagcggtcaagcaagcgaatacttctatgcttctctgtacgcagggctctactatgaagctgagggtaaatcagaaaacgcaaagtttcatttaaccgcggcttgtggatctccatatgggcagaggtctgatgattatatggcttcacttgctaaagtccattgcctttgtagaaactggagctccggtattctttgaaccggttcatggttttgtggagccaacatattagttattaaggcccaatttttgaaatatcagcccaattaaaaattggacctgggtttgcgatttccaacctttatttatgggaaataaataaagaaagtaaccattcacaaacattttaacaaataggtaaaattgtgccgttttggagtgtaccattcacaaacatattaaccaaattttgttg

SEQ ID NO: 40362 - protein, 257 aa, Arabidopsis thaliana
  peptide (1)..(257): Ceres Seq. ID no. 13497354
  misc_feature (64)..(252): Homolog of NCBI NO: 23124977 NR Description: hypothetical protein [Nostoc punctiforme]
  misc_feature (1)..(188): Homolog of NCBI NO: 34895050 NR Description: B1045F02.20 [Oryza sativa (japonica
  misc_feature (1)..(257): Homolog of NCBI NO: 30679555 NR Description: expressed protein [Arabidopsis thaliana]
MSLTQIVNPIIYPSRTIPRRFTAISPFKTLSPQFSRHPPHALSRRLFLPSVSSIWDAITGGGDSNPREAIAAVRRGMQLFRQGDVAGSVAEFDRAIILDPRQKAYLWQRGLSLYYVDRFEEGAEQFRIDVAQNPNDTEESIWCFICEARLHGVDVARTQFLEVGRDSRPVMREAYNLFKNGGDPEKLVNDFSSGQASEYFYASLYAGLYYEAEGKSENAKFHLTAACGSPYGQRSDDYMASLAKVHCLCRNWSSGIL

SEQ ID NO: 40363 - protein, 181 aa, Arabidopsis thaliana
  peptide (1)..(181): Ceres Seq. ID no. 13497355
  misc_feature (1)..(176): Homolog of NCBI NO: 23124977 NR Description: hypothetical protein [Nostoc punctiforme]
  misc_feature (1)..(112): Homolog of NCBI NO: 34895050 NR Description: B1045F02.20 [Oryza sativa (japonica
  misc_feature (1)..(181): Homolog of NCBI NO: 30679555 NR Description: expressed protein [Arabidopsis thaliana]
MQLFRQGDVAGSVAEFDRAIILDPRQKAYLWQRGLSLYYVDRFEEGAEQFRIDVAQNPNDTEESIWCFICEARLHGVDVARTQFLEVGRDSRPVMREAYNLFKNGGDPEKLVNDFSSGQASEYFYASLYAGLYYEAEGKSENAKFHLTAACGSPYGQRSDDYMASLAKVHCLCRNWSSGIL

SEQ ID NO: 40364 - DNA, 1566 bp, Arabidopsis thaliana
  misc_feature (1)..(1566): Ceres Seq. ID no. 13497116
  misc_feature: MA Experiment ID: 108501 Result: Up-regulated in Transcription
  misc_feature: MA Experiment 108501 PARAMETER Experiment Name: At_ap2_floral_buds_cDNA_P Parameter: Plant Line Value: ap2 (Ler.)
  misc_feature: MA Experiment 108501 PARAMETER Experiment Name: At_ap2_floral_buds_cDNA_P Parameter: Tissue Value: Closed Flower
  misc_feature: MA Experiment ID: 108595 Result: Up-regulated in Transcription
  misc_feature: MA Experiment 108595 PARAMETER Experiment Name: At_Ler-pi_Ovule_cDNA_P Parameter: Plant Line Value: null
  misc_feature: MA Experiment ID: 20000185 Result: Up-regulated in Transcription
  misc_feature: MA Experiment 20000185 PARAMETER Experiment Name: At_Roots__P Parameter: Age (day) Value: 7 vs. 21
  misc_feature: MA Experiment 20000185 PARAMETER Experiment Name: At_Roots__P Parameter: Organism Value: A. thaliana
  misc_feature: MA Experiment 20000185 PARAMETER Experiment Name: At_Roots__P Parameter: Tissue Value: Roots vs. Whole Plant
  misc_feature: MA Experiment ID: 20000227 Result: Down-regulated in Transcription
  misc_feature: MA Experiment 20000227 PARAMETER Experiment Name: At_Root-Tips-vs-Tops_P Parameter: Tissue Value: Root Tips vs. Root Tops
  misc_feature: MA Experiment ID: 20000439 Result: Up-regulated in Transcription
  misc_feature: MA Experiment 20000439 PARAMETER Experiment Name: At_Roots__P Parameter: Age (day) Value: 14 vs. 21
  misc_feature: MA Experiment 20000439 PARAMETER Experiment Name: At_Roots__P Parameter: Organism Value: A. thaliana
  misc_feature: MA Experiment 20000439 PARAMETER Experiment Name: At_Roots__P Parameter: Tissue Value: Roots vs. Whole Plant
  misc_feature: MA Experiment ID: 20000451 Result: Up-regulated in Transcription
  misc_feature: MA Experiment 20000451 PARAMETER Experiment Name: At_CS6879_Shoots-Roots_P Parameter: Age (day) Value: 14
  misc_feature: MA Experiment 20000451 PARAMETER Experiment Name: At_CS6879_Shoots-Roots_P Parameter: Organism Value: A. thaliana
  misc_feature: MA Experiment 20000451 PARAMETER Experiment Name: At_CS6879_Shoots-Roots_P Parameter: Plant Line Value: CS6879 vs. WS
  misc_feature: MA Experiment 20000451 PARAMETER Experiment Name: At_CS6879_Shoots-Roots_P Parameter: Tissue Value: Roots
  misc_feature: MA Experiment ID: 20000794 Result: Down-regulated in Transcription
  misc_feature: MA Experiment 20000794 PARAMETER Experiment Name: At_Petals_P Parameter: Age (day) Value: 23-25 days
  misc_feature: MA Experiment 20000794 PARAMETER Experiment Name: At_Petals_P Parameter: Plant Line Value: WS
  misc_feature: MA Experiment 20000794 PARAMETER Experiment Name: At_Petals_P Parameter: Tissue Value: Petals vs. Whole plant
  misc_feature: MA Experiment ID: 20001451 Result: Up-regulated in Transcription
  misc_feature: MA Experiment 20001451 PARAMETER Experiment Name: At_Far-red-induction_P Parameter: Age (day) Value: 7
  misc_feature: MA Experiment 20001451 PARAMETER Experiment Name: At_Far-red-induction_P Parameter: Light Value: Far-red vs. White
  misc_feature: MA Experiment 20001451 PARAMETER Experiment Name: At_Far-red-induction_P Parameter: Organism Value: A. thaliana
  misc_feature: MA Experiment 20001451 PARAMETER Experiment Name: At_Far-red-induction_P Parameter: Plant Line Value: Columbia
  misc_feature: MA Experiment 20001451 PARAMETER Experiment Name: At_Far-red-induction_P Parameter: Timepoint (hr) Value: 24
  misc_feature: MA Experiment 20001451 PARAMETER Experiment Name: At_Far-red-induction_P Parameter: Tissue Value: Whole Plant
  misc_feature: MA Experiment ID: 20001905 Result: Down-regulated in Transcription
  misc_feature: MA Experiment 20001905 PARAMETER Experiment Name: At_Drought_Reproduction_P Parameter: Age (day) Value: 40
  misc_feature: MA Experiment 20001905 PARAMETER Experiment Name: At_Drought_Reproduction_P Parameter: Organism Value: A. thaliana
  misc_feature: MA Experiment 20001905 PARAMETER Experiment Name: At_Drought_Reproduction_P Parameter: Plant Line Value: WS
  misc_feature: MA Experiment 20001905 PARAMETER Experiment Name: At_Drought_Reproduction_P Parameter: Timepoint (day) Value: 10
  misc_feature: MA Experiment 20001905 PARAMETER Experiment Name: At_Drought_Reproduction_P Parameter: Tissue Value: Rosettes
  misc_feature: MA Experiment 20001905 PARAMETER Experiment Name: At_Drought_Reproduction_P Parameter: Treatment Value: Drought vs. No Drought
gtattgtgttgttggagactgaaccatcaacgctttttcgacacttcttcttcttcctcctttctctcttcatgcaaaatcacagttacaagaaataaacaaaagattataaatcaaaacataaagagacaaaaatgagtgatggtcgagttaacgcagatcctcaacaagaagagaacatggttaaaccaccggttaagagatctctcactctcctcatcgtgacttacttttttctcttcttcggctctatcgcttcgagccttctcgcgaagtactatttcgtctacggtggctcgagccggtgggtctccacgtgggttcaatctgctggcttccctctcctcctcatcctaatctacttccctcactacgttctcaaaaccaccactcgccgtcctttcacgcgcttcacgctccgccatctcatcttctccgtgttgatcgggcttgttctcggtttcaacaacttcctcttctcatggggaacctcgtaccttccggtgtccacgtcatcgcttctcctctcgacacaactcgtcttcactctcattttgtctaggatcatagtgaaacagaagatcactttctcaaacctcaactgcgttgtcctgttgacgttaagctctgttttgttggctcttgattcgagtaaagataaaccgtccggtttaaccaaaaccaagtatttcatcgggtatgtatccacgatcggagccggtttactcttcgctctttacctccccgtgacggagaagctataccgtaccgtttattgttacgcgatggtcatggaggtgcaactggtgatggaattcgcagcgacggttttcgcgacaatcggtatggcttgcgaaggcgggtttaaggaaatggttaaggaagcgaaccatgttttcaccaaaggaccaacattttattggacgtttgcgatactagcaaatgtggtgacgtggcagctctctttcgcagccacgtcagggatggtttacttgacgtcaggtatcaccggaggtatctgcatgacggcgttgctcgcgatgaatgtgataggaggtgtggtggcttacggtgacgtgtttggtggagtgaagattgtgtcgacggtgctatgtatttggggattctcatcttacacatacgggatgtatatgaagatgaagaaggaggagaaggagaagggagaatattccggcgtaaagacgacggaagacagcggagagatggaggtggaaatgggaaatgttaaagatgacgtggcggcggcggatgatagggcttgaagatatctgtgtgattgagacggccgttatgattattattaggaaggaagccaacaaaaaaaaaaaaagtagtagtatctttttgtgttctttctttttctcaccttatgtttttttagtaatgcatttgcttttgtttttcttgtttttttaggttgttttgtttttccttttctggttatttttatgaattatcctcttatcatggccacaactaatgatgttgtacactttttaagtgtggattttccaatgtcggttgataagtatgtatttttctgtt

SEQ ID NO: 40365 - protein, 382 aa, Arabidopsis thaliana
  peptide (1)..(382): Ceres Seq. ID no. 13497117
  misc_feature (171)..(352): Pfam Name: Domain of unknown function, DUF250 Pfam Description: Domain of unknown function, DUF250
  misc_feature (27)..(378): Homolog of NCBI NO: 38605752 NR Description: OSJNBb0016D16.5 [Oryza sativa (japonica
  misc_feature (27)..(347): Homolog of NCBI NO: 38344290 NR Description: OSJNBa0013K16.22 [Oryza sativa (japonica
  misc_feature (27)..(336): Homolog of NCBI NO: 15219436 NR Description: purine permease family [Arabidopsis thaliana]
  misc_feature (27)..(351): Homolog of NCBI NO: 25350217 NR Description: hypothetical protein At2g33750 [imported] -
  misc_feature (21)..(351): Homolog of NCBI NO: 30685825 NR Description: purine permease family [Arabidopsis thaliana]
  misc_feature (27)..(361): Homolog of NCBI NO: 15217872 NR Description: purine permease, putative [Arabidopsis thaliana]
  misc_feature (27)..(344): Homolog of NCBI NO: 7620007 NR Description: purine permease [Arabidopsis thaliana]
  misc_feature (27)..(344): Homolog of NCBI NO: 15217873 NR Description: purine permease [Arabidopsis thaliana]
  misc_feature (22)..(344): Homolog of NCBI NO: 34911172 NR Description: putative purine permease [Oryza sativa (japonica
  misc_feature (1)..(382): Homolog of NCBI NO: 18397682 NR Description: purine permease-related [Arabidopsis thaliana]
MSDGRVNADPQQEENMVKPPVKRSLTLLIVTYFFLFFGSIASSLLAKYYFVYGGSSRWVSTWVQSAGFPLLLILIYFPHYVLKTTTRRPFTRFTLRHLIFSVLIGLVLGFNNFLFSWGTSYLPVSTSSLLLSTQLVFTLILSRIIVKQKITFSNLNCVVLLTLSSVLLALDSSKDKPSGLTKTKYFIGYVSTIGAGLLFALYLPVTEKLYRTVYCYAMVMEVQLVMEFAATVFATIGMACEGGFKEMVKEANHVFTKGPTFYWTFAILANVVTWQLSFAATSGMVYLTSGITGGICMTALLAMNVIGGVVAYGDVFGGVKIVSTVLCIWGFSSYTYGMYMKMKKEEKEKGEYSGVKTTEDSGEMEVEMGNVKDDVAAADDRA

SEQ ID NO: 40366 - protein, 367 aa, Arabidopsis thaliana
  peptide (1)..(367): Ceres Seq. ID no. 13497118
  misc_feature (156)..(337): Pfam Name: Domain of unknown function, DUF250 Pfam Description: Domain of unknown function, DUF250
  misc_feature (12)..(363): Homolog of NCBI NO: 38605752 NR Description: OSJNBb0016D16.5 [Oryza sativa (japonica
  misc_feature (12)..(332): Homolog of NCBI NO: 38344290 NR Description: OSJNBa0013K16.22 [Oryza sativa (japonica
  misc_feature (12)..(321): Homolog of NCBI NO: 15219436 NR Description: purine permease family [Arabidopsis thaliana]
  misc_feature (12)..(336): Homolog of NCBI NO: 25350217 NR Description: hypothetical protein At2g33750 [imported] -
  misc_feature (6)..(336): Homolog of NCBI NO: 30685825 NR Description: purine permease family [Arabidopsis thaliana]
  misc_feature (12)..(346): Homolog of NCBI NO: 15217872 NR Description: purine permease, putative [Arabidopsis thaliana]
  misc_feature (12)..(329): Homolog of NCBI NO: 7620007 NR Description: purine permease [Arabidopsis thaliana]
  misc_feature (12)..(329): Homolog of NCBI NO: 15217873 NR Description: purine permease [Arabidopsis thaliana]
  misc_feature (7)..(329): Homolog of NCBI NO: 34911172 NR Description: putative purine permease [Oryza sativa (japonica
  misc_feature (1)..(367): Homolog of NCBI NO: 18397682 NR Description: purine permease-related [Arabidopsis thaliana]
MVKPPVKRSLTLLIVTYFFLFFGSIASSLLAKYYFVYGGSSRWVSTWVQSAGFPLLLILIYFPHYVLKTTTRRPFTRFTLRHLIFSVLIGLVLGFNNFLFSWGTSYLPVSTSSLLLSTQLVFTLILSRIIVKQKITFSNLNCVVLLTLSSVLLALDSSKDKPSGLTKTKYFIGYVSTIGAGLLFALYLPVTEKLYRTVYCYAMVMEVQLVMEFAATVFATIGMACEGGFKEMVKEANHVFTKGPTFYWTFAILANVVTWQLSFAATSGMVYLTSGITGGICMTALLAMNVIGGVVAYGDVFGGVKIVSTVLCIWGFSSYTYGMYMKMKKEEKEKGEYSGVKTTEDSGEMEVEMGNVKDDVAAADDRA

SEQ ID NO: 40367 - DNA, 1180 bp, Arabidopsis thaliana
  misc_feature (1)..(1180): Ceres Seq. ID no. 12331259
  misc_feature: MA Experiment ID: 108461 Result: Up-regulated in Transcription
  misc_feature: MA Experiment 108461 PARAMETER Experiment Name: At_Germinating_Seeds_cDNA_P Parameter: Age (day) Value: 1 vs. 0
  misc_feature: MA Experiment 108461 PARAMETER Experiment Name: At_Germinating_Seeds_cDNA_P Parameter: Tissue Value: Germinating Seeds
  misc_feature: MA Experiment ID: 108462 Result: Up-regulated in Transcription
  misc_feature: MA Experiment 108462 PARAMETER Experiment Name: At_Germinating_Seeds_cDNA_P Parameter: Age (day) Value: 2 vs. 0
  misc_feature: MA Experiment 108462 PARAMETER Experiment Name: At_Germinating_Seeds_cDNA_P Parameter: Tissue Value: Germinating Seeds
  misc_feature: MA Experiment ID: 108464 Result: Up-regulated in Transcription
  misc_feature: MA Experiment 108464 PARAMETER Experiment Name: At_Germinating_Seeds_cDNA_P Parameter: Age (day) Value: 4 vs. 0
  misc_feature: MA Experiment 108464 PARAMETER Experiment Name: At_Germinating_Seeds_cDNA_P Parameter: Tissue Value: Germinating Seeds
  misc_feature: MA Experiment ID: 108573 Result: Up-regulated in Transcription
  misc_feature: MA Experiment 108573 PARAMETER Experiment Name: At_Drought_cDNA_P Parameter: Timepoint (hr) Value: 6
  misc_feature: MA Experiment 108573 PARAMETER Experiment Name: At_Drought_cDNA_P Parameter: Tissue Value: Aerial
  misc_feature: MA Experiment 108573 PARAMETER Experiment Name: At_Drought_cDNA_P Parameter: Treatment Value: Drought vs. No Drought
  misc_feature: MA Experiment ID: 108595 Result: Up-regulated in Transcription
  misc_feature: MA Experiment 108595 PARAMETER Experiment Name: At_Ler-pi_Ovule_cDNA_P Parameter: Plant Line Value: null
  misc_feature: MA Experiment ID: 20000069 Result: Up-regulated in Transcription
  misc_feature: MA Experiment 20000069 PARAMETER Experiment Name: At_100uM_ABA_Mutants_cDNA_P Parameter: Plant Line Value: CS23
  misc_feature: MA Experiment 20000069 PARAMETER Experiment Name: At_100uM_ABA_Mutants_cDNA_P Parameter: Timepoint (hr) Value: 6
  misc_feature: MA Experiment 20000069 PARAMETER Experiment Name: At_100uM_ABA_Mutants_cDNA_P Parameter: Tissue Value: Aerial
  misc_feature: MA Experiment 20000069 PARAMETER Experiment Name: At_100uM_ABA_Mutants_cDNA_P Parameter: Treatment Value: 100uM ABA vs. No Treatment
  misc_feature: MA Experiment ID: 20000070 Result: Up-regulated in Transcription
  misc_feature: MA Experiment 20000070 PARAMETER Experiment Name: At_100uM_ABA_Mutants_cDNA_P Parameter: Plant Line Value: CS24
  misc_feature: MA Experiment 20000070 PARAMETER Experiment Name: At_100uM_ABA_Mutants_cDNA_P Parameter: Timepoint (hr) Value: 6
  misc_feature: MA Experiment 20000070 PARAMETER Experiment Name: At_100uM_ABA_Mutants_cDNA_P Parameter: Tissue Value: Aerial
  misc_feature: MA Experiment 20000070 PARAMETER Experiment Name: At_100uM_ABA_Mutants_cDNA_P Parameter: Treatment Value: 100uM ABA vs. No Treatment
  misc_feature: MA Experiment ID: 20000071 Result: Up-regulated in Transcription
  misc_feature: MA Experiment 20000071 PARAMETER Experiment Name: At_100uM_ABA_Mutants_cDNA_P Parameter: Plant Line Value: CS8104
  misc_feature: MA Experiment 20000071 PARAMETER Experiment Name: At_100uM_ABA_Mutants_cDNA_P Parameter: Timepoint (hr) Value: 6
  misc_feature: MA Experiment 20000071 PARAMETER Experiment Name: At_100uM_ABA_Mutants_cDNA_P Parameter: Tissue Value: Aerial
  misc_feature: MA Experiment 20000071 PARAMETER Experiment Name: At_100uM_ABA_Mutants_cDNA_P Parameter: Treatment Value: 100uM ABA vs. No Treatment
  misc_feature: MA Experiment ID: 20000087 Result: Up-regulated in Transcription
  misc_feature: MA Experiment 20000087 PARAMETER Experiment Name: At_100uM_ABA_Mutants_cDNA_P Parameter: Plant Line Value: WS
  misc_feature: MA Experiment 20000087 PARAMETER Experiment Name: At_100uM_ABA_Mutants_cDNA_P Parameter: Timepoint (hr) Value: 6
  misc_feature: MA Experiment 20000087 PARAMETER Experiment Name: At_100uM_ABA_Mutants_cDNA_P Parameter: Tissue Value: Aerial
  misc_feature: MA Experiment 20000087 PARAMETER Experiment Name: At_100uM_ABA_Mutants_cDNA_P Parameter: Treatment Value: 100uM ABA vs. No Treatment
  misc_feature: MA Experiment ID: 20000117 Result: Up-regulated in Transcription
  misc_feature: MA Experiment 20000117 PARAMETER Experiment Name: At_100uM_ABA_Mutants_cDNA_P Parameter: Plant Line Value: Columbia
  misc_feature: MA Experiment 20000117 PARAMETER Experiment Name: At_100uM_ABA_Mutants_cDNA_P Parameter: Timepoint (hr) Value: 6
  misc_feature: MA Experiment 20000117 PARAMETER Experiment Name: At_100uM_ABA_Mutants_cDNA_P Parameter: Tissue Value: Aerial
  misc_feature: MA Experiment 20000117 PARAMETER Experiment Name: At_100uM_ABA_Mutants_cDNA_P Parameter: Treatment Value: 100uM ABA vs. No Treatment
  misc_feature: MA Experiment ID: 20000171 Result: Up-regulated in Transcription
  misc_feature: MA Experiment 20000171 PARAMETER Experiment Name: At_42deg_Heat_P Parameter: Age (day) Value: 14
  misc_feature: MA Experiment 20000171 PARAMETER Experiment Name: At_42deg_Heat_P Parameter: Organism Value: A. thaliana
  misc_feature: MA Experiment 20000171 PARAMETER Experiment Name: At_42deg_Heat_P Parameter: Plant Line Value: WS
  misc_feature: MA Experiment 20000171 PARAMETER Experiment Name: At_42deg_Heat_P Parameter: Temperature (deg C) Value: 42 vs. 22
  misc_feature: MA Experiment 20000171 PARAMETER Experiment Name: At_42deg_Heat_P Parameter: Timepoint (hr) Value: 1
  misc_feature: MA Experiment 20000171 PARAMETER Experiment Name: At_42deg_Heat_P Parameter: Tissue Value: Aerial
  misc_feature: MA Experiment ID: 20000185 Result: Up-regulated in Transcription
  misc_feature: MA Experiment 20000185 PARAMETER Experiment Name: At_Roots__P Parameter: Age (day) Value: 7 vs. 21
  misc_feature: MA Experiment 20000185 PARAMETER Experiment Name: At_Roots__P Parameter: Organism Value: A. thaliana
  misc_feature: MA Experiment 20000185 PARAMETER Experiment Name: At_Roots__P Parameter: Tissue Value: Roots vs. Whole Plant
  misc_feature: MA Experiment ID: 20000438 Result: Down-regulated in Transcription
  misc_feature: MA Experiment 20000438 PARAMETER Experiment Name: At_Shoots__P Parameter: Age (day) Value: 14
  misc_feature: MA Experiment 20000438 PARAMETER Experiment Name: At_Shoots__P Parameter: Tissue Value: Shoots vs. Whole Plant
  misc_feature: MA Experiment ID: 20000439 Result: Up-regulated in Transcription
  misc_feature: MA Experiment 20000439 PARAMETER Experiment Name: At_Roots__P Parameter: Age (day) Value: 14 vs. 21
  misc_feature: MA Experiment 20000439 PARAMETER Experiment Name: At_Roots__P Parameter: Organism Value: A. thaliana
  misc_feature: MA Experiment 20000439 PARAMETER Experiment Name: At_Roots__P Parameter: Tissue Value: Roots vs. Whole Plant
  misc_feature: MA Experiment ID: 20000453 Result: Up-regulated in Transcription
  misc_feature: MA Experiment 20000453 PARAMETER Experiment Name: At_100uM_ABA_P Parameter: Age (day) Value: 15
  misc_feature: MA Experiment 20000453 PARAMETER Experiment Name: At_100uM_ABA_P Parameter: Organism Value: A. thaliana
  misc_feature: MA Experiment 20000453 PARAMETER Experiment Name: At_100uM_ABA_P Parameter: Plant Line Value: WS
  misc_feature: MA Experiment 20000453 PARAMETER Experiment Name: At_100uM_ABA_P Parameter: Timepoint (hr) Value: 24
  misc_feature: MA Experiment 20000453 PARAMETER Experiment Name: At_100uM_ABA_P Parameter: Tissue Value: Aerial
  misc_feature: MA Experiment 20000453 PARAMETER Experiment Name: At_100uM_ABA_P Parameter: Treatment Value: 100uM ABA vs. No Treatment
  misc_feature: MA Experiment ID: 20000573 Result: Down-regulated in Transcription
  misc_feature: MA Experiment 20000573 PARAMETER Experiment Name: At_100uM_ABA_Mutants__P Parameter: Organism Value: A. thaliana
  misc_feature: MA Experiment 20000573 PARAMETER Experiment Name: At_100uM_ABA_Mutants__P Parameter: Plant Line Value: CS22 vs. Ler wt
  misc_feature: MA Experiment 20000573 PARAMETER Experiment Name: At_100uM_ABA_Mutants__P Parameter: Timepoint (hr) Value: N/A
  misc_feature: MA Experiment 20000573 PARAMETER Experiment Name: At_100uM_ABA_Mutants__P Parameter: Tissue Value: Whole Plant
  misc_feature: MA Experiment 20000573 PARAMETER Experiment Name: At_100uM_ABA_Mutants__P Parameter: Treatment Value: None
  misc_feature: MA Experiment ID: 20000709 Result: Down-regulated in Transcription
  misc_feature: MA Experiment 20000709 PARAMETER Experiment Name: At_15mM_NH4NO3_L-to-H_P Parameter: Age (hr) Value: 14
  misc_feature: MA Experiment 20000709 PARAMETER Experiment Name: At_15mM_NH4NO3_L-to-H_P Parameter: Organism Value: A. thaliana
  misc_feature: MA Experiment 20000709 PARAMETER Experiment Name: At_15mM_NH4NO3_L-to-H_P Parameter: Plant Line Value: WS
  misc_feature: MA Experiment 20000709 PARAMETER Experiment Name: At_15mM_NH4NO3_L-to-H_P Parameter: Timepoint (hr) Value: 4
  misc_feature: MA Experiment 20000709 PARAMETER Experiment Name: At_15mM_NH4NO3_L-to-H_P Parameter: Tissue Value: Aerial
  misc_feature: MA Experiment 20000709 PARAMETER Experiment Name: At_15mM_NH4NO3_L-to-H_P Parameter: Treatment Value: 15mM NH4NO3 vs. 30mM Mannitol
  misc_feature: MA Experiment ID: 20001554 Result: Up-regulated in Transcription
  misc_feature: MA Experiment 20001554 PARAMETER Experiment Name: At_Drought_Soil_Dry_P Parameter: Age (day) Value: 21
  misc_feature: MA Experiment 20001554 PARAMETER Experiment Name: At_Drought_Soil_Dry_P Parameter: Organism Value: A. thaliana
  misc_feature: MA Experiment 20001554 PARAMETER Experiment Name: At_Drought_Soil_Dry_P Parameter: Plant Line Value: WS
  misc_feature: MA Experiment 20001554 PARAMETER Experiment Name: At_Drought_Soil_Dry_P Parameter: Post Timepoint (hr) Value: None
  misc_feature: MA Experiment 20001554 PARAMETER Experiment Name: At_Drought_Soil_Dry_P Parameter: Post-Treatment Value: None
  misc_feature: MA Experiment 20001554 PARAMETER Experiment Name: At_Drought_Soil_Dry_P Parameter: Timepoint (day) Value: 7
  misc_feature: MA Experiment 20001554 PARAMETER Experiment Name: At_Drought_Soil_Dry_P Parameter: Treatment Value: Drought vs. No Drought
  misc_feature: MA Experiment ID: 20001555 Result: Up-regulated in Transcription
  misc_feature: MA Experiment 20001555 PARAMETER Experiment Name: At_Drought_Soil_Dry_P Parameter: Age (day) Value: 24
  misc_feature: MA Experiment 20001555 PARAMETER Experiment Name: At_Drought_Soil_Dry_P Parameter: Organism Value: A. thaliana
  misc_feature: MA Experiment 20001555 PARAMETER Experiment Name: At_Drought_Soil_Dry_P Parameter: Plant Line Value: WS
  misc_feature: MA Experiment 20001555 PARAMETER Experiment Name: At_Drought_Soil_Dry_P Parameter: Post Timepoint (hr) Value: None
  misc_feature: MA Experiment 20001555 PARAMETER Experiment Name: At_Drought_Soil_Dry_P Parameter: Post-Treatment Value: None
  misc_feature: MA Experiment 20001555 PARAMETER Experiment Name: At_Drought_Soil_Dry_P Parameter: Timepoint (day) Value: 10
  misc_feature: MA Experiment 20001555 PARAMETER Experiment Name: At_Drought_Soil_Dry_P Parameter: Treatment Value: Drought vs. No Drought
  misc_feature: MA Experiment ID: 20001757 Result: Down-regulated in Transcription
  misc_feature: MA Experiment 20001757 PARAMETER Experiment Name: At_50mM_NH4NO3_L-to-H_P Parameter: Timepoint (hr) Value: 6
  misc_feature: MA Experiment 20001757 PARAMETER Experiment Name: At_50mM_NH4NO3_L-to-H_P Parameter: Tissue Value: Leaf
  misc_feature: MA Experiment 20001757 PARAMETER Experiment Name: At_50mM_NH4NO3_L-to-H_P Parameter: Treatment Value: 50mM NH4NO3 vs 100mM Mannitol
  misc_feature: MA Experiment ID: 20001911 Result: Up-regulated in Transcription
  misc_feature: MA Experiment 20001911 PARAMETER Experiment Name: At_Drought_Reproduction_P Parameter: Age (day) Value: 40
  misc_feature: MA Experiment 20001911 PARAMETER Experiment Name: At_Drought_Reproduction_P Parameter: Organism Value: A. thaliana
  misc_feature: MA Experiment 20001911 PARAMETER Experiment Name: At_Drought_Reproduction_P Parameter: Plant Line Value: WS
  misc_feature: MA Experiment 20001911 PARAMETER Experiment Name: At_Drought_Reproduction_P Parameter: Timepoint (day) Value: 10
  misc_feature: MA Experiment 20001911 PARAMETER Experiment Name: At_Drought_Reproduction_P Parameter: Tissue Value: Flowers
  misc_feature: MA Experiment 20001911 PARAMETER Experiment Name: At_Drought_Reproduction_P Parameter: Treatment Value: Drought vs. No Drought
gcaagtctcatcagaagaggaagagaatcaatggcgagttgtttcagctacgtgtcttctcgtaacaaatgttaccaatacagcttctctcgtgctggtctccgatcatctacctccgatcttggcgacggcaccgtcttccactgttggatcccacttactcacatccacaccaagcccacgctcctcctccttcacgggatcggagctaacgctatgtggcagtgggaccgcttcatcgaccgttttatcccccgcttcaacgtctacgtaccggacctcatcttctttggcgactcctacaccactcgtcccgaccgctcagagtctttccaggcgacttgtgtcatgaaggcgatggatgcttacggtgttaggaccatgaccgtcgctggcctcagctacggtggttttgtggcctactcattggcggcgcagtttaaggagagggtagatcgagttgtgctaatatgcgccggtgttgctctggaggagaaagactcggaggatggtatgttcaaagtgaagagcccggaggaagcggcggctgttttgtttcctcagtctccttcgatgctccggcggcttctccagttatctttctataaaccgccgatttggatcccttcttgctttgccatggactacattcatgtaatgtgtaaagactatcttcaagaaaggaaagaacttgtggaagctctgcataagggtagaagattcgccaatcttccaaagataacacagccgacattgatgatatggggagaggaagatcaagtatttccagttgaattagctcatcgattgaaaagatatttaggggaagacagagcacaattggtgttactgaagaagacaggacatgcgattaatgaagagaaaccaaaagagatgtacaaacacatgaaatcttttctttgcactgacgcaatgattcctccaaatcaccagatcaatgctaagagactcatgttagcaaacttgatatccccagatcagcagatcaacaagtgatgttactgcagaaaaaaaaaaagtgttgttagaagacataatagttaatcatgttttagcttgtccctaaatgtgatttgtatcgttattgttaaagaaagacattgcttctaatagttggaattaagaatacttttatttcaagaaagtaatcatattcttt

SEQ ID NO: 40368 - protein, 338 aa, Arabidopsis thaliana
  peptide (1)..(338): Ceres Seq. ID no. 12331260
  misc_feature (87)..(305): Pfam Name: alpha/beta hydrolase fold Pfam Description: alpha/beta hydrolase fold
  misc_feature (29)..(314): Homolog of NCBI NO: 22326938 NR Description: similar to putative hydrolase; protein id:
  misc_feature (218)..(307): Homolog of NCBI NO: 27436747 NR Description: Hypothetical protein [Oryza sativa (japonica
  misc_feature (43)..(217): Homolog of NCBI NO: 27436747 NR Description: Hypothetical protein [Oryza sativa (japonica
  misc_feature (11)..(219): Homolog of NCBI NO: 25406548 NR Description: hypothetical protein T11I11.15 [imported] -
  misc_feature (7)..(305): Homolog of NCBI NO: 37533664 NR Description: putative hydrolase [Oryza sativa (japonica
  misc_feature (7)..(318): Homolog of NCBI NO: 33146617 NR Description: hydrolase-like protein [Oryza sativa (japonica
  misc_feature (11)..(307): Homolog of NCBI NO: 18411865 NR Description: hypothetical protein
  misc_feature (14)..(307): Homolog of NCBI NO: 15242419 NR Description: putative hydrolase; protein id: At5g09430.1
  misc_feature (11)..(338): Homolog of NCBI NO: 18420566 NR Description: Expressed protein
  misc_feature (11)..(338): Homolog of NCBI NO: 21536873 NR Description: putative hydrolase [Arabidopsis thaliana]
ASLIRRGRESMASCFSYVSSRNKCYQYSFSRAGLRSSTSDLGDGTVFHCWIPLTHIHTKPTLLLLHGIGANAMWQWDRFIDRFIPRFNVYVPDLIFFGDSYTTRPDRSESFQATCVMKAMDAYGVRTMTVAGLSYGGFVAYSLAAQFKERVDRVVLICAGVALEEKDSEDGMFKVKSPEEAAAVLFPQSPSMLRRLLQLSFYKPPIWIPSCFAMDYIHVMCKDYLQERKELVEALHKGRRFANLPKITQPTLMIWGEEDQVFPVELAHRLKRYLGEDRAQLVLLKKTGHAINEEKPKEMYKHMKSFLCTDAMIPPNHQINAKRLMLANLISPDQQINK

SEQ ID NO: 40369 - protein, 328 aa, Arabidopsis thaliana
  peptide (1)..(328): Ceres Seq. ID no. 12331261
  misc_feature (77)..(295): Pfam Name: alpha/beta hydrolase fold Pfam Description: alpha/beta hydrolase fold
  misc_feature (19)..(304): Homolog of NCBI NO: 22326938 NR Description: similar to putative hydrolase; protein id:
  misc_feature (208)..(297): Homolog of NCBI NO: 27436747 NR Description: Hypothetical protein [Oryza sativa (japonica
  misc_feature (33)..(207): Homolog of NCBI NO: 27436747 NR Description: Hypothetical protein [Oryza sativa (japonica
  misc_feature (1)..(209): Homolog of NCBI NO: 25406548 NR Description: hypothetical protein T11I11.15 [imported] -
  misc_feature (1)..(295): Homolog of NCBI NO: 37533664 NR Description: putative hydrolase [Oryza sativa (japonica
  misc_feature (1)..(308): Homolog of NCBI NO: 33146617 NR Description: hydrolase-like protein [Oryza sativa (japonica
  misc_feature (1)..(297): Homolog of NCBI NO: 18411865 NR Description: hypothetical protein
  misc_feature (4)..(297): Homolog of NCBI NO: 15242419 NR Description: putative hydrolase; protein id: At5g09430.1
  misc_feature (1)..(328): Homolog of NCBI NO: 18420566 NR Description: Expressed protein
  misc_feature (1)..(328): Homolog of NCBI NO: 21536873 NR Description: putative hydrolase [Arabidopsis thaliana]
MASCFSYVSSRNKCYQYSFSRAGLRSSTSDLGDGTVFHCWIPLTHIHTKPTLLLLHGIGANAMWQWDRFIDRFIPRFNVYVPDLIFFGDSYTTRPDRSESFQATCVMKAMDAYGVRTMTVAGLSYGGFVAYSLAAQFKERVDRVVLICAGVALEEKDSEDGMFKVKSPEEAAAVLFPQSPSMLRRLLQLSFYKPPIWIPSCFAMDYIHVMCKDYLQERKELVEALHKGRRFANLPKITQPTLMIWGEEDQVFPVELAHRLKRYLGEDRAQLVLLKKTGHAINEEKPKEMYKHMKSFLCTDAMIPPNHQINAKRLMLANLISPDQQINK

SEQ ID NO: 40370 - protein, 266 aa, Arabidopsis thaliana
  peptide (1)..(266): Ceres Seq. ID no. 12331262
  misc_feature (15)..(233): Pfam Name: alpha/beta hydrolase fold Pfam Description: alpha/beta hydrolase fold
  misc_feature (1)..(242): Homolog of NCBI NO: 22326938 NR Description: similar to putative hydrolase; protein id:
  misc_feature (146)..(235): Homolog of NCBI NO: 27436747 NR Description: Hypothetical protein [Oryza sativa (japonica
  misc_feature (1)..(145): Homolog of NCBI NO: 27436747 NR Description: Hypothetical protein [Oryza sativa (japonica
  misc_feature (1)..(147): Homolog of NCBI NO: 25406548 NR Description: hypothetical protein T11I11.15 [imported] -
  misc_feature (1)..(233): Homolog of NCBI NO: 37533664 NR Description: putative hydrolase [Oryza sativa (japonica
  misc_feature (1)..(246): Homolog of NCBI NO: 33146617 NR Description: hydrolase-like protein [Oryza sativa (japonica
  misc_feature (1)..(235): Homolog of NCBI NO: 18411865 NR Description: hypothetical protein
  misc_feature (1)..(235): Homolog of NCBI NO: 15242419 NR Description: putative hydrolase; protein id: At5g09430.1
  misc_feature (1)..(266): Homolog of NCBI NO: 18420566 NR Description: Expressed protein
  misc_feature (1)..(266): Homolog of NCBI NO: 21536873 NR Description: putative hydrolase [Arabidopsis thaliana]
MWQWDRFIDRFIPRFNVYVPDLIFFGDSYTTRPDRSESFQATCVMKAMDAYGVRTMTVAGLSYGGFVAYSLAAQFKERVDRVVLICAGVALEEKDSEDGMFKVKSPEEAAAVLFPQSPSMLRRLLQLSFYKPPIWIPSCFAMDYIHVMCKDYLQERKELVEALHKGRRFANLPKITQPTLMIWGEEDQVFPVELAHRLKRYLGEDRAQLVLLKKTGHAINEEKPKEMYKHMKSFLCTDAMIPPNHQINAKRLMLANLISPDQQINK

SEQ ID NO: 40371 - DNA, 1285 bp, Arabidopsis thaliana
  misc_feature (1)..(1285): Ceres Seq. ID no. 13499963
  misc_feature: MA Experiment ID: 108434 Result: Up-regulated in Transcription
  misc_feature: MA Experiment 108434 PARAMETER Experiment Name: At_Root_Tips_cDNA_P Parameter: Tissue Value: Root Tips
  misc_feature: MA Experiment ID: 20000111 Result: Down-regulated in Transcription
  misc_feature: MA Experiment 20000111 PARAMETER Experiment Name: At_42deg_Heat_cDNA_P Parameter: Temperature (deg C) Value: 42 vs. 22
  misc_feature: MA Experiment 20000111 PARAMETER Experiment Name: At_42deg_Heat_cDNA_P Parameter: Timepoint (hr) Value: 6
  misc_feature: MA Experiment 20000111 PARAMETER Experiment Name: At_42deg_Heat_cDNA_P Parameter: Tissue Value: Aerial
  misc_feature: MA Experiment ID: 20000113 Result: Down-regulated in Transcription
  misc_feature: MA Experiment 20000113 PARAMETER Experiment Name: At_42deg_Heat_cDNA_P Parameter: Temperature (deg C) Value: 42 vs. 22
  misc_feature: MA Experiment 20000113 PARAMETER Experiment Name: At_42deg_Heat_cDNA_P Parameter: Timepoint (hr) Value: 8
  misc_feature: MA Experiment 20000113 PARAMETER Experiment Name: At_42deg_Heat_cDNA_P Parameter: Tissue Value: Aerial
  misc_feature: MA Experiment ID: 20000173 Result: Down-regulated in Transcription
  misc_feature: MA Experiment 20000173 PARAMETER Experiment Name: At_42deg_Heat_P Parameter: Age (day) Value: 14
  misc_feature: MA Experiment 20000173 PARAMETER Experiment Name: At_42deg_Heat_P Parameter: Organism Value: A. thaliana
  misc_feature: MA Experiment 20000173 PARAMETER Experiment Name: At_42deg_Heat_P Parameter: Plant Line Value: WS
  misc_feature: MA Experiment 20000173 PARAMETER Experiment Name: At_42deg_Heat_P Parameter: Temperature (deg C) Value: 42 vs. 22
  misc_feature: MA Experiment 20000173 PARAMETER Experiment Name: At_42deg_Heat_P Parameter: Timepoint (hr) Value: 6
  misc_feature: MA Experiment 20000173 PARAMETER Experiment Name: At_42deg_Heat_P Parameter: Tissue Value: Aerial
  misc_feature: MA Experiment ID: 20000184 Result: Down-regulated in Transcription
  misc_feature: MA Experiment 20000184 PARAMETER Experiment Name: At_Shoots__P Parameter: Age (day) Value: 7
  misc_feature: MA Experiment 20000184 PARAMETER Experiment Name: At_Shoots__P Parameter: Tissue Value: Shoots vs. Whole Plant
  misc_feature: MA Experiment ID: 20001451 Result: Down-regulated in Transcription
  misc_feature: MA Experiment 20001451 PARAMETER Experiment Name: At_Far-red-induction_P Parameter: Age (day) Value: 7
  misc_feature: MA Experiment 20001451 PARAMETER Experiment Name: At_Far-red-induction_P Parameter: Light Value: Far-red vs. White
  misc_feature: MA Experiment 20001451 PARAMETER Experiment Name: At_Far-red-induction_P Parameter: Organism Value: A. thaliana
  misc_feature: MA Experiment 20001451 PARAMETER Experiment Name: At_Far-red-induction_P Parameter: Plant Line Value: Columbia
  misc_feature: MA Experiment 20001451 PARAMETER Experiment Name: At_Far-red-induction_P Parameter: Timepoint (hr) Value: 24
  misc_feature: MA Experiment 20001451 PARAMETER Experiment Name: At_Far-red-induction_P Parameter: Tissue Value: Whole Plant
aaaagatccctctcgcctctcggtgtccttgtatacagtacttcagttttccgatctctttcagattctgttgccaaacttcatataaacttagtgagcggaactggatttggggagaatggcttcttctttagctcaatctagaatctcgaatctccagaatcatctttcacctcttgaagcaaacaacaagctcaggagtctggtcaagatttctccccaagtatctgaagccttgtctaatggacgtgctgttgtcgctcttgagtcaaccattatctcccatgggatgccttaccctcaaaatctgcaaacagcaaaagaggtggagtcaattgtgagagaaaatggagcaatccctgcaacaattgctatccttaatggagtaccttgcataggtctgagcgaggaagaactagaacgtcttgcatctctcggaaaaagtgtccaaaagacagcgggaagggacatagcaaatgttgtggctacaagaggaaacggtgcaactacagtctctgcaacgttgtttttcgcttcaatggttggcatccaagtttttgtgacgggcgggataggtggtgtccatagacatgccaaccattcgatggacatatcatctgatcttactgcacttgggaggactccaatagcagtgatatcagcaggcgttaaatcaatacttgatattccaaagactcttgaatatttggaaactcaagaagtgtatgttgctgcatacaagagcgatgagtttccagcatttttcacagaaaaaagtggctgtaaggcaccttcccgtgtaaatagccctgaagactgtgctagagtaatagatgcaaacatgaagctaaaccgtcaggcggggattctatttgccattccaattccgaaacaccattcagccgctggaaatcttatcgaatcagcaacacagcgtgctcttacagaagcaagggaacaaaacgttactggaaatgcagaaactccattcttacttgcacgggtaaatgagttaaccggaggcacatcacttgcagcaaacattgcgcttgtgaaaaacaatgcccttatcggttctcagattgcagtagccctttctcagctgatgtgagcttccttatcaatcccagactcaagctcaagcgcaagttattcaggttcatgattcaggacagatcaaagatgttttggattggtagttatcaatttatattggttatcaaagatttttctttagctaaagaaactcgttaacttattataacatgttatatattagatttat

SEQ ID NO: 40372 - protein, 330 aa, Arabidopsis thaliana
  peptide (1)..(330): Ceres Seq. ID no. 13499964
  misc_feature (34)..(326): Pfam Name: Indigoidine synthase A like protein Pfam Description: Indigoidine synthase A like protein
  misc_feature (26)..(329): Homolog of NCBI NO: 16804378 NR Description: similar to Erwinia chrysanthemi IndA protein
  misc_feature (26)..(329): Homolog of NCBI NO: 16801496 NR Description: similar to Erwinia chrysanthemi IndA protein
  misc_feature (22)..(329): Homolog of NCBI NO: 15807302 NR Description: conserved hypothetical protein [Deinococcus
  misc_feature (26)..(329): Homolog of NCBI NO: 20806844 NR Description: uncharacterized enzyme involved in pigment
  misc_feature (26)..(330): Homolog of NCBI NO: 15923302 NR Description: conserved hypothetical protein
  misc_feature (26)..(330): Homolog of NCBI NO: 21282018 NR Description: conserved hypothetical protein
  misc_feature (25)..(330): Homolog of NCBI NO: 9454556 NR Description: Unknown protein [Arabidopsis thaliana]
  misc_feature (239)..(330): Homolog of NCBI NO: 25351902 NR Description: unknown protein [imported] - Arabidopsis thaliana
  misc_feature (1)..(259): Homolog of NCBI NO: 25351902 NR Description: unknown protein [imported] - Arabidopsis thaliana
  misc_feature (1)..(330): Homolog of NCBI NO: 30694792 NR Description: expressed protein [Arabidopsis thaliana]
MASSLAQSRISNLQNHLSPLEANNKLRSLVKISPQVSEALSNGRAVVALESTIISHGMPYPQNLQTAKEVESIVRENGAIPATIAILNGVPCIGLSEEELERLASLGKSVQKTAGRDIANVVATRGNGATTVSATLFFASMVGIQVFVTGGIGGVHRHANHSMDISSDLTALGRTPIAVISAGVKSILDIPKTLEYLETQEVYVAAYKSDEFPAFFTEKSGCKAPSRVNSPEDCARVIDANMKLNRQAGILFAIPIPKHHSAAGNLIESATQRALTEAREQNVTGNAETPFLLARVNELTGGTSLAANIALVKNNALIGSQIAVALSQLM

SEQ ID NO: 40373 - protein, 273 aa, Arabidopsis thaliana
  peptide (1)..(273): Ceres Seq. ID no. 13499965
  misc_feature (1)..(269): Pfam Name: Indigoidine synthase A like protein Pfam Description: Indigoidine synthase A like protein
  misc_feature (1)..(272): Homolog of NCBI NO: 16804378 NR Description: similar to Erwinia chrysanthemi IndA protein
  misc_feature (1)..(272): Homolog of NCBI NO: 16801496 NR Description: similar to Erwinia chrysanthemi IndA protein
  misc_feature (1)..(272): Homolog of NCBI NO: 15807302 NR Description: conserved hypothetical protein [Deinococcus
  misc_feature (1)..(272): Homolog of NCBI NO: 20806844 NR Description: uncharacterized enzyme involved in pigment
  misc_feature (1)..(273): Homolog of NCBI NO: 15923302 NR Description: conserved hypothetical protein
  misc_feature (1)..(273): Homolog of NCBI NO: 21282018 NR Description: conserved hypothetical protein
  misc_feature (1)..(273): Homolog of NCBI NO: 9454556 NR Description: Unknown protein [Arabidopsis thaliana]
  misc_feature (182)..(273): Homolog of NCBI NO: 25351902 NR Description: unknown protein [imported] - Arabidopsis thaliana
  misc_feature (1)..(202): Homolog of NCBI NO: 25351902 NR Description: unknown protein [imported] - Arabidopsis thaliana
  misc_feature (1)..(273): Homolog of NCBI NO: 30694792 NR Description: expressed protein [Arabidopsis thaliana]
MPYPQNLQTAKEVESIVRENGAIPATIAILNGVPCIGLSEEELERLASLGKSVQKTAGRDIANVVATRGNGATTVSATLFFASMVGIQVFVTGGIGGVHRHANHSMDISSDLTALGRTPIAVISAGVKSILDIPKTLEYLETQEVYVAAYKSDEFPAFFTEKSGCKAPSRVNSPEDCARVIDANMKLNRQAGILFAIPIPKHHSAAGNLIESATQRALTEAREQNVTGNAETPFLLARVNELTGGTSLAANIALVKNNALIGSQIAVALSQLM

SEQ ID NO: 40374 - protein, 190 aa, Arabidopsis thaliana
  peptide (1)..(190): Ceres Seq. ID no. 13499966
  misc_feature (1)..(186): Pfam Name: Indigoidine synthase A like protein Pfam Description: Indigoidine synthase A like protein
  misc_feature (1)..(189): Homolog of NCBI NO: 16804378 NR Description: similar to Erwinia chrysanthemi IndA protein
  misc_feature (1)..(189): Homolog of NCBI NO: 16801496 NR Description: similar to Erwinia chrysanthemi IndA protein
  misc_feature (1)..(189): Homolog of NCBI NO: 15807302 NR Description: conserved hypothetical protein [Deinococcus
  misc_feature (1)..(189): Homolog of NCBI NO: 20806844 NR Description: uncharacterized enzyme involved in pigment
  misc_feature (1)..(190): Homolog of NCBI NO: 15923302 NR Description: conserved hypothetical protein
  misc_feature (1)..(190): Homolog of NCBI NO: 21282018 NR Description: conserved hypothetical protein
  misc_feature (1)..(190): Homolog of NCBI NO: 9454556 NR Description: Unknown protein [Arabidopsis thaliana]
  misc_feature (99)..(190): Homolog of NCBI NO: 25351902 NR Description: unknown protein [imported] - Arabidopsis thaliana
  misc_feature (1)..(119): Homolog of NCBI NO: 25351902 NR Description: unknown protein [imported] - Arabidopsis thaliana
  misc_feature (1)..(190): Homolog of NCBI NO: 30694792 NR Description: expressed protein [Arabidopsis thaliana]
MVGIQVFVTGGIGGVHRHANHSMDISSDLTALGRTPIAVISAGVKSILDIPKTLEYLETQEVYVAAYKSDEFPAFFTEKSGCKAPSRVNSPEDCARVIDANMKLNRQAGILFAIPIPKHHSAAGNLIESATQRALTEAREQNVTGNAETPFLLARVNELTGGTSLAANIALVKNNALIGSQIAVALSQLM

SEQ ID NO: 40375 - DNA, 1383 bp, Arabidopsis thaliana
  misc_feature (1)..(1383): Ceres Seq. ID no. 12370864
  misc_feature: MA Experiment ID: 108434 Result: Down-regulated in Transcription
  misc_feature: MA Experiment 108434 PARAMETER Experiment Name: At_Root_Tips_cDNA_P Parameter: Tissue Value: Root Tips
  misc_feature: MA Experiment ID: 108435 Result: Up-regulated in Transcription
  misc_feature: MA Experiment 108435 PARAMETER Experiment Name: At_stm_Mutants_cDNA_P Parameter: Plant Line Value: wt Landsburg vs stm
  misc_feature: MA Experiment 108435 PARAMETER Experiment Name: At_stm_Mutants_cDNA_P Parameter: Tissue Value: Shoot Apical Meristem Region
  misc_feature: MA Experiment ID: 108469 Result: Up-regulated in Transcription
  misc_feature: MA Experiment ID: 108501 Result: Down-regulated in Transcription
  misc_feature: MA Experiment 108501 PARAMETER Experiment Name: At_ap2_floral_buds_cDNA_P Parameter: Plant Line Value: ap2 (Ler.)
  misc_feature: MA Experiment 108501 PARAMETER Experiment Name: At_ap2_floral_buds_cDNA_P Parameter: Tissue Value: Closed Flower
  misc_feature: MA Experiment ID: 108576 Result: Down-regulated in Transcription
  misc_feature: MA Experiment 108576 PARAMETER Experiment Name: At_42deg_Heat_cDNA_P Parameter: Temperature (deg C) Value: 42 vs. 22
  misc_feature: MA Experiment 108576 PARAMETER Experiment Name: At_42deg_Heat_cDNA_P Parameter: Timepoint (hr) Value: 1
  misc_feature: MA Experiment 108576 PARAMETER Experiment Name: At_42deg_Heat_cDNA_P Parameter: Tissue Value: Aerial
  misc_feature: MA Experiment ID: 108668 Result: Up-regulated in Transcription
  misc_feature: MA Experiment 108668 PARAMETER Experiment Name: At_2mM_SA_cDNA_P Parameter: Plant Line Value: WS
  misc_feature: MA Experiment 108668 PARAMETER Experiment Name: At_2mM_SA_cDNA_P Parameter: Timepoint (hr) Value: 6
  misc_feature: MA Experiment 108668 PARAMETER Experiment Name: At_2mM_SA_cDNA_P Parameter: Treatment Value: 2mM SA vs. No Treatment
  misc_feature: MA Experiment ID: 20000087 Result: Down-regulated in Transcription
  misc_feature: MA Experiment 20000087 PARAMETER Experiment Name: At_100uM_ABA_Mutants_cDNA_P Parameter: Plant Line Value: WS
  misc_feature: MA Experiment 20000087 PARAMETER Experiment Name: At_100uM_ABA_Mutants_cDNA_P Parameter: Timepoint (hr) Value: 6
  misc_feature: MA Experiment 20000087 PARAMETER Experiment Name: At_100uM_ABA_Mutants_cDNA_P Parameter: Tissue Value: Aerial
  misc_feature: MA Experiment 20000087 PARAMETER Experiment Name: At_100uM_ABA_Mutants_cDNA_P Parameter: Treatment Value: 100uM ABA vs. No Treatment
  misc_feature: MA Experiment ID: 20000090 Result: Up-regulated in Transcription
  misc_feature: MA Experiment ID: 20000112 Result: Down-regulated in Transcription
  misc_feature: MA Experiment 20000112 PARAMETER Experiment Name: At_42deg_Heat_cDNA_P Parameter: Temperature (deg C) Value: 42 vs. 22
  misc_feature: MA Experiment 20000112 PARAMETER Experiment Name: At_42deg_Heat_cDNA_P Parameter: Timepoint (hr) Value: 2
  misc_feature: MA Experiment 20000112 PARAMETER Experiment Name: At_42deg_Heat_cDNA_P Parameter: Tissue Value: Aerial
  misc_feature: MA Experiment ID: 20000113 Result: Down-regulated in Transcription
  misc_feature: MA Experiment 20000113 PARAMETER Experiment Name: At_42deg_Heat_cDNA_P Parameter: Temperature (deg C) Value: 42 vs. 22
  misc_feature: MA Experiment 20000113 PARAMETER Experiment Name: At_42deg_Heat_cDNA_P Parameter: Timepoint (hr) Value: 8
  misc_feature: MA Experiment 20000113 PARAMETER Experiment Name: At_42deg_Heat_cDNA_P Parameter: Tissue Value: Aerial
  misc_feature: MA Experiment ID: 20000328 Result: Down-regulated in Transcription
  misc_feature: MA Experiment 20000328 PARAMETER Experiment Name: At_42deg_Heat_Sub_P Parameter: Age (day) Value: 14
  misc_feature: MA Experiment 20000328 PARAMETER Experiment Name: At_42deg_Heat_Sub_P Parameter: Organism Value: A. thaliana
  misc_feature: MA Experiment 20000328 PARAMETER Experiment Name: At_42deg_Heat_Sub_P Parameter: Plant Line Value: WS
  misc_feature: MA Experiment 20000328 PARAMETER Experiment Name: At_42deg_Heat_Sub_P Parameter: Temperature (deg C) Value: 42 vs. 22
  misc_feature: MA Experiment 20000328 PARAMETER Experiment Name: At_42deg_Heat_Sub_P Parameter: Timepoint (hr) Value: 6
  misc_feature: MA Experiment 20000328 PARAMETER Experiment Name: At_42deg_Heat_Sub_P Parameter: Tissue Value: Aerial
  misc_feature: MA Experiment ID: 20000347 Result: Up-regulated in Transcription
  misc_feature: MA Experiment 20000347 PARAMETER Experiment Name: At_2mM_SA_Sub_P Parameter: Age (day) Value: 14
  misc_feature: MA Experiment 20000347 PARAMETER Experiment Name: At_2mM_SA_Sub_P Parameter: Organism Value: A. thaliana
  misc_feature: MA Experiment 20000347 PARAMETER Experiment Name: At_2mM_SA_Sub_P Parameter: Plant Line Value: WS
  misc_feature: MA Experiment 20000347 PARAMETER Experiment Name: At_2mM_SA_Sub_P Parameter: Timepoint (hr) Value: 6
  misc_feature: MA Experiment 20000347 PARAMETER Experiment Name: At_2mM_SA_Sub_P Parameter: Tissue Value: Aerial
  misc_feature: MA Experiment 20000347 PARAMETER Experiment Name: At_2mM_SA_Sub_P Parameter: Treatment Value: 2mM SA vs. No Treatment
  misc_feature: MA Experiment ID: 20000355 Result: Down-regulated in Transcription
  misc_feature: MA Experiment 20000355 PARAMETER Experiment Name: At_Siliques_Sub_P Parameter: Age (day) Value: 21
  misc_feature: MA Experiment 20000355 PARAMETER Experiment Name: At_Siliques_Sub_P Parameter: Organism Value: A. thaliana
  misc_feature: MA Experiment 20000355 PARAMETER Experiment Name: At_Siliques_Sub_P Parameter: Plant Line Value: WS
  misc_feature: MA Experiment 20000355 PARAMETER Experiment Name: At_Siliques_Sub_P Parameter: Tissue Value: Less Than 5mm Siliques vs. Whole Plant
  misc_feature: MA Experiment ID: 20000440 Result: Down-regulated in Transcription
  misc_feature: MA Experiment 20000440 PARAMETER Experiment Name: At_Closed-Flower__Sub_P Parameter: Tissue Value: Closed Flower vs. Whole Plant
attcaatgcacacaaacatttacccaaaatggcatcggcggttcagaaatcagcgttgctcttatgtggagactacatggaagcctatgaaacgattgttcctctctatgttctccaatcgtttggggttagcgttcattgcgtttcacccaaccgcaacgccggcgatcgctgcgttatgtctgcccacgatttcttgggcctcgagttgactttaaacgcaaacttcgatgacgtcactccggagaattacgacgtcatcatcatcccaggaggccgattcacggagcttctcagcgccgacgagaaatgcgttgacctcgtggcgcgattcgccgaatccaagaagctcatcttcactagctgtcatagccaggttatgctgatggcggccggaatcctcgccggtggtgtgaaatgcacggcgtttgaaagcataaagcctttgatcgaactctccggcggtgagtggtggcaacagcctgggattcagagcatgttcgagatcaccgattgcgttaaagacgggaatttcatgagtacggttggttggccaacgcttggtcacggcattaagcttttgcttgaatctcttggtggcaaagtctgtagcttggagaagaagcaagcttctgtgcttttcctcattggggactatgtagaagattatgggatcaatgtaccgtttagagcactacaagctttaggttgtaaagtggatgctgtgacaccgaacaagaagaagggagaagtgtgtgcaacggcggtttatgaccttgaggatggacggcagattcctgcagagaagcgtggacataacttctttgtgactgcatcgtgggatgatatatgtgtggatgattatgactgtgtagtggttccaggagggagatcacctgagctattggtgatgaatgaaaaggctgttgctttggttaagagttttgcagagaaagataaggtgtttgcagctattggacaggggaaattgcttcttgcagccactggtgttcttaaggggaagcgatgcgcgagtgggaaagggatgaaggtgatggtgaaggtggctggaggtgaggctgtgatggaaaagggatgtgtaactgatgggaaggttgtgacggcagcatcagccacggatctgcctgcctttttgtttgatttatcaactgctcttggtctaactgtcatgttctaaaattttgcaactaaaaaacataaaagatagtttgagtaataaaatcatatcttcaatttgctcaattgaagtgaaaagaaaaacaaaagagctcgattgtagtgtctctgctttcatgagttcatggcactcctaacaaactatattgtagctgcttcttggaaataaaagcatgtagtttggtg

SEQ ID NO: 40376 - protein, 398 aa, Arabidopsis thaliana
  peptide (1)..(398): Ceres Seq. ID no. 12370865
  misc_feature (212)..(397): Homolog of NCBI NO: 22978710 NR Description: hypothetical protein [Ralstonia metallidurans]
  misc_feature (212)..(396): Homolog of NCBI NO: 33591328 NR Description: conserved hypothetical protein [Bordetella
  misc_feature (212)..(392): Homolog of NCBI NO: 23040436 NR Description: hypothetical protein [Trichodesmium erythraeum
  misc_feature (212)..(393): Homolog of NCBI NO: 15890541 NR Description: AGR_L_853p [Agrobacterium tumefaciens]
  misc_feature (67)..(398): Homolog of NCBI NO: 21954064 NR Description: unknown protein [Arabidopsis thaliana]
  misc_feature (13)..(398): Homolog of NCBI NO: 15232958 NR Description: expressed protein; protein id: At3g02720.1
  misc_feature (16)..(398): Homolog of NCBI NO: 32488724 NR Description: OSJNBb0004A17.3 [Oryza sativa (japonica
  misc_feature (10)..(398): Homolog of NCBI NO: 15232554 NR Description: putative protein
  misc_feature (10)..(398): Homolog of NCBI NO: 30687679 NR Description: (YLS5) proteaseI (pfpI)-like protein, complete
  misc_feature (10)..(398): Homolog of NCBI NO: 18404881 NR Description: expressed protein
FNAHKHLPKMASAVQKSALLLCGDYMEAYETIVPLYVLQSFGVSVHCVSPNRNAGDRCVMSAHDFLGLELTLNANFDDVTPENYDVIIIPGGRFTELLSADEKCVDLVARFAESKKLIFTSCHSQVMLMAAGILAGGVKCTAFESIKPLIELSGGEWWQQPGIQSMFEITDCVKDGNFMSTVGWPTLGHGIKLLLESLGGKVCSLEKKQASVLFLIGDYVEDYGINVPFRALQALGCKVDAVTPNKKKGEVCATAVYDLEDGRQIPAEKRGHNFFVTASWDDICVDDYDCVVVPGGRSPELLVMNEKAVALVKSFAEKDKVFAAIGQGKLLLAATGVLKGKRCASGKGMKVMVKVAGGEAVMEKGCVTDGKVVTAASATDLPAFLFDLSTALGLTVMF

SEQ ID NO: 40377 - protein, 389 aa, Arabidopsis thaliana
  peptide (1)..(389): Ceres Seq. ID no. 12370866
  misc_feature (203)..(388): Homolog of NCBI NO: 22978710 NR Description: hypothetical protein [Ralstonia metallidurans]
  misc_feature (203)..(387): Homolog of NCBI NO: 33591328 NR Description: conserved hypothetical protein [Bordetella
  misc_feature (203)..(383): Homolog of NCBI NO: 23040436 NR Description: hypothetical protein [Trichodesmium erythraeum
  misc_feature (203)..(384): Homolog of NCBI NO: 15890541 NR Description: AGR_L_853p [Agrobacterium tumefaciens]
  misc_feature (58)..(389): Homolog of NCBI NO: 21954064 NR Description: unknown protein [Arabidopsis thaliana]
  misc_feature (4)..(389): Homolog of NCBI NO: 15232958 NR Description: expressed protein; protein id: At3g02720.1
  misc_feature (7)..(389): Homolog of NCBI NO: 32488724 NR Description: OSJNBb0004A17.3 [Oryza sativa (japonica
  misc_feature (1)..(389): Homolog of NCBI NO: 15232554 NR Description: putative protein
  misc_feature (1)..(389): Homolog of NCBI NO: 30687679 NR Description: (YLS5) proteaseI (pfpI)-like protein, complete
  misc_feature (1)..(389): Homolog of NCBI NO: 18404881 NR Description: expressed protein
MASAVQKSALLLCGDYMEAYETIVPLYVLQSFGVSVHCVSPNRNAGDRCVMSAHDFLGLELTLNANFDDVTPENYDVIIIPGGRFTELLSADEKCVDLVARFAESKKLIFTSCHSQVMLMAAGILAGGVKCTAFESIKPLIELSGGEWWQQPGIQSMFEITDCVKDGNFMSTVGWPTLGHGIKLLLESLGGKVCSLEKKQASVLFLIGDYVEDYGINVPFRALQALGCKVDAVTPNKKKGEVCATAVYDLEDGRQIPAEKRGHNFFVTASWDDICVDDYDCVVVPGGRSPELLVMNEKAVALVKSFAEKDKVFAAIGQGKLLLAATGVLKGKRCASGKGMKVMVKVAGGEAVMEKGCVTDGKVVTAASATDLPAFLFDLSTALGLTVMF

SEQ ID NO: 40378 - protein, 373 aa, Arabidopsis thaliana
  peptide (1)..(373): Ceres Seq. ID no. 12370867
  misc_feature (187)..(372): Homolog of NCBI NO: 22978710 NR Description: hypothetical protein [Ralstonia metallidurans]
  misc_feature (187)..(371): Homolog of NCBI NO: 33591328 NR Description: conserved hypothetical protein [Bordetella
  misc_feature (187)..(367): Homolog of NCBI NO: 23040436 NR Description: hypothetical protein [Trichodesmium erythraeum
  misc_feature (187)..(368): Homolog of NCBI NO: 15890541 NR Description: AGR_L_853p [Agrobacterium tumefaciens]
  misc_feature (42)..(373): Homolog of NCBI NO: 21954064 NR Description: unknown protein [Arabidopsis thaliana]
  misc_feature (1)..(373): Homolog of NCBI NO: 15232958 NR Description: expressed protein; protein id: At3g02720.1
  misc_feature (1)..(373): Homolog of NCBI NO: 32488724 NR Description: OSJNBb0004A17.3 [Oryza sativa (japonica
  misc_feature (1)..(373): Homolog of NCBI NO: 15232554 NR Description: putative protein
  misc_feature (1)..(373): Homolog of NCBI NO: 30687679 NR Description: (YLS5) proteaseI (pfpI)-like protein, complete
  misc_feature (1)..(373): Homolog of NCBI NO: 18404881 NR Description: expressed protein
MEAYETIVPLYVLQSFGVSVHCVSPNRNAGDRCVMSAHDFLGLELTLNANFDDVTPENYDVIIIPGGRFTELLSADEKCVDLVARFAESKKLIFTSCHSQVMLMAAGILAGGVKCTAFESIKPLIELSGGEWWQQPGIQSMFEITDCVKDGNFMSTVGWPTLGHGIKLLLESLGGKVCSLEKKQASVLFLIGDYVEDYGINVPFRALQALGCKVDAVTPNKKKGEVCATAVYDLEDGRQIPAEKRGHNFFVTASWDDICVDDYDCVVVPGGRSPELLVMNEKAVALVKSFAEKDKVFAAIGQGKLLLAATGVLKGKRCASGKGMKVMVKVAGGEAVMEKGCVTDGKVVTAASATDLPAFLFDLSTALGLTVMF

SEQ ID NO: 40379 - DNA, 1903 bp, Arabidopsis thaliana
  misc_feature (1)..(1903): Ceres Seq. ID no. 12336176
  misc_feature: MA Experiment ID: 108579 Result: Down-regulated in Transcription
  misc_feature: MA Experiment 108579 PARAMETER Experiment Name: At_4deg_Cold_cDNA_P Parameter: Temperature (deg C) Value: 4 vs. 22
  misc_feature: MA Experiment 108579 PARAMETER Experiment Name: At_4deg_Cold_cDNA_P Parameter: Timepoint (hr) Value: 6
  misc_feature: MA Experiment 108579 PARAMETER Experiment Name: At_4deg_Cold_cDNA_P Parameter: Tissue Value: Aerial
  misc_feature: MA Experiment ID: 108594 Result: Up-regulated in Transcription
  misc_feature: MA Experiment 108594 PARAMETER Experiment Name: At_Ler-rhl_Root_cDNA_P Parameter: Plant Line Value: null
  misc_feature: MA Experiment ID: 20000307 Result: Up-regulated in Transcription
  misc_feature: MA Experiment 20000307 PARAMETER Experiment Name: At_Germinating_Seeds_Sub_P Parameter: Age (hr) Value: 24 vs. 0
  misc_feature: MA Experiment 20000307 PARAMETER Experiment Name: At_Germinating_Seeds_Sub_P Parameter: Organism Value: A. thaliana
  misc_feature: MA Experiment 20000307 PARAMETER Experiment Name: At_Germinating_Seeds_Sub_P Parameter: Plant Line Value: WS
  misc_feature: MA Experiment 20000307 PARAMETER Experiment Name: At_Germinating_Seeds_Sub_P Parameter: Tissue Value: Germinating Seeds
  misc_feature: MA Experiment ID: 20000440 Result: Up-regulated in Transcription
  misc_feature: MA Experiment 20000440 PARAMETER Experiment Name: At_Closed-Flower__Sub_P Parameter: Tissue Value: Closed Flower vs. Whole Plant
  misc_feature: MA Experiment ID: 20001806 Result: Up-regulated in Transcription
  misc_feature: MA Experiment 20001806 PARAMETER Experiment Name: At_50mM_NH4NO3_L-to-H_Sub_P Parameter: Timepoint (hr) Value: 4
  misc_feature: MA Experiment 20001806 PARAMETER Experiment Name: At_50mM_NH4NO3_L-to-H_Sub_P Parameter: Tissue Value: Leaf
  misc_feature: MA Experiment 20001806 PARAMETER Experiment Name: At_50mM_NH4NO3_L-to-H_Sub_P Parameter: Treatment Value: 50mM NH4NO3 vs 100mM Mannitol
  misc_feature: MA Experiment ID: 20001807 Result: Up-regulated in Transcription
  misc_feature: MA Experiment 20001807 PARAMETER Experiment Name: At_50mM_NH4NO3_L-to-H_Sub_P Parameter: Timepoint (hr) Value: 6
  misc_feature: MA Experiment 20001807 PARAMETER Experiment Name: At_50mM_NH4NO3_L-to-H_Sub_P Parameter: Tissue Value: Leaf
  misc_feature: MA Experiment 20001807 PARAMETER Experiment Name: At_50mM_NH4NO3_L-to-H_Sub_P Parameter: Treatment Value: 50mM NH4NO3 vs 100mM Mannitol
acacaaaccgacccgacccgaatctggccggtgagaaaatggaggtccaaagcagcagcaacaatggtggtcactcttctttctccagtctccgcgtctacctcaactctctttccgcgacgccttctcgcttatcccgccgcgctatttccgtctccacctcttccgacgagatgagtcgcgtccgcgccgtctccggcgaacagatgcgccgtactctccggtggtacgatctcattggactcggaatcgggggaatggtcggcgccggtgtctttgtcaccaccggccgtgctagtcgtctcgacgccggtccttcaattgtcgtctcttacgccatcgccgggctctgcgctctcctctccgctttctgttacaccgaattcgccgtccatctcccggtcgccggcggtgccttcagctacatccgtatcacattcggtgaatttccagcatttttcaccggagcaaatcttgtaatggattacgtaatgtcaaacgcggccgtttcgagaagcttcaccgcttatttaggaacagctttcgggatctcaacttccaagtggcgattcgtcgtctccggtttaccgaaaggattcaacgagattgatccagtcgcagttctcgtcgtcctcgtaatcacagtcatcatctgttgcagtacaagagagagttccaaagtgaacatgataatgactgcatttcacatcgcattcatattcttcgtgatcgtgatgggattcataaaaggagattcaaagaatctatcctcaccggcgaatccagagcacccctcgggattttttccgttcggcgcggcgggagttttcaacggagctgccatggtttacttaagctacataggatacgacgccgtttcaaccatggcggaagaagttgaaaatccggtcaaagatatccccgtcggtgtttccggctccgtcgcaatcgtcaccgttctttactgtctcatggcagtctctatgtcaatgcttctgccatacgatctgatagatccggaggcgccgttttccgcggcgttcagaggatcgaacggctgggaatgggtgacgaaagtggtggggataggagcaagctttgggatattaacatcacttttggtggcaatgttaggtcaggctcgctacatgtgtgtcatcggacggtccagagtggtccccttttggttcgctaagattcatcccaaaacatctacgccagtcaacgcctccacttttcttggcattttcacggcggctcttgcgcttttcaccgacctaaacgtcctcctaaacctcgtatccattggaacactatttgtcttctacatggtcgcaaacgctctcatcttcagacgttacgtcccggttggacccaccaagccgtggcccacactctgcttcctcacactattctccataacctctctcgtcttcaccctcatctggaaacttgtgccggaaggtaagcctaaagctttcatgctcggtgccagtgcggtggtggctatagccatcgtgctgagctttcagtgcgtggttccccaggctaggaaacctgagttgtggggagtcccgttcatgccgtggaccccgtgcgtgtcgatattcttgaacatttttttgcttggttcgttggacgcaccctcttacgtccggtttggattcttctccggtttgatcgtgctcgtgtatttgttttatggcgttcatgcgagttctgatgctgaagcgaatggatcttttggtgtgaaagatggacaagtcatgaaagagctaattgaagtgtgaaaagtatttatttagtttagttttctaaagcatcatgaaccaaaatgtaattaaactctctaattttttttctacatgagggggtttgaaatattaatgagaaaatattaaat

SEQ ID NO: 40380 - protein, 595 aa, Arabidopsis thaliana
  peptide (1)..(595): Ceres Seq. ID no. 12336177
  misc_feature (56)..(455): Homolog of NCBI NO: 22330822 NR Description: putative cationic amino acid transporter
  misc_feature (119)..(574): Homolog of NCBI NO: 19699365 NR Description: At2g34960/F19I3.19 [Arabidopsis thaliana]
  misc_feature (26)..(574): Homolog of NCBI NO: 15220035 NR Description: putative amino acid transporter
  misc_feature (26)..(580): Homolog of NCBI NO: 34903850 NR Description: unnamed protein product [Oryza sativa (japonica
  misc_feature (26)..(574): Homolog of NCBI NO: 15226868 NR Description: putative amino acid transporter
  misc_feature (61)..(594): Homolog of NCBI NO: 1076291 NR Description: amino acid transport protein AAT1 - Arabidopsis
  misc_feature (26)..(594): Homolog of NCBI NO: 30685317 NR Description: amino acid transport protein AAT1 [Arabidopsis
  misc_feature (28)..(578): Homolog of NCBI NO: 38345948 NR Description: OSJNBb0103I08.20 [Oryza sativa (japonica
  misc_feature (13)..(595): Homolog of NCBI NO: 15228334 NR Description: putative amino acid transporter; protein id:
  misc_feature (13)..(595): Homolog of NCBI NO: 15238312 NR Description: amino acid transport - like protein
  misc_feature (56)..(455): Homolog of NCBI NO: 22330822 NR Description: putative cationic amino acid transporter
  misc_feature (119)..(574): Homolog of NCBI NO: 19699365 NR Description: At2g34960/F19I3.19 [Arabidopsis thaliana]
  misc_feature (26)..(574): Homolog of NCBI NO: 15220035 NR Description: putative amino acid transporter
  misc_feature (26)..(580): Homolog of NCBI NO: 34903850 NR Description: unnamed protein product [Oryza sativa (japonica
  misc_feature (26)..(574): Homolog of NCBI NO: 15226868 NR Description: putative amino acid transporter
  misc_feature (61)..(594): Homolog of NCBI NO: 1076291 NR Description: amino acid transport protein AAT1 - Arabidopsis
  misc_feature (26)..(594): Homolog of NCBI NO: 30685317 NR Description: amino acid transport protein AAT1 [Arabidopsis
  misc_feature (28)..(578): Homolog of NCBI NO: 38345948 NR Description: OSJNBb0103I08.20 [Oryza sativa (japonica
  misc_feature (13)..(595): Homolog of NCBI NO: 15228334 NR Description: putative amino acid transporter; protein id:
  misc_feature (13)..(595): Homolog of NCBI NO: 15238312 NR Description: amino acid transport - like protein
  misc_feature (56)..(455): Homolog of NCBI NO: 22330822 NR Description: putative cationic amino acid transporter
  misc_feature (119)..(574): Homolog of NCBI NO: 19699365 NR Description: At2g34960/F19I3.19 [Arabidopsis thaliana]
  misc_feature (26)..(574): Homolog of NCBI NO: 15220035 NR Description: putative amino acid transporter
  misc_feature (26)..(580): Homolog of NCBI NO: 34903850 NR Description: unnamed protein product [Oryza sativa (japonica
  misc_feature (26)..(574): Homolog of NCBI NO: 15226868 NR Description: putative amino acid transporter
  misc_feature (61)..(594): Homolog of NCBI NO: 1076291 NR Description: amino acid transport protein AAT1 - Arabidopsis
  misc_feature (26)..(594): Homolog of NCBI NO: 30685317 NR Description: amino acid transport protein AAT1 [Arabidopsis
  misc_feature (28)..(578): Homolog of NCBI NO: 38345948 NR Description: OSJNBb0103I08.20 [Oryza sativa (japonica
  misc_feature (13)..(595): Homolog of NCBI NO: 15228334 NR Description: putative amino acid transporter; protein id:
  misc_feature (13)..(595): Homolog of NCBI NO: 15238312 NR Description: amino acid transport - like protein
TNRPDPNLAGEKMEVQSSSNNGGHSSFSSLRVYLNSLSATPSRLSRRAISVSTSSDEMSRVRAVSGEQMRRTLRWYDLIGLGIGGMVGAGVFVTTGRASRLDAGPSIVVSYAIAGLCALLSAFCYTEFAVHLPVAGGAFSYIRITFGEFPAFFTGANLVMDYVMSNAAVSRSFTAYLGTAFGISTSKWRFVVSGLPKGFNEIDPVAVLVVLVITVIICCSTRESSKVNMIMTAFHIAFIFFVIVMGFIKGDSKNLSSPANPEHPSGFFPFGAAGVFNGAAMVYLSYIGYDAVSTMAEEVENPVKDIPVGVSGSVAIVTVLYCLMAVSMSMLLPYDLIDPEAPFSAAFRGSNGWEWVTKVVGIGASFGILTSLLVAMLGQARYMCVIGRSRVVPFWFAKIHPKTSTPVNASTFLGIFTAALALFTDLNVLLNLVSIGTLFVFYMVANALIFRRYVPVGPTKPWPTLCFLTLFSITSLVFTLIWKLVPEGKPKAFMLGASAVVAIAIVLSFQCVVPQARKPELWGVPFMPWTPCVSIFLNIFLLGSLDAPSYVRFGFFSGLIVLVYLFYGVHASSDAEANGSFGVKDGQVMKELIEV

SEQ ID NO: 40381 - protein, 583 aa, Arabidopsis thaliana
  peptide (1)..(583): Ceres Seq. ID no. 12336178
  misc_feature (44)..(443): Homolog of NCBI NO: 22330822 NR Description: putative cationic amino acid transporter
  misc_feature (107)..(562): Homolog of NCBI NO: 19699365 NR Description: At2g34960/F19I3.19 [Arabidopsis thaliana]
  misc_feature (14)..(562): Homolog of NCBI NO: 15220035 NR Description: putative amino acid transporter
  misc_feature (14)..(568): Homolog of NCBI NO: 34903850 NR Description: unnamed protein product [Oryza sativa (japonica
  misc_feature (14)..(562): Homolog of NCBI NO: 15226868 NR Description: putative amino acid transporter
  misc_feature (49)..(582): Homolog of NCBI NO: 1076291 NR Description: amino acid transport protein AAT1 - Arabidopsis
  misc_feature (14)..(582): Homolog of NCBI NO: 30685317 NR Description: amino acid transport protein AAT1 [Arabidopsis
  misc_feature (16)..(566): Homolog of NCBI NO: 38345948 NR Description: OSJNBb0103I08.20 [Oryza sativa (japonica
  misc_feature (1)..(583): Homolog of NCBI NO: 15228334 NR Description: putative amino acid transporter; protein id:
  misc_feature (1)..(583): Homolog of NCBI NO: 15238312 NR Description: amino acid transport - like protein
  misc_feature (44)..(443): Homolog of NCBI NO: 22330822 NR Description: putative cationic amino acid transporter
  misc_feature (107)..(562): Homolog of NCBI NO: 19699365 NR Description: At2g34960/F19I3.19 [Arabidopsis thaliana]
  misc_feature (14)..(562): Homolog of NCBI NO: 15220035 NR Description: putative amino acid transporter
  misc_feature (14)..(568): Homolog of NCBI NO: 34903850 NR Description: unnamed protein product [Oryza sativa (japonica
  misc_feature (14)..(562): Homolog of NCBI NO: 15226868 NR Description: putative amino acid transporter
  misc_feature (49)..(582): Homolog of NCBI NO: 1076291 NR Description: amino acid transport protein AAT1 - Arabidopsis
  misc_feature (14)..(582): Homolog of NCBI NO: 30685317 NR Description: amino acid transport protein AAT1 [Arabidopsis
  misc_feature (16)..(566): Homolog of NCBI NO: 38345948 NR Description: OSJNBb0103I08.20 [Oryza sativa (japonica
  misc_feature (1)..(583): Homolog of NCBI NO: 15228334 NR Description: putative amino acid transporter; protein id:
  misc_feature (1)..(583): Homolog of NCBI NO: 15238312 NR Description: amino acid transport - like protein
  misc_feature (44)..(443): Homolog of NCBI NO: 22330822 NR Description: putative cationic amino acid transporter
  misc_feature (107)..(562): Homolog of NCBI NO: 19699365 NR Description: At2g34960/F19I3.19 [Arabidopsis thaliana]
  misc_feature (14)..(562): Homolog of NCBI NO: 15220035 NR Description: putative amino acid transporter
  misc_feature (14)..(568): Homolog of NCBI NO: 34903850 NR Description: unnamed protein product [Oryza sativa (japonica
  misc_feature (14)..(562): Homolog of NCBI NO: 15226868 NR Description: putative amino acid transporter
  misc_feature (49)..(582): Homolog of NCBI NO: 1076291 NR Description: amino acid transport protein AAT1 - Arabidopsis
  misc_feature (14)..(582): Homolog of NCBI NO: 30685317 NR Description: amino acid transport protein AAT1 [Arabidopsis
  misc_feature (16)..(566): Homolog of NCBI NO: 38345948 NR Description: OSJNBb0103I08.20 [Oryza sativa (japonica
  misc_feature (1)..(583): Homolog of NCBI NO: 15228334 NR Description: putative amino acid transporter; protein id:
  misc_feature (1)..(583): Homolog of NCBI NO: 15238312 NR Description: amino acid transport - like protein
MEVQSSSNNGGHSSFSSLRVYLNSLSATPSRLSRRAISVSTSSDEMSRVRAVSGEQMRRTLRWYDLIGLGIGGMVGAGVFVTTGRASRLDAGPSIVVSYAIAGLCALLSAFCYTEFAVHLPVAGGAFSYIRITFGEFPAFFTGANLVMDYVMSNAAVSRSFTAYLGTAFGISTSKWRFVVSGLPKGFNEIDPVAVLVVLVITVIICCSTRESSKVNMIMTAFHIAFIFFVIVMGFIKGDSKNLSSPANPEHPSGFFPFGAAGVFNGAAMVYLSYIGYDAVSTMAEEVENPVKDIPVGVSGSVAIVTVLYCLMAVSMSMLLPYDLIDPEAPFSAAFRGSNGWEWVTKVVGIGASFGILTSLLVAMLGQARYMCVIGRSRVVPFWFAKIHPKTSTPVNASTFLGIFTAALALFTDLNVLLNLVSIGTLFVFYMVANALIFRRYVPVGPTKPWPTLCFLTLFSITSLVFTLIWKLVPEGKPKAFMLGASAVVAIAIVLSFQCVVPQARKPELWGVPFMPWTPCVSIFLNIFLLGSLDAPSYVRFGFFSGLIVLVYLFYGVHASSDAEANGSFGVKDGQVMKELIEV

SEQ ID NO: 40382 - protein, 538 aa, Arabidopsis thaliana
  peptide (1)..(538): Ceres Seq. ID no. 12336179
  misc_feature (1)..(398): Homolog of NCBI NO: 22330822 NR Description: putative cationic amino acid transporter
  misc_feature (62)..(517): Homolog of NCBI NO: 19699365 NR Description: At2g34960/F19I3.19 [Arabidopsis thaliana]
  misc_feature (1)..(517): Homolog of NCBI NO: 15220035 NR Description: putative amino acid transporter
  misc_feature (1)..(523): Homolog of NCBI NO: 34903850 NR Description: unnamed protein product [Oryza sativa (japonica
  misc_feature (1)..(517): Homolog of NCBI NO: 15226868 NR Description: putative amino acid transporter
  misc_feature (4)..(537): Homolog of NCBI NO: 1076291 NR Description: amino acid transport protein AAT1 - Arabidopsis
  misc_feature (1)..(537): Homolog of NCBI NO: 30685317 NR Description: amino acid transport protein AAT1 [Arabidopsis
  misc_feature (1)..(521): Homolog of NCBI NO: 38345948 NR Description: OSJNBb0103I08.20 [Oryza sativa (japonica
  misc_feature (1)..(538): Homolog of NCBI NO: 15228334 NR Description: putative amino acid transporter; protein id:
  misc_feature (1)..(538): Homolog of NCBI NO: 15238312 NR Description: amino acid transport - like protein
  misc_feature (1)..(398): Homolog of NCBI NO: 22330822 NR Description: putative cationic amino acid transporter
  misc_feature (62)..(517): Homolog of NCBI NO: 19699365 NR Description: At2g34960/F19I3.19 [Arabidopsis thaliana]
  misc_feature (1)..(517): Homolog of NCBI NO: 15220035 NR Description: putative amino acid transporter
  misc_feature (1)..(523): Homolog of NCBI NO: 34903850 NR Description: unnamed protein product [Oryza sativa (japonica
  misc_feature (1)..(517): Homolog of NCBI NO: 15226868 NR Description: putative amino acid transporter
  misc_feature (4)..(537): Homolog of NCBI NO: 1076291 NR Description: amino acid transport protein AAT1 - Arabidopsis
  misc_feature (1)..(537): Homolog of NCBI NO: 30685317 NR Description: amino acid transport protein AAT1 [Arabidopsis
  misc_feature (1)..(521): Homolog of NCBI NO: 38345948 NR Description: OSJNBb0103I08.20 [Oryza sativa (japonica
  misc_feature (1)..(538): Homolog of NCBI NO: 15228334 NR Description: putative amino acid transporter; protein id:
  misc_feature (1)..(538): Homolog of NCBI NO: 15238312 NR Description: amino acid transport - like protein
  misc_feature (1)..(398): Homolog of NCBI NO: 22330822 NR Description: putative cationic amino acid transporter
  misc_feature (62)..(517): Homolog of NCBI NO: 19699365 NR Description: At2g34960/F19I3.19 [Arabidopsis thaliana]
  misc_feature (1)..(517): Homolog of NCBI NO: 15220035 NR Description: putative amino acid transporter
  misc_feature (1)..(523): Homolog of NCBI NO: 34903850 NR Description: unnamed protein product [Oryza sativa (japonica
  misc_feature (1)..(517): Homolog of NCBI NO: 15226868 NR Description: putative amino acid transporter
  misc_feature (4)..(537): Homolog of NCBI NO: 1076291 NR Description: amino acid transport protein AAT1 - Arabidopsis
  misc_feature (1)..(537): Homolog of NCBI NO: 30685317 NR Description: amino acid transport protein AAT1 [Arabidopsis
  misc_feature (1)..(521): Homolog of NCBI NO: 38345948 NR Description: OSJNBb0103I08.20 [Oryza sativa (japonica
  misc_feature (1)..(538): Homolog of NCBI NO: 15228334 NR Description: putative amino acid transporter; protein id:
  misc_feature (1)..(538): Homolog of NCBI NO: 15238312 NR Description: amino acid transport - like protein
MSRVRAVSGEQMRRTLRWYDLIGLGIGGMVGAGVFVTTGRASRLDAGPSIVVSYAIAGLCALLSAFCYTEFAVHLPVAGGAFSYIRITFGEFPAFFTGANLVMDYVMSNAAVSRSFTAYLGTAFGISTSKWRFVVSGLPKGFNEIDPVAVLVVLVITVIICCSTRESSKVNMIMTAFHIAFIFFVIVMGFIKGDSKNLSSPANPEHPSGFFPFGAAGVFNGAAMVYLSYIGYDAVSTMAEEVENPVKDIPVGVSGSVAIVTVLYCLMAVSMSMLLPYDLIDPEAPFSAAFRGSNGWEWVTKVVGIGASFGILTSLLVAMLGQARYMCVIGRSRVVPFWFAKIHPKTSTPVNASTFLGIFTAALALFTDLNVLLNLVSIGTLFVFYMVANALIFRRYVPVGPTKPWPTLCFLTLFSITSLVFTLIWKLVPEGKPKAFMLGASAVVAIAIVLSFQCVVPQARKPELWGVPFMPWTPCVSIFLNIFLLGSLDAPSYVRFGFFSGLIVLVYLFYGVHASSDAEANGSFGVKDGQVMKELIEV

SEQ ID NO: 40383 - DNA, 1222 bp, Arabidopsis thaliana
  misc_feature (1)..(1222): Ceres Seq. ID no. 13488553
  misc_feature: MA Experiment ID: 108433 Result: Up-regulated in Transcription
  misc_feature: MA Experiment 108433 PARAMETER Experiment Name: At_rhl_Mutant2_cDNA_P Parameter: Age (day) Value: 7
  misc_feature: MA Experiment 108433 PARAMETER Experiment Name: At_rhl_Mutant2_cDNA_P Parameter: Organism Value: A. thaliana
  misc_feature: MA Experiment 108433 PARAMETER Experiment Name: At_rhl_Mutant2_cDNA_P Parameter: Plant Line Value: rhl Mutant vs. wt landsburg
  misc_feature: MA Experiment 108433 PARAMETER Experiment Name: At_rhl_Mutant2_cDNA_P Parameter: Tissue Value: Roots
  misc_feature: MA Experiment ID: 108461 Result: Up-regulated in Transcription
  misc_feature: MA Experiment 108461 PARAMETER Experiment Name: At_Germinating_Seeds_cDNA_P Parameter: Age (day) Value: 1 vs. 0
  misc_feature: MA Experiment 108461 PARAMETER Experiment Name: At_Germinating_Seeds_cDNA_P Parameter: Tissue Value: Germinating Seeds
  misc_feature: MA Experiment ID: 108462 Result: Up-regulated in Transcription
  misc_feature: MA Experiment 108462 PARAMETER Experiment Name: At_Germinating_Seeds_cDNA_P Parameter: Age (day) Value: 2 vs. 0
  misc_feature: MA Experiment 108462 PARAMETER Experiment Name: At_Germinating_Seeds_cDNA_P Parameter: Tissue Value: Germinating Seeds
  misc_feature: MA Experiment ID: 108463 Result: Up-regulated in Transcription
  misc_feature: MA Experiment 108463 PARAMETER Experiment Name: At_Germinating_Seeds_cDNA_P Parameter: Age (day) Value: 3 vs. 0
  misc_feature: MA Experiment 108463 PARAMETER Experiment Name: At_Germinating_Seeds_cDNA_P Parameter: Tissue Value: Germinating Seeds
  misc_feature: MA Experiment ID: 108464 Result: Up-regulated in Transcription
  misc_feature: MA Experiment 108464 PARAMETER Experiment Name: At_Germinating_Seeds_cDNA_P Parameter: Age (day) Value: 4 vs. 0
  misc_feature: MA Experiment 108464 PARAMETER Experiment Name: At_Germinating_Seeds_cDNA_P Parameter: Tissue Value: Germinating Seeds
  misc_feature: MA Experiment ID: 108501 Result: Down-regulated in Transcription
  misc_feature: MA Experiment 108501 PARAMETER Experiment Name: At_ap2_floral_buds_cDNA_P Parameter: Plant Line Value: ap2 (Ler.)
  misc_feature: MA Experiment 108501 PARAMETER Experiment Name: At_ap2_floral_buds_cDNA_P Parameter: Tissue Value: Closed Flower
  misc_feature: MA Experiment ID: 108579 Result: Down-regulated in Transcription
  misc_feature: MA Experiment 108579 PARAMETER Experiment Name: At_4deg_Cold_cDNA_P Parameter: Temperature (deg C) Value: 4 vs. 22
  misc_feature: MA Experiment 108579 PARAMETER Experiment Name: At_4deg_Cold_cDNA_P Parameter: Timepoint (hr) Value: 6
  misc_feature: MA Experiment 108579 PARAMETER Experiment Name: At_4deg_Cold_cDNA_P Parameter: Tissue Value: Aerial
  misc_feature: MA Experiment ID: 20000030 Result: Down-regulated in Transcription
  misc_feature: MA Experiment 20000030 PARAMETER Experiment Name: At_CS6630_Roots_cDNA_P Parameter: Plant Line Value: CS6630 vs. WS
  misc_feature: MA Experiment 20000030 PARAMETER Experiment Name: At_CS6630_Roots_cDNA_P Parameter: Tissue Value: Roots
  misc_feature: MA Experiment ID: 20000113 Result: Down-regulated in Transcription
  misc_feature: MA Experiment 20000113 PARAMETER Experiment Name: At_42deg_Heat_cDNA_P Parameter: Temperature (deg C) Value: 42 vs. 22
  misc_feature: MA Experiment 20000113 PARAMETER Experiment Name: At_42deg_Heat_cDNA_P Parameter: Timepoint (hr) Value: 8
  misc_feature: MA Experiment 20000113 PARAMETER Experiment Name: At_42deg_Heat_cDNA_P Parameter: Tissue Value: Aerial
  misc_feature: MA Experiment ID: 20000179 Result: Up-regulated in Transcription
  misc_feature: MA Experiment 20000179 PARAMETER Experiment Name: At_Germinating_Seeds_P Parameter: Age (hr) Value: 6 vs. 0
  misc_feature: MA Experiment 20000179 PARAMETER Experiment Name: At_Germinating_Seeds_P Parameter: Tissue Value: Germinating Seeds
  misc_feature: MA Experiment ID: 20000180 Result: Up-regulated in Transcription
  misc_feature: MA Experiment 20000180 PARAMETER Experiment Name: At_Germinating_Seeds_P Parameter: Age (hr) Value: 24 vs. 0
  misc_feature: MA Experiment 20000180 PARAMETER Experiment Name: At_Germinating_Seeds_P Parameter: Tissue Value: Germinating Seeds
  misc_feature: MA Experiment ID: 20000224 Result: Down-regulated in Transcription
  misc_feature: MA Experiment ID: 20000227 Result: Down-regulated in Transcription
  misc_feature: MA Experiment 20000227 PARAMETER Experiment Name: At_Root-Tips-vs-Tops_P Parameter: Tissue Value: Root Tips vs. Root Tops
  misc_feature: MA Experiment ID: 20001557 Result: Down-regulated in Transcription
  misc_feature: MA Experiment 20001557 PARAMETER Experiment Name: At_Drought_Soil_Dry_P Parameter: Age (day) Value: 27
  misc_feature: MA Experiment 20001557 PARAMETER Experiment Name: At_Drought_Soil_Dry_P Parameter: Organism Value: A. thaliana
  misc_feature: MA Experiment 20001557 PARAMETER Experiment Name: At_Drought_Soil_Dry_P Parameter: Plant Line Value: WS
  misc_feature: MA Experiment 20001557 PARAMETER Experiment Name: At_Drought_Soil_Dry_P Parameter: Post Timepoint (hr) Value: 3
  misc_feature: MA Experiment 20001557 PARAMETER Experiment Name: At_Drought_Soil_Dry_P Parameter: Post-Treatment Value: Re-Water vs. No Drought
  misc_feature: MA Experiment 20001557 PARAMETER Experiment Name: At_Drought_Soil_Dry_P Parameter: Timepoint (day) Value: 13
  misc_feature: MA Experiment 20001557 PARAMETER Experiment Name: At_Drought_Soil_Dry_P Parameter: Treatment Value: Drought vs. No Drought
  misc_feature: MA Experiment ID: 20001558 Result: Down-regulated in Transcription
  misc_feature: MA Experiment 20001558 PARAMETER Experiment Name: At_Drought_Soil_Dry_P Parameter: Age (day) Value: 27
  misc_feature: MA Experiment 20001558 PARAMETER Experiment Name: At_Drought_Soil_Dry_P Parameter: Organism Value: A. thaliana
  misc_feature: MA Experiment 20001558 PARAMETER Experiment Name: At_Drought_Soil_Dry_P Parameter: Plant Line Value: WS
  misc_feature: MA Experiment 20001558 PARAMETER Experiment Name: At_Drought_Soil_Dry_P Parameter: Post Timepoint (hr) Value: 6
  misc_feature: MA Experiment 20001558 PARAMETER Experiment Name: At_Drought_Soil_Dry_P Parameter: Post-Treatment Value: Re-Water vs. No Drought
  misc_feature: MA Experiment 20001558 PARAMETER Experiment Name: At_Drought_Soil_Dry_P Parameter: Timepoint (day) Value: 13
  misc_feature: MA Experiment 20001558 PARAMETER Experiment Name: At_Drought_Soil_Dry_P Parameter: Treatment Value: Drought vs. No Drought
aattttttacgtgtaagaaaaaaacaaaggatccttttttactggaaagatgtttttttttttcttatcttctgagataaattgcgatagagagagagaacaaaaaaattctcagtgagcgcttattgatcaacaatggcgaaagagacagtgtgtgtaaccggagctaatggtttcatcggatcttggataatccgaacgttaattgagaaaggatatactaaaatccacgcttcgatttacccaggatccgacccgactcatcttctgcaactacccggatccgattctaagatcaagatctttgaagcggatctcttagactctgatgcaatctccagagctattgatggatgtgcgggagtgttccacgtggcgtcaccttgtacgttggatccaccggtagatccagagaaggagctggtcgaaccggcggttaagggaacgatcaatgtgttggaagctgctaagaggtttaatgtgagacgcgtggtgatcacgtcatctatctccgcattggttcctaaccctaattggccggaaaaagttcccgtcgatgagtcgtcgtggtccgatcttgatttttgcaagtcgaggcagaaatggtatccaatttcgaagacattagctgagaaagcagcttgggaattttcggagaagcatggaaccaacattgtgacgattcatccatcaacatgtctcggaccgcttctgcaaccgaacctaaacgcaagctgtgctgttctgctacagcttttacaaggctcgaccgagacgcaagagcatcactggctcggtgtggttcacgtgaaagatgtggctaaaggtcatgtgatgctattcgaaacacctgacgcttctggacggtttttatgcactaatgggatttatcagttcagtgagtttgctgctcttgtgtctaagctcttccctgagtttgctgttcacaagtttgataaagagactcaacctgggcttacgtcgtgtaatgatgcggctaagcgattgattgagctcgggctggtttttactgcggttgaagatgcggttaaggagacggtccagagtcttagagacaaaggcttcctctgagaatgtatgatatatctttgcaaattttaaactctgtgagtaagatgtaactggtttatatgataaaagtagaggaactaagatgtaactggtttatatgatacatgtacgagtacaaggtattactctc

SEQ ID NO: 40384 - protein, 318 aa, Arabidopsis thaliana
  peptide (1)..(318): Ceres Seq. ID no. 13488554
  misc_feature (6)..(292): Pfam Name: NAD dependent epimerase/dehydratase family Pfam Description: NAD dependent epimerase/dehydratase family
  misc_feature (4)..(318): Homolog of NCBI NO: 7431407 NR Description: cinnamoyl-CoA reductase (EC 1.2.1.44) CCR - cider
  misc_feature (1)..(318): Homolog of NCBI NO: 30694964 NR Description: cinnamyl-alcohol dehydrogenase (CAD), putative
  misc_feature (4)..(318): Homolog of NCBI NO: 2960364 NR Description: cinnamoyl CoA reductase [Populus balsamifera
  misc_feature (4)..(318): Homolog of NCBI NO: 40233135 NR Description: cinnamoyl CoA reductase [Populus tomentosa]
  misc_feature (4)..(318): Homolog of NCBI NO: 9998901 NR Description: cinnamoyl-CoA reductase [Populus balsamifera
  misc_feature (6)..(318): Homolog of NCBI NO: 34907928 NR Description: putative cinnamoyl CoA reductase
  misc_feature (4)..(318): Homolog of NCBI NO: 28876000 NR Description: putative cinnamoyl-CoA reductase
  misc_feature (1)..(318): Homolog of NCBI NO: 15237678 NR Description: cinnamoyl-CoA reductase family [Arabidopsis
  misc_feature (6)..(318): Homolog of NCBI NO: 34906124 NR Description: putative cinnamoyl-CoA reductase
  misc_feature (1)..(318): Homolog of NCBI NO: 15226955 NR Description: cinnamoyl-CoA reductase family [Arabidopsis
MAKETVCVTGANGFIGSWIIRTLIEKGYTKIHASIYPGSDPTHLLQLPGSDSKIKIFEADLLDSDAISRAIDGCAGVFHVASPCTLDPPVDPEKELVEPAVKGTINVLEAAKRFNVRRVVITSSISALVPNPNWPEKVPVDESSWSDLDFCKSRQKWYPISKTLAEKAAWEFSEKHGTNIVTIHPSTCLGPLLQPNLNASCAVLLQLLQGSTETQEHHWLGVVHVKDVAKGHVMLFETPDASGRFLCTNGIYQFSEFAALVSKLFPEFAVHKFDKETQPGLTSCNDAAKRLIELGLVFTAVEDAVKETVQSLRDKGFL

SEQ ID NO: 40385 - DNA, 1801 bp, Arabidopsis thaliana
  misc_feature (1)..(1801): Ceres Seq. ID no. 13499856
  misc_feature: MA Experiment ID: 108569 Result: Up-regulated in Transcription
  misc_feature: MA Experiment 108569 PARAMETER Experiment Name: At_0.001%_MeJA__cDNA_P Parameter: Timepoint (hr) Value: 6
  misc_feature: MA Experiment 108569 PARAMETER Experiment Name: At_0.001%_MeJA__cDNA_P Parameter: Tissue Value: Aerial
  misc_feature: MA Experiment 108569 PARAMETER Experiment Name: At_0.001%_MeJA__cDNA_P Parameter: Treatment Value: 0.001% MeJA vs. No Treatment
  misc_feature: MA Experiment ID: 108573 Result: Up-regulated in Transcription
  misc_feature: MA Experiment 108573 PARAMETER Experiment Name: At_Drought_cDNA_P Parameter: Timepoint (hr) Value: 6
  misc_feature: MA Experiment 108573 PARAMETER Experiment Name: At_Drought_cDNA_P Parameter: Tissue Value: Aerial
  misc_feature: MA Experiment 108573 PARAMETER Experiment Name: At_Drought_cDNA_P Parameter: Treatment Value: Drought vs. No Drought
  misc_feature: MA Experiment ID: 108577 Result: Down-regulated in Transcription
  misc_feature: MA Experiment 108577 PARAMETER Experiment Name: At_42deg_Heat_cDNA_P Parameter: Temperature (deg C) Value: 42 vs. 22
  misc_feature: MA Experiment 108577 PARAMETER Experiment Name: At_42deg_Heat_cDNA_P Parameter: Timepoint (hr) Value: 6
  misc_feature: MA Experiment 108577 PARAMETER Experiment Name: At_42deg_Heat_cDNA_P Parameter: Tissue Value: Aerial
ccgctttctctctctgtctttccttgttcaaccctcgagagattacggatagtgaaagagaagctacaaaatttcccaatttatcaaaaaatagaaatttcttacttttttcaaaattcatttctccccaaaaaaaatatcttgtgaaaactgcaactgtgatccatggcggaggatatggctgccgacgaagttacggctcctcctcgtaaggttcttatcatctccgctggtgctagccactccgtcgctcttctctctggtgacattgtttgttcttggggtcgaggagaggatggacagttaggtcatggcgatgcagaggatcgaccttctccgactcagcttagcgctttagatggccaccaaattgtttccgttacctgtggtgctgatcacactgttgcttattcacaatcaggcatggaagtctacagttggggatggggtgattttgggagattaggccatggtaactcaagcgacttgtttactccgctaccaatcaaagcattgcacggtattcggatcaagcagattgcttgtggggatagtcattgtttggctgtcactatggaaggagaggtccagagttggggccgcaaccagaatggtcaacttggtctgggggacaccgaagattctctagtgcctcagaagattcaagcctttgagggaataccaatcaaaatggttgctgctggtgcagaacacactgctgcagttacagaagatggtgacctctatggatggggctggggaagatacggaaatttgggattaggtgaccggactgaccgcttagttcctgaaagagttacctctactggtggtgagaaaatgtcaatggttgcttgtggatggcggcacacaatatcagtttcctactctggagcattgtatacttatggatggagcaaatatggacagctaggacatggagacttggaggatcaccttattcctcacaaactggaagcactgagcaacagttttatctcccagatttcgggaggttggagacatacaatggcattgacttcagatggaaaactatatggatggggttggaataagtttggacaagtaggagtcggcaataatttagatcagtgttctcctgtgcaagtgcgatttcccgatgatcagaaagtagttcaagtctcatgtggatggagacataccttggctgtcactgaaagaaataacgtgtttgcttggggtagaggtacaaatggacagctcggcattggagagtcggttgacaggaactttcccaagattatagaggcactgagcgtcgatggagcaagtggacaacatatagaatcttctaatatcgatccatcttcagggaaaagctgggtgtcgcctgcagagagatatgcagttgttcctgatgaaacgggcctaacggatggttcaagcaaaggtaatggaggtgatatcagtgttccacaaactgatgtcaagcgtgtacgaatttgagcctgagtcaattccgttttttttttacttccggttcttccgttggattcgaaggtttttcagtgatctcttttgggttgaggtttgtactaagagtacgtctgtctagtttgggattgtactttttgttgttgttgttagtttgtaacttgtgatgcttccctccccctagctctcttattacatgggcgttgtaaactgtgtgtactactactactagtctctagggtatgtactttttttttcctcaccataataataccttctggttctatatctttcatttcttaaaaagttttctgttttttccttc

SEQ ID NO: 40386 - protein, 440 aa, Arabidopsis thaliana
  peptide (1)..(440): Ceres Seq. ID no. 13499857
  misc_feature (294)..(343): Pfam Name: Regulator of chromosome condensation (RCC1) Pfam Description: Regulator of chromosome condensation (RCC1)
  misc_feature (15)..(321): Homolog of NCBI NO: 627469 NR Description: hypothetical protein 2 - human (fragment)
  misc_feature (15)..(321): Homolog of NCBI NO: 7657152 NR Description: hect domain and RLD 3 [Homo sapiens]
  misc_feature (15)..(321): Homolog of NCBI NO: 27777642 NR Description: hect domain and RLD 3 [Mus musculus]
  misc_feature (15)..(321): Homolog of NCBI NO: 12856817 NR Description: unnamed protein product [Mus musculus]
  misc_feature (15)..(321): Homolog of NCBI NO: 24659266 NR Description: Similar to hect domain and RLD 3 [Homo sapiens]
  misc_feature (15)..(323): Homolog of NCBI NO: 37620181 NR Description: DKFZP564G092 protein [Homo sapiens]
  misc_feature (15)..(323): Homolog of NCBI NO: 34852488 NR Description: similar to HECT domain and RCC1-like domain
  misc_feature (1)..(220): Homolog of NCBI NO: 21741206 NR Description: OSJNBb0086G13.1 [Oryza sativa (japonica
  misc_feature (1)..(440): Homolog of NCBI NO: 15237540 NR Description: UVB-resistance protein UVR8 (gb|AAD43920.1)
  misc_feature (1)..(440): Homolog of NCBI NO: 11358913 NR Description: UVB-resistance protein UVR8 [imported] -
MAEDMAADEVTAPPRKVLIISAGASHSVALLSGDIVCSWGRGEDGQLGHGDAEDRPSPTQLSALDGHQIVSVTCGADHTVAYSQSGMEVYSWGWGDFGRLGHGNSSDLFTPLPIKALHGIRIKQIACGDSHCLAVTMEGEVQSWGRNQNGQLGLGDTEDSLVPQKIQAFEGIPIKMVAAGAEHTAAVTEDGDLYGWGWGRYGNLGLGDRTDRLVPERVTSTGGEKMSMVACGWRHTISVSYSGALYTYGWSKYGQLGHGDLEDHLIPHKLEALSNSFISQISGGWRHTMALTSDGKLYGWGWNKFGQVGVGNNLDQCSPVQVRFPDDQKVVQVSCGWRHTLAVTERNNVFAWGRGTNGQLGIGESVDRNFPKIIEALSVDGASGQHIESSNIDPSSGKSWVSPAERYAVVPDETGLTDGSSKGNGGDISVPQTDVKRVRI

SEQ ID NO: 40387 - protein, 436 aa, Arabidopsis thaliana
  peptide (1)..(436): Ceres Seq. ID no. 13499858
  misc_feature (290)..(339): Pfam Name: Regulator of chromosome condensation (RCC1) Pfam Description: Regulator of chromosome condensation (RCC1)
  misc_feature (11)..(317): Homolog of NCBI NO: 627469 NR Description: hypothetical protein 2 - human (fragment)
  misc_feature (11)..(317): Homolog of NCBI NO: 7657152 NR Description: hect domain and RLD 3 [Homo sapiens]
  misc_feature (11)..(317): Homolog of NCBI NO: 27777642 NR Description: hect domain and RLD 3 [Mus musculus]
  misc_feature (11)..(317): Homolog of NCBI NO: 12856817 NR Description: unnamed protein product [Mus musculus]
  misc_feature (11)..(317): Homolog of NCBI NO: 24659266 NR Description: Similar to hect domain and RLD 3 [Homo sapiens]
  misc_feature (11)..(319): Homolog of NCBI NO: 37620181 NR Description: DKFZP564G092 protein [Homo sapiens]
  misc_feature (11)..(319): Homolog of NCBI NO: 34852488 NR Description: similar to HECT domain and RCC1-like domain
  misc_feature (1)..(216): Homolog of NCBI NO: 21741206 NR Description: OSJNBb0086G13.1 [Oryza sativa (japonica
  misc_feature (1)..(436): Homolog of NCBI NO: 15237540 NR Description: UVB-resistance protein UVR8 (gb|AAD43920.1)
  misc_feature (1)..(436): Homolog of NCBI NO: 11358913 NR Description: UVB-resistance protein UVR8 [imported] -
MAADEVTAPPRKVLIISAGASHSVALLSGDIVCSWGRGEDGQLGHGDAEDRPSPTQLSALDGHQIVSVTCGADHTVAYSQSGMEVYSWGWGDFGRLGHGNSSDLFTPLPIKALHGIRIKQIACGDSHCLAVTMEGEVQSWGRNQNGQLGLGDTEDSLVPQKIQAFEGIPIKMVAAGAEHTAAVTEDGDLYGWGWGRYGNLGLGDRTDRLVPERVTSTGGEKMSMVACGWRHTISVSYSGALYTYGWSKYGQLGHGDLEDHLIPHKLEALSNSFISQISGGWRHTMALTSDGKLYGWGWNKFGQVGVGNNLDQCSPVQVRFPDDQKVVQVSCGWRHTLAVTERNNVFAWGRGTNGQLGIGESVDRNFPKIIEALSVDGASGQHIESSNIDPSSGKSWVSPAERYAVVPDETGLTDGSSKGNGGDISVPQTDVKRVRI

SEQ ID NO: 40388 - protein, 354 aa, Arabidopsis thaliana
  peptide (1)..(354): Ceres Seq. ID no. 13499859
  misc_feature (208)..(257): Pfam Name: Regulator of chromosome condensation (RCC1) Pfam Description: Regulator of chromosome condensation (RCC1)
  misc_feature (1)..(235): Homolog of NCBI NO: 627469 NR Description: hypothetical protein 2 - human (fragment)
  misc_feature (1)..(235): Homolog of NCBI NO: 7657152 NR Description: hect domain and RLD 3 [Homo sapiens]
  misc_feature (1)..(235): Homolog of NCBI NO: 27777642 NR Description: hect domain and RLD 3 [Mus musculus]
  misc_feature (1)..(235): Homolog of NCBI NO: 12856817 NR Description: unnamed protein product [Mus musculus]
  misc_feature (1)..(235): Homolog of NCBI NO: 24659266 NR Description: Similar to hect domain and RLD 3 [Homo sapiens]
  misc_feature (1)..(237): Homolog of NCBI NO: 37620181 NR Description: DKFZP564G092 protein [Homo sapiens]
  misc_feature (1)..(237): Homolog of NCBI NO: 34852488 NR Description: similar to HECT domain and RCC1-like domain
  misc_feature (1)..(134): Homolog of NCBI NO: 21741206 NR Description: OSJNBb0086G13.1 [Oryza sativa (japonica
  misc_feature (1)..(354): Homolog of NCBI NO: 15237540 NR Description: UVB-resistance protein UVR8 (gb|AAD43920.1)
  misc_feature (1)..(354): Homolog of NCBI NO: 11358913 NR Description: UVB-resistance protein UVR8 [imported] -
MEVYSWGWGDFGRLGHGNSSDLFTPLPIKALHGIRIKQIACGDSHCLAVTMEGEVQSWGRNQNGQLGLGDTEDSLVPQKIQAFEGIPIKMVAAGAEHTAAVTEDGDLYGWGWGRYGNLGLGDRTDRLVPERVTSTGGEKMSMVACGWRHTISVSYSGALYTYGWSKYGQLGHGDLEDHLIPHKLEALSNSFISQISGGWRHTMALTSDGKLYGWGWNKFGQVGVGNNLDQCSPVQVRFPDDQKVVQVSCGWRHTLAVTERNNVFAWGRGTNGQLGIGESVDRNFPKIIEALSVDGASGQHIESSNIDPSSGKSWVSPAERYAVVPDETGLTDGSSKGNGGDISVPQTDVKRVRI

SEQ ID NO: 40389 - DNA, 1303 bp, Arabidopsis thaliana
  misc_feature (1)..(1303): Ceres Seq. ID no. 13488578
  misc_feature: MA Experiment ID: 108577 Result: Down-regulated in Transcription
  misc_feature: MA Experiment 108577 PARAMETER Experiment Name: At_42deg_Heat_cDNA_P Parameter: Temperature (deg C) Value: 42 vs. 22
  misc_feature: MA Experiment 108577 PARAMETER Experiment Name: At_42deg_Heat_cDNA_P Parameter: Timepoint (hr) Value: 6
  misc_feature: MA Experiment 108577 PARAMETER Experiment Name: At_42deg_Heat_cDNA_P Parameter: Tissue Value: Aerial
  misc_feature: MA Experiment ID: 20001247 Result: Up-regulated in Transcription
  misc_feature: MA Experiment 20001247 PARAMETER Experiment Name: At_Far-red-induction_P Parameter: Age (day) Value: 7
  misc_feature: MA Experiment 20001247 PARAMETER Experiment Name: At_Far-red-induction_P Parameter: Light Value: Far-red vs. White
  misc_feature: MA Experiment 20001247 PARAMETER Experiment Name: At_Far-red-induction_P Parameter: Organism Value: A. thaliana
  misc_feature: MA Experiment 20001247 PARAMETER Experiment Name: At_Far-red-induction_P Parameter: Plant Line Value: Columbia
  misc_feature: MA Experiment 20001247 PARAMETER Experiment Name: At_Far-red-induction_P Parameter: Timepoint (hr) Value: 1
  misc_feature: MA Experiment 20001247 PARAMETER Experiment Name: At_Far-red-induction_P Parameter: Tissue Value: Whole Plant
attcattctcctttgtgttttctctttttggagattttaacttcagtttttgtctaattagggttttaatttaaattggagggaaattttagatgcagtgacgtagtttttgggtaaattttcgtcggattctgaattgtctccggcgacatggcttctaatctccccatgagccctcaattggagcagatccatggcgaaatccgtgaccatttccgagccctcgcgaatggtttccagaggttggataagattaaggattcaactagacaaagcaaacaacttgaagaacttactgacaagatgagagagtgtaaaagattggtcaaagagttcgaccgtgaactcaaggatgaggaagctagaaattctcctgaagtaaataagcaattgaacgatgagaaacaatctatgatcaaggagctcaattcttacgttgctctaagaaaaacgtatatgagtacccttggcaacaagaaagttgagctttttgatatgggagctggagttagtggcgaacctacagctgaggaaaatgttcaagtggcttcatctatgtcaaaccaggagcttgttgatgctggaatgaaaagaatggatgagactgatcaggccattgagcgctcaaaacaggttgtagaacaaacactcgaagttggaactcaaactgcagctaatttaaagggacagacggatcaaatgggacgcgtagttaaccacttggacactattcaattctcaatcaagaaggcctcccagctggtgaaagagatagggagacaggtggctaccgataaatgcataatggggttcctgtttctcattgtatgcggtgtagtagccataatcatagtgaagatcgtgaatccgaataacaaagacattagggacatcccaggattagctcctccagcgcaatcgaggaagctattgtacttgaggaatcaagactacatgtgagaatataaatctctatttgtatatttattcacgaggaatgaggaaattgcatcttgaggttcgatatttccttctaatttgttaacaatccatttcatggatgttagagagagggtttgtgcttgttggcattgtgtgctttgatagttgacgaggcttggggatgtttatcttcatgttcttttacttgttttaacccattcgtttgaatctgggtttgattggagggtgtgtatattttcagcttttgtctctatttctttttccttcttcttttttgtagcaacttatcacttcttttgtataaaattcagaccaatgttatactctctcacgttttcat

SEQ ID NO: 40390 - protein, 269 aa, Arabidopsis thaliana
  peptide (1)..(269): Ceres Seq. ID no. 13488579
  misc_feature (77)..(215): Pfam Name: Vesicle transport v-SNARE protein Pfam Description: Vesicle transport v-SNARE protein
  misc_feature (1)..(173): Homolog of NCBI NO: 25370781 NR Description: F11A17.20 [imported] - Arabidopsis thaliana
  misc_feature (7)..(262): Homolog of NCBI NO: 25370780 NR Description: hypothetical protein At2g35190 [imported] -
  misc_feature (17)..(264): Homolog of NCBI NO: 25370781 NR Description: F11A17.20 [imported] - Arabidopsis thaliana
  misc_feature (7)..(262): Homolog of NCBI NO: 27805643 NR Description: Novel plant SNARE 11 (AtNPSN11)
  misc_feature (7)..(262): Homolog of NCBI NO: 18403771 NR Description: expressed protein [Arabidopsis thaliana]
  misc_feature (1)..(265): Homolog of NCBI NO: 23237830 NR Description: contains ESTs
  misc_feature (1)..(257): Homolog of NCBI NO: 34896946 NR Description: putative vesicle soluble NSF attachment protein
  misc_feature (1)..(264): Homolog of NCBI NO: 22330102 NR Description: expressed protein [Arabidopsis thaliana]
  misc_feature (1)..(269): Homolog of NCBI NO: 21536876 NR Description: unknown [Arabidopsis thaliana]
  misc_feature (1)..(269): Homolog of NCBI NO: 18401508 NR Description: expressed protein [Arabidopsis thaliana]
MASNLPMSPQLEQIHGEIRDHFRALANGFQRLDKIKDSTRQSKQLEELTDKMRECKRLVKEFDRELKDEEARNSPEVNKQLNDEKQSMIKELNSYVALRKTYMSTLGNKKVELFDMGAGVSGEPTAEENVQVASSMSNQELVDAGMKRMDETDQAIERSKQVVEQTLEVGTQTAANLKGQTDQMGRVVNHLDTIQFSIKKASQLVKEIGRQVATDKCIMGFLFLIVCGVVAIIIVKIVNPNNKDIRDIPGLAPPAQSRKLLYLRNQDYM

SEQ ID NO: 40391 - protein, 263 aa, Arabidopsis thaliana
  peptide (1)..(263): Ceres Seq. ID no. 13488580
  misc_feature (71)..(209): Pfam Name: Vesicle transport v-SNARE protein Pfam Description: Vesicle transport v-SNARE protein
  misc_feature (1)..(167): Homolog of NCBI NO: 25370781 NR Description: F11A17.20 [imported] - Arabidopsis thaliana
  misc_feature (1)..(256): Homolog of NCBI NO: 25370780 NR Description: hypothetical protein At2g35190 [imported] -
  misc_feature (11)..(258): Homolog of NCBI NO: 25370781 NR Description: F11A17.20 [imported] - Arabidopsis thaliana
  misc_feature (1)..(256): Homolog of NCBI NO: 27805643 NR Description: Novel plant SNARE 11 (AtNPSN11)
  misc_feature (1)..(256): Homolog of NCBI NO: 18403771 NR Description: expressed protein [Arabidopsis thaliana]
  misc_feature (1)..(259): Homolog of NCBI NO: 23237830 NR Description: contains ESTs
  misc_feature (1)..(251): Homolog of NCBI NO: 34896946 NR Description: putative vesicle soluble NSF attachment protein
  misc_feature (1)..(258): Homolog of NCBI NO: 22330102 NR Description: expressed protein [Arabidopsis thaliana]
  misc_feature (1)..(263): Homolog of NCBI NO: 21536876 NR Description: unknown [Arabidopsis thaliana]
  misc_feature (1)..(263): Homolog of NCBI NO: 18401508 NR Description: expressed protein [Arabidopsis thaliana]
MSPQLEQIHGEIRDHFRALANGFQRLDKIKDSTRQSKQLEELTDKMRECKRLVKEFDRELKDEEARNSPEVNKQLNDEKQSMIKELNSYVALRKTYMSTLGNKKVELFDMGAGVSGEPTAEENVQVASSMSNQELVDAGMKRMDETDQAIERSKQVVEQTLEVGTQTAANLKGQTDQMGRVVNHLDTIQFSIKKASQLVKEIGRQVATDKCIMGFLFLIVCGVVAIIIVKIVNPNNKDIRDIPGLAPPAQSRKLLYLRNQDYM

SEQ ID NO: 40392 - protein, 218 aa, Arabidopsis thaliana
  peptide (1)..(218): Ceres Seq. ID no. 13488581
  misc_feature (26)..(164): Pfam Name: Vesicle transport v-SNARE protein Pfam Description: Vesicle transport v-SNARE protein
  misc_feature (1)..(122): Homolog of NCBI NO: 25370781 NR Description: F11A17.20 [imported] - Arabidopsis thaliana
  misc_feature (1)..(211): Homolog of NCBI NO: 25370780 NR Description: hypothetical protein At2g35190 [imported] -
  misc_feature (1)..(213): Homolog of NCBI NO: 25370781 NR Description: F11A17.20 [imported] - Arabidopsis thaliana
  misc_feature (1)..(211): Homolog of NCBI NO: 27805643 NR Description: Novel plant SNARE 11 (AtNPSN11)
  misc_feature (1)..(211): Homolog of NCBI NO: 18403771 NR Description: expressed protein [Arabidopsis thaliana]
  misc_feature (1)..(214): Homolog of NCBI NO: 23237830 NR Description: contains ESTs
  misc_feature (1)..(206): Homolog of NCBI NO: 34896946 NR Description: putative vesicle soluble NSF attachment protein
  misc_feature (1)..(213): Homolog of NCBI NO: 22330102 NR Description: expressed protein [Arabidopsis thaliana]
  misc_feature (1)..(218): Homolog of NCBI NO: 21536876 NR Description: unknown [Arabidopsis thaliana]
  misc_feature (1)..(218): Homolog of NCBI NO: 18401508 NR Description: expressed protein [Arabidopsis thaliana]
MRECKRLVKEFDRELKDEEARNSPEVNKQLNDEKQSMIKELNSYVALRKTYMSTLGNKKVELFDMGAGVSGEPTAEENVQVASSMSNQELVDAGMKRMDETDQAIERSKQVVEQTLEVGTQTAANLKGQTDQMGRVVNHLDTIQFSIKKASQLVKEIGRQVATDKCIMGFLFLIVCGVVAIIIVKIVNPNNKDIRDIPGLAPPAQSRKLLYLRNQDYM

SEQ ID NO: 40393 - DNA, 1515 bp, Arabidopsis thaliana
  misc_feature (1)..(1515): Ceres Seq. ID no. 13499906
  misc_feature: MA Experiment ID: 108461 Result: Up-regulated in Transcription
  misc_feature: MA Experiment 108461 PARAMETER Experiment Name: At_Germinating_Seeds_cDNA_P Parameter: Age (day) Value: 1 vs. 0
  misc_feature: MA Experiment 108461 PARAMETER Experiment Name: At_Germinating_Seeds_cDNA_P Parameter: Tissue Value: Germinating Seeds
  misc_feature: MA Experiment ID: 108462 Result: Up-regulated in Transcription
  misc_feature: MA Experiment 108462 PARAMETER Experiment Name: At_Germinating_Seeds_cDNA_P Parameter: Age (day) Value: 2 vs. 0
  misc_feature: MA Experiment 108462 PARAMETER Experiment Name: At_Germinating_Seeds_cDNA_P Parameter: Tissue Value: Germinating Seeds
  misc_feature: MA Experiment ID: 108463 Result: Up-regulated in Transcription
  misc_feature: MA Experiment 108463 PARAMETER Experiment Name: At_Germinating_Seeds_cDNA_P Parameter: Age (day) Value: 3 vs. 0
  misc_feature: MA Experiment 108463 PARAMETER Experiment Name: At_Germinating_Seeds_cDNA_P Parameter: Tissue Value: Germinating Seeds
  misc_feature: MA Experiment ID: 108469 Result: Up-regulated in Transcription
  misc_feature: MA Experiment ID: 108574 Result: Up-regulated in Transcription
  misc_feature: MA Experiment 108574 PARAMETER Experiment Name: At_Wounding__cDNA_P Parameter: Timepoint (hr) Value: 1
  misc_feature: MA Experiment 108574 PARAMETER Experiment Name: At_Wounding__cDNA_P Parameter: Tissue Value: Aerial
  misc_feature: MA Experiment 108574 PARAMETER Experiment Name: At_Wounding__cDNA_P Parameter: Treatment Value: Wounding vs. No Wounding
  misc_feature: MA Experiment ID: 108576 Result: Up-regulated in Transcription
  misc_feature: MA Experiment 108576 PARAMETER Experiment Name: At_42deg_Heat_cDNA_P Parameter: Temperature (deg C) Value: 42 vs. 22
  misc_feature: MA Experiment 108576 PARAMETER Experiment Name: At_42deg_Heat_cDNA_P Parameter: Timepoint (hr) Value: 1
  misc_feature: MA Experiment 108576 PARAMETER Experiment Name: At_42deg_Heat_cDNA_P Parameter: Tissue Value: Aerial
  misc_feature: MA Experiment ID: 108585 Result: Up-regulated in Transcription
  misc_feature: MA Experiment 108585 PARAMETER Experiment Name: At_5mM_NaNP_cDNA_P Parameter: Timepoint (hr) Value: 6
  misc_feature: MA Experiment 108585 PARAMETER Experiment Name: At_5mM_NaNP_cDNA_P Parameter: Tissue Value: Aerial
  misc_feature: MA Experiment 108585 PARAMETER Experiment Name: At_5mM_NaNP_cDNA_P Parameter: Treatment Value: null
  misc_feature: MA Experiment ID: 108595 Result: Up-regulated in Transcription
  misc_feature: MA Experiment 108595 PARAMETER Experiment Name: At_Ler-pi_Ovule_cDNA_P Parameter: Plant Line Value: null
  misc_feature: MA Experiment ID: 108667 Result: Up-regulated in Transcription
  misc_feature: MA Experiment 108667 PARAMETER Experiment Name: At_2mM_SA_cDNA_P Parameter: Plant Line Value: WS
  misc_feature: MA Experiment 108667 PARAMETER Experiment Name: At_2mM_SA_cDNA_P Parameter: Timepoint (hr) Value: 1
  misc_feature: MA Experiment 108667 PARAMETER Experiment Name: At_2mM_SA_cDNA_P Parameter: Treatment Value: 2mM SA vs. No Treatment
  misc_feature: MA Experiment ID: 108668 Result: Up-regulated in Transcription
  misc_feature: MA Experiment 108668 PARAMETER Experiment Name: At_2mM_SA_cDNA_P Parameter: Plant Line Value: WS
  misc_feature: MA Experiment 108668 PARAMETER Experiment Name: At_2mM_SA_cDNA_P Parameter: Timepoint (hr) Value: 6
  misc_feature: MA Experiment 108668 PARAMETER Experiment Name: At_2mM_SA_cDNA_P Parameter: Treatment Value: 2mM SA vs. No Treatment
  misc_feature: MA Experiment ID: 20000112 Result: Up-regulated in Transcription
  misc_feature: MA Experiment 20000112 PARAMETER Experiment Name: At_42deg_Heat_cDNA_P Parameter: Temperature (deg C) Value: 42 vs. 22
  misc_feature: MA Experiment 20000112 PARAMETER Experiment Name: At_42deg_Heat_cDNA_P Parameter: Timepoint (hr) Value: 2
  misc_feature: MA Experiment 20000112 PARAMETER Experiment Name: At_42deg_Heat_cDNA_P Parameter: Tissue Value: Aerial
  misc_feature: MA Experiment ID: 20000144 Result: Up-regulated in Transcription
  misc_feature: MA Experiment 20000144 PARAMETER Experiment Name: At_42deg_Heat_cDNA_P Parameter: Temperature (deg C) Value: 42 vs. 22
  misc_feature: MA Experiment 20000144 PARAMETER Experiment Name: At_42deg_Heat_cDNA_P Parameter: Timepoint (hr) Value: 1
  misc_feature: MA Experiment 20000144 PARAMETER Experiment Name: At_42deg_Heat_cDNA_P Parameter: Tissue Value: Aerial
  misc_feature: MA Experiment ID: 20000180 Result: Up-regulated in Transcription
  misc_feature: MA Experiment 20000180 PARAMETER Experiment Name: At_Germinating_Seeds_P Parameter: Age (hr) Value: 24 vs. 0
  misc_feature: MA Experiment 20000180 PARAMETER Experiment Name: At_Germinating_Seeds_P Parameter: Tissue Value: Germinating Seeds
  misc_feature: MA Experiment ID: 20000182 Result: Up-regulated in Transcription
  misc_feature: MA Experiment 20000182 PARAMETER Experiment Name: At_2mM_SA_P Parameter: Age (day) Value: 14
  misc_feature: MA Experiment 20000182 PARAMETER Experiment Name: At_2mM_SA_P Parameter: Organism Value: A. thaliana
  misc_feature: MA Experiment 20000182 PARAMETER Experiment Name: At_2mM_SA_P Parameter: Plant Line Value: WS
  misc_feature: MA Experiment 20000182 PARAMETER Experiment Name: At_2mM_SA_P Parameter: Timepoint (hr) Value: 6
  misc_feature: MA Experiment 20000182 PARAMETER Experiment Name: At_2mM_SA_P Parameter: Tissue Value: Aerial
  misc_feature: MA Experiment 20000182 PARAMETER Experiment Name: At_2mM_SA_P Parameter: Treatment Value: 2mM SA vs. No Treatment
  misc_feature: MA Experiment ID: 20000185 Result: Up-regulated in Transcription
  misc_feature: MA Experiment 20000185 PARAMETER Experiment Name: At_Roots__P Parameter: Age (day) Value: 7 vs. 21
  misc_feature: MA Experiment 20000185 PARAMETER Experiment Name: At_Roots__P Parameter: Organism Value: A. thaliana
  misc_feature: MA Experiment 20000185 PARAMETER Experiment Name: At_Roots__P Parameter: Tissue Value: Roots vs. Whole Plant
  misc_feature: MA Experiment ID: 20000451 Result: Down-regulated in Transcription
  misc_feature: MA Experiment 20000451 PARAMETER Experiment Name: At_CS6879_Shoots-Roots_P Parameter: Age (day) Value: 14
  misc_feature: MA Experiment 20000451 PARAMETER Experiment Name: At_CS6879_Shoots-Roots_P Parameter: Organism Value: A. thaliana
  misc_feature: MA Experiment 20000451 PARAMETER Experiment Name: At_CS6879_Shoots-Roots_P Parameter: Plant Line Value: CS6879 vs. WS
  misc_feature: MA Experiment 20000451 PARAMETER Experiment Name: At_CS6879_Shoots-Roots_P Parameter: Tissue Value: Roots
  misc_feature: MA Experiment ID: 20000709 Result: Up-regulated in Transcription
  misc_feature: MA Experiment 20000709 PARAMETER Experiment Name: At_15mM_NH4NO3_L-to-H_P Parameter: Age (hr) Value: 14
  misc_feature: MA Experiment 20000709 PARAMETER Experiment Name: At_15mM_NH4NO3_L-to-H_P Parameter: Organism Value: A. thaliana
  misc_feature: MA Experiment 20000709 PARAMETER Experiment Name: At_15mM_NH4NO3_L-to-H_P Parameter: Plant Line Value: WS
  misc_feature: MA Experiment 20000709 PARAMETER Experiment Name: At_15mM_NH4NO3_L-to-H_P Parameter: Timepoint (hr) Value: 4
  misc_feature: MA Experiment 20000709 PARAMETER Experiment Name: At_15mM_NH4NO3_L-to-H_P Parameter: Tissue Value: Aerial
  misc_feature: MA Experiment 20000709 PARAMETER Experiment Name: At_15mM_NH4NO3_L-to-H_P Parameter: Treatment Value: 15mM NH4NO3 vs. 30mM Mannitol
aagatcacggaaccacgccaggatccttccgccgtcggcgacgtcgctcctgacgtcacctcaacacgtaaaccacacaattaagtttattcctctctctctccgtcaacttaaaccggtgtttgtatataaatctgattgatatagaaatcgaaactcaaattggagaacattcgagaagctttggatttttgaatcacgaagacatggaaaaaacagaatctgtatcaggaaaggggaagagagtgattgttatcggcggcggaatcgccggctctctcgcttcgaaatttcttcaattcgattccgatctcaccctcattgatccgaaggagtattttgagattatttgggcaagtttaaggtcaatggtagagccagcttttgctgaaagatcggtgataaaccacaagaagtatttacaaaatggtcgtgttgtgacttctccagcggttaatatcacagacaccgatgttttgaccgcggatggtcttgtctttgggtatgattatcttgttattgctactggtcacaatgatgtgcttcctaaaactaggcaagagaagttatctcaataccaaacagaacatgagaagatcaagtcatctgagtcgattctgattgttggtggaggtccgtcgggtgtggagctcgctgcggagatagctgtcgatttccctgagaaaaaggttactatagtacacaatggaccgagattgctggaatttgttggtcagaaagctgcagacaaggcattagactggatgaagtccaagagagttgaagtgatattgaaccaaagggttgatttgagttcagcttcagatgggagtaaaacgtaccgaacatcgggtggagagacgatacacgcggattgtcacttcctctgtactggaaaacctttgtcttcagaatggctaaaaggaactgttctgaaagataacttggatggcaaaggaaggcttatggtcgatgagtacttgagagttaagggtcgcaagaatgtattcgctattggtgatattactgatgtcccggagatgaaacaaggctacattgctgagaaacacgcctctgtagctacaaagaacataaagttgttgatgtctggtgggaacgagaagaagatgtcgacttacaagcctggtccggacattgccataatatctttaggaagaaaggactcggttgctcagttcccattcatgacagtctcgggttgcatacctggtttgatcaaatctaaggatctgtttgtcgggaagacgaggaaggcaagaggtctggatcctaaccttgtggagccttgagtgattgtgcttatcttcatgatgagattcttcttgtgcaggcgcatttcgtcgtttatttcatcacacgtttgttgtatgttgatttggtccactctcctgtttgtggattctcagagtggagtgttgtttgcttttgttgtaacatgatttgtaaagaatctgttcgatttctctaaaaggaaccaaagttgttcaataagcc

SEQ ID NO: 40394 - protein, 367 aa, Arabidopsis thaliana
  peptide (1)..(367): Ceres Seq. ID no. 13499907
  misc_feature (13)..(284): Pfam Name: Pyridine nucleotide-disulphide oxidoreductase Pfam Description: Pyridine nucleotide-disulphide oxidoreductase
  misc_feature (227)..(362): Homolog of NCBI NO: 34852510 NR Description: similar to apoptosis-inducing factor
  misc_feature (12)..(348): Homolog of NCBI NO: 27764291 NR Description: unnamed protein product [Podospora anserina]
  misc_feature (6)..(316): Homolog of NCBI NO: 24418885 NR Description: RIKEN cDNA 5430437E11 [Mus musculus]
  misc_feature (6)..(362): Homolog of NCBI NO: 30017355 NR Description: RIKEN cDNA 5430437E11 [Mus musculus]
  misc_feature (6)..(362): Homolog of NCBI NO: 14318424 NR Description: apoptosis-inducing factor (AIF)-homologous
  misc_feature (157)..(360): Homolog of NCBI NO: 40641605 NR Description: putative pyridine nucleotide-disulphide
  misc_feature (42)..(362): Homolog of NCBI NO: 34581771 NR Description: pyridine nucleotide-disulphide oxidoreductase
  misc_feature (1)..(365): Homolog of NCBI NO: 22326972 NR Description: pyridine nucleotide-disulphide oxidoreductase
  misc_feature (1)..(365): Homolog of NCBI NO: 26450665 NR Description: unknown protein [Arabidopsis thaliana]
  misc_feature (1)..(367): Homolog of NCBI NO: 15229901 NR Description: pyridine nucleotide-disulphide oxidoreductase
MEKTESVSGKGKRVIVIGGGIAGSLASKFLQFDSDLTLIDPKEYFEIIWASLRSMVEPAFAERSVINHKKYLQNGRVVTSPAVNITDTDVLTADGLVFGYDYLVIATGHNDVLPKTRQEKLSQYQTEHEKIKSSESILIVGGGPSGVELAAEIAVDFPEKKVTIVHNGPRLLEFVGQKAADKALDWMKSKRVEVILNQRVDLSSASDGSKTYRTSGGETIHADCHFLCTGKPLSSEWLKGTVLKDNLDGKGRLMVDEYLRVKGRKNVFAIGDITDVPEMKQGYIAEKHASVATKNIKLLMSGGNEKKMSTYKPGPDIAIISLGRKDSVAQFPFMTVSGCIPGLIKSKDLFVGKTRKARGLDPNLVEP

SEQ ID NO: 40395 - protein, 313 aa, Arabidopsis thaliana
  peptide (1)..(313): Ceres Seq. ID no. 13499908
  misc_feature (1)..(230): Pfam Name: Pyridine nucleotide-disulphide oxidoreductase Pfam Description: Pyridine nucleotide-disulphide oxidoreductase
  misc_feature (173)..(308): Homolog of NCBI NO: 34852510 NR Description: similar to apoptosis-inducing factor
  misc_feature (1)..(294): Homolog of NCBI NO: 27764291 NR Description: unnamed protein product [Podospora anserina]
  misc_feature (1)..(262): Homolog of NCBI NO: 24418885 NR Description: RIKEN cDNA 5430437E11 [Mus musculus]
  misc_feature (1)..(308): Homolog of NCBI NO: 30017355 NR Description: RIKEN cDNA 5430437E11 [Mus musculus]
  misc_feature (1)..(308): Homolog of NCBI NO: 14318424 NR Description: apoptosis-inducing factor (AIF)-homologous
  misc_feature (103)..(306): Homolog of NCBI NO: 40641605 NR Description: putative pyridine nucleotide-disulphide
  misc_feature (1)..(308): Homolog of NCBI NO: 34581771 NR Description: pyridine nucleotide-disulphide oxidoreductase
  misc_feature (1)..(311): Homolog of NCBI NO: 22326972 NR Description: pyridine nucleotide-disulphide oxidoreductase
  misc_feature (1)..(311): Homolog of NCBI NO: 26450665 NR Description: unknown protein [Arabidopsis thaliana]
  misc_feature (1)..(313): Homolog of NCBI NO: 15229901 NR Description: pyridine nucleotide-disulphide oxidoreductase
MVEPAFAERSVINHKKYLQNGRVVTSPAVNITDTDVLTADGLVFGYDYLVIATGHNDVLPKTRQEKLSQYQTEHEKIKSSESILIVGGGPSGVELAAEIAVDFPEKKVTIVHNGPRLLEFVGQKAADKALDWMKSKRVEVILNQRVDLSSASDGSKTYRTSGGETIHADCHFLCTGKPLSSEWLKGTVLKDNLDGKGRLMVDEYLRVKGRKNVFAIGDITDVPEMKQGYIAEKHASVATKNIKLLMSGGNEKKMSTYKPGPDIAIISLGRKDSVAQFPFMTVSGCIPGLIKSKDLFVGKTRKARGLDPNLVEP

SEQ ID NO: 40396 - DNA, 1596 bp, Arabidopsis thaliana
  misc_feature (1)..(1596): Ceres Seq. ID no. 12330270
  misc_feature: MA Experiment ID: 108434 Result: Down-regulated in Transcription
  misc_feature: MA Experiment 108434 PARAMETER Experiment Name: At_Root_Tips_cDNA_P Parameter: Tissue Value: Root Tips
  misc_feature: MA Experiment ID: 108462 Result: Up-regulated in Transcription
  misc_feature: MA Experiment 108462 PARAMETER Experiment Name: At_Germinating_Seeds_cDNA_P Parameter: Age (day) Value: 2 vs. 0
  misc_feature: MA Experiment 108462 PARAMETER Experiment Name: At_Germinating_Seeds_cDNA_P Parameter: Tissue Value: Germinating Seeds
  misc_feature: MA Experiment ID: 108463 Result: Up-regulated in Transcription
  misc_feature: MA Experiment 108463 PARAMETER Experiment Name: At_Germinating_Seeds_cDNA_P Parameter: Age (day) Value: 3 vs. 0
  misc_feature: MA Experiment 108463 PARAMETER Experiment Name: At_Germinating_Seeds_cDNA_P Parameter: Tissue Value: Germinating Seeds
  misc_feature: MA Experiment ID: 108573 Result: Up-regulated in Transcription
  misc_feature: MA Experiment 108573 PARAMETER Experiment Name: At_Drought_cDNA_P Parameter: Timepoint (hr) Value: 6
  misc_feature: MA Experiment 108573 PARAMETER Experiment Name: At_Drought_cDNA_P Parameter: Tissue Value: Aerial
  misc_feature: MA Experiment 108573 PARAMETER Experiment Name: At_Drought_cDNA_P Parameter: Treatment Value: Drought vs. No Drought
  misc_feature: MA Experiment ID: 108576 Result: Down-regulated in Transcription
  misc_feature: MA Experiment 108576 PARAMETER Experiment Name: At_42deg_Heat_cDNA_P Parameter: Temperature (deg C) Value: 42 vs. 22
  misc_feature: MA Experiment 108576 PARAMETER Experiment Name: At_42deg_Heat_cDNA_P Parameter: Timepoint (hr) Value: 1
  misc_feature: MA Experiment 108576 PARAMETER Experiment Name: At_42deg_Heat_cDNA_P Parameter: Tissue Value: Aerial
  misc_feature: MA Experiment ID: 108577 Result: Down-regulated in Transcription
  misc_feature: MA Experiment 108577 PARAMETER Experiment Name: At_42deg_Heat_cDNA_P Parameter: Temperature (deg C) Value: 42 vs. 22
  misc_feature: MA Experiment 108577 PARAMETER Experiment Name: At_42deg_Heat_cDNA_P Parameter: Timepoint (hr) Value: 6
  misc_feature: MA Experiment 108577 PARAMETER Experiment Name: At_42deg_Heat_cDNA_P Parameter: Tissue Value: Aerial
  misc_feature: MA Experiment ID: 108595 Result: Down-regulated in Transcription
  misc_feature: MA Experiment 108595 PARAMETER Experiment Name: At_Ler-pi_Ovule_cDNA_P Parameter: Plant Line Value: null
  misc_feature: MA Experiment ID: 20000030 Result: Down-regulated in Transcription
  misc_feature: MA Experiment 20000030 PARAMETER Experiment Name: At_CS6630_Roots_cDNA_P Parameter: Plant Line Value: CS6630 vs. WS
  misc_feature: MA Experiment 20000030 PARAMETER Experiment Name: At_CS6630_Roots_cDNA_P Parameter: Tissue Value: Roots
  misc_feature: MA Experiment ID: 20000069 Result: Down-regulated in Transcription
  misc_feature: MA Experiment 20000069 PARAMETER Experiment Name: At_100uM_ABA_Mutants_cDNA_P Parameter: Plant Line Value: CS23
  misc_feature: MA Experiment 20000069 PARAMETER Experiment Name: At_100uM_ABA_Mutants_cDNA_P Parameter: Timepoint (hr) Value: 6
  misc_feature: MA Experiment 20000069 PARAMETER Experiment Name: At_100uM_ABA_Mutants_cDNA_P Parameter: Tissue Value: Aerial
  misc_feature: MA Experiment 20000069 PARAMETER Experiment Name: At_100uM_ABA_Mutants_cDNA_P Parameter: Treatment Value: 100uM ABA vs. No Treatment
  misc_feature: MA Experiment ID: 20000070 Result: Down-regulated in Transcription
  misc_feature: MA Experiment 20000070 PARAMETER Experiment Name: At_100uM_ABA_Mutants_cDNA_P Parameter: Plant Line Value: CS24
  misc_feature: MA Experiment 20000070 PARAMETER Experiment Name: At_100uM_ABA_Mutants_cDNA_P Parameter: Timepoint (hr) Value: 6
  misc_feature: MA Experiment 20000070 PARAMETER Experiment Name: At_100uM_ABA_Mutants_cDNA_P Parameter: Tissue Value: Aerial
  misc_feature: MA Experiment 20000070 PARAMETER Experiment Name: At_100uM_ABA_Mutants_cDNA_P Parameter: Treatment Value: 100uM ABA vs. No Treatment
  misc_feature: MA Experiment ID: 20000071 Result: Down-regulated in Transcription
  misc_feature: MA Experiment 20000071 PARAMETER Experiment Name: At_100uM_ABA_Mutants_cDNA_P Parameter: Plant Line Value: CS8104
  misc_feature: MA Experiment 20000071 PARAMETER Experiment Name: At_100uM_ABA_Mutants_cDNA_P Parameter: Timepoint (hr) Value: 6
  misc_feature: MA Experiment 20000071 PARAMETER Experiment Name: At_100uM_ABA_Mutants_cDNA_P Parameter: Tissue Value: Aerial
  misc_feature: MA Experiment 20000071 PARAMETER Experiment Name: At_100uM_ABA_Mutants_cDNA_P Parameter: Treatment Value: 100uM ABA vs. No Treatment
  misc_feature: MA Experiment ID: 20000072 Result: Down-regulated in Transcription
  misc_feature: MA Experiment 20000072 PARAMETER Experiment Name: At_100uM_ABA_Mutants_cDNA_P Parameter: Plant Line Value: CS8105
  misc_feature: MA Experiment 20000072 PARAMETER Experiment Name: At_100uM_ABA_Mutants_cDNA_P Parameter: Timepoint (hr) Value: 6
  misc_feature: MA Experiment 20000072 PARAMETER Experiment Name: At_100uM_ABA_Mutants_cDNA_P Parameter: Tissue Value: Aerial
  misc_feature: MA Experiment 20000072 PARAMETER Experiment Name: At_100uM_ABA_Mutants_cDNA_P Parameter: Treatment Value: 100uM ABA vs. No Treatment
  misc_feature: MA Experiment ID: 20000086 Result: Down-regulated in Transcription
  misc_feature: MA Experiment 20000086 PARAMETER Experiment Name: At_100uM_ABA_Mutants_cDNA_P Parameter: Plant Line Value: CS22
  misc_feature: MA Experiment 20000086 PARAMETER Experiment Name: At_100uM_ABA_Mutants_cDNA_P Parameter: Timepoint (hr) Value: 6
  misc_feature: MA Experiment 20000086 PARAMETER Experiment Name: At_100uM_ABA_Mutants_cDNA_P Parameter: Tissue Value: Aerial
  misc_feature: MA Experiment 20000086 PARAMETER Experiment Name: At_100uM_ABA_Mutants_cDNA_P Parameter: Treatment Value: 100uM ABA vs. No Treatment
  misc_feature: MA Experiment ID: 20000087 Result: Down-regulated in Transcription
  misc_feature: MA Experiment 20000087 PARAMETER Experiment Name: At_100uM_ABA_Mutants_cDNA_P Parameter: Plant Line Value: WS
  misc_feature: MA Experiment 20000087 PARAMETER Experiment Name: At_100uM_ABA_Mutants_cDNA_P Parameter: Timepoint (hr) Value: 6
  misc_feature: MA Experiment 20000087 PARAMETER Experiment Name: At_100uM_ABA_Mutants_cDNA_P Parameter: Tissue Value: Aerial
  misc_feature: MA Experiment 20000087 PARAMETER Experiment Name: At_100uM_ABA_Mutants_cDNA_P Parameter: Treatment Value: 100uM ABA vs. No Treatment
  misc_feature: MA Experiment ID: 20000089 Result: Down-regulated in Transcription
  misc_feature: MA Experiment ID: 20000090 Result: Down-regulated in Transcription
  misc_feature: MA Experiment ID: 20000117 Result: Down-regulated in Transcription
  misc_feature: MA Experiment 20000117 PARAMETER Experiment Name: At_100uM_ABA_Mutants_cDNA_P Parameter: Plant Line Value: Columbia
  misc_feature: MA Experiment 20000117 PARAMETER Experiment Name: At_100uM_ABA_Mutants_cDNA_P Parameter: Timepoint (hr) Value: 6
  misc_feature: MA Experiment 20000117 PARAMETER Experiment Name: At_100uM_ABA_Mutants_cDNA_P Parameter: Tissue Value: Aerial
  misc_feature: MA Experiment 20000117 PARAMETER Experiment Name: At_100uM_ABA_Mutants_cDNA_P Parameter: Treatment Value: 100uM ABA vs. No Treatment
  misc_feature: MA Experiment ID: 20000184 Result: Up-regulated in Transcription
  misc_feature: MA Experiment 20000184 PARAMETER Experiment Name: At_Shoots__P Parameter: Age (day) Value: 7
  misc_feature: MA Experiment 20000184 PARAMETER Experiment Name: At_Shoots__P Parameter: Tissue Value: Shoots vs. Whole Plant
  misc_feature: MA Experiment ID: 20000234 Result: Down-regulated in Transcription
  misc_feature: MA Experiment 20000234 PARAMETER Experiment Name: At_Siliques_P Parameter: Age (day) Value: 21
  misc_feature: MA Experiment 20000234 PARAMETER Experiment Name: At_Siliques_P Parameter: Organism Value: A. thaliana
  misc_feature: MA Experiment 20000234 PARAMETER Experiment Name: At_Siliques_P Parameter: Plant Line Value: WS
  misc_feature: MA Experiment 20000234 PARAMETER Experiment Name: At_Siliques_P Parameter: Tissue Value: Less Than 5mm Siliques vs. Whole Plant
  misc_feature: MA Experiment ID: 20000264 Result: Down-regulated in Transcription
  misc_feature: MA Experiment 20000264 PARAMETER Experiment Name: At_Open_Flower_P Parameter: Age (day) Value: 21
  misc_feature: MA Experiment 20000264 PARAMETER Experiment Name: At_Open_Flower_P Parameter: Plant Line Value: WS
  misc_feature: MA Experiment 20000264 PARAMETER Experiment Name: At_Open_Flower_P Parameter: Tissue Value: Open Flower vs. Whole Plant
  misc_feature: MA Experiment ID: 20000265 Result: Down-regulated in Transcription
  misc_feature: MA Experiment 20000265 PARAMETER Experiment Name: At_Open_Flower_P Parameter: Age (day) Value: 21
  misc_feature: MA Experiment 20000265 PARAMETER Experiment Name: At_Open_Flower_P Parameter: Plant Line Value: WS
  misc_feature: MA Experiment 20000265 PARAMETER Experiment Name: At_Open_Flower_P Parameter: Tissue Value: Closed Flower vs. Whole Plant
  misc_feature: MA Experiment ID: 20000286 Result: Down-regulated in Transcription
  misc_feature: MA Experiment 20000286 PARAMETER Experiment Name: At_Open_Flower_P Parameter: Age (day) Value: 21
  misc_feature: MA Experiment 20000286 PARAMETER Experiment Name: At_Open_Flower_P Parameter: Plant Line Value: WS
  misc_feature: MA Experiment 20000286 PARAMETER Experiment Name: At_Open_Flower_P Parameter: Tissue Value: Half Open vs. Whole Plant
  misc_feature: MA Experiment ID: 20000436 Result: Up-regulated in Transcription
  misc_feature: MA Experiment 20000436 PARAMETER Experiment Name: At_Drought_P Parameter: Age (day) Value: 7
  misc_feature: MA Experiment 20000436 PARAMETER Experiment Name: At_Drought_P Parameter: Organism Value: A. thaliana
  misc_feature: MA Experiment 20000436 PARAMETER Experiment Name: At_Drought_P Parameter: Plant Line Value: WS
  misc_feature: MA Experiment 20000436 PARAMETER Experiment Name: At_Drought_P Parameter: Timepoint (hr) Value: 12
  misc_feature: MA Experiment 20000436 PARAMETER Experiment Name: At_Drought_P Parameter: Tissue Value: Whole Plant
  misc_feature: MA Experiment 20000436 PARAMETER Experiment Name: At_Drought_P Parameter: Treatment Value: Drought vs. No Drought
  misc_feature: MA Experiment ID: 20000794 Result: Down-regulated in Transcription
  misc_feature: MA Experiment 20000794 PARAMETER Experiment Name: At_Petals_P Parameter: Age (day) Value: 23-25 days
  misc_feature: MA Experiment 20000794 PARAMETER Experiment Name: At_Petals_P Parameter: Plant Line Value: WS
  misc_feature: MA Experiment 20000794 PARAMETER Experiment Name: At_Petals_P Parameter: Tissue Value: Petals vs. Whole plant
  misc_feature: MA Experiment ID: 20001248 Result: Down-regulated in Transcription
  misc_feature: MA Experiment 20001248 PARAMETER Experiment Name: At_Far-red-induction_P Parameter: Age (day) Value: 7
  misc_feature: MA Experiment 20001248 PARAMETER Experiment Name: At_Far-red-induction_P Parameter: Light Value: Far-red vs. White
  misc_feature: MA Experiment 20001248 PARAMETER Experiment Name: At_Far-red-induction_P Parameter: Organism Value: A. thaliana
  misc_feature: MA Experiment 20001248 PARAMETER Experiment Name: At_Far-red-induction_P Parameter: Plant Line Value: Columbia
  misc_feature: MA Experiment 20001248 PARAMETER Experiment Name: At_Far-red-induction_P Parameter: Timepoint (hr) Value: 4
  misc_feature: MA Experiment 20001248 PARAMETER Experiment Name: At_Far-red-induction_P Parameter: Tissue Value: Whole Plant
  misc_feature: MA Experiment ID: 20001451 Result: Down-regulated in Transcription
  misc_feature: MA Experiment 20001451 PARAMETER Experiment Name: At_Far-red-induction_P Parameter: Age (day) Value: 7
  misc_feature: MA Experiment 20001451 PARAMETER Experiment Name: At_Far-red-induction_P Parameter: Light Value: Far-red vs. White
  misc_feature: MA Experiment 20001451 PARAMETER Experiment Name: At_Far-red-induction_P Parameter: Organism Value: A. thaliana
  misc_feature: MA Experiment 20001451 PARAMETER Experiment Name: At_Far-red-induction_P Parameter: Plant Line Value: Columbia
  misc_feature: MA Experiment 20001451 PARAMETER Experiment Name: At_Far-red-induction_P Parameter: Timepoint (hr) Value: 24
  misc_feature: MA Experiment 20001451 PARAMETER Experiment Name: At_Far-red-induction_P Parameter: Tissue Value: Whole Plant
aagatcaaactcaaaacaaaatttgtttgttcgtttgatctttcttaaaaatatgaaaattaacatcagagattccaccatggtccggcctgccaccgagacaccaatcactaatctttggaactccaacgttgatcttgtcatccccagattccatacccctagtgtctacttctacagacccaccggcgcttccaatttctttgaccctcaggtcatgaaggaagctctttccaaagcccttgtccctttttaccctatggctggtcgcttgaagagagacgatgatggtcgtattgagatcgattgtaacggtgccggtgttctcttcgttgttgctgatactccttctgttatcgatgattttggtgattttgctcctacccttaatctccgtcagcttattcccgaagttgatcactccaccggcattcactctttcccgcttctcgttttgcaggtgactttctttaaatgtgggggagcttcacttggggttgggatgcaacatcacgcggcagatggtttctctggtcttcattttatcaacacatggtctgatatggctcgtggtcttgacctaaccattccacctttcattgatcgaacactcctccgagctagggacccgccacagcctgcttttcatcatgttgaatatcagcctgcaccaagtatgaagatccctcttgatccatccaaatcaggacctgagaataccaccgtgtctatattcaaattaacacgagaccagcttgttgctctcaaagcgaaatccaaggaggatgggaacactgtcagctatagctcatatgagatgttggcaggccatgtgtggagatcagtgggaaaggcgcgagggcttccaaacgaccaagagacgaaactgtacattgcaactgatggaaggtctagactgcgtccgcagctgcctcctggttactttgggaatgtgatattcactgcaacaccattggctgttgcaggggatctgctatctaaaccaacatggtatgctgcaggacagattcatgatttcttggttcgtatggatgataactatctgaggtcagctcttgactacctggagatgcagcctgatctgtcagcccttgtccgcggtgcacatacctacaagtgtccaaatttaggaatcacaagctgggtcagattacctatttatgatgcagactttggttggggtcgtcctatctttatgggacctggtggaattccgtatgagggtttgtcgtttgtgctaccaagtcctactaatgatggcagcttatccgttgccattgccctccaatctgaacacatgaaactgtttgagaagtttttgtttgagatatgagagcgttaagccctcgtttttccctcagtaaatttgggcaaatttgcttcttgtcatcatcctgtgttttagagggtacaacaaatcataaggtgtgcttatggtctgtaactttggactatgtcgtataggaacttttgctttatgttaatacagatgataagtgttgttctatgacacatgccgtgattgctttgtgtttgatttgttatatccaccatgctgtatgattttcagcttcc

SEQ ID NO: 40397 - protein, 450 aa, Arabidopsis thaliana
  peptide (1)..(450): Ceres Seq. ID no. 12330271
  misc_feature (18)..(450): Pfam Name: Transferase family Pfam Description: Transferase family
  misc_feature (18)..(449): Homolog of NCBI NO: 7484692 NR Description: anthranilate N-benzoyltransferase (EC 2.3.1.144)
  misc_feature (313)..(450): Homolog of NCBI NO: 10241667 NR Description: putative N-hydroxycinnamoyl/benzoyl transferase
  misc_feature (18)..(166): Homolog of NCBI NO: 10241667 NR Description: putative N-hydroxycinnamoyl/benzoyl transferase
  misc_feature (16)..(450): Homolog of NCBI NO: 40644084 NR Description: hydroxycinnamoyl CoA quinate transferase
  misc_feature (16)..(449): Homolog of NCBI NO: 40644899 NR Description: hydroxycinnamoyl CoA quinate transferase
  misc_feature (16)..(449): Homolog of NCBI NO: 6469032 NR Description: N-hydroxycinnamoyl/benzoyltransferase [Ipomoea
  misc_feature (18)..(450): Homolog of NCBI NO: 38345030 NR Description: OSJNBa0029H02.14 [Oryza sativa (japonica
  misc_feature (18)..(449): Homolog of NCBI NO: 27475616 NR Description: hydroxycinnamoyl transferase [Nicotiana tabacum]
  misc_feature (18)..(450): Homolog of NCBI NO: 15239747 NR Description: anthranilate N-benzoyltransferase
  misc_feature (18)..(450): Homolog of NCBI NO: 21536883 NR Description: anthranilate N-benzoyltransferase [Arabidopsis
RSNSKQNLFVRLIFLKNMKINIRDSTMVRPATETPITNLWNSNVDLVIPRFHTPSVYFYRPTGASNFFDPQVMKEALSKALVPFYPMAGRLKRDDDGRIEIDCNGAGVLFVVADTPSVIDDFGDFAPTLNLRQLIPEVDHSTGIHSFPLLVLQVTFFKCGGASLGVGMQHHAADGFSGLHFINTWSDMARGLDLTIPPFIDRTLLRARDPPQPAFHHVEYQPAPSMKIPLDPSKSGPENTTVSIFKLTRDQLVALKAKSKEDGNTVSYSSYEMLAGHVWRSVGKARGLPNDQETKLYIATDGRSRLRPQLPPGYFGNVIFTATPLAVAGDLLSKPTWYAAGQIHDFLVRMDDNYLRSALDYLEMQPDLSALVRGAHTYKCPNLGITSWVRLPIYDADFGWGRPIFMGPGGIPYEGLSFVLPSPTNDGSLSVAIALQSEHMKLFEKFLFEI

SEQ ID NO: 40398 - protein, 433 aa, Arabidopsis thaliana
  peptide (1)..(433): Ceres Seq. ID no. 12330272
  misc_feature (1)..(433): Pfam Name: Transferase family Pfam Description: Transferase family
  misc_feature (1)..(432): Homolog of NCBI NO: 7484692 NR Description: anthranilate N-benzoyltransferase (EC 2.3.1.144)
  misc_feature (296)..(433): Homolog of NCBI NO: 10241667 NR Description: putative N-hydroxycinnamoyl/benzoyl transferase
  misc_feature (1)..(149): Homolog of NCBI NO: 10241667 NR Description: putative N-hydroxycinnamoyl/benzoyl transferase
  misc_feature (1)..(433): Homolog of NCBI NO: 40644084 NR Description: hydroxycinnamoyl CoA quinate transferase
  misc_feature (1)..(432): Homolog of NCBI NO: 40644899 NR Description: hydroxycinnamoyl CoA quinate transferase
  misc_feature (1)..(432): Homolog of NCBI NO: 6469032 NR Description: N-hydroxycinnamoyl/benzoyltransferase [Ipomoea
  misc_feature (1)..(433): Homolog of NCBI NO: 38345030 NR Description: OSJNBa0029H02.14 [Oryza sativa (japonica
  misc_feature (1)..(432): Homolog of NCBI NO: 27475616 NR Description: hydroxycinnamoyl transferase [Nicotiana tabacum]
  misc_feature (1)..(433): Homolog of NCBI NO: 15239747 NR Description: anthranilate N-benzoyltransferase
  misc_feature (1)..(433): Homolog of NCBI NO: 21536883 NR Description: anthranilate N-benzoyltransferase [Arabidopsis
MKINIRDSTMVRPATETPITNLWNSNVDLVIPRFHTPSVYFYRPTGASNFFDPQVMKEALSKALVPFYPMAGRLKRDDDGRIEIDCNGAGVLFVVADTPSVIDDFGDFAPTLNLRQLIPEVDHSTGIHSFPLLVLQVTFFKCGGASLGVGMQHHAADGFSGLHFINTWSDMARGLDLTIPPFIDRTLLRARDPPQPAFHHVEYQPAPSMKIPLDPSKSGPENTTVSIFKLTRDQLVALKAKSKEDGNTVSYSSYEMLAGHVWRSVGKARGLPNDQETKLYIATDGRSRLRPQLPPGYFGNVIFTATPLAVAGDLLSKPTWYAAGQIHDFLVRMDDNYLRSALDYLEMQPDLSALVRGAHTYKCPNLGITSWVRLPIYDADFGWGRPIFMGPGGIPYEGLSFVLPSPTNDGSLSVAIALQSEHMKLFEKFLFEI

SEQ ID NO: 40399 - protein, 424 aa, Arabidopsis thaliana
  peptide (1)..(424): Ceres Seq. ID no. 12330273
  misc_feature (1)..(424): Pfam Name: Transferase family Pfam Description: Transferase family
  misc_feature (1)..(423): Homolog of NCBI NO: 7484692 NR Description: anthranilate N-benzoyltransferase (EC 2.3.1.144)
  misc_feature (287)..(424): Homolog of NCBI NO: 10241667 NR Description: putative N-hydroxycinnamoyl/benzoyl transferase
  misc_feature (1)..(140): Homolog of NCBI NO: 10241667 NR Description: putative N-hydroxycinnamoyl/benzoyl transferase
  misc_feature (1)..(424): Homolog of NCBI NO: 40644084 NR Description: hydroxycinnamoyl CoA quinate transferase
  misc_feature (1)..(423): Homolog of NCBI NO: 40644899 NR Description: hydroxycinnamoyl CoA quinate transferase
  misc_feature (1)..(423): Homolog of NCBI NO: 6469032 NR Description: N-hydroxycinnamoyl/benzoyltransferase [Ipomoea
  misc_feature (1)..(424): Homolog of NCBI NO: 38345030 NR Description: OSJNBa0029H02.14 [Oryza sativa (japonica
  misc_feature (1)..(423): Homolog of NCBI NO: 27475616 NR Description: hydroxycinnamoyl transferase [Nicotiana tabacum]
  misc_feature (1)..(424): Homolog of NCBI NO: 15239747 NR Description: anthranilate N-benzoyltransferase
  misc_feature (1)..(424): Homolog of NCBI NO: 21536883 NR Description: anthranilate N-benzoyltransferase [Arabidopsis
MVRPATETPITNLWNSNVDLVIPRFHTPSVYFYRPTGASNFFDPQVMKEALSKALVPFYPMAGRLKRDDDGRIEIDCNGAGVLFVVADTPSVIDDFGDFAPTLNLRQLIPEVDHSTGIHSFPLLVLQVTFFKCGGASLGVGMQHHAADGFSGLHFINTWSDMARGLDLTIPPFIDRTLLRARDPPQPAFHHVEYQPAPSMKIPLDPSKSGPENTTVSIFKLTRDQLVALKAKSKEDGNTVSYSSYEMLAGHVWRSVGKARGLPNDQETKLYIATDGRSRLRPQLPPGYFGNVIFTATPLAVAGDLLSKPTWYAAGQIHDFLVRMDDNYLRSALDYLEMQPDLSALVRGAHTYKCPNLGITSWVRLPIYDADFGWGRPIFMGPGGIPYEGLSFVLPSPTNDGSLSVAIALQSEHMKLFEKFLFEI

SEQ ID NO: 40400 - DNA, 1184 bp, Arabidopsis thaliana; identical to SEQ ID NO: 35315
  misc_feature (1)..(1184): Ceres Seq. ID no. 13488582
  misc_feature: MA Experiment ID: 108434 Result: Down-regulated in Transcription
  misc_feature: MA Experiment 108434 PARAMETER Experiment Name: At_Root_Tips_cDNA_P Parameter: Tissue Value: Root Tips
  misc_feature: MA Experiment ID: 108577 Result: Down-regulated in Transcription
  misc_feature: MA Experiment 108577 PARAMETER Experiment Name: At_42deg_Heat_cDNA_P Parameter: Temperature (deg C) Value: 42 vs. 22
  misc_feature: MA Experiment 108577 PARAMETER Experiment Name: At_42deg_Heat_cDNA_P Parameter: Timepoint (hr) Value: 6
  misc_feature: MA Experiment 108577 PARAMETER Experiment Name: At_42deg_Heat_cDNA_P Parameter: Tissue Value: Aerial
  misc_feature: MA Experiment ID: 20000111 Result: Down-regulated in Transcription
  misc_feature: MA Experiment 20000111 PARAMETER Experiment Name: At_42deg_Heat_cDNA_P Parameter: Temperature (deg C) Value: 42 vs. 22
  misc_feature: MA Experiment 20000111 PARAMETER Experiment Name: At_42deg_Heat_cDNA_P Parameter: Timepoint (hr) Value: 6
  misc_feature: MA Experiment 20000111 PARAMETER Experiment Name: At_42deg_Heat_cDNA_P Parameter: Tissue Value: Aerial
  misc_feature: MA Experiment ID: 20000113 Result: Down-regulated in Transcription
  misc_feature: MA Experiment 20000113 PARAMETER Experiment Name: At_42deg_Heat_cDNA_P Parameter: Temperature (deg C) Value: 42 vs. 22
  misc_feature: MA Experiment 20000113 PARAMETER Experiment Name: At_42deg_Heat_cDNA_P Parameter: Timepoint (hr) Value: 8
  misc_feature: MA Experiment 20000113 PARAMETER Experiment Name: At_42deg_Heat_cDNA_P Parameter: Tissue Value: Aerial
  misc_feature: MA Experiment ID: 20000171 Result: Down-regulated in Transcription
  misc_feature: MA Experiment 20000171 PARAMETER Experiment Name: At_42deg_Heat_P Parameter: Age (day) Value: 14
  misc_feature: MA Experiment 20000171 PARAMETER Experiment Name: At_42deg_Heat_P Parameter: Organism Value: A. thaliana
  misc_feature: MA Experiment 20000171 PARAMETER Experiment Name: At_42deg_Heat_P Parameter: Plant Line Value: WS
  misc_feature: MA Experiment 20000171 PARAMETER Experiment Name: At_42deg_Heat_P Parameter: Temperature (deg C) Value: 42 vs. 22
  misc_feature: MA Experiment 20000171 PARAMETER Experiment Name: At_42deg_Heat_P Parameter: Timepoint (hr) Value: 1
  misc_feature: MA Experiment 20000171 PARAMETER Experiment Name: At_42deg_Heat_P Parameter: Tissue Value: Aerial
  misc_feature: MA Experiment ID: 20000173 Result: Down-regulated in Transcription
  misc_feature: MA Experiment 20000173 PARAMETER Experiment Name: At_42deg_Heat_P Parameter: Age (day) Value: 14
  misc_feature: MA Experiment 20000173 PARAMETER Experiment Name: At_42deg_Heat_P Parameter: Organism Value: A. thaliana
  misc_feature: MA Experiment 20000173 PARAMETER Experiment Name: At_42deg_Heat_P Parameter: Plant Line Value: WS
  misc_feature: MA Experiment 20000173 PARAMETER Experiment Name: At_42deg_Heat_P Parameter: Temperature (deg C) Value: 42 vs. 22
  misc_feature: MA Experiment 20000173 PARAMETER Experiment Name: At_42deg_Heat_P Parameter: Timepoint (hr) Value: 6
  misc_feature: MA Experiment 20000173 PARAMETER Experiment Name: At_42deg_Heat_P Parameter: Tissue Value: Aerial
  misc_feature: MA Experiment ID: 20000180 Result: Up-regulated in Transcription
  misc_feature: MA Experiment 20000180 PARAMETER Experiment Name: At_Germinating_Seeds_P Parameter: Age (hr) Value: 24 vs. 0
  misc_feature: MA Experiment 20000180 PARAMETER Experiment Name: At_Germinating_Seeds_P Parameter: Tissue Value: Germinating Seeds
  misc_feature: MA Experiment ID: 20000184 Result: Down-regulated in Transcription
  misc_feature: MA Experiment 20000184 PARAMETER Experiment Name: At_Shoots__P Parameter: Age (day) Value: 7
  misc_feature: MA Experiment 20000184 PARAMETER Experiment Name: At_Shoots__P Parameter: Tissue Value: Shoots vs. Whole Plant
  misc_feature: MA Experiment ID: 20000264 Result: Down-regulated in Transcription
  misc_feature: MA Experiment 20000264 PARAMETER Experiment Name: At_Open_Flower_P Parameter: Age (day) Value: 21
  misc_feature: MA Experiment 20000264 PARAMETER Experiment Name: At_Open_Flower_P Parameter: Plant Line Value: WS
  misc_feature: MA Experiment 20000264 PARAMETER Experiment Name: At_Open_Flower_P Parameter: Tissue Value: Open Flower vs. Whole Plant
  misc_feature: MA Experiment ID: 20000265 Result: Down-regulated in Transcription
  misc_feature: MA Experiment 20000265 PARAMETER Experiment Name: At_Open_Flower_P Parameter: Age (day) Value: 21
  misc_feature: MA Experiment 20000265 PARAMETER Experiment Name: At_Open_Flower_P Parameter: Plant Line Value: WS
  misc_feature: MA Experiment 20000265 PARAMETER Experiment Name: At_Open_Flower_P Parameter: Tissue Value: Closed Flower vs. Whole Plant
  misc_feature: MA Experiment ID: 20000451 Result: Up-regulated in Transcription
  misc_feature: MA Experiment 20000451 PARAMETER Experiment Name: At_CS6879_Shoots-Roots_P Parameter: Age (day) Value: 14
  misc_feature: MA Experiment 20000451 PARAMETER Experiment Name: At_CS6879_Shoots-Roots_P Parameter: Organism Value: A. thaliana
  misc_feature: MA Experiment 20000451 PARAMETER Experiment Name: At_CS6879_Shoots-Roots_P Parameter: Plant Line Value: CS6879 vs. WS
  misc_feature: MA Experiment 20000451 PARAMETER Experiment Name: At_CS6879_Shoots-Roots_P Parameter: Tissue Value: Roots
  misc_feature: MA Experiment ID: 20000452 Result: Up-regulated in Transcription
  misc_feature: MA Experiment 20000452 PARAMETER Experiment Name: At_CS6879_Shoots-Roots_P Parameter: Age (day) Value: 14
  misc_feature: MA Experiment 20000452 PARAMETER Experiment Name: At_CS6879_Shoots-Roots_P Parameter: Organism Value: A. thaliana
  misc_feature: MA Experiment 20000452 PARAMETER Experiment Name: At_CS6879_Shoots-Roots_P Parameter: Plant Line Value: CS6879 vs. WS
  misc_feature: MA Experiment 20000452 PARAMETER Experiment Name: At_CS6879_Shoots-Roots_P Parameter: Tissue Value: Shoots
  misc_feature: MA Experiment ID: 20001558 Result: Down-regulated in Transcription
  misc_feature: MA Experiment 20001558 PARAMETER Experiment Name: At_Drought_Soil_Dry_P Parameter: Age (day) Value: 27
  misc_feature: MA Experiment 20001558 PARAMETER Experiment Name: At_Drought_Soil_Dry_P Parameter: Organism Value: A. thaliana
  misc_feature: MA Experiment 20001558 PARAMETER Experiment Name: At_Drought_Soil_Dry_P Parameter: Plant Line Value: WS
  misc_feature: MA Experiment 20001558 PARAMETER Experiment Name: At_Drought_Soil_Dry_P Parameter: Post Timepoint (hr) Value: 6
  misc_feature: MA Experiment 20001558 PARAMETER Experiment Name: At_Drought_Soil_Dry_P Parameter: Post-Treatment Value: Re-Water vs. No Drought
  misc_feature: MA Experiment 20001558 PARAMETER Experiment Name: At_Drought_Soil_Dry_P Parameter: Timepoint (day) Value: 13
  misc_feature: MA Experiment 20001558 PARAMETER Experiment Name: At_Drought_Soil_Dry_P Parameter: Treatment Value: Drought vs. No Drought

SEQ ID NO: 40401 - protein, 246 aa, Arabidopsis thaliana; identical to SEQ ID NO: 35316
  peptide (1)..(246): Ceres Seq. ID no. 13488583
  misc_feature (2)..(236): Pfam Name: Glutamine cyclotransferase Pfam Description: Glutamine cyclotransferase
  misc_feature (2)..(236): Pfam Name: Glutamine cyclotransferase Pfam Description: Glutamine cyclotransferase
  misc_feature (2)..(236): Pfam Name: Glutamine cyclotransferase Pfam Description: Glutamine cyclotransferase
  misc_feature (5)..(231): Homolog of NCBI NO: 21243055 NR Description: glutamine cyclotransferase
  misc_feature (4)..(229): Homolog of NCBI NO: 31790364 NR Description: putative glutamine cyclotransferase
  misc_feature (1)..(231): Homolog of NCBI NO: 22970826 NR Description: hypothetical protein [Chloroflexus aurantiacus]
  misc_feature (1)..(229): Homolog of NCBI NO: 21231655 NR Description: glutamine cyclotransferase
  misc_feature (1)..(233): Homolog of NCBI NO: 16126885 NR Description: glutamine cyclotransferase [Caulobacter
  misc_feature (5)..(231): Homolog of NCBI NO: 21243055 NR Description: glutamine cyclotransferase
  misc_feature (1)..(231): Homolog of NCBI NO: 22970826 NR Description: hypothetical protein [Chloroflexus aurantiacus]
  misc_feature (1)..(233): Homolog of NCBI NO: 16126885 NR Description: glutamine cyclotransferase [Caulobacter
  misc_feature (1)..(229): Homolog of NCBI NO: 21231655 NR Description: glutamine cyclotransferase
  misc_feature (1)..(231): Homolog of NCBI NO: 22970826 NR Description: hypothetical protein [Chloroflexus aurantiacus]
  misc_feature (4)..(229): Homolog of NCBI NO: 31790364 NR Description: putative glutamine cyclotransferase
  misc_feature (5)..(231): Homolog of NCBI NO: 21243055 NR Description: glutamine cyclotransferase
  misc_feature (2)..(246): Homolog of NCBI NO: 21536884 NR Description: glutamine cyclotransferase precursor-like protein
  misc_feature (2)..(246): Homolog of NCBI NO: 18416607 NR Description: glutamine cyclotransferase precursor - like
  misc_feature (2)..(246): Homolog of NCBI NO: 7484984 NR Description: glutaminyl-peptide cyclotransferase homolog
  misc_feature (3)..(245): Homolog of NCBI NO: 7484740 NR Description: glutaminyl-peptide cyclotransferase (EC 2.3.2.5)
  misc_feature (1)..(244): Homolog of NCBI NO: 24413973 NR Description: putative glutaminyl-peptide cyclotransferase
  misc_feature (2)..(246): Homolog of NCBI NO: 21536884 NR Description: glutamine cyclotransferase precursor-like protein
  misc_feature (2)..(246): Homolog of NCBI NO: 18416607 NR Description: glutamine cyclotransferase precursor - like
  misc_feature (2)..(246): Homolog of NCBI NO: 7484984 NR Description: glutaminyl-peptide cyclotransferase homolog
  misc_feature (3)..(245): Homolog of NCBI NO: 7484740 NR Description: glutaminyl-peptide cyclotransferase (EC 2.3.2.5)
  misc_feature (1)..(244): Homolog of NCBI NO: 24413973 NR Description: putative glutaminyl-peptide cyclotransferase
  misc_feature (1)..(233): Homolog of NCBI NO: 16126885 NR Description: glutamine cyclotransferase [Caulobacter
  misc_feature (1)..(229): Homolog of NCBI NO: 21231655 NR Description: glutamine cyclotransferase
  misc_feature (4)..(229): Homolog of NCBI NO: 31790364 NR Description: putative glutamine cyclotransferase
  misc_feature (1)..(244): Homolog of NCBI NO: 24413973 NR Description: putative glutaminyl-peptide cyclotransferase
  misc_feature (3)..(245): Homolog of NCBI NO: 7484740 NR Description: glutaminyl-peptide cyclotransferase (EC 2.3.2.5)
  misc_feature (2)..(246): Homolog of NCBI NO: 7484984 NR Description: glutaminyl-peptide cyclotransferase homolog
  misc_feature (2)..(246): Homolog of NCBI NO: 18416607 NR Description: glutamine cyclotransferase precursor - like
  misc_feature (2)..(246): Homolog of NCBI NO: 21536884 NR Description: glutamine cyclotransferase precursor-like protein

SEQ ID NO: 40402 - protein, 191 aa, Arabidopsis thaliana; identical to SEQ ID NO: 35317
  peptide (1)..(191): Ceres Seq. ID no. 13488584
  misc_feature (1)..(181): Pfam Name: Glutamine cyclotransferase Pfam Description: Glutamine cyclotransferase
  misc_feature (1)..(181): Pfam Name: Glutamine cyclotransferase Pfam Description: Glutamine cyclotransferase
  misc_feature (1)..(181): Pfam Name: Glutamine cyclotransferase Pfam Description: Glutamine cyclotransferase
  misc_feature (1)..(176): Homolog of NCBI NO: 21243055 NR Description: glutamine cyclotransferase
  misc_feature (1)..(174): Homolog of NCBI NO: 31790364 NR Description: putative glutamine cyclotransferase
  misc_feature (1)..(176): Homolog of NCBI NO: 22970826 NR Description: hypothetical protein [Chloroflexus aurantiacus]
  misc_feature (1)..(174): Homolog of NCBI NO: 21231655 NR Description: glutamine cyclotransferase
  misc_feature (1)..(178): Homolog of NCBI NO: 16126885 NR Description: glutamine cyclotransferase [Caulobacter
  misc_feature (1)..(176): Homolog of NCBI NO: 21243055 NR Description: glutamine cyclotransferase
  misc_feature (1)..(176): Homolog of NCBI NO: 22970826 NR Description: hypothetical protein [Chloroflexus aurantiacus]
  misc_feature (1)..(178): Homolog of NCBI NO: 16126885 NR Description: glutamine cyclotransferase [Caulobacter
  misc_feature (1)..(174): Homolog of NCBI NO: 21231655 NR Description: glutamine cyclotransferase
  misc_feature (1)..(176): Homolog of NCBI NO: 22970826 NR Description: hypothetical protein [Chloroflexus aurantiacus]
  misc_feature (1)..(174): Homolog of NCBI NO: 31790364 NR Description: putative glutamine cyclotransferase
  misc_feature (1)..(176): Homolog of NCBI NO: 21243055 NR Description: glutamine cyclotransferase
  misc_feature (1)..(191): Homolog of NCBI NO: 21536884 NR Description: glutamine cyclotransferase precursor-like protein
  misc_feature (1)..(191): Homolog of NCBI NO: 18416607 NR Description: glutamine cyclotransferase precursor - like
  misc_feature (1)..(191): Homolog of NCBI NO: 7484984 NR Description: glutaminyl-peptide cyclotransferase homolog
  misc_feature (1)..(190): Homolog of NCBI NO: 7484740 NR Description: glutaminyl-peptide cyclotransferase (EC 2.3.2.5)
  misc_feature (1)..(189): Homolog of NCBI NO: 24413973 NR Description: putative glutaminyl-peptide cyclotransferase
  misc_feature (1)..(191): Homolog of NCBI NO: 21536884 NR Description: glutamine cyclotransferase precursor-like protein
  misc_feature (1)..(191): Homolog of NCBI NO: 18416607 NR Description: glutamine cyclotransferase precursor - like
  misc_feature (1)..(191): Homolog of NCBI NO: 7484984 NR Description: glutaminyl-peptide cyclotransferase homolog
  misc_feature (1)..(190): Homolog of NCBI NO: 7484740 NR Description: glutaminyl-peptide cyclotransferase (EC 2.3.2.5)
  misc_feature (1)..(189): Homolog of NCBI NO: 24413973 NR Description: putative glutaminyl-peptide cyclotransferase
  misc_feature (1)..(178): Homolog of NCBI NO: 16126885 NR Description: glutamine cyclotransferase [Caulobacter
  misc_feature (1)..(174): Homolog of NCBI NO: 21231655 NR Description: glutamine cyclotransferase
  misc_feature (1)..(174): Homolog of NCBI NO: 31790364 NR Description: putative glutamine cyclotransferase
  misc_feature (1)..(189): Homolog of NCBI NO: 24413973 NR Description: putative glutaminyl-peptide cyclotransferase
  misc_feature (1)..(190): Homolog of NCBI NO: 7484740 NR Description: glutaminyl-peptide cyclotransferase (EC 2.3.2.5)
  misc_feature (1)..(191): Homolog of NCBI NO: 7484984 NR Description: glutaminyl-peptide cyclotransferase homolog
  misc_feature (1)..(191): Homolog of NCBI NO: 18416607 NR Description: glutamine cyclotransferase precursor - like
  misc_feature (1)..(191): Homolog of NCBI NO: 21536884 NR Description: glutamine cyclotransferase precursor-like protein

SEQ ID NO: 40403 - protein, 147 aa, Arabidopsis thaliana; identical to SEQ ID NO: 35318
  peptide (1)..(147): Ceres Seq. ID no. 13488585
  misc_feature (1)..(137): Pfam Name: Glutamine cyclotransferase Pfam Description: Glutamine cyclotransferase
  misc_feature (1)..(137): Pfam Name: Glutamine cyclotransferase Pfam Description: Glutamine cyclotransferase
  misc_feature (1)..(137): Pfam Name: Glutamine cyclotransferase Pfam Description: Glutamine cyclotransferase
  misc_feature (1)..(132): Homolog of NCBI NO: 21243055 NR Description: glutamine cyclotransferase
  misc_feature (1)..(130): Homolog of NCBI NO: 31790364 NR Description: putative glutamine cyclotransferase
  misc_feature (1)..(132): Homolog of NCBI NO: 22970826 NR Description: hypothetical protein [Chloroflexus aurantiacus]
  misc_feature (1)..(130): Homolog of NCBI NO: 21231655 NR Description: glutamine cyclotransferase
  misc_feature (1)..(134): Homolog of NCBI NO: 16126885 NR Description: glutamine cyclotransferase [Caulobacter
  misc_feature (1)..(132): Homolog of NCBI NO: 21243055 NR Description: glutamine cyclotransferase
  misc_feature (1)..(132): Homolog of NCBI NO: 22970826 NR Description: hypothetical protein [Chloroflexus aurantiacus]
  misc_feature (1)..(134): Homolog of NCBI NO: 16126885 NR Description: glutamine cyclotransferase [Caulobacter
  misc_feature (1)..(130): Homolog of NCBI NO: 21231655 NR Description: glutamine cyclotransferase
  misc_feature (1)..(132): Homolog of NCBI NO: 22970826 NR Description: hypothetical protein [Chloroflexus aurantiacus]
  misc_feature (1)..(130): Homolog of NCBI NO: 31790364 NR Description: putative glutamine cyclotransferase
  misc_feature (1)..(132): Homolog of NCBI NO: 21243055 NR Description: glutamine cyclotransferase
  misc_feature (1)..(147): Homolog of NCBI NO: 21536884 NR Description: glutamine cyclotransferase precursor-like protein
  misc_feature (1)..(147): Homolog of NCBI NO: 18416607 NR Description: glutamine cyclotransferase precursor - like
  misc_feature (1)..(147): Homolog of NCBI NO: 7484984 NR Description: glutaminyl-peptide cyclotransferase homolog
  misc_feature (1)..(146): Homolog of NCBI NO: 7484740 NR Description: glutaminyl-peptide cyclotransferase (EC 2.3.2.5)
  misc_feature (1)..(145): Homolog of NCBI NO: 24413973 NR Description: putative glutaminyl-peptide cyclotransferase
  misc_feature (1)..(147): Homolog of NCBI NO: 21536884 NR Description: glutamine cyclotransferase precursor-like protein
  misc_feature (1)..(147): Homolog of NCBI NO: 18416607 NR Description: glutamine cyclotransferase precursor - like
  misc_feature (1)..(147): Homolog of NCBI NO: 7484984 NR Description: glutaminyl-peptide cyclotransferase homolog
  misc_feature (1)..(146): Homolog of NCBI NO: 7484740 NR Description: glutaminyl-peptide cyclotransferase (EC 2.3.2.5)
  misc_feature (1)..(145): Homolog of NCBI NO: 24413973 NR Description: putative glutaminyl-peptide cyclotransferase
  misc_feature (1)..(134): Homolog of NCBI NO: 16126885 NR Description: glutamine cyclotransferase [Caulobacter
  misc_feature (1)..(130): Homolog of NCBI NO: 21231655 NR Description: glutamine cyclotransferase
  misc_feature (1)..(130): Homolog of NCBI NO: 31790364 NR Description: putative glutamine cyclotransferase
  misc_feature (1)..(145): Homolog of NCBI NO: 24413973 NR Description: putative glutaminyl-peptide cyclotransferase
  misc_feature (1)..(146): Homolog of NCBI NO: 7484740 NR Description: glutaminyl-peptide cyclotransferase (EC 2.3.2.5)
  misc_feature (1)..(147): Homolog of NCBI NO: 7484984 NR Description: glutaminyl-peptide cyclotransferase homolog
  misc_feature (1)..(147): Homolog of NCBI NO: 18416607 NR Description: glutamine cyclotransferase precursor - like
  misc_feature (1)..(147): Homolog of NCBI NO: 21536884 NR Description: glutamine cyclotransferase precursor-like protein

SEQ ID NO: 40404 - DNA, 1506 bp, Arabidopsis thaliana
  misc_feature (1)..(1506): Ceres Seq. ID no. 12370848
  misc_feature: MA Experiment ID: 108461 Result: Up-regulated in Transcription
  misc_feature: MA Experiment 108461 PARAMETER Experiment Name: At_Germinating_Seeds_cDNA_P Parameter: Age (day) Value: 1 vs. 0
  misc_feature: MA Experiment 108461 PARAMETER Experiment Name: At_Germinating_Seeds_cDNA_P Parameter: Tissue Value: Germinating Seeds
  misc_feature: MA Experiment ID: 108462 Result: Up-regulated in Transcription
  misc_feature: MA Experiment 108462 PARAMETER Experiment Name: At_Germinating_Seeds_cDNA_P Parameter: Age (day) Value: 2 vs. 0
  misc_feature: MA Experiment 108462 PARAMETER Experiment Name: At_Germinating_Seeds_cDNA_P Parameter: Tissue Value: Germinating Seeds
  misc_feature: MA Experiment ID: 108464 Result: Up-regulated in Transcription
  misc_feature: MA Experiment 108464 PARAMETER Experiment Name: At_Germinating_Seeds_cDNA_P Parameter: Age (day) Value: 4 vs. 0
  misc_feature: MA Experiment 108464 PARAMETER Experiment Name: At_Germinating_Seeds_cDNA_P Parameter: Tissue Value: Germinating Seeds
  misc_feature: MA Experiment ID: 108569 Result: Up-regulated in Transcription
  misc_feature: MA Experiment 108569 PARAMETER Experiment Name: At_0.001%_MeJA__cDNA_P Parameter: Timepoint (hr) Value: 6
  misc_feature: MA Experiment 108569 PARAMETER Experiment Name: At_0.001%_MeJA__cDNA_P Parameter: Tissue Value: Aerial
  misc_feature: MA Experiment 108569 PARAMETER Experiment Name: At_0.001%_MeJA__cDNA_P Parameter: Treatment Value: 0.001% MeJA vs. No Treatment
  misc_feature: MA Experiment ID: 108573 Result: Down-regulated in Transcription
  misc_feature: MA Experiment 108573 PARAMETER Experiment Name: At_Drought_cDNA_P Parameter: Timepoint (hr) Value: 6
  misc_feature: MA Experiment 108573 PARAMETER Experiment Name: At_Drought_cDNA_P Parameter: Tissue Value: Aerial
  misc_feature: MA Experiment 108573 PARAMETER Experiment Name: At_Drought_cDNA_P Parameter: Treatment Value: Drought vs. No Drought
  misc_feature: MA Experiment ID: 108574 Result: Up-regulated in Transcription
  misc_feature: MA Experiment 108574 PARAMETER Experiment Name: At_Wounding__cDNA_P Parameter: Timepoint (hr) Value: 1
  misc_feature: MA Experiment 108574 PARAMETER Experiment Name: At_Wounding__cDNA_P Parameter: Tissue Value: Aerial
  misc_feature: MA Experiment 108574 PARAMETER Experiment Name: At_Wounding__cDNA_P Parameter: Treatment Value: Wounding vs. No Wounding
  misc_feature: MA Experiment ID: 108595 Result: Down-regulated in Transcription
  misc_feature: MA Experiment 108595 PARAMETER Experiment Name: At_Ler-pi_Ovule_cDNA_P Parameter: Plant Line Value: null
  misc_feature: MA Experiment ID: 108668 Result: Down-regulated in Transcription
  misc_feature: MA Experiment 108668 PARAMETER Experiment Name: At_2mM_SA_cDNA_P Parameter: Plant Line Value: WS
  misc_feature: MA Experiment 108668 PARAMETER Experiment Name: At_2mM_SA_cDNA_P Parameter: Timepoint (hr) Value: 6
  misc_feature: MA Experiment 108668 PARAMETER Experiment Name: At_2mM_SA_cDNA_P Parameter: Treatment Value: 2mM SA vs. No Treatment
  misc_feature: MA Experiment ID: 20000072 Result: Down-regulated in Transcription
  misc_feature: MA Experiment 20000072 PARAMETER Experiment Name: At_100uM_ABA_Mutants_cDNA_P Parameter: Plant Line Value: CS8105
  misc_feature: MA Experiment 20000072 PARAMETER Experiment Name: At_100uM_ABA_Mutants_cDNA_P Parameter: Timepoint (hr) Value: 6
  misc_feature: MA Experiment 20000072 PARAMETER Experiment Name: At_100uM_ABA_Mutants_cDNA_P Parameter: Tissue Value: Aerial
  misc_feature: MA Experiment 20000072 PARAMETER Experiment Name: At_100uM_ABA_Mutants_cDNA_P Parameter: Treatment Value: 100uM ABA vs. No Treatment
  misc_feature: MA Experiment ID: 20000090 Result: Down-regulated in Transcription
  misc_feature: MA Experiment ID: 20000113 Result: Down-regulated in Transcription
  misc_feature: MA Experiment 20000113 PARAMETER Experiment Name: At_42deg_Heat_cDNA_P Parameter: Temperature (deg C) Value: 42 vs. 22
  misc_feature: MA Experiment 20000113 PARAMETER Experiment Name: At_42deg_Heat_cDNA_P Parameter: Timepoint (hr) Value: 8
  misc_feature: MA Experiment 20000113 PARAMETER Experiment Name: At_42deg_Heat_cDNA_P Parameter: Tissue Value: Aerial
  misc_feature: MA Experiment ID: 20000117 Result: Down-regulated in Transcription
  misc_feature: MA Experiment 20000117 PARAMETER Experiment Name: At_100uM_ABA_Mutants_cDNA_P Parameter: Plant Line Value: Columbia
  misc_feature: MA Experiment 20000117 PARAMETER Experiment Name: At_100uM_ABA_Mutants_cDNA_P Parameter: Timepoint (hr) Value: 6
  misc_feature: MA Experiment 20000117 PARAMETER Experiment Name: At_100uM_ABA_Mutants_cDNA_P Parameter: Tissue Value: Aerial
  misc_feature: MA Experiment 20000117 PARAMETER Experiment Name: At_100uM_ABA_Mutants_cDNA_P Parameter: Treatment Value: 100uM ABA vs. No Treatment
  misc_feature: MA Experiment ID: 20000179 Result: Up-regulated in Transcription
  misc_feature: MA Experiment 20000179 PARAMETER Experiment Name: At_Germinating_Seeds_P Parameter: Age (hr) Value: 6 vs. 0
  misc_feature: MA Experiment 20000179 PARAMETER Experiment Name: At_Germinating_Seeds_P Parameter: Tissue Value: Germinating Seeds
  misc_feature: MA Experiment ID: 20000180 Result: Up-regulated in Transcription
  misc_feature: MA Experiment 20000180 PARAMETER Experiment Name: At_Germinating_Seeds_P Parameter: Age (hr) Value: 24 vs. 0
  misc_feature: MA Experiment 20000180 PARAMETER Experiment Name: At_Germinating_Seeds_P Parameter: Tissue Value: Germinating Seeds
  misc_feature: MA Experiment ID: 20000182 Result: Down-regulated in Transcription
  misc_feature: MA Experiment 20000182 PARAMETER Experiment Name: At_2mM_SA_P Parameter: Age (day) Value: 14
  misc_feature: MA Experiment 20000182 PARAMETER Experiment Name: At_2mM_SA_P Parameter: Organism Value: A. thaliana
  misc_feature: MA Experiment 20000182 PARAMETER Experiment Name: At_2mM_SA_P Parameter: Plant Line Value: WS
  misc_feature: MA Experiment 20000182 PARAMETER Experiment Name: At_2mM_SA_P Parameter: Timepoint (hr) Value: 6
  misc_feature: MA Experiment 20000182 PARAMETER Experiment Name: At_2mM_SA_P Parameter: Tissue Value: Aerial
  misc_feature: MA Experiment 20000182 PARAMETER Experiment Name: At_2mM_SA_P Parameter: Treatment Value: 2mM SA vs. No Treatment
  misc_feature: MA Experiment ID: 20000211 Result: Up-regulated in Transcription
  misc_feature: MA Experiment 20000211 PARAMETER Experiment Name: At_0.001percent_MeJA__P Parameter: Age (day) Value: 14
  misc_feature: MA Experiment 20000211 PARAMETER Experiment Name: At_0.001percent_MeJA__P Parameter: Organism Value: A. thaliana
  misc_feature: MA Experiment 20000211 PARAMETER Experiment Name: At_0.001percent_MeJA__P Parameter: Plant Line Value: WS
  misc_feature: MA Experiment 20000211 PARAMETER Experiment Name: At_0.001percent_MeJA__P Parameter: Timepoint (hr) Value: 1
  misc_feature: MA Experiment 20000211 PARAMETER Experiment Name: At_0.001percent_MeJA__P Parameter: Tissue Value: Aerial
  misc_feature: MA Experiment 20000211 PARAMETER Experiment Name: At_0.001percent_MeJA__P Parameter: Treatment Value: 0.001percent MeJA vs. No Treatment
  misc_feature: MA Experiment ID: 20000224 Result: Up-regulated in Transcription
  misc_feature: MA Experiment ID: 20000235 Result: Up-regulated in Transcription
  misc_feature: MA Experiment 20000235 PARAMETER Experiment Name: At_Siliques_P Parameter: Age (day) Value: 21
  misc_feature: MA Experiment 20000235 PARAMETER Experiment Name: At_Siliques_P Parameter: Organism Value: A. thaliana
  misc_feature: MA Experiment 20000235 PARAMETER Experiment Name: At_Siliques_P Parameter: Plant Line Value: WS
  misc_feature: MA Experiment 20000235 PARAMETER Experiment Name: At_Siliques_P Parameter: Tissue Value: 5-10mm Siliques vs. Whole Plant
  misc_feature: MA Experiment ID: 20000437 Result: Down-regulated in Transcription
  misc_feature: MA Experiment 20000437 PARAMETER Experiment Name: At_Drought_P Parameter: Age (day) Value: 8
  misc_feature: MA Experiment 20000437 PARAMETER Experiment Name: At_Drought_P Parameter: Organism Value: A. thaliana
  misc_feature: MA Experiment 20000437 PARAMETER Experiment Name: At_Drought_P Parameter: Plant Line Value: WS
  misc_feature: MA Experiment 20000437 PARAMETER Experiment Name: At_Drought_P Parameter: Timepoint (hr) Value: 24
  misc_feature: MA Experiment 20000437 PARAMETER Experiment Name: At_Drought_P Parameter: Tissue Value: Whole Plant
  misc_feature: MA Experiment 20000437 PARAMETER Experiment Name: At_Drought_P Parameter: Treatment Value: Drought vs. No Drought
  misc_feature: MA Experiment ID: 20000794 Result: Down-regulated in Transcription
  misc_feature: MA Experiment 20000794 PARAMETER Experiment Name: At_Petals_P Parameter: Age (day) Value: 23-25 days
  misc_feature: MA Experiment 20000794 PARAMETER Experiment Name: At_Petals_P Parameter: Plant Line Value: WS
  misc_feature: MA Experiment 20000794 PARAMETER Experiment Name: At_Petals_P Parameter: Tissue Value: Petals vs. Whole plant
  misc_feature: MA Experiment ID: 20001247 Result: Down-regulated in Transcription
  misc_feature: MA Experiment 20001247 PARAMETER Experiment Name: At_Far-red-induction_P Parameter: Age (day) Value: 7
  misc_feature: MA Experiment 20001247 PARAMETER Experiment Name: At_Far-red-induction_P Parameter: Light Value: Far-red vs. White
  misc_feature: MA Experiment 20001247 PARAMETER Experiment Name: At_Far-red-induction_P Parameter: Organism Value: A. thaliana
  misc_feature: MA Experiment 20001247 PARAMETER Experiment Name: At_Far-red-induction_P Parameter: Plant Line Value: Columbia
  misc_feature: MA Experiment 20001247 PARAMETER Experiment Name: At_Far-red-induction_P Parameter: Timepoint (hr) Value: 1
  misc_feature: MA Experiment 20001247 PARAMETER Experiment Name: At_Far-red-induction_P Parameter: Tissue Value: Whole Plant
  misc_feature: MA Experiment ID: 20001248 Result: Down-regulated in Transcription
  misc_feature: MA Experiment 20001248 PARAMETER Experiment Name: At_Far-red-induction_P Parameter: Age (day) Value: 7
  misc_feature: MA Experiment 20001248 PARAMETER Experiment Name: At_Far-red-induction_P Parameter: Light Value: Far-red vs. White
  misc_feature: MA Experiment 20001248 PARAMETER Experiment Name: At_Far-red-induction_P Parameter: Organism Value: A. thaliana
  misc_feature: MA Experiment 20001248 PARAMETER Experiment Name: At_Far-red-induction_P Parameter: Plant Line Value: Columbia
  misc_feature: MA Experiment 20001248 PARAMETER Experiment Name: At_Far-red-induction_P Parameter: Timepoint (hr) Value: 4
  misc_feature: MA Experiment 20001248 PARAMETER Experiment Name: At_Far-red-induction_P Parameter: Tissue Value: Whole Plant
  misc_feature: MA Experiment ID: 20001450 Result: Down-regulated in Transcription
  misc_feature: MA Experiment 20001450 PARAMETER Experiment Name: At_Far-red-induction_P Parameter: Age (day) Value: 7
  misc_feature: MA Experiment 20001450 PARAMETER Experiment Name: At_Far-red-induction_P Parameter: Light Value: Far-red vs. White
  misc_feature: MA Experiment 20001450 PARAMETER Experiment Name: At_Far-red-induction_P Parameter: Organism Value: A. thaliana
  misc_feature: MA Experiment 20001450 PARAMETER Experiment Name: At_Far-red-induction_P Parameter: Plant Line Value: Columbia
  misc_feature: MA Experiment 20001450 PARAMETER Experiment Name: At_Far-red-induction_P Parameter: Timepoint (hr) Value: 8
  misc_feature: MA Experiment 20001450 PARAMETER Experiment Name: At_Far-red-induction_P Parameter: Tissue Value: Whole Plant
  misc_feature: MA Experiment ID: 20001905 Result: Down-regulated in Transcription
  misc_feature: MA Experiment 20001905 PARAMETER Experiment Name: At_Drought_Reproduction_P Parameter: Age (day) Value: 40
  misc_feature: MA Experiment 20001905 PARAMETER Experiment Name: At_Drought_Reproduction_P Parameter: Organism Value: A. thaliana
  misc_feature: MA Experiment 20001905 PARAMETER Experiment Name: At_Drought_Reproduction_P Parameter: Plant Line Value: WS
  misc_feature: MA Experiment 20001905 PARAMETER Experiment Name: At_Drought_Reproduction_P Parameter: Timepoint (day) Value: 10
  misc_feature: MA Experiment 20001905 PARAMETER Experiment Name: At_Drought_Reproduction_P Parameter: Tissue Value: Rosettes
  misc_feature: MA Experiment 20001905 PARAMETER Experiment Name: At_Drought_Reproduction_P Parameter: Treatment Value: Drought vs. No Drought
  misc_feature: MA Experiment ID: 20001911 Result: Down-regulated in Transcription
  misc_feature: MA Experiment 20001911 PARAMETER Experiment Name: At_Drought_Reproduction_P Parameter: Age (day) Value: 40
  misc_feature: MA Experiment 20001911 PARAMETER Experiment Name: At_Drought_Reproduction_P Parameter: Organism Value: A. thaliana
  misc_feature: MA Experiment 20001911 PARAMETER Experiment Name: At_Drought_Reproduction_P Parameter: Plant Line Value: WS
  misc_feature: MA Experiment 20001911 PARAMETER Experiment Name: At_Drought_Reproduction_P Parameter: Timepoint (day) Value: 10
  misc_feature: MA Experiment 20001911 PARAMETER Experiment Name: At_Drought_Reproduction_P Parameter: Tissue Value: Flowers
  misc_feature: MA Experiment 20001911 PARAMETER Experiment Name: At_Drought_Reproduction_P Parameter: Treatment Value: Drought vs. No Drought
agtagtggactagtgaattttatcagcatctatctactcgagaaaagaaaatggcagatgaagtagtagtgatctctaagagcattgttcgaccagagagctacaacgaggaatcggatcgggttaagatccatctcactccatgggatctcttctttcttcgatccgaatacccacaaagaggtcttctctttcctcaacccgacccggaaacccatataatctctcagttgaaatcatctctctctgtcgctttgaagatcttctacccattcgctggtcgtcttgtcaaggtcgagaacgaagatgctggaacggcgtcgttttacgtcgattgtgatggctcaggtgtcaaattcatccacgcttcagctaaatccgtttcggttagtgatgttttagaacctgttgatagtaatgtccctgagttcttgaatcgttttttcccggcgaatggtgttaggagctgtgaaggaatctcggagtcgttaattgcgtttcaagtaacggaattgaaagatggggtttttatagggtttggttataatcatattgttgcagatggatcttcgttttggagtttcttcaatacttggtcggagatttgctttaacgggtttgatgccgatcatcggagaaagtttcctcctttgcttctccgtggatggtttctcgacggtattgagtatccgattcgaattccgttaccggagacggagacaccgaaccgggttgttgttacttcatcgttattacaagagaagatttttcgagtcacgagtagaaacatctctgagcttaaagcgaaagctaacggcgaggttgactccgatgatcggaaaatatcgtcgcttcaagcggtttcagcgtatatgtggcgatcgataatcagaaacagtggtctgaatccggaagaagtgattcattgcaagttactggtggatatgagaggaagactaaaccctccgcttgagaaagagtgtttcggtaacgtggtcggattcgcgacggtgacgactactgtggcggagatgcttcacaatgggcttggttgggctgcattgcaaataaacaaaactgttgggtcacaaacgaatgaagagtttagagagtttgctgagaattgggtgaagaaaccgagtatattgaatgctaaggcttttagtaattctataacaattgctagctctcctcggttcaatgtgtatggaaacgatttcggttggggtaaaccaatagcggttcgagctggaccgggaaataccaccgatggtaaactcattgcttatccggggatcgaagaaggaaacatcgagtttcaaacgtgtttatcgtctagtgttttggaaaaattatcgactgatgaagagtttttgaagcatgtatgtgttgtataagtaaaatcaaccaaatcaaatgtacttttttgtgtgtgtcttgaataaagttgaagatgtgaaaacaatctttgtcaacagaaatctatttagatagttttccttcttt

SEQ ID NO: 40405 - protein, 448 aa, Arabidopsis thaliana
  peptide (1)..(448): Ceres Seq. ID no. 12370849
  misc_feature (3)..(442): Pfam Name: Transferase family Pfam Description: Transferase family
  misc_feature (4)..(365): Homolog of NCBI NO: 30693289 NR Description: hydroxycinnamoyl benzoyltransferase-related
  misc_feature (399)..(445): Homolog of NCBI NO: 11357342 NR Description: hypothetical protein F11C1.130 - Arabidopsis
  misc_feature (4)..(365): Homolog of NCBI NO: 11357342 NR Description: hypothetical protein F11C1.130 - Arabidopsis
  misc_feature (1)..(448): Homolog of NCBI NO: 15450952 NR Description: anthranilate
  misc_feature (1)..(448): Homolog of NCBI NO: 15240229 NR Description: anthranilate
  misc_feature (3)..(444): Homolog of NCBI NO: 15229713 NR Description: anthranilate
  misc_feature (4)..(431): Homolog of NCBI NO: 15240844 NR Description: anthranilate N-benzoyltransferase -like protein
  misc_feature (5)..(447): Homolog of NCBI NO: 15229707 NR Description: anthranilate
  misc_feature (1)..(443): Homolog of NCBI NO: 15229709 NR Description: anthranilate
  misc_feature (1)..(448): Homolog of NCBI NO: 15240227 NR Description: anthranilate
MADEVVVISKSIVRPESYNEESDRVKIHLTPWDLFFLRSEYPQRGLLFPQPDPETHIISQLKSSLSVALKIFYPFAGRLVKVENEDAGTASFYVDCDGSGVKFIHASAKSVSVSDVLEPVDSNVPEFLNRFFPANGVRSCEGISESLIAFQVTELKDGVFIGFGYNHIVADGSSFWSFFNTWSEICFNGFDADHRRKFPPLLLRGWFLDGIEYPIRIPLPETETPNRVVVTSSLLQEKIFRVTSRNISELKAKANGEVDSDDRKISSLQAVSAYMWRSIIRNSGLNPEEVIHCKLLVDMRGRLNPPLEKECFGNVVGFATVTTTVAEMLHNGLGWAALQINKTVGSQTNEEFREFAENWVKKPSILNAKAFSNSITIASSPRFNVYGNDFGWGKPIAVRAGPGNTTDGKLIAYPGIEEGNIEFQTCLSSSVLEKLSTDEEFLKHVCVV

SEQ ID NO: 40406 - DNA, 1126 bp, Arabidopsis thaliana
  misc_feature (1)..(1126): Ceres Seq. ID no. 13487406
  misc_feature: MA Experiment ID: 20000184 Result: Up-regulated in Transcription
  misc_feature: MA Experiment 20000184 PARAMETER Experiment Name: At_Shoots__P Parameter: Age (day) Value: 7
  misc_feature: MA Experiment 20000184 PARAMETER Experiment Name: At_Shoots__P Parameter: Tissue Value: Shoots vs. Whole Plant
  misc_feature: MA Experiment ID: 20000185 Result: Up-regulated in Transcription
  misc_feature: MA Experiment 20000185 PARAMETER Experiment Name: At_Roots__P Parameter: Age (day) Value: 7 vs. 21
  misc_feature: MA Experiment 20000185 PARAMETER Experiment Name: At_Roots__P Parameter: Organism Value: A. thaliana
  misc_feature: MA Experiment 20000185 PARAMETER Experiment Name: At_Roots__P Parameter: Tissue Value: Roots vs. Whole Plant
  misc_feature: MA Experiment ID: 20000438 Result: Up-regulated in Transcription
  misc_feature: MA Experiment 20000438 PARAMETER Experiment Name: At_Shoots__P Parameter: Age (day) Value: 14
  misc_feature: MA Experiment 20000438 PARAMETER Experiment Name: At_Shoots__P Parameter: Tissue Value: Shoots vs. Whole Plant
  misc_feature: MA Experiment ID: 20000439 Result: Up-regulated in Transcription
  misc_feature: MA Experiment 20000439 PARAMETER Experiment Name: At_Roots__P Parameter: Age (day) Value: 14 vs. 21
  misc_feature: MA Experiment 20000439 PARAMETER Experiment Name: At_Roots__P Parameter: Organism Value: A. thaliana
  misc_feature: MA Experiment 20000439 PARAMETER Experiment Name: At_Roots__P Parameter: Tissue Value: Roots vs. Whole Plant
  misc_feature: MA Experiment ID: 20000495 Result: Down-regulated in Transcription
  misc_feature: MA Experiment 20000495 PARAMETER Experiment Name: At_Guard_Cells_P Parameter: Harvest Date Value: 8/2/2002
  misc_feature: MA Experiment 20000495 PARAMETER Experiment Name: At_Guard_Cells_P Parameter: Organism Value: A. thaliana
  misc_feature: MA Experiment 20000495 PARAMETER Experiment Name: At_Guard_Cells_P Parameter: Tissue Value: Guard Cells vs. Leaves
  misc_feature: MA Experiment ID: 20001247 Result: Up-regulated in Transcription
  misc_feature: MA Experiment 20001247 PARAMETER Experiment Name: At_Far-red-induction_P Parameter: Age (day) Value: 7
  misc_feature: MA Experiment 20001247 PARAMETER Experiment Name: At_Far-red-induction_P Parameter: Light Value: Far-red vs. White
  misc_feature: MA Experiment 20001247 PARAMETER Experiment Name: At_Far-red-induction_P Parameter: Organism Value: A. thaliana
  misc_feature: MA Experiment 20001247 PARAMETER Experiment Name: At_Far-red-induction_P Parameter: Plant Line Value: Columbia
  misc_feature: MA Experiment 20001247 PARAMETER Experiment Name: At_Far-red-induction_P Parameter: Timepoint (hr) Value: 1
  misc_feature: MA Experiment 20001247 PARAMETER Experiment Name: At_Far-red-induction_P Parameter: Tissue Value: Whole Plant
accagaagagagagaaagagacagagagaaaatggtgagagaagaacaagaagaagatgacaacaacaacaacaacaacggaggaggagagagaaagctgcttgtggctgatgaaacggtgccgtctttgttggacgaaacggggttggtttgtgtaacgggaggttctggtttcgttgcttcttggctcatcatgcgtctccttcaacgtggctactccgttcgggccacggttcgaaccaactcagaagggaataagaaagatataagctacctaaccgagctaccatttgcatcggagaggcttcaaatattcaccgccgatctcaacgaaccggagagcttcaaaccggcaatcgaaggatgcaaagccgtattccacgtggcacatcctatggacccaaacagcaacgaaacagaagagaccgttacgaaacgtactgtgcaaggtctcatggggatactaaagtcgtgtttggacgctaaaaccgtgaaacgttttttctacacgtcaagcgccgtgactgttttctatagcggtggaaacggcggtggaggaggcgaagtagacgagagcgtttggagcgacgtcgaggtgtttaggaatcaaaaggagaagagggtgagtagctcttacgtcgtgtcgaaaatggcggcggagacggcggcgcttgagttcggtgggaagaatgggttagaggttgtgacgctcgttattcctctcgtcgtcggaccttttatatcttcgtcgttgccttcctccgtcttcatatctctcgccatgctctttggaaattacaaggagaagtatttgtttgatacttacaatatggtgcatattgatgatgtggcaagggcgatgatatttctattagaaaagccagttgcaaaaggtagatatatttgttcgtcggtggagatgaagatcgatgaggtctttgagtttttgtctacgaaatttcctcagtttcagctaccttcaatagatttgaataaatataaagtagagaagaggatgggtctttcatcgaagaagctgaaaagtgccgggttcgaattcaagtatggagccgaggaaatattcagtggagctataaggagctgtcaagcaaggggatttctttaa

SEQ ID NO: 40407 - protein, 374 aa, Arabidopsis thaliana
  peptide (1)..(374): Ceres Seq. ID no. 13487407
  misc_feature (48)..(288): Pfam Name: 3-beta hydroxysteroid dehydrogenase/isomerase family Pfam Description: 3-beta hydroxysteroid dehydrogenase/isomerase
  misc_feature (48)..(374): Homolog of NCBI NO: 2129859 NR Description: vestitone reductase - alfalfa
  misc_feature (11)..(374): Homolog of NCBI NO: 15225469 NR Description: dihydroflavonol 4-reductase (dihydrokaempferol
PEERERDREKMVREEQEEDDNNNNNNGGGERKLLVADETVPSLLDETGLVCVTGGSGFVASWLIMRLLQRGYSVRATVRTNSEGNKKDISYLTELPFASERLQIFTADLNEPESFKPAIEGCKAVFHVAHPMDPNSNETEETVTKRTVQGLMGILKSCLDAKTVKRFFYTSSAVTVFYSGGNGGGGGEVDESVWSDVEVFRNQKEKRVSSSYVVSKMAAETAALEFGGKNGLEVVTLVIPLVVGPFISSSLPSSVFISLAMLFGNYKEKYLFDTYNMVHIDDVARAMIFLLEKPVAKGRYICSSVEMKIDEVFEFLSTKFPQFQLPSIDLNKYKVEKRMGLSSKKLKSAGFEFKYGAEEIFSGAIRSCQARGFL

SEQ ID NO: 40408 - protein, 364 aa, Arabidopsis thaliana
  peptide (1)..(364): Ceres Seq. ID no. 13487408
  misc_feature (38)..(278): Pfam Name: 3-beta hydroxysteroid dehydrogenase/isomerase family Pfam Description: 3-beta hydroxysteroid dehydrogenase/isomerase
  misc_feature (38)..(364): Homolog of NCBI NO: 2129859 NR Description: vestitone reductase - alfalfa
  misc_feature (1)..(364): Homolog of NCBI NO: 15225469 NR Description: dihydroflavonol 4-reductase (dihydrokaempferol
MVREEQEEDDNNNNNNGGGERKLLVADETVPSLLDETGLVCVTGGSGFVASWLIMRLLQRGYSVRATVRTNSEGNKKDISYLTELPFASERLQIFTADLNEPESFKPAIEGCKAVFHVAHPMDPNSNETEETVTKRTVQGLMGILKSCLDAKTVKRFFYTSSAVTVFYSGGNGGGGGEVDESVWSDVEVFRNQKEKRVSSSYVVSKMAAETAALEFGGKNGLEVVTLVIPLVVGPFISSSLPSSVFISLAMLFGNYKEKYLFDTYNMVHIDDVARAMIFLLEKPVAKGRYICSSVEMKIDEVFEFLSTKFPQFQLPSIDLNKYKVEKRMGLSSKKLKSAGFEFKYGAEEIFSGAIRSCQARGFL

SEQ ID NO: 40409 - protein, 310 aa, Arabidopsis thaliana
  peptide (1)..(310): Ceres Seq. ID no. 13487409
  misc_feature (1)..(224): Pfam Name: 3-beta hydroxysteroid dehydrogenase/isomerase family Pfam Description: 3-beta hydroxysteroid dehydrogenase/isomerase
  misc_feature (1)..(310): Homolog of NCBI NO: 2129859 NR Description: vestitone reductase - alfalfa
  misc_feature (1)..(310): Homolog of NCBI NO: 15225469 NR Description: dihydroflavonol 4-reductase (dihydrokaempferol
MRLLQRGYSVRATVRTNSEGNKKDISYLTELPFASERLQIFTADLNEPESFKPAIEGCKAVFHVAHPMDPNSNETEETVTKRTVQGLMGILKSCLDAKTVKRFFYTSSAVTVFYSGGNGGGGGEVDESVWSDVEVFRNQKEKRVSSSYVVSKMAAETAALEFGGKNGLEVVTLVIPLVVGPFISSSLPSSVFISLAMLFGNYKEKYLFDTYNMVHIDDVARAMIFLLEKPVAKGRYICSSVEMKIDEVFEFLSTKFPQFQLPSIDLNKYKVEKRMGLSSKKLKSAGFEFKYGAEEIFSGAIRSCQARGFL

SEQ ID NO: 40410 - DNA, 1258 bp, Arabidopsis thaliana
  misc_feature (1)..(1258): Ceres Seq. ID no. 12328864
  misc_feature: MA Experiment ID: 20001248 Result: Up-regulated in Transcription
  misc_feature: MA Experiment 20001248 PARAMETER Experiment Name: At_Far-red-induction_P Parameter: Age (day) Value: 7
  misc_feature: MA Experiment 20001248 PARAMETER Experiment Name: At_Far-red-induction_P Parameter: Light Value: Far-red vs. White
  misc_feature: MA Experiment 20001248 PARAMETER Experiment Name: At_Far-red-induction_P Parameter: Organism Value: A. thaliana
  misc_feature: MA Experiment 20001248 PARAMETER Experiment Name: At_Far-red-induction_P Parameter: Plant Line Value: Columbia
  misc_feature: MA Experiment 20001248 PARAMETER Experiment Name: At_Far-red-induction_P Parameter: Timepoint (hr) Value: 4
  misc_feature: MA Experiment 20001248 PARAMETER Experiment Name: At_Far-red-induction_P Parameter: Tissue Value: Whole Plant
gagaaagatcttctttaacctctttgcaacaaatctactcaaaaccctaacccctttttcaaattacttccatctttagatcgaatcaaatcaatgtccgtcgacgatcttcctccgtcgtcggcctccgccgtaacgccactaggctcctccgtgattccgattgtgaacaagctccaagacatattcgctcagctaggaagtcaatcgacgatcgctcttccgcaagtagctgtcgtcggaagtcaaagcagtggcaaatccagcgttctagaagctctcgtcggccgtgactttcttcctcgtggcaatgatatttgcacgcgccgacctctccgtctccagcttgttcagacgaaacctagctctgatggtggatccgatgaagagtggggcgagtttcttcaccacgatcctgttagacgtatctacgatttctctgagattcgccgtgagattgaggcggagactaatagagtatcaggagagaacaaaggtgtatcagatattccgattggtttgaagatattttcacctaatgttttggatattagtcttgtggatcttcctggtatcactaaggttcctgttggtgatcagccaagtgatatcgaagcgcgtataagaacgatgatcttgacttacattaaggaacctagttgcttgatacttgctgttagccctgctaatactgatttagcaaattcagatgcattacaaatcgcaggaaatgctgatcctgatggtcatagaaccataggtgtaatcacaaagttggatattatggacagaggtactgatgctcggaatcaccttctgggaaaaacaattcctcttcgacttggatacgtgggagttgtaaatcgtagtcaagaggatattttgatgaaccgtagcatcaaagatgctcttgttgcagaggaaaagttctttcgtagtcgtccagtttacagcggtctcacagatcgtttgggtgtccctcaactggcaaagaaattaaatcaggtccttgttcaacacatcaaggcactgcttcctagtttaaagtcacgtatcaacaatgcattgtttgctacagcaaaggagtatgagagctatggggatataacagagtctagggtatgtgggttttggccagttttagccttatatataccatccattctcaatgatggcattgctatttgctttttttgcattgtatgatttcttgctcagttttcgtatttgaatataattgtattcatttttgtgatcc

SEQ ID NO: 40411 - protein, 370 aa, Arabidopsis thaliana
  peptide (1)..(370): Ceres Seq. ID no. 12328865
  misc_feature (19)..(236): Pfam Name: Dynamin family Pfam Description: Dynamin family
  misc_feature (7)..(342): Homolog of NCBI NO: 19032337 NR Description: dynamin like protein 2a [Arabidopsis thaliana]
  misc_feature (7)..(342): Homolog of NCBI NO: 14334428 NR Description: putative dynamin protein ADL2 [Arabidopsis
  misc_feature (7)..(342): Homolog of NCBI NO: 18418260 NR Description: dynamin-like protein ADL2
  misc_feature (7)..(342): Homolog of NCBI NO: 2576411 NR Description: similar to dynamin-like protein encoded by
  misc_feature (1)..(342): Homolog of NCBI NO: 20466604 NR Description: dynamin-like protein [Arabidopsis thaliana]
  misc_feature (1)..(342): Homolog of NCBI NO: 19032339 NR Description: dynamin like protein 2b [Arabidopsis thaliana]
  misc_feature (1)..(342): Homolog of NCBI NO: 25307189 NR Description: dynamin-like protein [imported] - Arabidopsis
  misc_feature (1)..(342): Homolog of NCBI NO: 18397440 NR Description: dynamin-like protein
  misc_feature (1)..(370): Homolog of NCBI NO: 18397442 NR Description: dynamin-like protein; protein id: At2g14120.2
  misc_feature (1)..(370): Homolog of NCBI NO: 21536888 NR Description: dynamin-like protein [Arabidopsis thaliana]
MSVDDLPPSSASAVTPLGSSVIPIVNKLQDIFAQLGSQSTIALPQVAVVGSQSSGKSSVLEALVGRDFLPRGNDICTRRPLRLQLVQTKPSSDGGSDEEWGEFLHHDPVRRIYDFSEIRREIEAETNRVSGENKGVSDIPIGLKIFSPNVLDISLVDLPGITKVPVGDQPSDIEARIRTMILTYIKEPSCLILAVSPANTDLANSDALQIAGNADPDGHRTIGVITKLDIMDRGTDARNHLLGKTIPLRLGYVGVVNRSQEDILMNRSIKDALVAEEKFFRSRPVYSGLTDRLGVPQLAKKLNQVLVQHIKALLPSLKSRINNALFATAKEYESYGDITESRVCGFWPVLALYIPSILNDGIAICFFCIV

SEQ ID NO: 40412 - protein, 191 aa, Arabidopsis thaliana
  peptide (1)..(191): Ceres Seq. ID no. 12328866
  misc_feature (1)..(57): Pfam Name: Dynamin family Pfam Description: Dynamin family
  misc_feature (1)..(163): Homolog of NCBI NO: 19032337 NR Description: dynamin like protein 2a [Arabidopsis thaliana]
  misc_feature (1)..(163): Homolog of NCBI NO: 18418260 NR Description: dynamin-like protein ADL2
  misc_feature (1)..(163): Homolog of NCBI NO: 14334428 NR Description: putative dynamin protein ADL2 [Arabidopsis
  misc_feature (1)..(163): Homolog of NCBI NO: 2576411 NR Description: similar to dynamin-like protein encoded by
  misc_feature (1)..(163): Homolog of NCBI NO: 20466604 NR Description: dynamin-like protein [Arabidopsis thaliana]
  misc_feature (1)..(163): Homolog of NCBI NO: 19032339 NR Description: dynamin like protein 2b [Arabidopsis thaliana]
  misc_feature (1)..(163): Homolog of NCBI NO: 25307189 NR Description: dynamin-like protein [imported] - Arabidopsis
  misc_feature (1)..(163): Homolog of NCBI NO: 18397440 NR Description: dynamin-like protein
  misc_feature (1)..(191): Homolog of NCBI NO: 18397442 NR Description: dynamin-like protein; protein id: At2g14120.2
  misc_feature (1)..(191): Homolog of NCBI NO: 21536888 NR Description: dynamin-like protein [Arabidopsis thaliana]
MILTYIKEPSCLILAVSPANTDLANSDALQIAGNADPDGHRTIGVITKLDIMDRGTDARNHLLGKTIPLRLGYVGVVNRSQEDILMNRSIKDALVAEEKFFRSRPVYSGLTDRLGVPQLAKKLNQVLVQHIKALLPSLKSRINNALFATAKEYESYGDITESRVCGFWPVLALYIPSILNDGIAICFFCIV

SEQ ID NO: 40413 - DNA, 1851 bp, Arabidopsis thaliana
  misc_feature (1)..(1851): Ceres Seq. ID no. 13499920
  misc_feature: MA Experiment ID: 20000227 Result: Down-regulated in Transcription
  misc_feature: MA Experiment 20000227 PARAMETER Experiment Name: At_Root-Tips-vs-Tops_P Parameter: Tissue Value: Root Tips vs. Root Tops
  misc_feature: MA Experiment ID: 20000437 Result: Up-regulated in Transcription
  misc_feature: MA Experiment 20000437 PARAMETER Experiment Name: At_Drought_P Parameter: Age (day) Value: 8
  misc_feature: MA Experiment 20000437 PARAMETER Experiment Name: At_Drought_P Parameter: Organism Value: A. thaliana
  misc_feature: MA Experiment 20000437 PARAMETER Experiment Name: At_Drought_P Parameter: Plant Line Value: WS
  misc_feature: MA Experiment 20000437 PARAMETER Experiment Name: At_Drought_P Parameter: Timepoint (hr) Value: 24
  misc_feature: MA Experiment 20000437 PARAMETER Experiment Name: At_Drought_P Parameter: Tissue Value: Whole Plant
  misc_feature: MA Experiment 20000437 PARAMETER Experiment Name: At_Drought_P Parameter: Treatment Value: Drought vs. No Drought
  misc_feature: MA Experiment ID: 20000439 Result: Up-regulated in Transcription
  misc_feature: MA Experiment 20000439 PARAMETER Experiment Name: At_Roots__P Parameter: Age (day) Value: 14 vs. 21
  misc_feature: MA Experiment 20000439 PARAMETER Experiment Name: At_Roots__P Parameter: Organism Value: A. thaliana
  misc_feature: MA Experiment 20000439 PARAMETER Experiment Name: At_Roots__P Parameter: Tissue Value: Roots vs. Whole Plant
  misc_feature: MA Experiment ID: 20000573 Result: Down-regulated in Transcription
  misc_feature: MA Experiment 20000573 PARAMETER Experiment Name: At_100uM_ABA_Mutants__P Parameter: Organism Value: A. thaliana
  misc_feature: MA Experiment 20000573 PARAMETER Experiment Name: At_100uM_ABA_Mutants__P Parameter: Plant Line Value: CS22 vs. Ler wt
  misc_feature: MA Experiment 20000573 PARAMETER Experiment Name: At_100uM_ABA_Mutants__P Parameter: Timepoint (hr) Value: N/A
  misc_feature: MA Experiment 20000573 PARAMETER Experiment Name: At_100uM_ABA_Mutants__P Parameter: Tissue Value: Whole Plant
  misc_feature: MA Experiment 20000573 PARAMETER Experiment Name: At_100uM_ABA_Mutants__P Parameter: Treatment Value: None
  misc_feature: MA Experiment ID: 20000574 Result: Down-regulated in Transcription
  misc_feature: MA Experiment 20000574 PARAMETER Experiment Name: At_100uM_ABA_Mutants__P Parameter: Organism Value: A. thaliana
  misc_feature: MA Experiment 20000574 PARAMETER Experiment Name: At_100uM_ABA_Mutants__P Parameter: Plant Line Value: CS23 vs. Ler wt
  misc_feature: MA Experiment 20000574 PARAMETER Experiment Name: At_100uM_ABA_Mutants__P Parameter: Timepoint (hr) Value: N/A
  misc_feature: MA Experiment 20000574 PARAMETER Experiment Name: At_100uM_ABA_Mutants__P Parameter: Tissue Value: Whole Plant
  misc_feature: MA Experiment 20000574 PARAMETER Experiment Name: At_100uM_ABA_Mutants__P Parameter: Treatment Value: None
  misc_feature: MA Experiment ID: 20001451 Result: Down-regulated in Transcription
  misc_feature: MA Experiment 20001451 PARAMETER Experiment Name: At_Far-red-induction_P Parameter: Age (day) Value: 7
  misc_feature: MA Experiment 20001451 PARAMETER Experiment Name: At_Far-red-induction_P Parameter: Light Value: Far-red vs. White
  misc_feature: MA Experiment 20001451 PARAMETER Experiment Name: At_Far-red-induction_P Parameter: Organism Value: A. thaliana
  misc_feature: MA Experiment 20001451 PARAMETER Experiment Name: At_Far-red-induction_P Parameter: Plant Line Value: Columbia
  misc_feature: MA Experiment 20001451 PARAMETER Experiment Name: At_Far-red-induction_P Parameter: Timepoint (hr) Value: 24
  misc_feature: MA Experiment 20001451 PARAMETER Experiment Name: At_Far-red-induction_P Parameter: Tissue Value: Whole Plant
  misc_feature: MA Experiment ID: 20001757 Result: Up-regulated in Transcription
  misc_feature: MA Experiment 20001757 PARAMETER Experiment Name: At_50mM_NH4NO3_L-to-H_P Parameter: Timepoint (hr) Value: 6
  misc_feature: MA Experiment 20001757 PARAMETER Experiment Name: At_50mM_NH4NO3_L-to-H_P Parameter: Tissue Value: Leaf
  misc_feature: MA Experiment 20001757 PARAMETER Experiment Name: At_50mM_NH4NO3_L-to-H_P Parameter: Treatment Value: 50mM NH4NO3 vs 100mM Mannitol
  misc_feature: MA Experiment ID: 20001905 Result: Up-regulated in Transcription
  misc_feature: MA Experiment 20001905 PARAMETER Experiment Name: At_Drought_Reproduction_P Parameter: Age (day) Value: 40
  misc_feature: MA Experiment 20001905 PARAMETER Experiment Name: At_Drought_Reproduction_P Parameter: Organism Value: A. thaliana
  misc_feature: MA Experiment 20001905 PARAMETER Experiment Name: At_Drought_Reproduction_P Parameter: Plant Line Value: WS
  misc_feature: MA Experiment 20001905 PARAMETER Experiment Name: At_Drought_Reproduction_P Parameter: Timepoint (day) Value: 10
  misc_feature: MA Experiment 20001905 PARAMETER Experiment Name: At_Drought_Reproduction_P Parameter: Tissue Value: Rosettes
  misc_feature: MA Experiment 20001905 PARAMETER Experiment Name: At_Drought_Reproduction_P Parameter: Treatment Value: Drought vs. No Drought
aagtctctttttttgtttaaagatgaacaaatttttgtgttcacattaataaaaactaaaaagaggattcccatgcacacgaaccaacaccaagagcctttttattgtattttaatttctttatttgagccaacaactatttattttcgttcttctttcacactagctctaaaaaccggtttaactaaaccagtcaaaaaccggacgtatgaaagcgttcactgtcttctctgacttacgcgttgaccaatgactacagtattttgaaaaaaccttcgtgtgatataaccggttactggaagtctgtaaccatccgtactgtatatttaacctgctattgccggtcaataaaaaaaaaatcaaggaccaccatttaacacagtgcggtgacaaatatcaaatccttgagtcattattatctctttcctctcttacgccatacatttcatctttcttctctctctatctctcctctttgaaccctaaaaactctttctttacaaggattgatctttttgtatttttgattttgacatttgctttgtgttcgatctctgttttgatgcgatttctctgtttttaaagccatttgatagattgtttccggtaaagctcagcgagagaagaagaagaacaacaatggagtttacagatttctcaaagacgagtttttactacccgtcgtcacaaagcgtttgggatttcggagatttagcggcggcggagaggcattctttagggttcatggagttattaagttctcagcagcatcaagactttgctactgtttctcctcattccttccttctccaaacgtctcaaccgcaaacgcaaacgcaaccatcggcgaagctgtcttcaagtatcattcaagctccaccgtcagagcaattagtgacgtcaaaggtggagtctttgtgttcggatcatttgttgataaacccaccggcgactcctaactcgtcatcgatttcgtctgcttcaagcgaggctctaaatgaagagaaaccgaaaacagaagacaatgaagaagaaggaggtgaagatcaacaagagaagagtcatactaagaaacagttgaaagcaaagaagaataatcagaagagacagagagaggcaagagtcgcattcatgacaaagagtgaagttgatcatctcgaagatggttatcgctggcgaaaatatggtcaaaaagctgtcaaaaacagtccttttcccaggagttactaccgttgcacaacggcttcatgtaacgtgaagaagagagtggagagatcattcagagatccaagcactgtggttacaacctacgaaggtcaacacactcacattagtccactcacgtctcgtcctatttccactggaggtttcttcggatcgtcaggagctgcttcgagtctcggtaatggttgctttgggtttcctattgatggctccacgttaatctctcctcagttccaacagcttgtccaataccatcaccaacagcagcaacaagaactcatgtcttgttttggaggagtcaacgagtaccttaatagccacgctaatgagtatggtgatgataatcgtgtgaagaagagtcgagttttggttaaagataatggacttctgcaagatgttgttccgtctcatatgttgaaggaagagtagtagtatatatatagtcttatagttttaatctagtttttttttgtataattgtctaaaagaaacggatcttttgttctgatgaagaagatgttttcttatggttctgaaatcgtaaggtaatgatgattgtaccaagccgagaaagtacttgtgattttcaccattgaatcactataaatgtaatttttatttactgcg

SEQ ID NO: 40414 - protein, 337 aa, Arabidopsis thaliana
  peptide (1)..(337): Ceres Seq. ID no. 13499921
  misc_feature (173)..(232): Pfam Name: WRKY DNA -binding domain Pfam Description: WRKY DNA -binding domain
  misc_feature (10)..(337): Homolog of NCBI NO: 7484934 NR Description: DNA-binding protein homolog T9A21.10 -
  misc_feature (105)..(237): Homolog of NCBI NO: 25518132 NR Description: F1N18.10 protein - Arabidopsis thaliana
  misc_feature (105)..(237): Homolog of NCBI NO: 15220582 NR Description: WRKY family transcription factor [Arabidopsis
  misc_feature (10)..(252): Homolog of NCBI NO: 15236785 NR Description: WRKY family transcription factor [Arabidopsis
  misc_feature (104)..(249): Homolog of NCBI NO: 34912866 NR Description: putative DNA-binding protein homolog
  misc_feature (99)..(337): Homolog of NCBI NO: 18412338 NR Description: WRKY family transcription factor [Arabidopsis
  misc_feature (99)..(337): Homolog of NCBI NO: 11357984 NR Description: hypothetical protein T12C14.40 - Arabidopsis
  misc_feature (45)..(333): Homolog of NCBI NO: 15239913 NR Description: WRKY family transcription factor [Arabidopsis
  misc_feature (1)..(337): Homolog of NCBI NO: 21536889 NR Description: putative WRKY-type DNA binding protein
  misc_feature (1)..(337): Homolog of NCBI NO: 15226550 NR Description: WRKY family transcription factor [Arabidopsis
MEFTDFSKTSFYYPSSQSVWDFGDLAAAERHSLGFMELLSSQQHQDFATVSPHSFLLQTSQPQTQTQPSAKLSSSIIQAPPSEQLVTSKVESLCSDHLLINPPATPNSSSISSASSEALNEEKPKTEDNEEEGGEDQQEKSHTKKQLKAKKNNQKRQREARVAFMTKSEVDHLEDGYRWRKYGQKAVKNSPFPRSYYRCTTASCNVKKRVERSFRDPSTVVTTYEGQHTHISPLTSRPISTGGFFGSSGAASSLGNGCFGFPIDGSTLISPQFQQLVQYHHQQQQQELMSCFGGVNEYLNSHANEYGDDNRVKKSRVLVKDNGLLQDVVPSHMLKEE

SEQ ID NO: 40415 - protein, 302 aa, Arabidopsis thaliana
  peptide (1)..(302): Ceres Seq. ID no. 13499922
  misc_feature (138)..(197): Pfam Name: WRKY DNA -binding domain Pfam Description: WRKY DNA -binding domain
  misc_feature (1)..(302): Homolog of NCBI NO: 7484934 NR Description: DNA-binding protein homolog T9A21.10 -
  misc_feature (70)..(202): Homolog of NCBI NO: 25518132 NR Description: F1N18.10 protein - Arabidopsis thaliana
  misc_feature (70)..(202): Homolog of NCBI NO: 15220582 NR Description: WRKY family transcription factor [Arabidopsis
  misc_feature (1)..(217): Homolog of NCBI NO: 15236785 NR Description: WRKY family transcription factor [Arabidopsis
  misc_feature (69)..(214): Homolog of NCBI NO: 34912866 NR Description: putative DNA-binding protein homolog
  misc_feature (64)..(302): Homolog of NCBI NO: 18412338 NR Description: WRKY family transcription factor [Arabidopsis
  misc_feature (64)..(302): Homolog of NCBI NO: 11357984 NR Description: hypothetical protein T12C14.40 - Arabidopsis
  misc_feature (10)..(298): Homolog of NCBI NO: 15239913 NR Description: WRKY family transcription factor [Arabidopsis
  misc_feature (1)..(302): Homolog of NCBI NO: 21536889 NR Description: putative WRKY-type DNA binding protein
  misc_feature (1)..(302): Homolog of NCBI NO: 15226550 NR Description: WRKY family transcription factor [Arabidopsis
MELLSSQQHQDFATVSPHSFLLQTSQPQTQTQPSAKLSSSIIQAPPSEQLVTSKVESLCSDHLLINPPATPNSSSISSASSEALNEEKPKTEDNEEEGGEDQQEKSHTKKQLKAKKNNQKRQREARVAFMTKSEVDHLEDGYRWRKYGQKAVKNSPFPRSYYRCTTASCNVKKRVERSFRDPSTVVTTYEGQHTHISPLTSRPISTGGFFGSSGAASSLGNGCFGFPIDGSTLISPQFQQLVQYHHQQQQQELMSCFGGVNEYLNSHANEYGDDNRVKKSRVLVKDNGLLQDVVPSHMLKEE

SEQ ID NO: 40416 - protein, 173 aa, Arabidopsis thaliana
  peptide (1)..(173): Ceres Seq. ID no. 13499923
  misc_feature (9)..(68): Pfam Name: WRKY DNA -binding domain Pfam Description: WRKY DNA -binding domain
  misc_feature (1)..(173): Homolog of NCBI NO: 7484934 NR Description: DNA-binding protein homolog T9A21.10 -
  misc_feature (1)..(73): Homolog of NCBI NO: 25518132 NR Description: F1N18.10 protein - Arabidopsis thaliana
  misc_feature (1)..(73): Homolog of NCBI NO: 15220582 NR Description: WRKY family transcription factor [Arabidopsis
  misc_feature (1)..(88): Homolog of NCBI NO: 15236785 NR Description: WRKY family transcription factor [Arabidopsis
  misc_feature (1)..(85): Homolog of NCBI NO: 34912866 NR Description: putative DNA-binding protein homolog
  misc_feature (1)..(173): Homolog of NCBI NO: 18412338 NR Description: WRKY family transcription factor [Arabidopsis
  misc_feature (1)..(173): Homolog of NCBI NO: 11357984 NR Description: hypothetical protein T12C14.40 - Arabidopsis
  misc_feature (1)..(169): Homolog of NCBI NO: 15239913 NR Description: WRKY family transcription factor [Arabidopsis
  misc_feature (1)..(173): Homolog of NCBI NO: 21536889 NR Description: putative WRKY-type DNA binding protein
  misc_feature (1)..(173): Homolog of NCBI NO: 15226550 NR Description: WRKY family transcription factor [Arabidopsis
MTKSEVDHLEDGYRWRKYGQKAVKNSPFPRSYYRCTTASCNVKKRVERSFRDPSTVVTTYEGQHTHISPLTSRPISTGGFFGSSGAASSLGNGCFGFPIDGSTLISPQFQQLVQYHHQQQQQELMSCFGGVNEYLNSHANEYGDDNRVKKSRVLVKDNGLLQDVVPSHMLKEE

SEQ ID NO: 40417 - DNA, 1516 bp, Arabidopsis thaliana
  misc_feature (1)..(1516): Ceres Seq. ID no. 12422112
  misc_feature: MA Experiment ID: 108473 Result: Down-regulated in Transcription
  misc_feature: MA Experiment 108473 PARAMETER Experiment Name: At_Drought_Flowers_cDNA_P Parameter: Timepoint (hr) Value: 7 d
  misc_feature: MA Experiment 108473 PARAMETER Experiment Name: At_Drought_Flowers_cDNA_P Parameter: Tissue Value: Flower
  misc_feature: MA Experiment 108473 PARAMETER Experiment Name: At_Drought_Flowers_cDNA_P Parameter: Treatment Value: Drought vs. No Drought
  misc_feature: MA Experiment ID: 108501 Result: Down-regulated in Transcription
  misc_feature: MA Experiment 108501 PARAMETER Experiment Name: At_ap2_floral_buds_cDNA_P Parameter: Plant Line Value: ap2 (Ler.)
  misc_feature: MA Experiment 108501 PARAMETER Experiment Name: At_ap2_floral_buds_cDNA_P Parameter: Tissue Value: Closed Flower
  misc_feature: MA Experiment ID: 20000184 Result: Down-regulated in Transcription
  misc_feature: MA Experiment 20000184 PARAMETER Experiment Name: At_Shoots__P Parameter: Age (day) Value: 7
  misc_feature: MA Experiment 20000184 PARAMETER Experiment Name: At_Shoots__P Parameter: Tissue Value: Shoots vs. Whole Plant
  misc_feature: MA Experiment ID: 20000265 Result: Up-regulated in Transcription
  misc_feature: MA Experiment 20000265 PARAMETER Experiment Name: At_Open_Flower_P Parameter: Age (day) Value: 21
  misc_feature: MA Experiment 20000265 PARAMETER Experiment Name: At_Open_Flower_P Parameter: Plant Line Value: WS
  misc_feature: MA Experiment 20000265 PARAMETER Experiment Name: At_Open_Flower_P Parameter: Tissue Value: Closed Flower vs. Whole Plant
  misc_feature: MA Experiment ID: 20000286 Result: Up-regulated in Transcription
  misc_feature: MA Experiment 20000286 PARAMETER Experiment Name: At_Open_Flower_P Parameter: Age (day) Value: 21
  misc_feature: MA Experiment 20000286 PARAMETER Experiment Name: At_Open_Flower_P Parameter: Plant Line Value: WS
  misc_feature: MA Experiment 20000286 PARAMETER Experiment Name: At_Open_Flower_P Parameter: Tissue Value: Half Open vs. Whole Plant
  misc_feature: MA Experiment ID: 20001771 Result: Up-regulated in Transcription
  misc_feature: MA Experiment 20001771 PARAMETER Experiment Name: At_Far-red-enriched-adult_P Parameter: Age (day) Value: 28
  misc_feature: MA Experiment 20001771 PARAMETER Experiment Name: At_Far-red-enriched-adult_P Parameter: Light Value: Far-red enriched vs. White
  misc_feature: MA Experiment 20001771 PARAMETER Experiment Name: At_Far-red-enriched-adult_P Parameter: Organism Value: A. thaliana
  misc_feature: MA Experiment 20001771 PARAMETER Experiment Name: At_Far-red-enriched-adult_P Parameter: Plant Line Value: Columbia
  misc_feature: MA Experiment 20001771 PARAMETER Experiment Name: At_Far-red-enriched-adult_P Parameter: Timepoint (hr) Value: 16
  misc_feature: MA Experiment 20001771 PARAMETER Experiment Name: At_Far-red-enriched-adult_P Parameter: Tissue Value: Aerial
attttcgatatgtttaggggaaaaatatttgtgttatcattattttctatttacgtcctctcatcagcggctgaaaaaaatacatcattttctgcgctttttgcttttggtgattcagtcttagatacgggaaacaataattttcttcttactcttctcaaaggaaattattggccatatggtttgagttttgactataaatttccgacgggaagattcggaaatggaagagttttcaccgatatagttgccgaaggtttacagatcaaaagacttgtaccagcttatagcaagattcgtcgcatcagttctgaagaccttaagactggcgtttgttttgcatcaggtggttcaggaattgacgatcttacatcccgaacactggtgaaagaaaaaaaaaacttaattgttatttcgataaacactatatattatatatctcaaacaatgttttcttataataattggatggttgtgggtggttttgtcagagagttttatcggcaggtgaccaagtaaaagactttaaagactatttgaagaaactaagaagagtagtgaaacgtaagaaaaaagtaaaataaatagtttcaaacgctgtgtttcttatttctgaaggaaataatgatcttggatactttgtcgctcccgctcttcttcgattacagtccacaacaacatacaccagtaaaatggttgtttggaccagaaagtttctaaaagatttatatgatcttggagcgagaaaatttgcggtgatgggagtgatgcctgtgggatgtttgcctatccatcgagcctcattcggtggggtattcggatggtgtaacttcctctttaatagagttacggaggacttcaacatgaaattgcagaaaggtcttacaagttacgcagtagaatatgatttcaaagatgcaaagtttgtttacgtcgacatatacggtactcttatggatcttgtcaaaaatcctatggcctatggtacgtatatacacactccctatataaatatatgcatgacgtaaccaagtgatagtaatatgtcatttgttttatcttttaaaggattgtgcatcctaacaattaatgttttttttttctttctttgtgatcaaatttatatccgaatcataacactataagatgatcaagatcatgattctaattacaacaatacatatacttgcagggtttacagaagcgaaaaaagcttgttgttgtatgccgaatgcaataataccatgcttccatccagataaatacgtcttctatgactttgctcacccttcccagaaagcctacgaagtaatatctaaacctattgtctatcagatagcgaaaggccttgcctagctaattccttatttcctacaatgttttattataatctttgaaaattatcaccatatcgataaatatatgtaaatgtataagattcatgacaatctattcgtttttcttattgtaaacaatgtataattcaaattacaggcttttaaatattgtccatttt

SEQ ID NO: 40418 - protein, 172 aa, Arabidopsis thaliana
  peptide (1)..(172): Ceres Seq. ID no. 12422113
  misc_feature (33)..(128): Pfam Name: GDSL-like Lipase/Acylhydrolase Pfam Description: GDSL-like Lipase/Acylhydrolase
  misc_feature (2)..(127): Homolog of NCBI NO: 8778580 NR Description: F28C11.13 [Arabidopsis thaliana]
  misc_feature (32)..(126): Homolog of NCBI NO: 25404994 NR Description: protein T4O12.13 [imported] - Arabidopsis
  misc_feature (2)..(127): Homolog of NCBI NO: 15220775 NR Description: hypothetical protein; protein id: At1g23500.1
  misc_feature (27)..(128): Homolog of NCBI NO: 25404994 NR Description: protein T4O12.13 [imported] - Arabidopsis
  misc_feature (11)..(128): Homolog of NCBI NO: 15054388 NR Description: family II lipase EXL4 [Arabidopsis thaliana]
  misc_feature (11)..(128): Homolog of NCBI NO: 15222902 NR Description: family II extracellular lipase 4 (EXL4)
  misc_feature (9)..(128): Homolog of NCBI NO: 18410967 NR Description: family II extracellular lipase 5 (EXL5)
  misc_feature (4)..(128): Homolog of NCBI NO: 8778809 NR Description: T4O12.14 [Arabidopsis thaliana]
  misc_feature (4)..(128): Homolog of NCBI NO: 25404995 NR Description: protein T4O12.15 [imported] - Arabidopsis
  misc_feature (4)..(128): Homolog of NCBI NO: 15222904 NR Description: family II extracellular lipase 6 (EXL6)
IFDMFRGKIFVLSLFSIYVLSSAAEKNTSFSALFAFGDSVLDTGNNNFLLTLLKGNYWPYGLSFDYKFPTGRFGNGRVFTDIVAEGLQIKRLVPAYSKIRRISSEDLKTGVCFASGGSGIDDLTSRTLVKEKKNLIVISINTIYYISQTMFSYNNWMVVGGFVREFYRQVTK

SEQ ID NO: 40419 - protein, 169 aa, Arabidopsis thaliana
  peptide (1)..(169): Ceres Seq. ID no. 12422114
  misc_feature (30)..(125): Pfam Name: GDSL-like Lipase/Acylhydrolase Pfam Description: GDSL-like Lipase/Acylhydrolase
  misc_feature (1)..(124): Homolog of NCBI NO: 8778580 NR Description: F28C11.13 [Arabidopsis thaliana]
  misc_feature (29)..(123): Homolog of NCBI NO: 25404994 NR Description: protein T4O12.13 [imported] - Arabidopsis
  misc_feature (1)..(124): Homolog of NCBI NO: 15220775 NR Description: hypothetical protein; protein id: At1g23500.1
  misc_feature (24)..(125): Homolog of NCBI NO: 25404994 NR Description: protein T4O12.13 [imported] - Arabidopsis
  misc_feature (8)..(125): Homolog of NCBI NO: 15054388 NR Description: family II lipase EXL4 [Arabidopsis thaliana]
  misc_feature (8)..(125): Homolog of NCBI NO: 15222902 NR Description: family II extracellular lipase 4 (EXL4)
  misc_feature (6)..(125): Homolog of NCBI NO: 18410967 NR Description: family II extracellular lipase 5 (EXL5)
  misc_feature (1)..(125): Homolog of NCBI NO: 8778809 NR Description: T4O12.14 [Arabidopsis thaliana]
  misc_feature (1)..(125): Homolog of NCBI NO: 25404995 NR Description: protein T4O12.15 [imported] - Arabidopsis
  misc_feature (1)..(125): Homolog of NCBI NO: 15222904 NR Description: family II extracellular lipase 6 (EXL6)
MFRGKIFVLSLFSIYVLSSAAEKNTSFSALFAFGDSVLDTGNNNFLLTLLKGNYWPYGLSFDYKFPTGRFGNGRVFTDIVAEGLQIKRLVPAYSKIRRISSEDLKTGVCFASGGSGIDDLTSRTLVKEKKNLIVISINTIYYISQTMFSYNNWMVVGGFVREFYRQVTK

SEQ ID NO: 40420 - protein, 111 aa, Arabidopsis thaliana
  peptide (1)..(111): Ceres Seq. ID no. 12422115
  misc_feature (1)..(98): Pfam Name: GDSL-like Lipase/Acylhydrolase Pfam Description: GDSL-like Lipase/Acylhydrolase
  misc_feature (1)..(13): Homolog of NCBI NO: 8778580 NR Description: F28C11.13 [Arabidopsis thaliana]
  misc_feature (8)..(98): Homolog of NCBI NO: 8778580 NR Description: F28C11.13 [Arabidopsis thaliana]
  misc_feature (1)..(98): Homolog of NCBI NO: 15220775 NR Description: hypothetical protein; protein id: At1g23500.1
  misc_feature (1)..(98): Homolog of NCBI NO: 25404994 NR Description: protein T4O12.13 [imported] - Arabidopsis
  misc_feature (1)..(98): Homolog of NCBI NO: 15054388 NR Description: family II lipase EXL4 [Arabidopsis thaliana]
  misc_feature (1)..(98): Homolog of NCBI NO: 15222902 NR Description: family II extracellular lipase 4 (EXL4)
  misc_feature (1)..(110): Homolog of NCBI NO: 18410967 NR Description: family II extracellular lipase 5 (EXL5)
  misc_feature (1)..(110): Homolog of NCBI NO: 8778809 NR Description: T4O12.14 [Arabidopsis thaliana]
  misc_feature (1)..(98): Homolog of NCBI NO: 25404995 NR Description: protein T4O12.15 [imported] - Arabidopsis
  misc_feature (1)..(98): Homolog of NCBI NO: 15222904 NR Description: family II extracellular lipase 6 (EXL6)
MVVWTRKFLKDLYDLGARKFAVMGVMPVGCLPIHRASFGGVFGWCNFLFNRVTEDFNMKLQKGLTSYAVEYDFKDAKFVYVDIYGTLMDLVKNPMAYGTYIHTPYINICMT

SEQ ID NO: 40421 - DNA, 1435 bp, Arabidopsis thaliana; identical to SEQ ID NO: 39473
  misc_feature (1)..(1435): Ceres Seq. ID no. 12562265
  misc_feature: MA Experiment ID: 108489 Result: Down-regulated in Transcription
  misc_feature: MA Experiment ID: 108573 Result: Down-regulated in Transcription
  misc_feature: MA Experiment 108573 PARAMETER Experiment Name: At_Drought_cDNA_P Parameter: Timepoint (hr) Value: 6
  misc_feature: MA Experiment 108573 PARAMETER Experiment Name: At_Drought_cDNA_P Parameter: Tissue Value: Aerial
  misc_feature: MA Experiment 108573 PARAMETER Experiment Name: At_Drought_cDNA_P Parameter: Treatment Value: Drought vs. No Drought
  misc_feature: MA Experiment ID: 108595 Result: Down-regulated in Transcription
  misc_feature: MA Experiment 108595 PARAMETER Experiment Name: At_Ler-pi_Ovule_cDNA_P Parameter: Plant Line Value: null
  misc_feature: MA Experiment ID: 108668 Result: Up-regulated in Transcription
  misc_feature: MA Experiment 108668 PARAMETER Experiment Name: At_2mM_SA_cDNA_P Parameter: Plant Line Value: WS
  misc_feature: MA Experiment 108668 PARAMETER Experiment Name: At_2mM_SA_cDNA_P Parameter: Timepoint (hr) Value: 6
  misc_feature: MA Experiment 108668 PARAMETER Experiment Name: At_2mM_SA_cDNA_P Parameter: Treatment Value: 2mM SA vs. No Treatment
  misc_feature: MA Experiment ID: 20000090 Result: Up-regulated in Transcription
  misc_feature: MA Experiment ID: 20000111 Result: Down-regulated in Transcription
  misc_feature: MA Experiment 20000111 PARAMETER Experiment Name: At_42deg_Heat_cDNA_P Parameter: Temperature (deg C) Value: 42 vs. 22
  misc_feature: MA Experiment 20000111 PARAMETER Experiment Name: At_42deg_Heat_cDNA_P Parameter: Timepoint (hr) Value: 6
  misc_feature: MA Experiment 20000111 PARAMETER Experiment Name: At_42deg_Heat_cDNA_P Parameter: Tissue Value: Aerial
  misc_feature: MA Experiment ID: 20000113 Result: Down-regulated in Transcription
  misc_feature: MA Experiment 20000113 PARAMETER Experiment Name: At_42deg_Heat_cDNA_P Parameter: Temperature (deg C) Value: 42 vs. 22
  misc_feature: MA Experiment 20000113 PARAMETER Experiment Name: At_42deg_Heat_cDNA_P Parameter: Timepoint (hr) Value: 8
  misc_feature: MA Experiment 20000113 PARAMETER Experiment Name: At_42deg_Heat_cDNA_P Parameter: Tissue Value: Aerial
  misc_feature: MA Experiment ID: 20000173 Result: Down-regulated in Transcription
  misc_feature: MA Experiment 20000173 PARAMETER Experiment Name: At_42deg_Heat_P Parameter: Age (day) Value: 14
  misc_feature: MA Experiment 20000173 PARAMETER Experiment Name: At_42deg_Heat_P Parameter: Organism Value: A. thaliana
  misc_feature: MA Experiment 20000173 PARAMETER Experiment Name: At_42deg_Heat_P Parameter: Plant Line Value: WS
  misc_feature: MA Experiment 20000173 PARAMETER Experiment Name: At_42deg_Heat_P Parameter: Temperature (deg C) Value: 42 vs. 22
  misc_feature: MA Experiment 20000173 PARAMETER Experiment Name: At_42deg_Heat_P Parameter: Timepoint (hr) Value: 6
  misc_feature: MA Experiment 20000173 PARAMETER Experiment Name: At_42deg_Heat_P Parameter: Tissue Value: Aerial
  misc_feature: MA Experiment ID: 20000182 Result: Up-regulated in Transcription
  misc_feature: MA Experiment 20000182 PARAMETER Experiment Name: At_2mM_SA_P Parameter: Age (day) Value: 14
  misc_feature: MA Experiment 20000182 PARAMETER Experiment Name: At_2mM_SA_P Parameter: Organism Value: A. thaliana
  misc_feature: MA Experiment 20000182 PARAMETER Experiment Name: At_2mM_SA_P Parameter: Plant Line Value: WS
  misc_feature: MA Experiment 20000182 PARAMETER Experiment Name: At_2mM_SA_P Parameter: Timepoint (hr) Value: 6
  misc_feature: MA Experiment 20000182 PARAMETER Experiment Name: At_2mM_SA_P Parameter: Tissue Value: Aerial
  misc_feature: MA Experiment 20000182 PARAMETER Experiment Name: At_2mM_SA_P Parameter: Treatment Value: 2mM SA vs. No Treatment
  misc_feature: MA Experiment ID: 20000184 Result: Down-regulated in Transcription
  misc_feature: MA Experiment 20000184 PARAMETER Experiment Name: At_Shoots__P Parameter: Age (day) Value: 7
  misc_feature: MA Experiment 20000184 PARAMETER Experiment Name: At_Shoots__P Parameter: Tissue Value: Shoots vs. Whole Plant
  misc_feature: MA Experiment ID: 20000185 Result: Down-regulated in Transcription
  misc_feature: MA Experiment 20000185 PARAMETER Experiment Name: At_Roots__P Parameter: Age (day) Value: 7 vs. 21
  misc_feature: MA Experiment 20000185 PARAMETER Experiment Name: At_Roots__P Parameter: Organism Value: A. thaliana
  misc_feature: MA Experiment 20000185 PARAMETER Experiment Name: At_Roots__P Parameter: Tissue Value: Roots vs. Whole Plant
  misc_feature: MA Experiment ID: 20000227 Result: Up-regulated in Transcription
  misc_feature: MA Experiment 20000227 PARAMETER Experiment Name: At_Root-Tips-vs-Tops_P Parameter: Tissue Value: Root Tips vs. Root Tops
  misc_feature: MA Experiment ID: 20000234 Result: Down-regulated in Transcription
  misc_feature: MA Experiment 20000234 PARAMETER Experiment Name: At_Siliques_P Parameter: Age (day) Value: 21
  misc_feature: MA Experiment 20000234 PARAMETER Experiment Name: At_Siliques_P Parameter: Organism Value: A. thaliana
  misc_feature: MA Experiment 20000234 PARAMETER Experiment Name: At_Siliques_P Parameter: Plant Line Value: WS
  misc_feature: MA Experiment 20000234 PARAMETER Experiment Name: At_Siliques_P Parameter: Tissue Value: Less Than 5mm Siliques vs. Whole Plant
  misc_feature: MA Experiment ID: 20000264 Result: Down-regulated in Transcription
  misc_feature: MA Experiment 20000264 PARAMETER Experiment Name: At_Open_Flower_P Parameter: Age (day) Value: 21
  misc_feature: MA Experiment 20000264 PARAMETER Experiment Name: At_Open_Flower_P Parameter: Plant Line Value: WS
  misc_feature: MA Experiment 20000264 PARAMETER Experiment Name: At_Open_Flower_P Parameter: Tissue Value: Open Flower vs. Whole Plant
  misc_feature: MA Experiment ID: 20000265 Result: Down-regulated in Transcription
  misc_feature: MA Experiment 20000265 PARAMETER Experiment Name: At_Open_Flower_P Parameter: Age (day) Value: 21
  misc_feature: MA Experiment 20000265 PARAMETER Experiment Name: At_Open_Flower_P Parameter: Plant Line Value: WS
  misc_feature: MA Experiment 20000265 PARAMETER Experiment Name: At_Open_Flower_P Parameter: Tissue Value: Closed Flower vs. Whole Plant
  misc_feature: MA Experiment ID: 20000286 Result: Down-regulated in Transcription
  misc_feature: MA Experiment 20000286 PARAMETER Experiment Name: At_Open_Flower_P Parameter: Age (day) Value: 21
  misc_feature: MA Experiment 20000286 PARAMETER Experiment Name: At_Open_Flower_P Parameter: Plant Line Value: WS
  misc_feature: MA Experiment 20000286 PARAMETER Experiment Name: At_Open_Flower_P Parameter: Tissue Value: Half Open vs. Whole Plant
  misc_feature: MA Experiment ID: 20000438 Result: Down-regulated in Transcription
  misc_feature: MA Experiment 20000438 PARAMETER Experiment Name: At_Shoots__P Parameter: Age (day) Value: 14
  misc_feature: MA Experiment 20000438 PARAMETER Experiment Name: At_Shoots__P Parameter: Tissue Value: Shoots vs. Whole Plant
  misc_feature: MA Experiment ID: 20000439 Result: Down-regulated in Transcription
  misc_feature: MA Experiment 20000439 PARAMETER Experiment Name: At_Roots__P Parameter: Age (day) Value: 14 vs. 21
  misc_feature: MA Experiment 20000439 PARAMETER Experiment Name: At_Roots__P Parameter: Organism Value: A. thaliana
  misc_feature: MA Experiment 20000439 PARAMETER Experiment Name: At_Roots__P Parameter: Tissue Value: Roots vs. Whole Plant
  misc_feature: MA Experiment ID: 20000527 Result: Down-regulated in Transcription
  misc_feature: MA Experiment 20000527 PARAMETER Experiment Name: At_10percent_PEG_P Parameter: Age (day) Value: 20
  misc_feature: MA Experiment 20000527 PARAMETER Experiment Name: At_10percent_PEG_P Parameter: Organism Value: A. thaliana
  misc_feature: MA Experiment 20000527 PARAMETER Experiment Name: At_10percent_PEG_P Parameter: Plant Line Value: WS
  misc_feature: MA Experiment 20000527 PARAMETER Experiment Name: At_10percent_PEG_P Parameter: Timepoint (day) Value: 20
  misc_feature: MA Experiment 20000527 PARAMETER Experiment Name: At_10percent_PEG_P Parameter: Tissue Value: Whole Plant
  misc_feature: MA Experiment 20000527 PARAMETER Experiment Name: At_10percent_PEG_P Parameter: Treatment Value: 10percent PEG vs. No Treatment
  misc_feature: MA Experiment ID: 20001555 Result: Down-regulated in Transcription
  misc_feature: MA Experiment 20001555 PARAMETER Experiment Name: At_Drought_Soil_Dry_P Parameter: Age (day) Value: 24
  misc_feature: MA Experiment 20001555 PARAMETER Experiment Name: At_Drought_Soil_Dry_P Parameter: Organism Value: A. thaliana
  misc_feature: MA Experiment 20001555 PARAMETER Experiment Name: At_Drought_Soil_Dry_P Parameter: Plant Line Value: WS
  misc_feature: MA Experiment 20001555 PARAMETER Experiment Name: At_Drought_Soil_Dry_P Parameter: Post Timepoint (hr) Value: None
  misc_feature: MA Experiment 20001555 PARAMETER Experiment Name: At_Drought_Soil_Dry_P Parameter: Post-Treatment Value: None
  misc_feature: MA Experiment 20001555 PARAMETER Experiment Name: At_Drought_Soil_Dry_P Parameter: Timepoint (day) Value: 10
  misc_feature: MA Experiment 20001555 PARAMETER Experiment Name: At_Drought_Soil_Dry_P Parameter: Treatment Value: Drought vs. No Drought
  misc_feature: MA Experiment ID: 20001556 Result: Down-regulated in Transcription
  misc_feature: MA Experiment 20001556 PARAMETER Experiment Name: At_Drought_Soil_Dry_P Parameter: Age (day) Value: 26
  misc_feature: MA Experiment 20001556 PARAMETER Experiment Name: At_Drought_Soil_Dry_P Parameter: Organism Value: A. thaliana
  misc_feature: MA Experiment 20001556 PARAMETER Experiment Name: At_Drought_Soil_Dry_P Parameter: Plant Line Value: WS
  misc_feature: MA Experiment 20001556 PARAMETER Experiment Name: At_Drought_Soil_Dry_P Parameter: Post Timepoint (hr) Value: None
  misc_feature: MA Experiment 20001556 PARAMETER Experiment Name: At_Drought_Soil_Dry_P Parameter: Post-Treatment Value: None
  misc_feature: MA Experiment 20001556 PARAMETER Experiment Name: At_Drought_Soil_Dry_P Parameter: Timepoint (day) Value: 12
  misc_feature: MA Experiment 20001556 PARAMETER Experiment Name: At_Drought_Soil_Dry_P Parameter: Treatment Value: Drought vs. No Drought
  misc_feature: MA Experiment ID: 20001557 Result: Down-regulated in Transcription
  misc_feature: MA Experiment 20001557 PARAMETER Experiment Name: At_Drought_Soil_Dry_P Parameter: Age (day) Value: 27
  misc_feature: MA Experiment 20001557 PARAMETER Experiment Name: At_Drought_Soil_Dry_P Parameter: Organism Value: A. thaliana
  misc_feature: MA Experiment 20001557 PARAMETER Experiment Name: At_Drought_Soil_Dry_P Parameter: Plant Line Value: WS
  misc_feature: MA Experiment 20001557 PARAMETER Experiment Name: At_Drought_Soil_Dry_P Parameter: Post Timepoint (hr) Value: 3
  misc_feature: MA Experiment 20001557 PARAMETER Experiment Name: At_Drought_Soil_Dry_P Parameter: Post-Treatment Value: Re-Water vs. No Drought
  misc_feature: MA Experiment 20001557 PARAMETER Experiment Name: At_Drought_Soil_Dry_P Parameter: Timepoint (day) Value: 13
  misc_feature: MA Experiment 20001557 PARAMETER Experiment Name: At_Drought_Soil_Dry_P Parameter: Treatment Value: Drought vs. No Drought
  misc_feature: MA Experiment ID: 20001558 Result: Down-regulated in Transcription
  misc_feature: MA Experiment 20001558 PARAMETER Experiment Name: At_Drought_Soil_Dry_P Parameter: Age (day) Value: 27
  misc_feature: MA Experiment 20001558 PARAMETER Experiment Name: At_Drought_Soil_Dry_P Parameter: Organism Value: A. thaliana
  misc_feature: MA Experiment 20001558 PARAMETER Experiment Name: At_Drought_Soil_Dry_P Parameter: Plant Line Value: WS
  misc_feature: MA Experiment 20001558 PARAMETER Experiment Name: At_Drought_Soil_Dry_P Parameter: Post Timepoint (hr) Value: 6
  misc_feature: MA Experiment 20001558 PARAMETER Experiment Name: At_Drought_Soil_Dry_P Parameter: Post-Treatment Value: Re-Water vs. No Drought
  misc_feature: MA Experiment 20001558 PARAMETER Experiment Name: At_Drought_Soil_Dry_P Parameter: Timepoint (day) Value: 13
  misc_feature: MA Experiment 20001558 PARAMETER Experiment Name: At_Drought_Soil_Dry_P Parameter: Treatment Value: Drought vs. No Drought

SEQ ID NO: 40422 - protein, 424 aa, Arabidopsis thaliana; identical to SEQ ID NO: 39474
  peptide (1)..(424): Ceres Seq. ID no. 12562266
  misc_feature (30)..(342): Pfam Name: Calreticulin family Pfam Description: Calreticulin family
  misc_feature (30)..(342): Pfam Name: Calreticulin family Pfam Description: Calreticulin family
  misc_feature (19)..(424): Homolog of NCBI NO: 11131745 NR Description: Calreticulin precursor
  misc_feature (13)..(424): Homolog of NCBI NO: 11131631 NR Description: Calreticulin precursor
  misc_feature (15)..(423): Homolog of NCBI NO: 9858814 NR Description: calreticulin [Pinus taeda]
  misc_feature (356)..(381): Homolog of NCBI NO: 6664320 NR Description: T27G7.13 [Arabidopsis thaliana]
  misc_feature (381)..(421): Homolog of NCBI NO: 6664320 NR Description: T27G7.13 [Arabidopsis thaliana]
  misc_feature (19)..(424): Homolog of NCBI NO: 11131745 NR Description: Calreticulin precursor
  misc_feature (15)..(423): Homolog of NCBI NO: 9858814 NR Description: calreticulin [Pinus taeda]
  misc_feature (381)..(421): Homolog of NCBI NO: 6664320 NR Description: T27G7.13 [Arabidopsis thaliana]
  misc_feature (1)..(424): Homolog of NCBI NO: 18390896 NR Description: calreticulin, putative
  misc_feature (1)..(424): Homolog of NCBI NO: 27311777 NR Description: calreticulin, putative [Arabidopsis thaliana]
  misc_feature (1)..(424): Homolog of NCBI NO: 12643531 NR Description: Calreticulin 3 precursor
  misc_feature (74)..(288): Homolog of NCBI NO: 6664320 NR Description: T27G7.13 [Arabidopsis thaliana]
  misc_feature (1)..(74): Homolog of NCBI NO: 6664320 NR Description: T27G7.13 [Arabidopsis thaliana]
  misc_feature (356)..(381): Homolog of NCBI NO: 6664320 NR Description: T27G7.13 [Arabidopsis thaliana]
  misc_feature (13)..(424): Homolog of NCBI NO: 11131631 NR Description: Calreticulin precursor
  misc_feature (1)..(74): Homolog of NCBI NO: 6664320 NR Description: T27G7.13 [Arabidopsis thaliana]
  misc_feature (74)..(288): Homolog of NCBI NO: 6664320 NR Description: T27G7.13 [Arabidopsis thaliana]
  misc_feature (1)..(424): Homolog of NCBI NO: 12643531 NR Description: Calreticulin 3 precursor
  misc_feature (1)..(424): Homolog of NCBI NO: 27311777 NR Description: calreticulin, putative [Arabidopsis thaliana]
  misc_feature (1)..(424): Homolog of NCBI NO: 18390896 NR Description: calreticulin, putative

SEQ ID NO: 40423 - protein, 285 aa, Arabidopsis thaliana; identical to SEQ ID NO: 39475
  peptide (1)..(285): Ceres Seq. ID no. 12562267
  misc_feature (1)..(203): Pfam Name: Calreticulin family Pfam Description: Calreticulin family
  misc_feature (1)..(203): Pfam Name: Calreticulin family Pfam Description: Calreticulin family
  misc_feature (1)..(285): Homolog of NCBI NO: 11131769 NR Description: Calreticulin precursor
  misc_feature (1)..(285): Homolog of NCBI NO: 11131745 NR Description: Calreticulin precursor
  misc_feature (1)..(285): Homolog of NCBI NO: 11131631 NR Description: Calreticulin precursor
  misc_feature (1)..(284): Homolog of NCBI NO: 9858814 NR Description: calreticulin [Pinus taeda]
  misc_feature (217)..(242): Homolog of NCBI NO: 6664320 NR Description: T27G7.13 [Arabidopsis thaliana]
  misc_feature (1)..(285): Homolog of NCBI NO: 11131769 NR Description: Calreticulin precursor
  misc_feature (1)..(285): Homolog of NCBI NO: 11131631 NR Description: Calreticulin precursor
  misc_feature (217)..(242): Homolog of NCBI NO: 6664320 NR Description: T27G7.13 [Arabidopsis thaliana]
  misc_feature (1)..(285): Homolog of NCBI NO: 18390896 NR Description: calreticulin, putative
  misc_feature (1)..(285): Homolog of NCBI NO: 27311777 NR Description: calreticulin, putative [Arabidopsis thaliana]
  misc_feature (1)..(285): Homolog of NCBI NO: 12643531 NR Description: Calreticulin 3 precursor
  misc_feature (1)..(149): Homolog of NCBI NO: 6664320 NR Description: T27G7.13 [Arabidopsis thaliana]
  misc_feature (242)..(282): Homolog of NCBI NO: 6664320 NR Description: T27G7.13 [Arabidopsis thaliana]
  misc_feature (1)..(284): Homolog of NCBI NO: 9858814 NR Description: calreticulin [Pinus taeda]
  misc_feature (1)..(285): Homolog of NCBI NO: 11131745 NR Description: Calreticulin precursor
  misc_feature (242)..(282): Homolog of NCBI NO: 6664320 NR Description: T27G7.13 [Arabidopsis thaliana]
  misc_feature (1)..(149): Homolog of NCBI NO: 6664320 NR Description: T27G7.13 [Arabidopsis thaliana]
  misc_feature (1)..(285): Homolog of NCBI NO: 12643531 NR Description: Calreticulin 3 precursor
  misc_feature (1)..(285): Homolog of NCBI NO: 27311777 NR Description: calreticulin, putative [Arabidopsis thaliana]
  misc_feature (1)..(285): Homolog of NCBI NO: 18390896 NR Description: calreticulin, putative

SEQ ID NO: 40424 - protein, 220 aa, Arabidopsis thaliana; identical to SEQ ID NO: 39476
  peptide (1)..(220): Ceres Seq. ID no. 12562268
  misc_feature (1)..(138): Pfam Name: Calreticulin family Pfam Description: Calreticulin family
  misc_feature (1)..(138): Pfam Name: Calreticulin family Pfam Description: Calreticulin family
  misc_feature (1)..(220): Homolog of NCBI NO: 11131769 NR Description: Calreticulin precursor
  misc_feature (1)..(220): Homolog of NCBI NO: 11131745 NR Description: Calreticulin precursor
  misc_feature (1)..(220): Homolog of NCBI NO: 11131631 NR Description: Calreticulin precursor
  misc_feature (1)..(219): Homolog of NCBI NO: 9858814 NR Description: calreticulin [Pinus taeda]
  misc_feature (152)..(177): Homolog of NCBI NO: 6664320 NR Description: T27G7.13 [Arabidopsis thaliana]
  misc_feature (1)..(220): Homolog of NCBI NO: 11131769 NR Description: Calreticulin precursor
  misc_feature (1)..(220): Homolog of NCBI NO: 11131631 NR Description: Calreticulin precursor
  misc_feature (152)..(177): Homolog of NCBI NO: 6664320 NR Description: T27G7.13 [Arabidopsis thaliana]
  misc_feature (1)..(220): Homolog of NCBI NO: 18390896 NR Description: calreticulin, putative
  misc_feature (1)..(220): Homolog of NCBI NO: 27311777 NR Description: calreticulin, putative [Arabidopsis thaliana]
  misc_feature (1)..(220): Homolog of NCBI NO: 12643531 NR Description: Calreticulin 3 precursor
  misc_feature (1)..(84): Homolog of NCBI NO: 6664320 NR Description: T27G7.13 [Arabidopsis thaliana]
  misc_feature (177)..(217): Homolog of NCBI NO: 6664320 NR Description: T27G7.13 [Arabidopsis thaliana]
  misc_feature (1)..(219): Homolog of NCBI NO: 9858814 NR Description: calreticulin [Pinus taeda]
  misc_feature (1)..(220): Homolog of NCBI NO: 11131745 NR Description: Calreticulin precursor
  misc_feature (177)..(217): Homolog of NCBI NO: 6664320 NR Description: T27G7.13 [Arabidopsis thaliana]
  misc_feature (1)..(84): Homolog of NCBI NO: 6664320 NR Description: T27G7.13 [Arabidopsis thaliana]
  misc_feature (1)..(220): Homolog of NCBI NO: 12643531 NR Description: Calreticulin 3 precursor
  misc_feature (1)..(220): Homolog of NCBI NO: 27311777 NR Description: calreticulin, putative [Arabidopsis thaliana]
  misc_feature (1)..(220): Homolog of NCBI NO: 18390896 NR Description: calreticulin, putative

SEQ ID NO: 40425 - DNA, 958 bp, Arabidopsis thaliana; identical to SEQ ID NO: 27259
  misc_feature (1)..(958): Ceres Seq. ID no. 13575744
  misc_feature: MA Experiment ID: 108434 Result: Down-regulated in Transcription
  misc_feature: MA Experiment 108434 PARAMETER Experiment Name: At_Root_Tips_cDNA_P Parameter: Tissue Value: Root Tips
  misc_feature: MA Experiment ID: 108435 Result: Down-regulated in Transcription
  misc_feature: MA Experiment 108435 PARAMETER Experiment Name: At_stm_Mutants_cDNA_P Parameter: Plant Line Value: wt Landsburg vs stm
  misc_feature: MA Experiment 108435 PARAMETER Experiment Name: At_stm_Mutants_cDNA_P Parameter: Tissue Value: Shoot Apical Meristem Region
  misc_feature: MA Experiment ID: 108501 Result: Down-regulated in Transcription
  misc_feature: MA Experiment 108501 PARAMETER Experiment Name: At_ap2_floral_buds_cDNA_P Parameter: Plant Line Value: ap2 (Ler.)
  misc_feature: MA Experiment 108501 PARAMETER Experiment Name: At_ap2_floral_buds_cDNA_P Parameter: Tissue Value: Closed Flower
  misc_feature: MA Experiment ID: 108572 Result: Up-regulated in Transcription
  misc_feature: MA Experiment 108572 PARAMETER Experiment Name: At_Drought_cDNA_P Parameter: Timepoint (hr) Value: 1
  misc_feature: MA Experiment 108572 PARAMETER Experiment Name: At_Drought_cDNA_P Parameter: Tissue Value: Aerial
  misc_feature: MA Experiment 108572 PARAMETER Experiment Name: At_Drought_cDNA_P Parameter: Treatment Value: Drought vs. No Drought
  misc_feature: MA Experiment ID: 108573 Result: Up-regulated in Transcription
  misc_feature: MA Experiment 108573 PARAMETER Experiment Name: At_Drought_cDNA_P Parameter: Timepoint (hr) Value: 6
  misc_feature: MA Experiment 108573 PARAMETER Experiment Name: At_Drought_cDNA_P Parameter: Tissue Value: Aerial
  misc_feature: MA Experiment 108573 PARAMETER Experiment Name: At_Drought_cDNA_P Parameter: Treatment Value: Drought vs. No Drought
  misc_feature: MA Experiment ID: 108574 Result: Down-regulated in Transcription
  misc_feature: MA Experiment 108574 PARAMETER Experiment Name: At_Wounding__cDNA_P Parameter: Timepoint (hr) Value: 1
  misc_feature: MA Experiment 108574 PARAMETER Experiment Name: At_Wounding__cDNA_P Parameter: Tissue Value: Aerial
  misc_feature: MA Experiment 108574 PARAMETER Experiment Name: At_Wounding__cDNA_P Parameter: Treatment Value: Wounding vs. No Wounding
  misc_feature: MA Experiment ID: 108577 Result: Down-regulated in Transcription
  misc_feature: MA Experiment 108577 PARAMETER Experiment Name: At_42deg_Heat_cDNA_P Parameter: Temperature (deg C) Value: 42 vs. 22
  misc_feature: MA Experiment 108577 PARAMETER Experiment Name: At_42deg_Heat_cDNA_P Parameter: Timepoint (hr) Value: 6
  misc_feature: MA Experiment 108577 PARAMETER Experiment Name: At_42deg_Heat_cDNA_P Parameter: Tissue Value: Aerial
  misc_feature: MA Experiment ID: 108595 Result: Up-regulated in Transcription
  misc_feature: MA Experiment 108595 PARAMETER Experiment Name: At_Ler-pi_Ovule_cDNA_P Parameter: Plant Line Value: null
  misc_feature: MA Experiment ID: 20000069 Result: Up-regulated in Transcription
  misc_feature: MA Experiment 20000069 PARAMETER Experiment Name: At_100uM_ABA_Mutants_cDNA_P Parameter: Plant Line Value: CS23
  misc_feature: MA Experiment 20000069 PARAMETER Experiment Name: At_100uM_ABA_Mutants_cDNA_P Parameter: Timepoint (hr) Value: 6
  misc_feature: MA Experiment 20000069 PARAMETER Experiment Name: At_100uM_ABA_Mutants_cDNA_P Parameter: Tissue Value: Aerial
  misc_feature: MA Experiment 20000069 PARAMETER Experiment Name: At_100uM_ABA_Mutants_cDNA_P Parameter: Treatment Value: 100uM ABA vs. No Treatment
  misc_feature: MA Experiment ID: 20000070 Result: Up-regulated in Transcription
  misc_feature: MA Experiment 20000070 PARAMETER Experiment Name: At_100uM_ABA_Mutants_cDNA_P Parameter: Plant Line Value: CS24
  misc_feature: MA Experiment 20000070 PARAMETER Experiment Name: At_100uM_ABA_Mutants_cDNA_P Parameter: Timepoint (hr) Value: 6
  misc_feature: MA Experiment 20000070 PARAMETER Experiment Name: At_100uM_ABA_Mutants_cDNA_P Parameter: Tissue Value: Aerial
  misc_feature: MA Experiment 20000070 PARAMETER Experiment Name: At_100uM_ABA_Mutants_cDNA_P Parameter: Treatment Value: 100uM ABA vs. No Treatment
  misc_feature: MA Experiment ID: 20000071 Result: Up-regulated in Transcription
  misc_feature: MA Experiment 20000071 PARAMETER Experiment Name: At_100uM_ABA_Mutants_cDNA_P Parameter: Plant Line Value: CS8104
  misc_feature: MA Experiment 20000071 PARAMETER Experiment Name: At_100uM_ABA_Mutants_cDNA_P Parameter: Timepoint (hr) Value: 6
  misc_feature: MA Experiment 20000071 PARAMETER Experiment Name: At_100uM_ABA_Mutants_cDNA_P Parameter: Tissue Value: Aerial
  misc_feature: MA Experiment 20000071 PARAMETER Experiment Name: At_100uM_ABA_Mutants_cDNA_P Parameter: Treatment Value: 100uM ABA vs. No Treatment
  misc_feature: MA Experiment ID: 20000072 Result: Up-regulated in Transcription
  misc_feature: MA Experiment 20000072 PARAMETER Experiment Name: At_100uM_ABA_Mutants_cDNA_P Parameter: Plant Line Value: CS8105
  misc_feature: MA Experiment 20000072 PARAMETER Experiment Name: At_100uM_ABA_Mutants_cDNA_P Parameter: Timepoint (hr) Value: 6
  misc_feature: MA Experiment 20000072 PARAMETER Experiment Name: At_100uM_ABA_Mutants_cDNA_P Parameter: Tissue Value: Aerial
  misc_feature: MA Experiment 20000072 PARAMETER Experiment Name: At_100uM_ABA_Mutants_cDNA_P Parameter: Treatment Value: 100uM ABA vs. No Treatment
  misc_feature: MA Experiment ID: 20000086 Result: Up-regulated in Transcription
  misc_feature: MA Experiment 20000086 PARAMETER Experiment Name: At_100uM_ABA_Mutants_cDNA_P Parameter: Plant Line Value: CS22
  misc_feature: MA Experiment 20000086 PARAMETER Experiment Name: At_100uM_ABA_Mutants_cDNA_P Parameter: Timepoint (hr) Value: 6
  misc_feature: MA Experiment 20000086 PARAMETER Experiment Name: At_100uM_ABA_Mutants_cDNA_P Parameter: Tissue Value: Aerial
  misc_feature: MA Experiment 20000086 PARAMETER Experiment Name: At_100uM_ABA_Mutants_cDNA_P Parameter: Treatment Value: 100uM ABA vs. No Treatment
  misc_feature: MA Experiment ID: 20000087 Result: Up-regulated in Transcription
  misc_feature: MA Experiment 20000087 PARAMETER Experiment Name: At_100uM_ABA_Mutants_cDNA_P Parameter: Plant Line Value: WS
  misc_feature: MA Experiment 20000087 PARAMETER Experiment Name: At_100uM_ABA_Mutants_cDNA_P Parameter: Timepoint (hr) Value: 6
  misc_feature: MA Experiment 20000087 PARAMETER Experiment Name: At_100uM_ABA_Mutants_cDNA_P Parameter: Tissue Value: Aerial
  misc_feature: MA Experiment 20000087 PARAMETER Experiment Name: At_100uM_ABA_Mutants_cDNA_P Parameter: Treatment Value: 100uM ABA vs. No Treatment
  misc_feature: MA Experiment ID: 20000088 Result: Up-regulated in Transcription
  misc_feature: MA Experiment 20000088 PARAMETER Experiment Name: At_100uM_ABA_Mutants_cDNA_P Parameter: Plant Line Value: Landsberg
  misc_feature: MA Experiment 20000088 PARAMETER Experiment Name: At_100uM_ABA_Mutants_cDNA_P Parameter: Timepoint (hr) Value: 6
  misc_feature: MA Experiment 20000088 PARAMETER Experiment Name: At_100uM_ABA_Mutants_cDNA_P Parameter: Tissue Value: Aerial
  misc_feature: MA Experiment 20000088 PARAMETER Experiment Name: At_100uM_ABA_Mutants_cDNA_P Parameter: Treatment Value: 100uM ABA vs. No Treatment
  misc_feature: MA Experiment ID: 20000089 Result: Up-regulated in Transcription
  misc_feature: MA Experiment ID: 20000090 Result: Up-regulated in Transcription
  misc_feature: MA Experiment ID: 20000117 Result: Up-regulated in Transcription
  misc_feature: MA Experiment 20000117 PARAMETER Experiment Name: At_100uM_ABA_Mutants_cDNA_P Parameter: Plant Line Value: Columbia
  misc_feature: MA Experiment 20000117 PARAMETER Experiment Name: At_100uM_ABA_Mutants_cDNA_P Parameter: Timepoint (hr) Value: 6
  misc_feature: MA Experiment 20000117 PARAMETER Experiment Name: At_100uM_ABA_Mutants_cDNA_P Parameter: Tissue Value: Aerial
  misc_feature: MA Experiment 20000117 PARAMETER Experiment Name: At_100uM_ABA_Mutants_cDNA_P Parameter: Treatment Value: 100uM ABA vs. No Treatment
  misc_feature: MA Experiment ID: 20000224 Result: Down-regulated in Transcription
  misc_feature: MA Experiment ID: 20000234 Result: Down-regulated in Transcription
  misc_feature: MA Experiment 20000234 PARAMETER Experiment Name: At_Siliques_P Parameter: Age (day) Value: 21
  misc_feature: MA Experiment 20000234 PARAMETER Experiment Name: At_Siliques_P Parameter: Organism Value: A. thaliana
  misc_feature: MA Experiment 20000234 PARAMETER Experiment Name: At_Siliques_P Parameter: Plant Line Value: WS
  misc_feature: MA Experiment 20000234 PARAMETER Experiment Name: At_Siliques_P Parameter: Tissue Value: Less Than 5mm Siliques vs. Whole Plant
  misc_feature: MA Experiment ID: 20000265 Result: Down-regulated in Transcription
  misc_feature: MA Experiment 20000265 PARAMETER Experiment Name: At_Open_Flower_P Parameter: Age (day) Value: 21
  misc_feature: MA Experiment 20000265 PARAMETER Experiment Name: At_Open_Flower_P Parameter: Plant Line Value: WS
  misc_feature: MA Experiment 20000265 PARAMETER Experiment Name: At_Open_Flower_P Parameter: Tissue Value: Closed Flower vs. Whole Plant
  misc_feature: MA Experiment ID: 20000438 Result: Down-regulated in Transcription
  misc_feature: MA Experiment 20000438 PARAMETER Experiment Name: At_Shoots__P Parameter: Age (day) Value: 14
  misc_feature: MA Experiment 20000438 PARAMETER Experiment Name: At_Shoots__P Parameter: Tissue Value: Shoots vs. Whole Plant
  misc_feature: MA Experiment ID: 20000794 Result: Up-regulated in Transcription
  misc_feature: MA Experiment 20000794 PARAMETER Experiment Name: At_Petals_P Parameter: Age (day) Value: 23-25 days
  misc_feature: MA Experiment 20000794 PARAMETER Experiment Name: At_Petals_P Parameter: Plant Line Value: WS
  misc_feature: MA Experiment 20000794 PARAMETER Experiment Name: At_Petals_P Parameter: Tissue Value: Petals vs. Whole plant
  misc_feature: MA Experiment ID: 20001248 Result: Up-regulated in Transcription
  misc_feature: MA Experiment 20001248 PARAMETER Experiment Name: At_Far-red-induction_P Parameter: Age (day) Value: 7
  misc_feature: MA Experiment 20001248 PARAMETER Experiment Name: At_Far-red-induction_P Parameter: Light Value: Far-red vs. White
  misc_feature: MA Experiment 20001248 PARAMETER Experiment Name: At_Far-red-induction_P Parameter: Organism Value: A. thaliana
  misc_feature: MA Experiment 20001248 PARAMETER Experiment Name: At_Far-red-induction_P Parameter: Plant Line Value: Columbia
  misc_feature: MA Experiment 20001248 PARAMETER Experiment Name: At_Far-red-induction_P Parameter: Timepoint (hr) Value: 4
  misc_feature: MA Experiment 20001248 PARAMETER Experiment Name: At_Far-red-induction_P Parameter: Tissue Value: Whole Plant
  misc_feature: MA Experiment ID: 20001558 Result: Down-regulated in Transcription
  misc_feature: MA Experiment 20001558 PARAMETER Experiment Name: At_Drought_Soil_Dry_P Parameter: Age (day) Value: 27
  misc_feature: MA Experiment 20001558 PARAMETER Experiment Name: At_Drought_Soil_Dry_P Parameter: Organism Value: A. thaliana
  misc_feature: MA Experiment 20001558 PARAMETER Experiment Name: At_Drought_Soil_Dry_P Parameter: Plant Line Value: WS
  misc_feature: MA Experiment 20001558 PARAMETER Experiment Name: At_Drought_Soil_Dry_P Parameter: Post Timepoint (hr) Value: 6
  misc_feature: MA Experiment 20001558 PARAMETER Experiment Name: At_Drought_Soil_Dry_P Parameter: Post-Treatment Value: Re-Water vs. No Drought
  misc_feature: MA Experiment 20001558 PARAMETER Experiment Name: At_Drought_Soil_Dry_P Parameter: Timepoint (day) Value: 13
  misc_feature: MA Experiment 20001558 PARAMETER Experiment Name: At_Drought_Soil_Dry_P Parameter: Treatment Value: Drought vs. No Drought
  misc_feature: MA Experiment ID: 20001560 Result: Down-regulated in Transcription
  misc_feature: MA Experiment 20001560 PARAMETER Experiment Name: At_Drought_Soil_Dry_P Parameter: Age (day) Value: 28
  misc_feature: MA Experiment 20001560 PARAMETER Experiment Name: At_Drought_Soil_Dry_P Parameter: Organism Value: A. thaliana
  misc_feature: MA Experiment 20001560 PARAMETER Experiment Name: At_Drought_Soil_Dry_P Parameter: Plant Line Value: WS
  misc_feature: MA Experiment 20001560 PARAMETER Experiment Name: At_Drought_Soil_Dry_P Parameter: Post Timepoint (hr) Value: None
  misc_feature: MA Experiment 20001560 PARAMETER Experiment Name: At_Drought_Soil_Dry_P Parameter: Post-Treatment Value: None
  misc_feature: MA Experiment 20001560 PARAMETER Experiment Name: At_Drought_Soil_Dry_P Parameter: Timepoint (day) Value: 14
  misc_feature: MA Experiment 20001560 PARAMETER Experiment Name: At_Drought_Soil_Dry_P Parameter: Treatment Value: Drought vs. No Drought

SEQ ID NO: 40426 - protein, 158 aa, Arabidopsis thaliana; identical to SEQ ID NO: 27260
  peptide (1)..(158): Ceres Seq. ID no. 13575745
  misc_feature (1)..(150): Pfam Name: Papain family cysteine protease Pfam Description: Papain family cysteine protease
  misc_feature (1)..(150): Pfam Name: Papain family cysteine protease Pfam Description: Papain family cysteine protease
  misc_feature (1)..(157): Homolog of NCBI NO: 7381221 NR Description: papain-like cysteine proteinase isoform II
  misc_feature (1)..(154): Homolog of NCBI NO: 516865 NR Description: putative thiol protease [Arabidopsis thaliana]
  misc_feature (1)..(157): Homolog of NCBI NO: 7211743 NR Description: papain-like cysteine proteinase isoform II
  misc_feature (1)..(157): Homolog of NCBI NO: 7211745 NR Description: papain-like cysteine proteinase isoform III
  misc_feature (1)..(157): Homolog of NCBI NO: 7381219 NR Description: papain-like cysteine proteinase isoform I
  misc_feature (1)..(157): Homolog of NCBI NO: 7381221 NR Description: papain-like cysteine proteinase isoform II
  misc_feature (1)..(157): Homolog of NCBI NO: 7211743 NR Description: papain-like cysteine proteinase isoform II
  misc_feature (1)..(157): Homolog of NCBI NO: 7381219 NR Description: papain-like cysteine proteinase isoform I
  misc_feature (1)..(158): Homolog of NCBI NO: 18420375 NR Description: cysteine proteinase RD19A [Arabidopsis thaliana]
  misc_feature (1)..(158): Homolog of NCBI NO: 21593213 NR Description: cysteine proteinase RD19A [Arabidopsis thaliana]
  misc_feature (1)..(158): Homolog of NCBI NO: 18141287 NR Description: senescence-associated cysteine protease [Brassica
  misc_feature (1)..(154): Homolog of NCBI NO: 18399697 NR Description: cysteine proteinase A494 precursor, putative
  misc_feature (1)..(157): Homolog of NCBI NO: 7211741 NR Description: papain-like cysteine proteinase isoform I
  misc_feature (1)..(157): Homolog of NCBI NO: 7211745 NR Description: papain-like cysteine proteinase isoform III
  misc_feature (1)..(154): Homolog of NCBI NO: 516865 NR Description: putative thiol protease [Arabidopsis thaliana]
  misc_feature (1)..(157): Homolog of NCBI NO: 7211741 NR Description: papain-like cysteine proteinase isoform I
  misc_feature (1)..(154): Homolog of NCBI NO: 18399697 NR Description: cysteine proteinase A494 precursor, putative
  misc_feature (1)..(158): Homolog of NCBI NO: 18141287 NR Description: senescence-associated cysteine protease [Brassica
  misc_feature (1)..(158): Homolog of NCBI NO: 21593213 NR Description: cysteine proteinase RD19A [Arabidopsis thaliana]
  misc_feature (1)..(158): Homolog of NCBI NO: 18420375 NR Description: cysteine proteinase RD19A [Arabidopsis thaliana]

SEQ ID NO: 40427 - protein, 144 aa, Arabidopsis thaliana; identical to SEQ ID NO: 27261
  peptide (1)..(144): Ceres Seq. ID no. 13575746
  misc_feature (1)..(136): Pfam Name: Papain family cysteine protease Pfam Description: Papain family cysteine protease
  misc_feature (1)..(136): Pfam Name: Papain family cysteine protease Pfam Description: Papain family cysteine protease
  misc_feature (1)..(143): Homolog of NCBI NO: 7381221 NR Description: papain-like cysteine proteinase isoform II
  misc_feature (1)..(140): Homolog of NCBI NO: 516865 NR Description: putative thiol protease [Arabidopsis thaliana]
  misc_feature (1)..(143): Homolog of NCBI NO: 7211743 NR Description: papain-like cysteine proteinase isoform II
  misc_feature (1)..(143): Homolog of NCBI NO: 7211745 NR Description: papain-like cysteine proteinase isoform III
  misc_feature (1)..(143): Homolog of NCBI NO: 7381219 NR Description: papain-like cysteine proteinase isoform I
  misc_feature (1)..(143): Homolog of NCBI NO: 7381221 NR Description: papain-like cysteine proteinase isoform II
  misc_feature (1)..(143): Homolog of NCBI NO: 7211743 NR Description: papain-like cysteine proteinase isoform II
  misc_feature (1)..(143): Homolog of NCBI NO: 7381219 NR Description: papain-like cysteine proteinase isoform I
  misc_feature (1)..(144): Homolog of NCBI NO: 18420375 NR Description: cysteine proteinase RD19A [Arabidopsis thaliana]
  misc_feature (1)..(144): Homolog of NCBI NO: 21593213 NR Description: cysteine proteinase RD19A [Arabidopsis thaliana]
  misc_feature (1)..(144): Homolog of NCBI NO: 18141287 NR Description: senescence-associated cysteine protease [Brassica
  misc_feature (1)..(140): Homolog of NCBI NO: 18399697 NR Description: cysteine proteinase A494 precursor, putative
  misc_feature (1)..(143): Homolog of NCBI NO: 7211741 NR Description: papain-like cysteine proteinase isoform I
  misc_feature (1)..(143): Homolog of NCBI NO: 7211745 NR Description: papain-like cysteine proteinase isoform III
  misc_feature (1)..(140): Homolog of NCBI NO: 516865 NR Description: putative thiol protease [Arabidopsis thaliana]
  misc_feature (1)..(143): Homolog of NCBI NO: 7211741 NR Description: papain-like cysteine proteinase isoform I
  misc_feature (1)..(140): Homolog of NCBI NO: 18399697 NR Description: cysteine proteinase A494 precursor, putative
  misc_feature (1)..(144): Homolog of NCBI NO: 18141287 NR Description: senescence-associated cysteine protease [Brassica
  misc_feature (1)..(144): Homolog of NCBI NO: 21593213 NR Description: cysteine proteinase RD19A [Arabidopsis thaliana]
  misc_feature (1)..(144): Homolog of NCBI NO: 18420375 NR Description: cysteine proteinase RD19A [Arabidopsis thaliana]

SEQ ID NO: 40428 - protein, 86 aa, Arabidopsis thaliana; identical to SEQ ID NO: 27262
  peptide (1)..(86): Ceres Seq. ID no. 13575747
  misc_feature (1)..(78): Pfam Name: Papain family cysteine protease Pfam Description: Papain family cysteine protease
  misc_feature (1)..(78): Pfam Name: Papain family cysteine protease Pfam Description: Papain family cysteine protease
  misc_feature (1)..(85): Homolog of NCBI NO: 7381221 NR Description: papain-like cysteine proteinase isoform II
  misc_feature (1)..(82): Homolog of NCBI NO: 516865 NR Description: putative thiol protease [Arabidopsis thaliana]
  misc_feature (1)..(85): Homolog of NCBI NO: 7211743 NR Description: papain-like cysteine proteinase isoform II
  misc_feature (1)..(85): Homolog of NCBI NO: 7211745 NR Description: papain-like cysteine proteinase isoform III
  misc_feature (1)..(85): Homolog of NCBI NO: 7381219 NR Description: papain-like cysteine proteinase isoform I
  misc_feature (1)..(85): Homolog of NCBI NO: 7381221 NR Description: papain-like cysteine proteinase isoform II
  misc_feature (1)..(85): Homolog of NCBI NO: 7211743 NR Description: papain-like cysteine proteinase isoform II
  misc_feature (1)..(85): Homolog of NCBI NO: 7381219 NR Description: papain-like cysteine proteinase isoform I
  misc_feature (1)..(86): Homolog of NCBI NO: 18420375 NR Description: cysteine proteinase RD19A [Arabidopsis thaliana]
  misc_feature (1)..(86): Homolog of NCBI NO: 21593213 NR Description: cysteine proteinase RD19A [Arabidopsis thaliana]
  misc_feature (1)..(86): Homolog of NCBI NO: 18141287 NR Description: senescence-associated cysteine protease [Brassica
  misc_feature (1)..(82): Homolog of NCBI NO: 18399697 NR Description: cysteine proteinase A494 precursor, putative
  misc_feature (1)..(85): Homolog of NCBI NO: 7211741 NR Description: papain-like cysteine proteinase isoform I
  misc_feature (1)..(85): Homolog of NCBI NO: 7211745 NR Description: papain-like cysteine proteinase isoform III
  misc_feature (1)..(82): Homolog of NCBI NO: 516865 NR Description: putative thiol protease [Arabidopsis thaliana]
  misc_feature (1)..(85): Homolog of NCBI NO: 7211741 NR Description: papain-like cysteine proteinase isoform I
  misc_feature (1)..(82): Homolog of NCBI NO: 18399697 NR Description: cysteine proteinase A494 precursor, putative
  misc_feature (1)..(86): Homolog of NCBI NO: 18141287 NR Description: senescence-associated cysteine protease [Brassica
  misc_feature (1)..(86): Homolog of NCBI NO: 21593213 NR Description: cysteine proteinase RD19A [Arabidopsis thaliana]
  misc_feature (1)..(86): Homolog of NCBI NO: 18420375 NR Description: cysteine proteinase RD19A [Arabidopsis thaliana]

SEQ ID NO: 40429 - DNA, 1499 bp, Arabidopsis thaliana
  misc_feature (1)..(1499): Ceres Seq. ID no. 12394534
  misc_feature: MA Experiment ID: 108461 Result: Down-regulated in Transcription
  misc_feature: MA Experiment 108461 PARAMETER Experiment Name: At_Germinating_Seeds_cDNA_P Parameter: Age (day) Value: 1 vs. 0
  misc_feature: MA Experiment 108461 PARAMETER Experiment Name: At_Germinating_Seeds_cDNA_P Parameter: Tissue Value: Germinating Seeds
  misc_feature: MA Experiment ID: 108462 Result: Down-regulated in Transcription
  misc_feature: MA Experiment 108462 PARAMETER Experiment Name: At_Germinating_Seeds_cDNA_P Parameter: Age (day) Value: 2 vs. 0
  misc_feature: MA Experiment 108462 PARAMETER Experiment Name: At_Germinating_Seeds_cDNA_P Parameter: Tissue Value: Germinating Seeds
  misc_feature: MA Experiment ID: 108464 Result: Down-regulated in Transcription
  misc_feature: MA Experiment 108464 PARAMETER Experiment Name: At_Germinating_Seeds_cDNA_P Parameter: Age (day) Value: 4 vs. 0
  misc_feature: MA Experiment 108464 PARAMETER Experiment Name: At_Germinating_Seeds_cDNA_P Parameter: Tissue Value: Germinating Seeds
  misc_feature: MA Experiment ID: 108469 Result: Up-regulated in Transcription
  misc_feature: MA Experiment ID: 108667 Result: Up-regulated in Transcription
  misc_feature: MA Experiment 108667 PARAMETER Experiment Name: At_2mM_SA_cDNA_P Parameter: Plant Line Value: WS
  misc_feature: MA Experiment 108667 PARAMETER Experiment Name: At_2mM_SA_cDNA_P Parameter: Timepoint (hr) Value: 1
  misc_feature: MA Experiment 108667 PARAMETER Experiment Name: At_2mM_SA_cDNA_P Parameter: Treatment Value: 2mM SA vs. No Treatment
  misc_feature: MA Experiment ID: 108668 Result: Up-regulated in Transcription
  misc_feature: MA Experiment 108668 PARAMETER Experiment Name: At_2mM_SA_cDNA_P Parameter: Plant Line Value: WS
  misc_feature: MA Experiment 108668 PARAMETER Experiment Name: At_2mM_SA_cDNA_P Parameter: Timepoint (hr) Value: 6
  misc_feature: MA Experiment 108668 PARAMETER Experiment Name: At_2mM_SA_cDNA_P Parameter: Treatment Value: 2mM SA vs. No Treatment
  misc_feature: MA Experiment ID: 20000068 Result: Up-regulated in Transcription
  misc_feature: MA Experiment ID: 20000171 Result: Down-regulated in Transcription
  misc_feature: MA Experiment 20000171 PARAMETER Experiment Name: At_42deg_Heat_P Parameter: Age (day) Value: 14
  misc_feature: MA Experiment 20000171 PARAMETER Experiment Name: At_42deg_Heat_P Parameter: Organism Value: A. thaliana
  misc_feature: MA Experiment 20000171 PARAMETER Experiment Name: At_42deg_Heat_P Parameter: Plant Line Value: WS
  misc_feature: MA Experiment 20000171 PARAMETER Experiment Name: At_42deg_Heat_P Parameter: Temperature (deg C) Value: 42 vs. 22
  misc_feature: MA Experiment 20000171 PARAMETER Experiment Name: At_42deg_Heat_P Parameter: Timepoint (hr) Value: 1
  misc_feature: MA Experiment 20000171 PARAMETER Experiment Name: At_42deg_Heat_P Parameter: Tissue Value: Aerial
  misc_feature: MA Experiment ID: 20000173 Result: Down-regulated in Transcription
  misc_feature: MA Experiment 20000173 PARAMETER Experiment Name: At_42deg_Heat_P Parameter: Age (day) Value: 14
  misc_feature: MA Experiment 20000173 PARAMETER Experiment Name: At_42deg_Heat_P Parameter: Organism Value: A. thaliana
  misc_feature: MA Experiment 20000173 PARAMETER Experiment Name: At_42deg_Heat_P Parameter: Plant Line Value: WS
  misc_feature: MA Experiment 20000173 PARAMETER Experiment Name: At_42deg_Heat_P Parameter: Temperature (deg C) Value: 42 vs. 22
  misc_feature: MA Experiment 20000173 PARAMETER Experiment Name: At_42deg_Heat_P Parameter: Timepoint (hr) Value: 6
  misc_feature: MA Experiment 20000173 PARAMETER Experiment Name: At_42deg_Heat_P Parameter: Tissue Value: Aerial
  misc_feature: MA Experiment ID: 20000179 Result: Down-regulated in Transcription
  misc_feature: MA Experiment 20000179 PARAMETER Experiment Name: At_Germinating_Seeds_P Parameter: Age (hr) Value: 6 vs. 0
  misc_feature: MA Experiment 20000179 PARAMETER Experiment Name: At_Germinating_Seeds_P Parameter: Tissue Value: Germinating Seeds
  misc_feature: MA Experiment ID: 20000180 Result: Down-regulated in Transcription
  misc_feature: MA Experiment 20000180 PARAMETER Experiment Name: At_Germinating_Seeds_P Parameter: Age (hr) Value: 24 vs. 0
  misc_feature: MA Experiment 20000180 PARAMETER Experiment Name: At_Germinating_Seeds_P Parameter: Tissue Value: Germinating Seeds
  misc_feature: MA Experiment ID: 20000182 Result: Up-regulated in Transcription
  misc_feature: MA Experiment 20000182 PARAMETER Experiment Name: At_2mM_SA_P Parameter: Age (day) Value: 14
  misc_feature: MA Experiment 20000182 PARAMETER Experiment Name: At_2mM_SA_P Parameter: Organism Value: A. thaliana
  misc_feature: MA Experiment 20000182 PARAMETER Experiment Name: At_2mM_SA_P Parameter: Plant Line Value: WS
  misc_feature: MA Experiment 20000182 PARAMETER Experiment Name: At_2mM_SA_P Parameter: Timepoint (hr) Value: 6
  misc_feature: MA Experiment 20000182 PARAMETER Experiment Name: At_2mM_SA_P Parameter: Tissue Value: Aerial
  misc_feature: MA Experiment 20000182 PARAMETER Experiment Name: At_2mM_SA_P Parameter: Treatment Value: 2mM SA vs. No Treatment
  misc_feature: MA Experiment ID: 20000184 Result: Down-regulated in Transcription
  misc_feature: MA Experiment 20000184 PARAMETER Experiment Name: At_Shoots__P Parameter: Age (day) Value: 7
  misc_feature: MA Experiment 20000184 PARAMETER Experiment Name: At_Shoots__P Parameter: Tissue Value: Shoots vs. Whole Plant
  misc_feature: MA Experiment ID: 20000185 Result: Down-regulated in Transcription
  misc_feature: MA Experiment 20000185 PARAMETER Experiment Name: At_Roots__P Parameter: Age (day) Value: 7 vs. 21
  misc_feature: MA Experiment 20000185 PARAMETER Experiment Name: At_Roots__P Parameter: Organism Value: A. thaliana
  misc_feature: MA Experiment 20000185 PARAMETER Experiment Name: At_Roots__P Parameter: Tissue Value: Roots vs. Whole Plant
  misc_feature: MA Experiment ID: 20000234 Result: Down-regulated in Transcription
  misc_feature: MA Experiment 20000234 PARAMETER Experiment Name: At_Siliques_P Parameter: Age (day) Value: 21
  misc_feature: MA Experiment 20000234 PARAMETER Experiment Name: At_Siliques_P Parameter: Organism Value: A. thaliana
  misc_feature: MA Experiment 20000234 PARAMETER Experiment Name: At_Siliques_P Parameter: Plant Line Value: WS
  misc_feature: MA Experiment 20000234 PARAMETER Experiment Name: At_Siliques_P Parameter: Tissue Value: Less Than 5mm Siliques vs. Whole Plant
  misc_feature: MA Experiment ID: 20000265 Result: Down-regulated in Transcription
  misc_feature: MA Experiment 20000265 PARAMETER Experiment Name: At_Open_Flower_P Parameter: Age (day) Value: 21
  misc_feature: MA Experiment 20000265 PARAMETER Experiment Name: At_Open_Flower_P Parameter: Plant Line Value: WS
  misc_feature: MA Experiment 20000265 PARAMETER Experiment Name: At_Open_Flower_P Parameter: Tissue Value: Closed Flower vs. Whole Plant
  misc_feature: MA Experiment ID: 20000286 Result: Down-regulated in Transcription
  misc_feature: MA Experiment 20000286 PARAMETER Experiment Name: At_Open_Flower_P Parameter: Age (day) Value: 21
  misc_feature: MA Experiment 20000286 PARAMETER Experiment Name: At_Open_Flower_P Parameter: Plant Line Value: WS
  misc_feature: MA Experiment 20000286 PARAMETER Experiment Name: At_Open_Flower_P Parameter: Tissue Value: Half Open vs. Whole Plant
  misc_feature: MA Experiment ID: 20000439 Result: Down-regulated in Transcription
  misc_feature: MA Experiment 20000439 PARAMETER Experiment Name: At_Roots__P Parameter: Age (day) Value: 14 vs. 21
  misc_feature: MA Experiment 20000439 PARAMETER Experiment Name: At_Roots__P Parameter: Organism Value: A. thaliana
  misc_feature: MA Experiment 20000439 PARAMETER Experiment Name: At_Roots__P Parameter: Tissue Value: Roots vs. Whole Plant
  misc_feature: MA Experiment ID: 20000451 Result: Up-regulated in Transcription
  misc_feature: MA Experiment 20000451 PARAMETER Experiment Name: At_CS6879_Shoots-Roots_P Parameter: Age (day) Value: 14
  misc_feature: MA Experiment 20000451 PARAMETER Experiment Name: At_CS6879_Shoots-Roots_P Parameter: Organism Value: A. thaliana
  misc_feature: MA Experiment 20000451 PARAMETER Experiment Name: At_CS6879_Shoots-Roots_P Parameter: Plant Line Value: CS6879 vs. WS
  misc_feature: MA Experiment 20000451 PARAMETER Experiment Name: At_CS6879_Shoots-Roots_P Parameter: Tissue Value: Roots
  misc_feature: MA Experiment ID: 20000453 Result: Down-regulated in Transcription
  misc_feature: MA Experiment 20000453 PARAMETER Experiment Name: At_100uM_ABA_P Parameter: Age (day) Value: 15
  misc_feature: MA Experiment 20000453 PARAMETER Experiment Name: At_100uM_ABA_P Parameter: Organism Value: A. thaliana
  misc_feature: MA Experiment 20000453 PARAMETER Experiment Name: At_100uM_ABA_P Parameter: Plant Line Value: WS
  misc_feature: MA Experiment 20000453 PARAMETER Experiment Name: At_100uM_ABA_P Parameter: Timepoint (hr) Value: 24
  misc_feature: MA Experiment 20000453 PARAMETER Experiment Name: At_100uM_ABA_P Parameter: Tissue Value: Aerial
  misc_feature: MA Experiment 20000453 PARAMETER Experiment Name: At_100uM_ABA_P Parameter: Treatment Value: 100uM ABA vs. No Treatment
  misc_feature: MA Experiment ID: 20000495 Result: Down-regulated in Transcription
  misc_feature: MA Experiment 20000495 PARAMETER Experiment Name: At_Guard_Cells_P Parameter: Harvest Date Value: 8/2/2002
  misc_feature: MA Experiment 20000495 PARAMETER Experiment Name: At_Guard_Cells_P Parameter: Organism Value: A. thaliana
  misc_feature: MA Experiment 20000495 PARAMETER Experiment Name: At_Guard_Cells_P Parameter: Tissue Value: Guard Cells vs. Leaves
  misc_feature: MA Experiment ID: 20000709 Result: Up-regulated in Transcription
  misc_feature: MA Experiment 20000709 PARAMETER Experiment Name: At_15mM_NH4NO3_L-to-H_P Parameter: Age (hr) Value: 14
  misc_feature: MA Experiment 20000709 PARAMETER Experiment Name: At_15mM_NH4NO3_L-to-H_P Parameter: Organism Value: A. thaliana
  misc_feature: MA Experiment 20000709 PARAMETER Experiment Name: At_15mM_NH4NO3_L-to-H_P Parameter: Plant Line Value: WS
  misc_feature: MA Experiment 20000709 PARAMETER Experiment Name: At_15mM_NH4NO3_L-to-H_P Parameter: Timepoint (hr) Value: 4
  misc_feature: MA Experiment 20000709 PARAMETER Experiment Name: At_15mM_NH4NO3_L-to-H_P Parameter: Tissue Value: Aerial
  misc_feature: MA Experiment 20000709 PARAMETER Experiment Name: At_15mM_NH4NO3_L-to-H_P Parameter: Treatment Value: 15mM NH4NO3 vs. 30mM Mannitol
  misc_feature: MA Experiment ID: 20001248 Result: Down-regulated in Transcription
  misc_feature: MA Experiment 20001248 PARAMETER Experiment Name: At_Far-red-induction_P Parameter: Age (day) Value: 7
  misc_feature: MA Experiment 20001248 PARAMETER Experiment Name: At_Far-red-induction_P Parameter: Light Value: Far-red vs. White
  misc_feature: MA Experiment 20001248 PARAMETER Experiment Name: At_Far-red-induction_P Parameter: Organism Value: A. thaliana
  misc_feature: MA Experiment 20001248 PARAMETER Experiment Name: At_Far-red-induction_P Parameter: Plant Line Value: Columbia
  misc_feature: MA Experiment 20001248 PARAMETER Experiment Name: At_Far-red-induction_P Parameter: Timepoint (hr) Value: 4
  misc_feature: MA Experiment 20001248 PARAMETER Experiment Name: At_Far-red-induction_P Parameter: Tissue Value: Whole Plant
  misc_feature: MA Experiment ID: 20001450 Result: Down-regulated in Transcription
  misc_feature: MA Experiment 20001450 PARAMETER Experiment Name: At_Far-red-induction_P Parameter: Age (day) Value: 7
  misc_feature: MA Experiment 20001450 PARAMETER Experiment Name: At_Far-red-induction_P Parameter: Light Value: Far-red vs. White
  misc_feature: MA Experiment 20001450 PARAMETER Experiment Name: At_Far-red-induction_P Parameter: Organism Value: A. thaliana
  misc_feature: MA Experiment 20001450 PARAMETER Experiment Name: At_Far-red-induction_P Parameter: Plant Line Value: Columbia
  misc_feature: MA Experiment 20001450 PARAMETER Experiment Name: At_Far-red-induction_P Parameter: Timepoint (hr) Value: 8
  misc_feature: MA Experiment 20001450 PARAMETER Experiment Name: At_Far-red-induction_P Parameter: Tissue Value: Whole Plant
  misc_feature: MA Experiment ID: 20001451 Result: Down-regulated in Transcription
  misc_feature: MA Experiment 20001451 PARAMETER Experiment Name: At_Far-red-induction_P Parameter: Age (day) Value: 7
  misc_feature: MA Experiment 20001451 PARAMETER Experiment Name: At_Far-red-induction_P Parameter: Light Value: Far-red vs. White
  misc_feature: MA Experiment 20001451 PARAMETER Experiment Name: At_Far-red-induction_P Parameter: Organism Value: A. thaliana
  misc_feature: MA Experiment 20001451 PARAMETER Experiment Name: At_Far-red-induction_P Parameter: Plant Line Value: Columbia
  misc_feature: MA Experiment 20001451 PARAMETER Experiment Name: At_Far-red-induction_P Parameter: Timepoint (hr) Value: 24
  misc_feature: MA Experiment 20001451 PARAMETER Experiment Name: At_Far-red-induction_P Parameter: Tissue Value: Whole Plant
  misc_feature: MA Experiment ID: 20001554 Result: Down-regulated in Transcription
  misc_feature: MA Experiment 20001554 PARAMETER Experiment Name: At_Drought_Soil_Dry_P Parameter: Age (day) Value: 21
  misc_feature: MA Experiment 20001554 PARAMETER Experiment Name: At_Drought_Soil_Dry_P Parameter: Organism Value: A. thaliana
  misc_feature: MA Experiment 20001554 PARAMETER Experiment Name: At_Drought_Soil_Dry_P Parameter: Plant Line Value: WS
  misc_feature: MA Experiment 20001554 PARAMETER Experiment Name: At_Drought_Soil_Dry_P Parameter: Post Timepoint (hr) Value: None
  misc_feature: MA Experiment 20001554 PARAMETER Experiment Name: At_Drought_Soil_Dry_P Parameter: Post-Treatment Value: None
  misc_feature: MA Experiment 20001554 PARAMETER Experiment Name: At_Drought_Soil_Dry_P Parameter: Timepoint (day) Value: 7
  misc_feature: MA Experiment 20001554 PARAMETER Experiment Name: At_Drought_Soil_Dry_P Parameter: Treatment Value: Drought vs. No Drought
  misc_feature: MA Experiment ID: 20001556 Result: Down-regulated in Transcription
  misc_feature: MA Experiment 20001556 PARAMETER Experiment Name: At_Drought_Soil_Dry_P Parameter: Age (day) Value: 26
  misc_feature: MA Experiment 20001556 PARAMETER Experiment Name: At_Drought_Soil_Dry_P Parameter: Organism Value: A. thaliana
  misc_feature: MA Experiment 20001556 PARAMETER Experiment Name: At_Drought_Soil_Dry_P Parameter: Plant Line Value: WS
  misc_feature: MA Experiment 20001556 PARAMETER Experiment Name: At_Drought_Soil_Dry_P Parameter: Post Timepoint (hr) Value: None
  misc_feature: MA Experiment 20001556 PARAMETER Experiment Name: At_Drought_Soil_Dry_P Parameter: Post-Treatment Value: None
  misc_feature: MA Experiment 20001556 PARAMETER Experiment Name: At_Drought_Soil_Dry_P Parameter: Timepoint (day) Value: 12
  misc_feature: MA Experiment 20001556 PARAMETER Experiment Name: At_Drought_Soil_Dry_P Parameter: Treatment Value: Drought vs. No Drought
  misc_feature: MA Experiment ID: 20001557 Result: Down-regulated in Transcription
  misc_feature: MA Experiment 20001557 PARAMETER Experiment Name: At_Drought_Soil_Dry_P Parameter: Age (day) Value: 27
  misc_feature: MA Experiment 20001557 PARAMETER Experiment Name: At_Drought_Soil_Dry_P Parameter: Organism Value: A. thaliana
  misc_feature: MA Experiment 20001557 PARAMETER Experiment Name: At_Drought_Soil_Dry_P Parameter: Plant Line Value: WS
  misc_feature: MA Experiment 20001557 PARAMETER Experiment Name: At_Drought_Soil_Dry_P Parameter: Post Timepoint (hr) Value: 3
  misc_feature: MA Experiment 20001557 PARAMETER Experiment Name: At_Drought_Soil_Dry_P Parameter: Post-Treatment Value: Re-Water vs. No Drought
  misc_feature: MA Experiment 20001557 PARAMETER Experiment Name: At_Drought_Soil_Dry_P Parameter: Timepoint (day) Value: 13
  misc_feature: MA Experiment 20001557 PARAMETER Experiment Name: At_Drought_Soil_Dry_P Parameter: Treatment Value: Drought vs. No Drought
agtatataaagtatagggttgattcggagaaagaggttaaagtattagattgaaacaacaaatctcaggggaagaagaagagagaatggattcggcggagaagggcttgcttgttgtgagcgacagagaagaagtaaacaagaaagatggctttttgtgggaaacgaagaaacttagttacatcgccggtccgatgattgcagtgaactcgtctatgtatgttcttcaggtgatatctataatgatggctggtcatctcggtgagcttttcctctctagcaccgccattgctgtttctttctgcagcgtcaccggtttcagcgtcgtttttggattggctagtgcgttggagactttatgtggtcaagctaatggagctaagcaatacgagaagcttggtgttcaaacttacacaggaattgtctctttgtttcttgtgtgtattcctctctctgttctctggagctacattggtgatatactttctcttattggacaagatgctatggttgctcaagaagctgggaagtttgcaacttggctcatacccgcgctctttggttacgctactttgcagccgcttgttcggtttttccaagcacagtctctgattttgcctttggttatgagttcagtctcttctctctgtgtccacattgtcctctgttggagcttggtctttaagttcggtcttggaagcctcggtgcagctattgcgatcggcgtttcttactggctaaacgtgactgttcttggattgtacatgacgttttcttctagctgtaggaagagtcgtgcacctatctccatgagtttgtttgaaggaatgggagagtttttccggtttggaatcccatctgcgtctatgatttgcctcgagtggtggtcattcgaatttctagtcctgctctctgggatttttgccaaatcccgaagctagaagcctctgttcnntcagtctgtctttcaacacaatcctccttgtaccaaatcccagagagtctcggcgcagcagcaagtacaagagttgcaaacgagttaggagctggaaacccgaaacaagctcgaatggcggtttacacagcgatggttataacaggtgtagaatcaataatggtgggtgcaatagtctttggtgcaagaaatgtatttggttacctattcagttctgaaactgaagttgtagactatgtaaaatcaatggctccactgcttttctttatcggtcatattcgatgcccttcacgcagctctctcgggtgtggctagaggatcagggaggcaagatattggggcatacgtaaacctagcagcatactatctctttggaataccaactgctatactattagctttttgggtttaaaatgagaggaagaggactctggattggaatcacagttgggtcatgtgtacaagctgnttttgctcggtcttatcgttaatcctcactaaattggaaaaaaacaggcgagaaaggctagagaaagagtgatggg

SEQ ID NO: 40430 - protein, 284 aa, Arabidopsis thaliana
  peptide (1)..(284): Ceres Seq. ID no. 12394535
  misc_feature (26)..(278): Homolog of NCBI NO: 15228073 NR Description: hypothetical protein; protein id: At2g04050.1
  misc_feature (3)..(283): Homolog of NCBI NO: 13430684 NR Description: putative MATE efflux family protein [Arabidopsis
  misc_feature (1)..(278): Homolog of NCBI NO: 25518472 NR Description: hypothetical protein F9L1.9 [imported] -
  misc_feature (20)..(278): Homolog of NCBI NO: 25518684 NR Description: hypothetical protein F9L1.12 [imported] -
  misc_feature (20)..(278): Homolog of NCBI NO: 18394206 NR Description: expressed protein
  misc_feature (1)..(278): Homolog of NCBI NO: 25518548 NR Description: hypothetical protein F9L1.10 - Arabidopsis
  misc_feature (1)..(278): Homolog of NCBI NO: 15218068 NR Description: hypothetical protein; protein id: At1g15160.1
  misc_feature (2)..(278): Homolog of NCBI NO: 25511632 NR Description: F9L1.11 protein - Arabidopsis thaliana
  misc_feature (2)..(278): Homolog of NCBI NO: 15218070 NR Description: hypothetical protein; protein id: At1g15170.1
  misc_feature (1)..(278): Homolog of NCBI NO: 15223961 NR Description: hypothetical protein; protein id: At1g71140.1
MDSAEKGLLVVSDREEVNKKDGFLWETKKLSYIAGPMIAVNSSMYVLQVISIMMAGHLGELFLSSTAIAVSFCSVTGFSVVFGLASALETLCGQANGAKQYEKLGVQTYTGIVSLFLVCIPLSVLWSYIGDILSLIGQDAMVAQEAGKFATWLIPALFGYATLQPLVRFFQAQSLILPLVMSSVSSLCVHIVLCWSLVFKFGLGSLGAAIAIGVSYWLNVTVLGLYMTFSSSCRKSRAPISMSLFEGMGEFFRFGIPSASMICLEWWSFEFLVLLSGIFAKSRS

SEQ ID NO: 40431 - protein, 248 aa, Arabidopsis thaliana
  peptide (1)..(248): Ceres Seq. ID no. 12394536
  misc_feature (1)..(242): Homolog of NCBI NO: 15228073 NR Description: hypothetical protein; protein id: At2g04050.1
  misc_feature (1)..(247): Homolog of NCBI NO: 13430684 NR Description: putative MATE efflux family protein [Arabidopsis
  misc_feature (1)..(242): Homolog of NCBI NO: 25518472 NR Description: hypothetical protein F9L1.9 [imported] -
  misc_feature (1)..(242): Homolog of NCBI NO: 25518684 NR Description: hypothetical protein F9L1.12 [imported] -
  misc_feature (1)..(242): Homolog of NCBI NO: 18394206 NR Description: expressed protein
  misc_feature (1)..(242): Homolog of NCBI NO: 25518548 NR Description: hypothetical protein F9L1.10 - Arabidopsis
  misc_feature (1)..(242): Homolog of NCBI NO: 15218068 NR Description: hypothetical protein; protein id: At1g15160.1
  misc_feature (1)..(242): Homolog of NCBI NO: 25511632 NR Description: F9L1.11 protein - Arabidopsis thaliana
  misc_feature (1)..(242): Homolog of NCBI NO: 15218070 NR Description: hypothetical protein; protein id: At1g15170.1
  misc_feature (1)..(242): Homolog of NCBI NO: 15223961 NR Description: hypothetical protein; protein id: At1g71140.1
MIAVNSSMYVLQVISIMMAGHLGELFLSSTAIAVSFCSVTGFSVVFGLASALETLCGQANGAKQYEKLGVQTYTGIVSLFLVCIPLSVLWSYIGDILSLIGQDAMVAQEAGKFATWLIPALFGYATLQPLVRFFQAQSLILPLVMSSVSSLCVHIVLCWSLVFKFGLGSLGAAIAIGVSYWLNVTVLGLYMTFSSSCRKSRAPISMSLFEGMGEFFRFGIPSASMICLEWWSFEFLVLLSGIFAKSRS

SEQ ID NO: 40432 - protein, 241 aa, Arabidopsis thaliana
  peptide (1)..(241): Ceres Seq. ID no. 12394537
  misc_feature (1)..(235): Homolog of NCBI NO: 15228073 NR Description: hypothetical protein; protein id: At2g04050.1
  misc_feature (1)..(240): Homolog of NCBI NO: 13430684 NR Description: putative MATE efflux family protein [Arabidopsis
  misc_feature (1)..(235): Homolog of NCBI NO: 25518472 NR Description: hypothetical protein F9L1.9 [imported] -
  misc_feature (1)..(235): Homolog of NCBI NO: 25518684 NR Description: hypothetical protein F9L1.12 [imported] -
  misc_feature (1)..(235): Homolog of NCBI NO: 18394206 NR Description: expressed protein
  misc_feature (1)..(235): Homolog of NCBI NO: 25518548 NR Description: hypothetical protein F9L1.10 - Arabidopsis
  misc_feature (1)..(235): Homolog of NCBI NO: 15218068 NR Description: hypothetical protein; protein id: At1g15160.1
  misc_feature (1)..(235): Homolog of NCBI NO: 25511632 NR Description: F9L1.11 protein - Arabidopsis thaliana
  misc_feature (1)..(235): Homolog of NCBI NO: 15218070 NR Description: hypothetical protein; protein id: At1g15170.1
  misc_feature (1)..(235): Homolog of NCBI NO: 15223961 NR Description: hypothetical protein; protein id: At1g71140.1
MYVLQVISIMMAGHLGELFLSSTAIAVSFCSVTGFSVVFGLASALETLCGQANGAKQYEKLGVQTYTGIVSLFLVCIPLSVLWSYIGDILSLIGQDAMVAQEAGKFATWLIPALFGYATLQPLVRFFQAQSLILPLVMSSVSSLCVHIVLCWSLVFKFGLGSLGAAIAIGVSYWLNVTVLGLYMTFSSSCRKSRAPISMSLFEGMGEFFRFGIPSASMICLEWWSFEFLVLLSGIFAKSRS

SEQ ID NO: 40433 - DNA, 2338 bp, Arabidopsis thaliana; identical to SEQ ID NO: 29542
  misc_feature (1)..(2338): Ceres Seq. ID no. 13497306
  misc_feature: MA Experiment ID: 108434 Result: Up-regulated in Transcription
  misc_feature: MA Experiment 108434 PARAMETER Experiment Name: At_Root_Tips_cDNA_P Parameter: Tissue Value: Root Tips
  misc_feature: MA Experiment ID: 108461 Result: Down-regulated in Transcription
  misc_feature: MA Experiment 108461 PARAMETER Experiment Name: At_Germinating_Seeds_cDNA_P Parameter: Age (day) Value: 1 vs. 0
  misc_feature: MA Experiment 108461 PARAMETER Experiment Name: At_Germinating_Seeds_cDNA_P Parameter: Tissue Value: Germinating Seeds
  misc_feature: MA Experiment ID: 108462 Result: Down-regulated in Transcription
  misc_feature: MA Experiment 108462 PARAMETER Experiment Name: At_Germinating_Seeds_cDNA_P Parameter: Age (day) Value: 2 vs. 0
  misc_feature: MA Experiment 108462 PARAMETER Experiment Name: At_Germinating_Seeds_cDNA_P Parameter: Tissue Value: Germinating Seeds
  misc_feature: MA Experiment ID: 108463 Result: Down-regulated in Transcription
  misc_feature: MA Experiment 108463 PARAMETER Experiment Name: At_Germinating_Seeds_cDNA_P Parameter: Age (day) Value: 3 vs. 0
  misc_feature: MA Experiment 108463 PARAMETER Experiment Name: At_Germinating_Seeds_cDNA_P Parameter: Tissue Value: Germinating Seeds
  misc_feature: MA Experiment ID: 108464 Result: Down-regulated in Transcription
  misc_feature: MA Experiment 108464 PARAMETER Experiment Name: At_Germinating_Seeds_cDNA_P Parameter: Age (day) Value: 4 vs. 0
  misc_feature: MA Experiment 108464 PARAMETER Experiment Name: At_Germinating_Seeds_cDNA_P Parameter: Tissue Value: Germinating Seeds
  misc_feature: MA Experiment ID: 108572 Result: Up-regulated in Transcription
  misc_feature: MA Experiment 108572 PARAMETER Experiment Name: At_Drought_cDNA_P Parameter: Timepoint (hr) Value: 1
  misc_feature: MA Experiment 108572 PARAMETER Experiment Name: At_Drought_cDNA_P Parameter: Tissue Value: Aerial
  misc_feature: MA Experiment 108572 PARAMETER Experiment Name: At_Drought_cDNA_P Parameter: Treatment Value: Drought vs. No Drought
  misc_feature: MA Experiment ID: 108573 Result: Up-regulated in Transcription
  misc_feature: MA Experiment 108573 PARAMETER Experiment Name: At_Drought_cDNA_P Parameter: Timepoint (hr) Value: 6
  misc_feature: MA Experiment 108573 PARAMETER Experiment Name: At_Drought_cDNA_P Parameter: Tissue Value: Aerial
  misc_feature: MA Experiment 108573 PARAMETER Experiment Name: At_Drought_cDNA_P Parameter: Treatment Value: Drought vs. No Drought
  misc_feature: MA Experiment ID: 108574 Result: Up-regulated in Transcription
  misc_feature: MA Experiment 108574 PARAMETER Experiment Name: At_Wounding__cDNA_P Parameter: Timepoint (hr) Value: 1
  misc_feature: MA Experiment 108574 PARAMETER Experiment Name: At_Wounding__cDNA_P Parameter: Tissue Value: Aerial
  misc_feature: MA Experiment 108574 PARAMETER Experiment Name: At_Wounding__cDNA_P Parameter: Treatment Value: Wounding vs. No Wounding
  misc_feature: MA Experiment ID: 108576 Result: Down-regulated in Transcription
  misc_feature: MA Experiment 108576 PARAMETER Experiment Name: At_42deg_Heat_cDNA_P Parameter: Temperature (deg C) Value: 42 vs. 22
  misc_feature: MA Experiment 108576 PARAMETER Experiment Name: At_42deg_Heat_cDNA_P Parameter: Timepoint (hr) Value: 1
  misc_feature: MA Experiment 108576 PARAMETER Experiment Name: At_42deg_Heat_cDNA_P Parameter: Tissue Value: Aerial
  misc_feature: MA Experiment ID: 108585 Result: Up-regulated in Transcription
  misc_feature: MA Experiment 108585 PARAMETER Experiment Name: At_5mM_NaNP_cDNA_P Parameter: Timepoint (hr) Value: 6
  misc_feature: MA Experiment 108585 PARAMETER Experiment Name: At_5mM_NaNP_cDNA_P Parameter: Tissue Value: Aerial
  misc_feature: MA Experiment 108585 PARAMETER Experiment Name: At_5mM_NaNP_cDNA_P Parameter: Treatment Value: null
  misc_feature: MA Experiment ID: 108608 Result: Up-regulated in Transcription
  misc_feature: MA Experiment 108608 PARAMETER Experiment Name: At_100uM_ABA_cDNA_P Parameter: Timepoint (hr) Value: 1
  misc_feature: MA Experiment 108608 PARAMETER Experiment Name: At_100uM_ABA_cDNA_P Parameter: Tissue Value: Aerial
  misc_feature: MA Experiment 108608 PARAMETER Experiment Name: At_100uM_ABA_cDNA_P Parameter: Treatment Value: 100uM ABA vs. No Treatment
  misc_feature: MA Experiment ID: 108668 Result: Up-regulated in Transcription
  misc_feature: MA Experiment 108668 PARAMETER Experiment Name: At_2mM_SA_cDNA_P Parameter: Plant Line Value: WS
  misc_feature: MA Experiment 108668 PARAMETER Experiment Name: At_2mM_SA_cDNA_P Parameter: Timepoint (hr) Value: 6
  misc_feature: MA Experiment 108668 PARAMETER Experiment Name: At_2mM_SA_cDNA_P Parameter: Treatment Value: 2mM SA vs. No Treatment
  misc_feature: MA Experiment ID: 20000069 Result: Up-regulated in Transcription
  misc_feature: MA Experiment 20000069 PARAMETER Experiment Name: At_100uM_ABA_Mutants_cDNA_P Parameter: Plant Line Value: CS23
  misc_feature: MA Experiment 20000069 PARAMETER Experiment Name: At_100uM_ABA_Mutants_cDNA_P Parameter: Timepoint (hr) Value: 6
  misc_feature: MA Experiment 20000069 PARAMETER Experiment Name: At_100uM_ABA_Mutants_cDNA_P Parameter: Tissue Value: Aerial
  misc_feature: MA Experiment 20000069 PARAMETER Experiment Name: At_100uM_ABA_Mutants_cDNA_P Parameter: Treatment Value: 100uM ABA vs. No Treatment
  misc_feature: MA Experiment ID: 20000070 Result: Up-regulated in Transcription
  misc_feature: MA Experiment 20000070 PARAMETER Experiment Name: At_100uM_ABA_Mutants_cDNA_P Parameter: Plant Line Value: CS24
  misc_feature: MA Experiment 20000070 PARAMETER Experiment Name: At_100uM_ABA_Mutants_cDNA_P Parameter: Timepoint (hr) Value: 6
  misc_feature: MA Experiment 20000070 PARAMETER Experiment Name: At_100uM_ABA_Mutants_cDNA_P Parameter: Tissue Value: Aerial
  misc_feature: MA Experiment 20000070 PARAMETER Experiment Name: At_100uM_ABA_Mutants_cDNA_P Parameter: Treatment Value: 100uM ABA vs. No Treatment
  misc_feature: MA Experiment ID: 20000088 Result: Up-regulated in Transcription
  misc_feature: MA Experiment 20000088 PARAMETER Experiment Name: At_100uM_ABA_Mutants_cDNA_P Parameter: Plant Line Value: Landsberg
  misc_feature: MA Experiment 20000088 PARAMETER Experiment Name: At_100uM_ABA_Mutants_cDNA_P Parameter: Timepoint (hr) Value: 6
  misc_feature: MA Experiment 20000088 PARAMETER Experiment Name: At_100uM_ABA_Mutants_cDNA_P Parameter: Tissue Value: Aerial
  misc_feature: MA Experiment 20000088 PARAMETER Experiment Name: At_100uM_ABA_Mutants_cDNA_P Parameter: Treatment Value: 100uM ABA vs. No Treatment
  misc_feature: MA Experiment ID: 20000166 Result: Up-regulated in Transcription
  misc_feature: MA Experiment 20000166 PARAMETER Experiment Name: At_100uM_ABA_P Parameter: Age (day) Value: 14
  misc_feature: MA Experiment 20000166 PARAMETER Experiment Name: At_100uM_ABA_P Parameter: Organism Value: A. thaliana
  misc_feature: MA Experiment 20000166 PARAMETER Experiment Name: At_100uM_ABA_P Parameter: Plant Line Value: WS
  misc_feature: MA Experiment 20000166 PARAMETER Experiment Name: At_100uM_ABA_P Parameter: Timepoint (hr) Value: 1
  misc_feature: MA Experiment 20000166 PARAMETER Experiment Name: At_100uM_ABA_P Parameter: Tissue Value: Aerial
  misc_feature: MA Experiment 20000166 PARAMETER Experiment Name: At_100uM_ABA_P Parameter: Treatment Value: 100uM ABA vs. No Treatment
  misc_feature: MA Experiment ID: 20000182 Result: Up-regulated in Transcription
  misc_feature: MA Experiment 20000182 PARAMETER Experiment Name: At_2mM_SA_P Parameter: Age (day) Value: 14
  misc_feature: MA Experiment 20000182 PARAMETER Experiment Name: At_2mM_SA_P Parameter: Organism Value: A. thaliana
  misc_feature: MA Experiment 20000182 PARAMETER Experiment Name: At_2mM_SA_P Parameter: Plant Line Value: WS
  misc_feature: MA Experiment 20000182 PARAMETER Experiment Name: At_2mM_SA_P Parameter: Timepoint (hr) Value: 6
  misc_feature: MA Experiment 20000182 PARAMETER Experiment Name: At_2mM_SA_P Parameter: Tissue Value: Aerial
  misc_feature: MA Experiment 20000182 PARAMETER Experiment Name: At_2mM_SA_P Parameter: Treatment Value: 2mM SA vs. No Treatment
  misc_feature: MA Experiment ID: 20000436 Result: Up-regulated in Transcription
  misc_feature: MA Experiment 20000436 PARAMETER Experiment Name: At_Drought_P Parameter: Age (day) Value: 7
  misc_feature: MA Experiment 20000436 PARAMETER Experiment Name: At_Drought_P Parameter: Organism Value: A. thaliana
  misc_feature: MA Experiment 20000436 PARAMETER Experiment Name: At_Drought_P Parameter: Plant Line Value: WS
  misc_feature: MA Experiment 20000436 PARAMETER Experiment Name: At_Drought_P Parameter: Timepoint (hr) Value: 12
  misc_feature: MA Experiment 20000436 PARAMETER Experiment Name: At_Drought_P Parameter: Tissue Value: Whole Plant
  misc_feature: MA Experiment 20000436 PARAMETER Experiment Name: At_Drought_P Parameter: Treatment Value: Drought vs. No Drought
  misc_feature: MA Experiment ID: 20000437 Result: Up-regulated in Transcription
  misc_feature: MA Experiment 20000437 PARAMETER Experiment Name: At_Drought_P Parameter: Age (day) Value: 8
  misc_feature: MA Experiment 20000437 PARAMETER Experiment Name: At_Drought_P Parameter: Organism Value: A. thaliana
  misc_feature: MA Experiment 20000437 PARAMETER Experiment Name: At_Drought_P Parameter: Plant Line Value: WS
  misc_feature: MA Experiment 20000437 PARAMETER Experiment Name: At_Drought_P Parameter: Timepoint (hr) Value: 24
  misc_feature: MA Experiment 20000437 PARAMETER Experiment Name: At_Drought_P Parameter: Tissue Value: Whole Plant
  misc_feature: MA Experiment 20000437 PARAMETER Experiment Name: At_Drought_P Parameter: Treatment Value: Drought vs. No Drought
  misc_feature: MA Experiment ID: 20001557 Result: Up-regulated in Transcription
  misc_feature: MA Experiment 20001557 PARAMETER Experiment Name: At_Drought_Soil_Dry_P Parameter: Age (day) Value: 27
  misc_feature: MA Experiment 20001557 PARAMETER Experiment Name: At_Drought_Soil_Dry_P Parameter: Organism Value: A. thaliana
  misc_feature: MA Experiment 20001557 PARAMETER Experiment Name: At_Drought_Soil_Dry_P Parameter: Plant Line Value: WS
  misc_feature: MA Experiment 20001557 PARAMETER Experiment Name: At_Drought_Soil_Dry_P Parameter: Post Timepoint (hr) Value: 3
  misc_feature: MA Experiment 20001557 PARAMETER Experiment Name: At_Drought_Soil_Dry_P Parameter: Post-Treatment Value: Re-Water vs. No Drought
  misc_feature: MA Experiment 20001557 PARAMETER Experiment Name: At_Drought_Soil_Dry_P Parameter: Timepoint (day) Value: 13
  misc_feature: MA Experiment 20001557 PARAMETER Experiment Name: At_Drought_Soil_Dry_P Parameter: Treatment Value: Drought vs. No Drought
  misc_feature: MA Experiment ID: 20001560 Result: Up-regulated in Transcription
  misc_feature: MA Experiment 20001560 PARAMETER Experiment Name: At_Drought_Soil_Dry_P Parameter: Age (day) Value: 28
  misc_feature: MA Experiment 20001560 PARAMETER Experiment Name: At_Drought_Soil_Dry_P Parameter: Organism Value: A. thaliana
  misc_feature: MA Experiment 20001560 PARAMETER Experiment Name: At_Drought_Soil_Dry_P Parameter: Plant Line Value: WS
  misc_feature: MA Experiment 20001560 PARAMETER Experiment Name: At_Drought_Soil_Dry_P Parameter: Post Timepoint (hr) Value: None
  misc_feature: MA Experiment 20001560 PARAMETER Experiment Name: At_Drought_Soil_Dry_P Parameter: Post-Treatment Value: None
  misc_feature: MA Experiment 20001560 PARAMETER Experiment Name: At_Drought_Soil_Dry_P Parameter: Timepoint (day) Value: 14
  misc_feature: MA Experiment 20001560 PARAMETER Experiment Name: At_Drought_Soil_Dry_P Parameter: Treatment Value: Drought vs. No Drought
  misc_feature: MA Experiment ID: 20001905 Result: Up-regulated in Transcription
  misc_feature: MA Experiment 20001905 PARAMETER Experiment Name: At_Drought_Reproduction_P Parameter: Age (day) Value: 40
  misc_feature: MA Experiment 20001905 PARAMETER Experiment Name: At_Drought_Reproduction_P Parameter: Organism Value: A. thaliana
  misc_feature: MA Experiment 20001905 PARAMETER Experiment Name: At_Drought_Reproduction_P Parameter: Plant Line Value: WS
  misc_feature: MA Experiment 20001905 PARAMETER Experiment Name: At_Drought_Reproduction_P Parameter: Timepoint (day) Value: 10
  misc_feature: MA Experiment 20001905 PARAMETER Experiment Name: At_Drought_Reproduction_P Parameter: Tissue Value: Rosettes
  misc_feature: MA Experiment 20001905 PARAMETER Experiment Name: At_Drought_Reproduction_P Parameter: Treatment Value: Drought vs. No Drought
  misc_feature: MA Experiment ID: 20001911 Result: Up-regulated in Transcription
  misc_feature: MA Experiment 20001911 PARAMETER Experiment Name: At_Drought_Reproduction_P Parameter: Age (day) Value: 40
  misc_feature: MA Experiment 20001911 PARAMETER Experiment Name: At_Drought_Reproduction_P Parameter: Organism Value: A. thaliana
  misc_feature: MA Experiment 20001911 PARAMETER Experiment Name: At_Drought_Reproduction_P Parameter: Plant Line Value: WS
  misc_feature: MA Experiment 20001911 PARAMETER Experiment Name: At_Drought_Reproduction_P Parameter: Timepoint (day) Value: 10
  misc_feature: MA Experiment 20001911 PARAMETER Experiment Name: At_Drought_Reproduction_P Parameter: Tissue Value: Flowers
  misc_feature: MA Experiment 20001911 PARAMETER Experiment Name: At_Drought_Reproduction_P Parameter: Treatment Value: Drought vs. No Drought

SEQ ID NO: 40434 - protein, 627 aa, Arabidopsis thaliana; identical to SEQ ID NO: 29543
  peptide (1)..(627): Ceres Seq. ID no. 13497307
  misc_feature (126)..(317): Pfam Name: ABC transporter Pfam Description: ABC transporter
  misc_feature (126)..(317): Pfam Name: ABC transporter Pfam Description: ABC transporter
  misc_feature (32)..(619): Homolog of NCBI NO: 6320874 NR Description: Hypothetical ORF; Yer036cp [Saccharomyces
  misc_feature (37)..(622): Homolog of NCBI NO: 27707592 NR Description: similar to ATP-binding cassette, sub-family F,
  misc_feature (34)..(627): Homolog of NCBI NO: 18859989 NR Description: CG9281-PB [Drosophila melanogaster]
  misc_feature (33)..(622): Homolog of NCBI NO: 27881506 NR Description: ATP-binding cassette, sub-family F, member 2
  misc_feature (33)..(622): Homolog of NCBI NO: 10947137 NR Description: ATP-binding cassette, sub-family F, member 2
  misc_feature (32)..(619): Homolog of NCBI NO: 6320874 NR Description: Hypothetical ORF; Yer036cp [Saccharomyces
  misc_feature (34)..(627): Homolog of NCBI NO: 18859989 NR Description: CG9281-PB [Drosophila melanogaster]
  misc_feature (33)..(622): Homolog of NCBI NO: 10947137 NR Description: ATP-binding cassette, sub-family F, member 2
  misc_feature (33)..(627): Homolog of NCBI NO: 28071305 NR Description: putative ABC transporter [Oryza sativa (japonica
  misc_feature (33)..(578): Homolog of NCBI NO: 7573600 NR Description: ABC transporter homolog [Populus nigra]
  misc_feature (33)..(624): Homolog of NCBI NO: 28436765 NR Description: Similar to ATP-binding cassette, sub-family F
  misc_feature (33)..(622): Homolog of NCBI NO: 28502799 NR Description: Similar to ATP-binding cassette, sub-family F
  misc_feature (33)..(622): Homolog of NCBI NO: 10179834 NR Description: iron inhibited ABC transporter 2 [Homo sapiens]
  misc_feature (33)..(622): Homolog of NCBI NO: 27881506 NR Description: ATP-binding cassette, sub-family F, member 2
  misc_feature (37)..(622): Homolog of NCBI NO: 27707592 NR Description: similar to ATP-binding cassette, sub-family F,
  misc_feature (33)..(622): Homolog of NCBI NO: 10179834 NR Description: iron inhibited ABC transporter 2 [Homo sapiens]
  misc_feature (33)..(622): Homolog of NCBI NO: 28502799 NR Description: Similar to ATP-binding cassette, sub-family F
  misc_feature (33)..(624): Homolog of NCBI NO: 28436765 NR Description: Similar to ATP-binding cassette, sub-family F
  misc_feature (33)..(578): Homolog of NCBI NO: 7573600 NR Description: ABC transporter homolog [Populus nigra]
  misc_feature (33)..(627): Homolog of NCBI NO: 28071305 NR Description: putative ABC transporter [Oryza sativa (japonica

SEQ ID NO: 40435 - protein, 595 aa, Arabidopsis thaliana; identical to SEQ ID NO: 29544
  peptide (1)..(595): Ceres Seq. ID no. 13497308
  misc_feature (94)..(285): Pfam Name: ABC transporter Pfam Description: ABC transporter
  misc_feature (94)..(285): Pfam Name: ABC transporter Pfam Description: ABC transporter
  misc_feature (1)..(587): Homolog of NCBI NO: 6320874 NR Description: Hypothetical ORF; Yer036cp [Saccharomyces
  misc_feature (5)..(590): Homolog of NCBI NO: 27707592 NR Description: similar to ATP-binding cassette, sub-family F,
  misc_feature (2)..(595): Homolog of NCBI NO: 18859989 NR Description: CG9281-PB [Drosophila melanogaster]
  misc_feature (1)..(590): Homolog of NCBI NO: 27881506 NR Description: ATP-binding cassette, sub-family F, member 2
  misc_feature (1)..(590): Homolog of NCBI NO: 10947137 NR Description: ATP-binding cassette, sub-family F, member 2
  misc_feature (1)..(587): Homolog of NCBI NO: 6320874 NR Description: Hypothetical ORF; Yer036cp [Saccharomyces
  misc_feature (2)..(595): Homolog of NCBI NO: 18859989 NR Description: CG9281-PB [Drosophila melanogaster]
  misc_feature (1)..(590): Homolog of NCBI NO: 10947137 NR Description: ATP-binding cassette, sub-family F, member 2
  misc_feature (1)..(595): Homolog of NCBI NO: 28071305 NR Description: putative ABC transporter [Oryza sativa (japonica
  misc_feature (1)..(546): Homolog of NCBI NO: 7573600 NR Description: ABC transporter homolog [Populus nigra]
  misc_feature (1)..(592): Homolog of NCBI NO: 28436765 NR Description: Similar to ATP-binding cassette, sub-family F
  misc_feature (1)..(590): Homolog of NCBI NO: 28502799 NR Description: Similar to ATP-binding cassette, sub-family F
  misc_feature (1)..(590): Homolog of NCBI NO: 10179834 NR Description: iron inhibited ABC transporter 2 [Homo sapiens]
  misc_feature (1)..(590): Homolog of NCBI NO: 27881506 NR Description: ATP-binding cassette, sub-family F, member 2
  misc_feature (5)..(590): Homolog of NCBI NO: 27707592 NR Description: similar to ATP-binding cassette, sub-family F,
  misc_feature (1)..(590): Homolog of NCBI NO: 10179834 NR Description: iron inhibited ABC transporter 2 [Homo sapiens]
  misc_feature (1)..(590): Homolog of NCBI NO: 28502799 NR Description: Similar to ATP-binding cassette, sub-family F
  misc_feature (1)..(592): Homolog of NCBI NO: 28436765 NR Description: Similar to ATP-binding cassette, sub-family F
  misc_feature (1)..(546): Homolog of NCBI NO: 7573600 NR Description: ABC transporter homolog [Populus nigra]
  misc_feature (1)..(595): Homolog of NCBI NO: 28071305 NR Description: putative ABC transporter [Oryza sativa (japonica

SEQ ID NO: 40436 - protein, 508 aa, Arabidopsis thaliana; identical to SEQ ID NO: 29545
  peptide (1)..(508): Ceres Seq. ID no. 13497309
  misc_feature (7)..(198): Pfam Name: ABC transporter Pfam Description: ABC transporter
  misc_feature (7)..(198): Pfam Name: ABC transporter Pfam Description: ABC transporter
  misc_feature (1)..(500): Homolog of NCBI NO: 6320874 NR Description: Hypothetical ORF; Yer036cp [Saccharomyces
  misc_feature (1)..(503): Homolog of NCBI NO: 27707592 NR Description: similar to ATP-binding cassette, sub-family F,
  misc_feature (1)..(508): Homolog of NCBI NO: 18859989 NR Description: CG9281-PB [Drosophila melanogaster]
  misc_feature (1)..(503): Homolog of NCBI NO: 27881506 NR Description: ATP-binding cassette, sub-family F, member 2
  misc_feature (1)..(503): Homolog of NCBI NO: 10947137 NR Description: ATP-binding cassette, sub-family F, member 2
  misc_feature (1)..(500): Homolog of NCBI NO: 6320874 NR Description: Hypothetical ORF; Yer036cp [Saccharomyces
  misc_feature (1)..(508): Homolog of NCBI NO: 18859989 NR Description: CG9281-PB [Drosophila melanogaster]
  misc_feature (1)..(503): Homolog of NCBI NO: 10947137 NR Description: ATP-binding cassette, sub-family F, member 2
  misc_feature (1)..(508): Homolog of NCBI NO: 28071305 NR Description: putative ABC transporter [Oryza sativa (japonica
  misc_feature (1)..(459): Homolog of NCBI NO: 7573600 NR Description: ABC transporter homolog [Populus nigra]
  misc_feature (1)..(505): Homolog of NCBI NO: 28436765 NR Description: Similar to ATP-binding cassette, sub-family F
  misc_feature (1)..(503): Homolog of NCBI NO: 28502799 NR Description: Similar to ATP-binding cassette, sub-family F
  misc_feature (1)..(503): Homolog of NCBI NO: 10179834 NR Description: iron inhibited ABC transporter 2 [Homo sapiens]
  misc_feature (1)..(503): Homolog of NCBI NO: 27881506 NR Description: ATP-binding cassette, sub-family F, member 2
  misc_feature (1)..(503): Homolog of NCBI NO: 27707592 NR Description: similar to ATP-binding cassette, sub-family F,
  misc_feature (1)..(503): Homolog of NCBI NO: 10179834 NR Description: iron inhibited ABC transporter 2 [Homo sapiens]
  misc_feature (1)..(503): Homolog of NCBI NO: 28502799 NR Description: Similar to ATP-binding cassette, sub-family F
  misc_feature (1)..(505): Homolog of NCBI NO: 28436765 NR Description: Similar to ATP-binding cassette, sub-family F
  misc_feature (1)..(459): Homolog of NCBI NO: 7573600 NR Description: ABC transporter homolog [Populus nigra]
  misc_feature (1)..(508): Homolog of NCBI NO: 28071305 NR Description: putative ABC transporter [Oryza sativa (japonica

SEQ ID NO: 40437 - DNA, 1153 bp, Arabidopsis thaliana
  misc_feature (1)..(1153): Ceres Seq. ID no. 12482574
  misc_feature: MA Experiment ID: 108434 Result: Up-regulated in Transcription
  misc_feature: MA Experiment 108434 PARAMETER Experiment Name: At_Root_Tips_cDNA_P Parameter: Tissue Value: Root Tips
  misc_feature: MA Experiment ID: 108595 Result: Down-regulated in Transcription
  misc_feature: MA Experiment 108595 PARAMETER Experiment Name: At_Ler-pi_Ovule_cDNA_P Parameter: Plant Line Value: null
  misc_feature: MA Experiment ID: 20000184 Result: Up-regulated in Transcription
  misc_feature: MA Experiment 20000184 PARAMETER Experiment Name: At_Shoots__P Parameter: Age (day) Value: 7
  misc_feature: MA Experiment 20000184 PARAMETER Experiment Name: At_Shoots__P Parameter: Tissue Value: Shoots vs. Whole Plant
aacaatatttattataaagaaggctgagatgcagaccccatcgatggctgcctccactacttcctactacccaatccccaaaagcttccttctttctcctcctcgtcacaaacgaaaccctaatctcatctcctgctccaccaaacccatttgctctcctcctcctccttcgtcttcttcttcgtctcctctgcaaacgacgacaacccatcgaagccaaaagcagaatctgcgtctacccacgtttgaagattcgtttcttctttaccaatttagctctcccaccgaagacccaggattctctaaccggatcccggaacaattcgacggagagccacgcgaattggtgttgccgagagtagaagacaacaacaaagggttggcaatttcgtcgaacatgtggtgggcagatctgaaagcggctcttgggcaacgaatcaatattgagggtatcgtttcttcggtctccgttgttgttaaagatcgtcaatttgttcttccgcatgtttctgtgaaagatttaagatacattgattgggaagtgctgaagagaaagggcttcaaaggtgtagtgtttgataaagataacactcttacggctccttattctctagcgatttggccaccattacgtccttccattgagcggtgtaaagccgtttttggccatgacatcgccgtgtttagcaattccgctgggctcacggaatacgatcatgatgattcgaaagctaaagcattggaggctgaaataggaattagagtgttgaggcatagagtgaagaagcctgcaggaactgctgaagaagttgagaaacactttggttgcacatcttcagagctaatcatggtgggtgatcgacctttcacagatatcgtttacgggaacagaaacggatttctaaccgtattaaccgagcctttgagtcgagctgaggagcctttcattgttagacaggtgaggagattagagttggccttgttgaaacgttggttgagaaaaggtttgaagcctgtggatcatagtttggtatcagatataacacagtttgttaaagttccatcagatttgtaagaaggattctcattttgctattgcaacaacaactttgttccttgttttttttttgtaattgaaattttgagtttgggt

SEQ ID NO: 40438 - protein, 357 aa, Arabidopsis thaliana
  peptide (1)..(357): Ceres Seq. ID no. 12482575
  misc_feature (238)..(308): Pfam Name: haloacid dehalogenase-like hydrolase Pfam Description: haloacid dehalogenase-like hydrolase
  misc_feature (146)..(299): Homolog of NCBI NO: 11282546 NR Description: hypothetical protein 15E6.20 [imported] -
  misc_feature (146)..(299): Homolog of NCBI NO: 6321892 NR Description: Hypothetical ORF; Yhr100cp [Saccharomyces
  misc_feature (165)..(334): Homolog of NCBI NO: 15613885 NR Description: BH1322~unknown conserved protein [Bacillus
  misc_feature (162)..(335): Homolog of NCBI NO: 21283278 NR Description: conserved hypothetical protein
  misc_feature (162)..(335): Homolog of NCBI NO: 15924588 NR Description: conserved hypothetical protein
  misc_feature (162)..(335): Homolog of NCBI NO: 16079622 NR Description: similar to hypothetical proteins [Bacillus
  misc_feature (260)..(352): Homolog of NCBI NO: 34908890 NR Description: P0699H05.17 [Oryza sativa (japonica
  misc_feature (134)..(252): Homolog of NCBI NO: 34908890 NR Description: P0699H05.17 [Oryza sativa (japonica
  misc_feature (15)..(357): Homolog of NCBI NO: 28466953 NR Description: At3g58830 [Arabidopsis thaliana]
  misc_feature (10)..(357): Homolog of NCBI NO: 15231583 NR Description: putative protein; protein id: At3g58830.1
TIFIIKKAEMQTPSMAASTTSYYPIPKSFLLSPPRHKRNPNLISCSTKPICSPPPPSSSSSSPLQTTTTHRSQKQNLRLPTFEDSFLLYQFSSPTEDPGFSNRIPEQFDGEPRELVLPRVEDNNKGLAISSNMWWADLKAALGQRINIEGIVSSVSVVVKDRQFVLPHVSVKDLRYIDWEVLKRKGFKGVVFDKDNTLTAPYSLAIWPPLRPSIERCKAVFGHDIAVFSNSAGLTEYDHDDSKAKALEAEIGIRVLRHRVKKPAGTAEEVEKHFGCTSSELIMVGDRPFTDIVYGNRNGFLTVLTEPLSRAEEPFIVRQVRRLELALLKRWLRKGLKPVDHSLVSDITQFVKVPSDL

SEQ ID NO: 40439 - protein, 348 aa, Arabidopsis thaliana
  peptide (1)..(348): Ceres Seq. ID no. 12482576
  misc_feature (229)..(299): Pfam Name: haloacid dehalogenase-like hydrolase Pfam Description: haloacid dehalogenase-like hydrolase
  misc_feature (137)..(290): Homolog of NCBI NO: 11282546 NR Description: hypothetical protein 15E6.20 [imported] -
  misc_feature (137)..(290): Homolog of NCBI NO: 6321892 NR Description: Hypothetical ORF; Yhr100cp [Saccharomyces
  misc_feature (156)..(325): Homolog of NCBI NO: 15613885 NR Description: BH1322~unknown conserved protein [Bacillus
  misc_feature (153)..(326): Homolog of NCBI NO: 21283278 NR Description: conserved hypothetical protein
  misc_feature (153)..(326): Homolog of NCBI NO: 15924588 NR Description: conserved hypothetical protein
  misc_feature (153)..(326): Homolog of NCBI NO: 16079622 NR Description: similar to hypothetical proteins [Bacillus
  misc_feature (251)..(343): Homolog of NCBI NO: 34908890 NR Description: P0699H05.17 [Oryza sativa (japonica
  misc_feature (125)..(243): Homolog of NCBI NO: 34908890 NR Description: P0699H05.17 [Oryza sativa (japonica
  misc_feature (6)..(348): Homolog of NCBI NO: 28466953 NR Description: At3g58830 [Arabidopsis thaliana]
  misc_feature (1)..(348): Homolog of NCBI NO: 15231583 NR Description: putative protein; protein id: At3g58830.1
MQTPSMAASTTSYYPIPKSFLLSPPRHKRNPNLISCSTKPICSPPPPSSSSSSPLQTTTTHRSQKQNLRLPTFEDSFLLYQFSSPTEDPGFSNRIPEQFDGEPRELVLPRVEDNNKGLAISSNMWWADLKAALGQRINIEGIVSSVSVVVKDRQFVLPHVSVKDLRYIDWEVLKRKGFKGVVFDKDNTLTAPYSLAIWPPLRPSIERCKAVFGHDIAVFSNSAGLTEYDHDDSKAKALEAEIGIRVLRHRVKKPAGTAEEVEKHFGCTSSELIMVGDRPFTDIVYGNRNGFLTVLTEPLSRAEEPFIVRQVRRLELALLKRWLRKGLKPVDHSLVSDITQFVKVPSDL

SEQ ID NO: 40440 - protein, 343 aa, Arabidopsis thaliana
  peptide (1)..(343): Ceres Seq. ID no. 12482577
  misc_feature (224)..(294): Pfam Name: haloacid dehalogenase-like hydrolase Pfam Description: haloacid dehalogenase-like hydrolase
  misc_feature (132)..(285): Homolog of NCBI NO: 11282546 NR Description: hypothetical protein 15E6.20 [imported] -
  misc_feature (132)..(285): Homolog of NCBI NO: 6321892 NR Description: Hypothetical ORF; Yhr100cp [Saccharomyces
  misc_feature (151)..(320): Homolog of NCBI NO: 15613885 NR Description: BH1322~unknown conserved protein [Bacillus
  misc_feature (148)..(321): Homolog of NCBI NO: 21283278 NR Description: conserved hypothetical protein
  misc_feature (148)..(321): Homolog of NCBI NO: 15924588 NR Description: conserved hypothetical protein
  misc_feature (148)..(321): Homolog of NCBI NO: 16079622 NR Description: similar to hypothetical proteins [Bacillus
  misc_feature (246)..(338): Homolog of NCBI NO: 34908890 NR Description: P0699H05.17 [Oryza sativa (japonica
  misc_feature (120)..(238): Homolog of NCBI NO: 34908890 NR Description: P0699H05.17 [Oryza sativa (japonica
  misc_feature (1)..(343): Homolog of NCBI NO: 28466953 NR Description: At3g58830 [Arabidopsis thaliana]
  misc_feature (1)..(343): Homolog of NCBI NO: 15231583 NR Description: putative protein; protein id: At3g58830.1
MAASTTSYYPIPKSFLLSPPRHKRNPNLISCSTKPICSPPPPSSSSSSPLQTTTTHRSQKQNLRLPTFEDSFLLYQFSSPTEDPGFSNRIPEQFDGEPRELVLPRVEDNNKGLAISSNMWWADLKAALGQRINIEGIVSSVSVVVKDRQFVLPHVSVKDLRYIDWEVLKRKGFKGVVFDKDNTLTAPYSLAIWPPLRPSIERCKAVFGHDIAVFSNSAGLTEYDHDDSKAKALEAEIGIRVLRHRVKKPAGTAEEVEKHFGCTSSELIMVGDRPFTDIVYGNRNGFLTVLTEPLSRAEEPFIVRQVRRLELALLKRWLRKGLKPVDHSLVSDITQFVKVPSDL

SEQ ID NO: 40441 - DNA, 1227 bp, Arabidopsis thaliana
  misc_feature (1)..(1227): Ceres Seq. ID no. 12395366
  misc_feature: MA Experiment ID: 108434 Result: Down-regulated in Transcription
  misc_feature: MA Experiment 108434 PARAMETER Experiment Name: At_Root_Tips_cDNA_P Parameter: Tissue Value: Root Tips
  misc_feature: MA Experiment ID: 108461 Result: Down-regulated in Transcription
  misc_feature: MA Experiment 108461 PARAMETER Experiment Name: At_Germinating_Seeds_cDNA_P Parameter: Age (day) Value: 1 vs. 0
  misc_feature: MA Experiment 108461 PARAMETER Experiment Name: At_Germinating_Seeds_cDNA_P Parameter: Tissue Value: Germinating Seeds
  misc_feature: MA Experiment ID: 108462 Result: Down-regulated in Transcription
  misc_feature: MA Experiment 108462 PARAMETER Experiment Name: At_Germinating_Seeds_cDNA_P Parameter: Age (day) Value: 2 vs. 0
  misc_feature: MA Experiment 108462 PARAMETER Experiment Name: At_Germinating_Seeds_cDNA_P Parameter: Tissue Value: Germinating Seeds
  misc_feature: MA Experiment ID: 108464 Result: Down-regulated in Transcription
  misc_feature: MA Experiment 108464 PARAMETER Experiment Name: At_Germinating_Seeds_cDNA_P Parameter: Age (day) Value: 4 vs. 0
  misc_feature: MA Experiment 108464 PARAMETER Experiment Name: At_Germinating_Seeds_cDNA_P Parameter: Tissue Value: Germinating Seeds
  misc_feature: MA Experiment ID: 108473 Result: Up-regulated in Transcription
  misc_feature: MA Experiment 108473 PARAMETER Experiment Name: At_Drought_Flowers_cDNA_P Parameter: Timepoint (hr) Value: 7 d
  misc_feature: MA Experiment 108473 PARAMETER Experiment Name: At_Drought_Flowers_cDNA_P Parameter: Tissue Value: Flower
  misc_feature: MA Experiment 108473 PARAMETER Experiment Name: At_Drought_Flowers_cDNA_P Parameter: Treatment Value: Drought vs. No Drought
  misc_feature: MA Experiment ID: 108488 Result: Down-regulated in Transcription
  misc_feature: MA Experiment ID: 108561 Result: Up-regulated in Transcription
  misc_feature: MA Experiment 108561 PARAMETER Experiment Name: At_100uM_ABA_cDNA_P Parameter: Timepoint (hr) Value: 6
  misc_feature: MA Experiment 108561 PARAMETER Experiment Name: At_100uM_ABA_cDNA_P Parameter: Tissue Value: Aerial
  misc_feature: MA Experiment 108561 PARAMETER Experiment Name: At_100uM_ABA_cDNA_P Parameter: Treatment Value: 100uM ABA vs. No Treatment
  misc_feature: MA Experiment ID: 108572 Result: Up-regulated in Transcription
  misc_feature: MA Experiment 108572 PARAMETER Experiment Name: At_Drought_cDNA_P Parameter: Timepoint (hr) Value: 1
  misc_feature: MA Experiment 108572 PARAMETER Experiment Name: At_Drought_cDNA_P Parameter: Tissue Value: Aerial
  misc_feature: MA Experiment 108572 PARAMETER Experiment Name: At_Drought_cDNA_P Parameter: Treatment Value: Drought vs. No Drought
  misc_feature: MA Experiment ID: 108573 Result: Up-regulated in Transcription
  misc_feature: MA Experiment 108573 PARAMETER Experiment Name: At_Drought_cDNA_P Parameter: Timepoint (hr) Value: 6
  misc_feature: MA Experiment 108573 PARAMETER Experiment Name: At_Drought_cDNA_P Parameter: Tissue Value: Aerial
  misc_feature: MA Experiment 108573 PARAMETER Experiment Name: At_Drought_cDNA_P Parameter: Treatment Value: Drought vs. No Drought
  misc_feature: MA Experiment ID: 108577 Result: Up-regulated in Transcription
  misc_feature: MA Experiment 108577 PARAMETER Experiment Name: At_42deg_Heat_cDNA_P Parameter: Temperature (deg C) Value: 42 vs. 22
  misc_feature: MA Experiment 108577 PARAMETER Experiment Name: At_42deg_Heat_cDNA_P Parameter: Timepoint (hr) Value: 6
  misc_feature: MA Experiment 108577 PARAMETER Experiment Name: At_42deg_Heat_cDNA_P Parameter: Tissue Value: Aerial
  misc_feature: MA Experiment ID: 108579 Result: Up-regulated in Transcription
  misc_feature: MA Experiment 108579 PARAMETER Experiment Name: At_4deg_Cold_cDNA_P Parameter: Temperature (deg C) Value: 4 vs. 22
  misc_feature: MA Experiment 108579 PARAMETER Experiment Name: At_4deg_Cold_cDNA_P Parameter: Timepoint (hr) Value: 6
  misc_feature: MA Experiment 108579 PARAMETER Experiment Name: At_4deg_Cold_cDNA_P Parameter: Tissue Value: Aerial
  misc_feature: MA Experiment ID: 108585 Result: Up-regulated in Transcription
  misc_feature: MA Experiment 108585 PARAMETER Experiment Name: At_5mM_NaNP_cDNA_P Parameter: Timepoint (hr) Value: 6
  misc_feature: MA Experiment 108585 PARAMETER Experiment Name: At_5mM_NaNP_cDNA_P Parameter: Tissue Value: Aerial
  misc_feature: MA Experiment 108585 PARAMETER Experiment Name: At_5mM_NaNP_cDNA_P Parameter: Treatment Value: null
  misc_feature: MA Experiment ID: 108594 Result: Up-regulated in Transcription
  misc_feature: MA Experiment 108594 PARAMETER Experiment Name: At_Ler-rhl_Root_cDNA_P Parameter: Plant Line Value: null
  misc_feature: MA Experiment ID: 108595 Result: Up-regulated in Transcription
  misc_feature: MA Experiment 108595 PARAMETER Experiment Name: At_Ler-pi_Ovule_cDNA_P Parameter: Plant Line Value: null
  misc_feature: MA Experiment ID: 108667 Result: Up-regulated in Transcription
  misc_feature: MA Experiment 108667 PARAMETER Experiment Name: At_2mM_SA_cDNA_P Parameter: Plant Line Value: WS
  misc_feature: MA Experiment 108667 PARAMETER Experiment Name: At_2mM_SA_cDNA_P Parameter: Timepoint (hr) Value: 1
  misc_feature: MA Experiment 108667 PARAMETER Experiment Name: At_2mM_SA_cDNA_P Parameter: Treatment Value: 2mM SA vs. No Treatment
  misc_feature: MA Experiment ID: 20000069 Result: Up-regulated in Transcription
  misc_feature: MA Experiment 20000069 PARAMETER Experiment Name: At_100uM_ABA_Mutants_cDNA_P Parameter: Plant Line Value: CS23
  misc_feature: MA Experiment 20000069 PARAMETER Experiment Name: At_100uM_ABA_Mutants_cDNA_P Parameter: Timepoint (hr) Value: 6
  misc_feature: MA Experiment 20000069 PARAMETER Experiment Name: At_100uM_ABA_Mutants_cDNA_P Parameter: Tissue Value: Aerial
  misc_feature: MA Experiment 20000069 PARAMETER Experiment Name: At_100uM_ABA_Mutants_cDNA_P Parameter: Treatment Value: 100uM ABA vs. No Treatment
  misc_feature: MA Experiment ID: 20000070 Result: Up-regulated in Transcription
  misc_feature: MA Experiment 20000070 PARAMETER Experiment Name: At_100uM_ABA_Mutants_cDNA_P Parameter: Plant Line Value: CS24
  misc_feature: MA Experiment 20000070 PARAMETER Experiment Name: At_100uM_ABA_Mutants_cDNA_P Parameter: Timepoint (hr) Value: 6
  misc_feature: MA Experiment 20000070 PARAMETER Experiment Name: At_100uM_ABA_Mutants_cDNA_P Parameter: Tissue Value: Aerial
  misc_feature: MA Experiment 20000070 PARAMETER Experiment Name: At_100uM_ABA_Mutants_cDNA_P Parameter: Treatment Value: 100uM ABA vs. No Treatment
  misc_feature: MA Experiment ID: 20000071 Result: Up-regulated in Transcription
  misc_feature: MA Experiment 20000071 PARAMETER Experiment Name: At_100uM_ABA_Mutants_cDNA_P Parameter: Plant Line Value: CS8104
  misc_feature: MA Experiment 20000071 PARAMETER Experiment Name: At_100uM_ABA_Mutants_cDNA_P Parameter: Timepoint (hr) Value: 6
  misc_feature: MA Experiment 20000071 PARAMETER Experiment Name: At_100uM_ABA_Mutants_cDNA_P Parameter: Tissue Value: Aerial
  misc_feature: MA Experiment 20000071 PARAMETER Experiment Name: At_100uM_ABA_Mutants_cDNA_P Parameter: Treatment Value: 100uM ABA vs. No Treatment
  misc_feature: MA Experiment ID: 20000072 Result: Up-regulated in Transcription
  misc_feature: MA Experiment 20000072 PARAMETER Experiment Name: At_100uM_ABA_Mutants_cDNA_P Parameter: Plant Line Value: CS8105
  misc_feature: MA Experiment 20000072 PARAMETER Experiment Name: At_100uM_ABA_Mutants_cDNA_P Parameter: Timepoint (hr) Value: 6
  misc_feature: MA Experiment 20000072 PARAMETER Experiment Name: At_100uM_ABA_Mutants_cDNA_P Parameter: Tissue Value: Aerial
  misc_feature: MA Experiment 20000072 PARAMETER Experiment Name: At_100uM_ABA_Mutants_cDNA_P Parameter: Treatment Value: 100uM ABA vs. No Treatment
  misc_feature: MA Experiment ID: 20000086 Result: Up-regulated in Transcription
  misc_feature: MA Experiment 20000086 PARAMETER Experiment Name: At_100uM_ABA_Mutants_cDNA_P Parameter: Plant Line Value: CS22
  misc_feature: MA Experiment 20000086 PARAMETER Experiment Name: At_100uM_ABA_Mutants_cDNA_P Parameter: Timepoint (hr) Value: 6
  misc_feature: MA Experiment 20000086 PARAMETER Experiment Name: At_100uM_ABA_Mutants_cDNA_P Parameter: Tissue Value: Aerial
  misc_feature: MA Experiment 20000086 PARAMETER Experiment Name: At_100uM_ABA_Mutants_cDNA_P Parameter: Treatment Value: 100uM ABA vs. No Treatment
  misc_feature: MA Experiment ID: 20000087 Result: Up-regulated in Transcription
  misc_feature: MA Experiment 20000087 PARAMETER Experiment Name: At_100uM_ABA_Mutants_cDNA_P Parameter: Plant Line Value: WS
  misc_feature: MA Experiment 20000087 PARAMETER Experiment Name: At_100uM_ABA_Mutants_cDNA_P Parameter: Timepoint (hr) Value: 6
  misc_feature: MA Experiment 20000087 PARAMETER Experiment Name: At_100uM_ABA_Mutants_cDNA_P Parameter: Tissue Value: Aerial
  misc_feature: MA Experiment 20000087 PARAMETER Experiment Name: At_100uM_ABA_Mutants_cDNA_P Parameter: Treatment Value: 100uM ABA vs. No Treatment
  misc_feature: MA Experiment ID: 20000088 Result: Up-regulated in Transcription
  misc_feature: MA Experiment 20000088 PARAMETER Experiment Name: At_100uM_ABA_Mutants_cDNA_P Parameter: Plant Line Value: Landsberg
  misc_feature: MA Experiment 20000088 PARAMETER Experiment Name: At_100uM_ABA_Mutants_cDNA_P Parameter: Timepoint (hr) Value: 6
  misc_feature: MA Experiment 20000088 PARAMETER Experiment Name: At_100uM_ABA_Mutants_cDNA_P Parameter: Tissue Value: Aerial
  misc_feature: MA Experiment 20000088 PARAMETER Experiment Name: At_100uM_ABA_Mutants_cDNA_P Parameter: Treatment Value: 100uM ABA vs. No Treatment
  misc_feature: MA Experiment ID: 20000090 Result: Up-regulated in Transcription
  misc_feature: MA Experiment ID: 20000111 Result: Up-regulated in Transcription
  misc_feature: MA Experiment 20000111 PARAMETER Experiment Name: At_42deg_Heat_cDNA_P Parameter: Temperature (deg C) Value: 42 vs. 22
  misc_feature: MA Experiment 20000111 PARAMETER Experiment Name: At_42deg_Heat_cDNA_P Parameter: Timepoint (hr) Value: 6
  misc_feature: MA Experiment 20000111 PARAMETER Experiment Name: At_42deg_Heat_cDNA_P Parameter: Tissue Value: Aerial
  misc_feature: MA Experiment ID: 20000112 Result: Up-regulated in Transcription
  misc_feature: MA Experiment 20000112 PARAMETER Experiment Name: At_42deg_Heat_cDNA_P Parameter: Temperature (deg C) Value: 42 vs. 22
  misc_feature: MA Experiment 20000112 PARAMETER Experiment Name: At_42deg_Heat_cDNA_P Parameter: Timepoint (hr) Value: 2
  misc_feature: MA Experiment 20000112 PARAMETER Experiment Name: At_42deg_Heat_cDNA_P Parameter: Tissue Value: Aerial
  misc_feature: MA Experiment ID: 20000113 Result: Up-regulated in Transcription
  misc_feature: MA Experiment 20000113 PARAMETER Experiment Name: At_42deg_Heat_cDNA_P Parameter: Temperature (deg C) Value: 42 vs. 22
  misc_feature: MA Experiment 20000113 PARAMETER Experiment Name: At_42deg_Heat_cDNA_P Parameter: Timepoint (hr) Value: 8
  misc_feature: MA Experiment 20000113 PARAMETER Experiment Name: At_42deg_Heat_cDNA_P Parameter: Tissue Value: Aerial
  misc_feature: MA Experiment ID: 20000117 Result: Up-regulated in Transcription
  misc_feature: MA Experiment 20000117 PARAMETER Experiment Name: At_100uM_ABA_Mutants_cDNA_P Parameter: Plant Line Value: Columbia
  misc_feature: MA Experiment 20000117 PARAMETER Experiment Name: At_100uM_ABA_Mutants_cDNA_P Parameter: Timepoint (hr) Value: 6
  misc_feature: MA Experiment 20000117 PARAMETER Experiment Name: At_100uM_ABA_Mutants_cDNA_P Parameter: Tissue Value: Aerial
  misc_feature: MA Experiment 20000117 PARAMETER Experiment Name: At_100uM_ABA_Mutants_cDNA_P Parameter: Treatment Value: 100uM ABA vs. No Treatment
  misc_feature: MA Experiment ID: 20000171 Result: Up-regulated in Transcription
  misc_feature: MA Experiment 20000171 PARAMETER Experiment Name: At_42deg_Heat_P Parameter: Age (day) Value: 14
  misc_feature: MA Experiment 20000171 PARAMETER Experiment Name: At_42deg_Heat_P Parameter: Organism Value: A. thaliana
  misc_feature: MA Experiment 20000171 PARAMETER Experiment Name: At_42deg_Heat_P Parameter: Plant Line Value: WS
  misc_feature: MA Experiment 20000171 PARAMETER Experiment Name: At_42deg_Heat_P Parameter: Temperature (deg C) Value: 42 vs. 22
  misc_feature: MA Experiment 20000171 PARAMETER Experiment Name: At_42deg_Heat_P Parameter: Timepoint (hr) Value: 1
  misc_feature: MA Experiment 20000171 PARAMETER Experiment Name: At_42deg_Heat_P Parameter: Tissue Value: Aerial
  misc_feature: MA Experiment ID: 20000179 Result: Down-regulated in Transcription
  misc_feature: MA Experiment 20000179 PARAMETER Experiment Name: At_Germinating_Seeds_P Parameter: Age (hr) Value: 6 vs. 0
  misc_feature: MA Experiment 20000179 PARAMETER Experiment Name: At_Germinating_Seeds_P Parameter: Tissue Value: Germinating Seeds
  misc_feature: MA Experiment ID: 20000180 Result: Down-regulated in Transcription
  misc_feature: MA Experiment 20000180 PARAMETER Experiment Name: At_Germinating_Seeds_P Parameter: Age (hr) Value: 24 vs. 0
  misc_feature: MA Experiment 20000180 PARAMETER Experiment Name: At_Germinating_Seeds_P Parameter: Tissue Value: Germinating Seeds
  misc_feature: MA Experiment ID: 20000184 Result: Down-regulated in Transcription
  misc_feature: MA Experiment 20000184 PARAMETER Experiment Name: At_Shoots__P Parameter: Age (day) Value: 7
  misc_feature: MA Experiment 20000184 PARAMETER Experiment Name: At_Shoots__P Parameter: Tissue Value: Shoots vs. Whole Plant
  misc_feature: MA Experiment ID: 20000185 Result: Down-regulated in Transcription
  misc_feature: MA Experiment 20000185 PARAMETER Experiment Name: At_Roots__P Parameter: Age (day) Value: 7 vs. 21
  misc_feature: MA Experiment 20000185 PARAMETER Experiment Name: At_Roots__P Parameter: Organism Value: A. thaliana
  misc_feature: MA Experiment 20000185 PARAMETER Experiment Name: At_Roots__P Parameter: Tissue Value: Roots vs. Whole Plant
  misc_feature: MA Experiment ID: 20000224 Result: Down-regulated in Transcription
  misc_feature: MA Experiment ID: 20000227 Result: Down-regulated in Transcription
  misc_feature: MA Experiment 20000227 PARAMETER Experiment Name: At_Root-Tips-vs-Tops_P Parameter: Tissue Value: Root Tips vs. Root Tops
  misc_feature: MA Experiment ID: 20000234 Result: Down-regulated in Transcription
  misc_feature: MA Experiment 20000234 PARAMETER Experiment Name: At_Siliques_P Parameter: Age (day) Value: 21
  misc_feature: MA Experiment 20000234 PARAMETER Experiment Name: At_Siliques_P Parameter: Organism Value: A. thaliana
  misc_feature: MA Experiment 20000234 PARAMETER Experiment Name: At_Siliques_P Parameter: Plant Line Value: WS
  misc_feature: MA Experiment 20000234 PARAMETER Experiment Name: At_Siliques_P Parameter: Tissue Value: Less Than 5mm Siliques vs. Whole Plant
  misc_feature: MA Experiment ID: 20000235 Result: Down-regulated in Transcription
  misc_feature: MA Experiment 20000235 PARAMETER Experiment Name: At_Siliques_P Parameter: Age (day) Value: 21
  misc_feature: MA Experiment 20000235 PARAMETER Experiment Name: At_Siliques_P Parameter: Organism Value: A. thaliana
  misc_feature: MA Experiment 20000235 PARAMETER Experiment Name: At_Siliques_P Parameter: Plant Line Value: WS
  misc_feature: MA Experiment 20000235 PARAMETER Experiment Name: At_Siliques_P Parameter: Tissue Value: 5-10mm Siliques vs. Whole Plant
  misc_feature: MA Experiment ID: 20000264 Result: Down-regulated in Transcription
  misc_feature: MA Experiment 20000264 PARAMETER Experiment Name: At_Open_Flower_P Parameter: Age (day) Value: 21
  misc_feature: MA Experiment 20000264 PARAMETER Experiment Name: At_Open_Flower_P Parameter: Plant Line Value: WS
  misc_feature: MA Experiment 20000264 PARAMETER Experiment Name: At_Open_Flower_P Parameter: Tissue Value: Open Flower vs. Whole Plant
  misc_feature: MA Experiment ID: 20000265 Result: Down-regulated in Transcription
  misc_feature: MA Experiment 20000265 PARAMETER Experiment Name: At_Open_Flower_P Parameter: Age (day) Value: 21
  misc_feature: MA Experiment 20000265 PARAMETER Experiment Name: At_Open_Flower_P Parameter: Plant Line Value: WS
  misc_feature: MA Experiment 20000265 PARAMETER Experiment Name: At_Open_Flower_P Parameter: Tissue Value: Closed Flower vs. Whole Plant
  misc_feature: MA Experiment ID: 20000267 Result: Up-regulated in Transcription
  misc_feature: MA Experiment 20000267 PARAMETER Experiment Name: At_Drought_P Parameter: Age (day) Value: 7
  misc_feature: MA Experiment 20000267 PARAMETER Experiment Name: At_Drought_P Parameter: Organism Value: A. thaliana
  misc_feature: MA Experiment 20000267 PARAMETER Experiment Name: At_Drought_P Parameter: Plant Line Value: WS
  misc_feature: MA Experiment 20000267 PARAMETER Experiment Name: At_Drought_P Parameter: Timepoint (hr) Value: 6
  misc_feature: MA Experiment 20000267 PARAMETER Experiment Name: At_Drought_P Parameter: Tissue Value: Whole Plant
  misc_feature: MA Experiment 20000267 PARAMETER Experiment Name: At_Drought_P Parameter: Treatment Value: Drought vs. No Drought
  misc_feature: MA Experiment ID: 20000269 Result: Down-regulated in Transcription
  misc_feature: MA Experiment 20000269 PARAMETER Experiment Name: At_1mM_KNO3_L-vs-H_Roots_P Parameter: Age (day) Value: 7,10,12
  misc_feature: MA Experiment 20000269 PARAMETER Experiment Name: At_1mM_KNO3_L-vs-H_Roots_P Parameter: Organism Value: A. thaliana
  misc_feature: MA Experiment 20000269 PARAMETER Experiment Name: At_1mM_KNO3_L-vs-H_Roots_P Parameter: Plant Line Value: WS
  misc_feature: MA Experiment 20000269 PARAMETER Experiment Name: At_1mM_KNO3_L-vs-H_Roots_P Parameter: Timepoint (day) Value: 7,10,12
  misc_feature: MA Experiment 20000269 PARAMETER Experiment Name: At_1mM_KNO3_L-vs-H_Roots_P Parameter: Tissue Value: Roots
  misc_feature: MA Experiment 20000269 PARAMETER Experiment Name: At_1mM_KNO3_L-vs-H_Roots_P Parameter: Treatment Value: 1mM KNO3 vs. 50mM KNO3
  misc_feature: MA Experiment ID: 20000286 Result: Down-regulated in Transcription
  misc_feature: MA Experiment 20000286 PARAMETER Experiment Name: At_Open_Flower_P Parameter: Age (day) Value: 21
  misc_feature: MA Experiment 20000286 PARAMETER Experiment Name: At_Open_Flower_P Parameter: Plant Line Value: WS
  misc_feature: MA Experiment 20000286 PARAMETER Experiment Name: At_Open_Flower_P Parameter: Tissue Value: Half Open vs. Whole Plant
  misc_feature: MA Experiment ID: 20000436 Result: Up-regulated in Transcription
  misc_feature: MA Experiment 20000436 PARAMETER Experiment Name: At_Drought_P Parameter: Age (day) Value: 7
  misc_feature: MA Experiment 20000436 PARAMETER Experiment Name: At_Drought_P Parameter: Organism Value: A. thaliana
  misc_feature: MA Experiment 20000436 PARAMETER Experiment Name: At_Drought_P Parameter: Plant Line Value: WS
  misc_feature: MA Experiment 20000436 PARAMETER Experiment Name: At_Drought_P Parameter: Timepoint (hr) Value: 12
  misc_feature: MA Experiment 20000436 PARAMETER Experiment Name: At_Drought_P Parameter: Tissue Value: Whole Plant
  misc_feature: MA Experiment 20000436 PARAMETER Experiment Name: At_Drought_P Parameter: Treatment Value: Drought vs. No Drought
  misc_feature: MA Experiment ID: 20000437 Result: Up-regulated in Transcription
  misc_feature: MA Experiment 20000437 PARAMETER Experiment Name: At_Drought_P Parameter: Age (day) Value: 8
  misc_feature: MA Experiment 20000437 PARAMETER Experiment Name: At_Drought_P Parameter: Organism Value: A. thaliana
  misc_feature: MA Experiment 20000437 PARAMETER Experiment Name: At_Drought_P Parameter: Plant Line Value: WS
  misc_feature: MA Experiment 20000437 PARAMETER Experiment Name: At_Drought_P Parameter: Timepoint (hr) Value: 24
  misc_feature: MA Experiment 20000437 PARAMETER Experiment Name: At_Drought_P Parameter: Tissue Value: Whole Plant
  misc_feature: MA Experiment 20000437 PARAMETER Experiment Name: At_Drought_P Parameter: Treatment Value: Drought vs. No Drought
  misc_feature: MA Experiment ID: 20000438 Result: Down-regulated in Transcription
  misc_feature: MA Experiment 20000438 PARAMETER Experiment Name: At_Shoots__P Parameter: Age (day) Value: 14
  misc_feature: MA Experiment 20000438 PARAMETER Experiment Name: At_Shoots__P Parameter: Tissue Value: Shoots vs. Whole Plant
  misc_feature: MA Experiment ID: 20000439 Result: Down-regulated in Transcription
  misc_feature: MA Experiment 20000439 PARAMETER Experiment Name: At_Roots__P Parameter: Age (day) Value: 14 vs. 21
  misc_feature: MA Experiment 20000439 PARAMETER Experiment Name: At_Roots__P Parameter: Organism Value: A. thaliana
  misc_feature: MA Experiment 20000439 PARAMETER Experiment Name: At_Roots__P Parameter: Tissue Value: Roots vs. Whole Plant
  misc_feature: MA Experiment ID: 20000451 Result: Down-regulated in Transcription
  misc_feature: MA Experiment 20000451 PARAMETER Experiment Name: At_CS6879_Shoots-Roots_P Parameter: Age (day) Value: 14
  misc_feature: MA Experiment 20000451 PARAMETER Experiment Name: At_CS6879_Shoots-Roots_P Parameter: Organism Value: A. thaliana
  misc_feature: MA Experiment 20000451 PARAMETER Experiment Name: At_CS6879_Shoots-Roots_P Parameter: Plant Line Value: CS6879 vs. WS
  misc_feature: MA Experiment 20000451 PARAMETER Experiment Name: At_CS6879_Shoots-Roots_P Parameter: Tissue Value: Roots
  misc_feature: MA Experiment ID: 20000453 Result: Up-regulated in Transcription
  misc_feature: MA Experiment 20000453 PARAMETER Experiment Name: At_100uM_ABA_P Parameter: Age (day) Value: 15
  misc_feature: MA Experiment 20000453 PARAMETER Experiment Name: At_100uM_ABA_P Parameter: Organism Value: A. thaliana
  misc_feature: MA Experiment 20000453 PARAMETER Experiment Name: At_100uM_ABA_P Parameter: Plant Line Value: WS
  misc_feature: MA Experiment 20000453 PARAMETER Experiment Name: At_100uM_ABA_P Parameter: Timepoint (hr) Value: 24
  misc_feature: MA Experiment 20000453 PARAMETER Experiment Name: At_100uM_ABA_P Parameter: Tissue Value: Aerial
  misc_feature: MA Experiment 20000453 PARAMETER Experiment Name: At_100uM_ABA_P Parameter: Treatment Value: 100uM ABA vs. No Treatment
  misc_feature: MA Experiment ID: 20001248 Result: Up-regulated in Transcription
  misc_feature: MA Experiment 20001248 PARAMETER Experiment Name: At_Far-red-induction_P Parameter: Age (day) Value: 7
  misc_feature: MA Experiment 20001248 PARAMETER Experiment Name: At_Far-red-induction_P Parameter: Light Value: Far-red vs. White
  misc_feature: MA Experiment 20001248 PARAMETER Experiment Name: At_Far-red-induction_P Parameter: Organism Value: A. thaliana
  misc_feature: MA Experiment 20001248 PARAMETER Experiment Name: At_Far-red-induction_P Parameter: Plant Line Value: Columbia
  misc_feature: MA Experiment 20001248 PARAMETER Experiment Name: At_Far-red-induction_P Parameter: Timepoint (hr) Value: 4
  misc_feature: MA Experiment 20001248 PARAMETER Experiment Name: At_Far-red-induction_P Parameter: Tissue Value: Whole Plant
  misc_feature: MA Experiment ID: 20001450 Result: Up-regulated in Transcription
  misc_feature: MA Experiment 20001450 PARAMETER Experiment Name: At_Far-red-induction_P Parameter: Age (day) Value: 7
  misc_feature: MA Experiment 20001450 PARAMETER Experiment Name: At_Far-red-induction_P Parameter: Light Value: Far-red vs. White
  misc_feature: MA Experiment 20001450 PARAMETER Experiment Name: At_Far-red-induction_P Parameter: Organism Value: A. thaliana
  misc_feature: MA Experiment 20001450 PARAMETER Experiment Name: At_Far-red-induction_P Parameter: Plant Line Value: Columbia
  misc_feature: MA Experiment 20001450 PARAMETER Experiment Name: At_Far-red-induction_P Parameter: Timepoint (hr) Value: 8
  misc_feature: MA Experiment 20001450 PARAMETER Experiment Name: At_Far-red-induction_P Parameter: Tissue Value: Whole Plant
  misc_feature: MA Experiment ID: 20001554 Result: Up-regulated in Transcription
  misc_feature: MA Experiment 20001554 PARAMETER Experiment Name: At_Drought_Soil_Dry_P Parameter: Age (day) Value: 21
  misc_feature: MA Experiment 20001554 PARAMETER Experiment Name: At_Drought_Soil_Dry_P Parameter: Organism Value: A. thaliana
  misc_feature: MA Experiment 20001554 PARAMETER Experiment Name: At_Drought_Soil_Dry_P Parameter: Plant Line Value: WS
  misc_feature: MA Experiment 20001554 PARAMETER Experiment Name: At_Drought_Soil_Dry_P Parameter: Post Timepoint (hr) Value: None
  misc_feature: MA Experiment 20001554 PARAMETER Experiment Name: At_Drought_Soil_Dry_P Parameter: Post-Treatment Value: None
  misc_feature: MA Experiment 20001554 PARAMETER Experiment Name: At_Drought_Soil_Dry_P Parameter: Timepoint (day) Value: 7
  misc_feature: MA Experiment 20001554 PARAMETER Experiment Name: At_Drought_Soil_Dry_P Parameter: Treatment Value: Drought vs. No Drought
  misc_feature: MA Experiment ID: 20001555 Result: Up-regulated in Transcription
  misc_feature: MA Experiment 20001555 PARAMETER Experiment Name: At_Drought_Soil_Dry_P Parameter: Age (day) Value: 24
  misc_feature: MA Experiment 20001555 PARAMETER Experiment Name: At_Drought_Soil_Dry_P Parameter: Organism Value: A. thaliana
  misc_feature: MA Experiment 20001555 PARAMETER Experiment Name: At_Drought_Soil_Dry_P Parameter: Plant Line Value: WS
  misc_feature: MA Experiment 20001555 PARAMETER Experiment Name: At_Drought_Soil_Dry_P Parameter: Post Timepoint (hr) Value: None
  misc_feature: MA Experiment 20001555 PARAMETER Experiment Name: At_Drought_Soil_Dry_P Parameter: Post-Treatment Value: None
  misc_feature: MA Experiment 20001555 PARAMETER Experiment Name: At_Drought_Soil_Dry_P Parameter: Timepoint (day) Value: 10
  misc_feature: MA Experiment 20001555 PARAMETER Experiment Name: At_Drought_Soil_Dry_P Parameter: Treatment Value: Drought vs. No Drought
  misc_feature: MA Experiment ID: 20001558 Result: Down-regulated in Transcription
  misc_feature: MA Experiment 20001558 PARAMETER Experiment Name: At_Drought_Soil_Dry_P Parameter: Age (day) Value: 27
  misc_feature: MA Experiment 20001558 PARAMETER Experiment Name: At_Drought_Soil_Dry_P Parameter: Organism Value: A. thaliana
  misc_feature: MA Experiment 20001558 PARAMETER Experiment Name: At_Drought_Soil_Dry_P Parameter: Plant Line Value: WS
  misc_feature: MA Experiment 20001558 PARAMETER Experiment Name: At_Drought_Soil_Dry_P Parameter: Post Timepoint (hr) Value: 6
  misc_feature: MA Experiment 20001558 PARAMETER Experiment Name: At_Drought_Soil_Dry_P Parameter: Post-Treatment Value: Re-Water vs. No Drought
  misc_feature: MA Experiment 20001558 PARAMETER Experiment Name: At_Drought_Soil_Dry_P Parameter: Timepoint (day) Value: 13
  misc_feature: MA Experiment 20001558 PARAMETER Experiment Name: At_Drought_Soil_Dry_P Parameter: Treatment Value: Drought vs. No Drought
  misc_feature: MA Experiment ID: 20001560 Result: Down-regulated in Transcription
  misc_feature: MA Experiment 20001560 PARAMETER Experiment Name: At_Drought_Soil_Dry_P Parameter: Age (day) Value: 28
  misc_feature: MA Experiment 20001560 PARAMETER Experiment Name: At_Drought_Soil_Dry_P Parameter: Organism Value: A. thaliana
  misc_feature: MA Experiment 20001560 PARAMETER Experiment Name: At_Drought_Soil_Dry_P Parameter: Plant Line Value: WS
  misc_feature: MA Experiment 20001560 PARAMETER Experiment Name: At_Drought_Soil_Dry_P Parameter: Post Timepoint (hr) Value: None
  misc_feature: MA Experiment 20001560 PARAMETER Experiment Name: At_Drought_Soil_Dry_P Parameter: Post-Treatment Value: None
  misc_feature: MA Experiment 20001560 PARAMETER Experiment Name: At_Drought_Soil_Dry_P Parameter: Timepoint (day) Value: 14
  misc_feature: MA Experiment 20001560 PARAMETER Experiment Name: At_Drought_Soil_Dry_P Parameter: Treatment Value: Drought vs. No Drought
  misc_feature: MA Experiment ID: 20001906 Result: Up-regulated in Transcription
  misc_feature: MA Experiment 20001906 PARAMETER Experiment Name: At_Drought_Reproduction_P Parameter: Age (day) Value: 35
  misc_feature: MA Experiment 20001906 PARAMETER Experiment Name: At_Drought_Reproduction_P Parameter: Organism Value: A. thaliana
  misc_feature: MA Experiment 20001906 PARAMETER Experiment Name: At_Drought_Reproduction_P Parameter: Plant Line Value: WS
  misc_feature: MA Experiment 20001906 PARAMETER Experiment Name: At_Drought_Reproduction_P Parameter: Timepoint (day) Value: 5
  misc_feature: MA Experiment 20001906 PARAMETER Experiment Name: At_Drought_Reproduction_P Parameter: Tissue Value: Siliques
  misc_feature: MA Experiment 20001906 PARAMETER Experiment Name: At_Drought_Reproduction_P Parameter: Treatment Value: Drought vs. No Drought
  misc_feature: MA Experiment ID: 20001908 Result: Up-regulated in Transcription
  misc_feature: MA Experiment 20001908 PARAMETER Experiment Name: At_Drought_Reproduction_P Parameter: Age (day) Value: 40
  misc_feature: MA Experiment 20001908 PARAMETER Experiment Name: At_Drought_Reproduction_P Parameter: Organism Value: A. thaliana
  misc_feature: MA Experiment 20001908 PARAMETER Experiment Name: At_Drought_Reproduction_P Parameter: Plant Line Value: WS
  misc_feature: MA Experiment 20001908 PARAMETER Experiment Name: At_Drought_Reproduction_P Parameter: Timepoint (day) Value: 10
  misc_feature: MA Experiment 20001908 PARAMETER Experiment Name: At_Drought_Reproduction_P Parameter: Tissue Value: Siliques
  misc_feature: MA Experiment 20001908 PARAMETER Experiment Name: At_Drought_Reproduction_P Parameter: Treatment Value: Drought vs. No Drought
  misc_feature: MA Experiment ID: 20001911 Result: Up-regulated in Transcription
  misc_feature: MA Experiment 20001911 PARAMETER Experiment Name: At_Drought_Reproduction_P Parameter: Age (day) Value: 40
  misc_feature: MA Experiment 20001911 PARAMETER Experiment Name: At_Drought_Reproduction_P Parameter: Organism Value: A. thaliana
  misc_feature: MA Experiment 20001911 PARAMETER Experiment Name: At_Drought_Reproduction_P Parameter: Plant Line Value: WS
  misc_feature: MA Experiment 20001911 PARAMETER Experiment Name: At_Drought_Reproduction_P Parameter: Timepoint (day) Value: 10
  misc_feature: MA Experiment 20001911 PARAMETER Experiment Name: At_Drought_Reproduction_P Parameter: Tissue Value: Flowers
  misc_feature: MA Experiment 20001911 PARAMETER Experiment Name: At_Drought_Reproduction_P Parameter: Treatment Value: Drought vs. No Drought
atgtgaattataaaacgtattgagtattatcgtgaccgacttcaaaaaacaagaaaaacctcaacttctctttttcagctatagccgccgcctcctcccactaaactcaaatcctctcatagtcttttcaatcaaatctgctcttcttcactgttgaagctggctatcaaaactcacaataactatgggaccgatgatgatgagagcagaagaagataactacaatctaaatcctccaccatggctaatcccaatgctaagagcaaactacttcatcccttgttcaatccacgccgcttccaacaaaagcgagtgcaacatgttctgtcttgactgttcttctgaggccttttgctcttactgtttgctcaatcacagaaaccatcgtgtccttcagatacgaagatcgtcgtaccacaacgttgtgagagtaaacgagattcagaagttcatagacatctcttgtgttcaaacatacataatcaacagcgcaaggatcgtgttcttgaacgaacgtcctcagccaagaatcggcaaaggagtcaccaatacttgtgaaatctgttgcagaagccttcttgattctttccgtttctgctctctcggttgcaaacttggaggaatgaagcgtgatccaagtctaaccttctctttgagagggaagcatggaagagagtacgaaggtgagtgggaatctgatgaagcgactacaccaactaagatacgcaagacatgtgctttcaaccgtctgatgagtggtctttccatctccaccgttaaatgtgattacttgtcaggagatcaaccgtcttcgagctccggtgatgagagcggttttaaactttctccggggacaccgccgatatataatcaccggaattcaagtagacggaagggcgtcccacaccgtgctcctttctaaaattaatactaacggaagctaattatatagtgtagattatagaaaatgtggttgttatgttgtaactaaatggttagtagtttttaaccttttgagctaggaatatacatattgtaagacatattacttacaggtattgtttggtttttctttttatagtacatatagaaattaggtatatactgtactcaaagggattgaaatatgttttcatatagtttttttgctgtaaatatacgtttgaaggaggtatgtttcttcaacttgtttgtatcgtatactgtgtactatcttcacaataaaat

SEQ ID NO: 40442 - protein, 245 aa, Arabidopsis thaliana
  peptide (1)..(245): Ceres Seq. ID no. 12395367
  misc_feature (15)..(239): Pfam Name: Protein of unknown function, DUF597 Pfam Description: Protein of unknown function, DUF597
  misc_feature (6)..(149): Homolog of NCBI NO: 18398555 NR Description: expressed protein
  misc_feature (204)..(245): Homolog of NCBI NO: 37537092 NR Description: unknown protein [Oryza sativa (japonica
  misc_feature (18)..(179): Homolog of NCBI NO: 37537092 NR Description: unknown protein [Oryza sativa (japonica
  misc_feature (11)..(196): Homolog of NCBI NO: 15217560 NR Description: hypothetical protein; protein id: At1g43000.1
  misc_feature (5)..(245): Homolog of NCBI NO: 25337907 NR Description: hypothetical protein F9H16.1 - Arabidopsis
  misc_feature (1)..(245): Homolog of NCBI NO: 21537073 NR Description: unknown [Arabidopsis thaliana]
  misc_feature (1)..(245): Homolog of NCBI NO: 18394936 NR Description: expressed protein
  misc_feature (5)..(245): Homolog of NCBI NO: 21536890 NR Description: unknown [Arabidopsis thaliana]
  misc_feature (4)..(245): Homolog of NCBI NO: 25337904 NR Description: unknown protein F14G6.19 [imported] - Arabidopsis
  misc_feature (1)..(245): Homolog of NCBI NO: 18411153 NR Description: expressed protein
MGPMMMRAEEDNYNLNPPPWLIPMLRANYFIPCSIHAASNKSECNMFCLDCSSEAFCSYCLLNHRNHRVLQIRRSSYHNVVRVNEIQKFIDISCVQTYIINSARIVFLNERPQPRIGKGVTNTCEICCRSLLDSFRFCSLGCKLGGMKRDPSLTFSLRGKHGREYEGEWESDEATTPTKIRKTCAFNRLMSGLSISTVKCDYLSGDQPSSSSGDESGFKLSPGTPPIYNHRNSSRRKGVPHRAPF

SEQ ID NO: 40443 - protein, 242 aa, Arabidopsis thaliana
  peptide (1)..(242): Ceres Seq. ID no. 12395368
  misc_feature (12)..(236): Pfam Name: Protein of unknown function, DUF597 Pfam Description: Protein of unknown function, DUF597
  misc_feature (3)..(146): Homolog of NCBI NO: 18398555 NR Description: expressed protein
  misc_feature (201)..(242): Homolog of NCBI NO: 37537092 NR Description: unknown protein [Oryza sativa (japonica
  misc_feature (15)..(176): Homolog of NCBI NO: 37537092 NR Description: unknown protein [Oryza sativa (japonica
  misc_feature (8)..(193): Homolog of NCBI NO: 15217560 NR Description: hypothetical protein; protein id: At1g43000.1
  misc_feature (2)..(242): Homolog of NCBI NO: 25337907 NR Description: hypothetical protein F9H16.1 - Arabidopsis
  misc_feature (1)..(242): Homolog of NCBI NO: 21537073 NR Description: unknown [Arabidopsis thaliana]
  misc_feature (1)..(242): Homolog of NCBI NO: 18394936 NR Description: expressed protein
  misc_feature (2)..(242): Homolog of NCBI NO: 21536890 NR Description: unknown [Arabidopsis thaliana]
  misc_feature (1)..(242): Homolog of NCBI NO: 25337904 NR Description: unknown protein F14G6.19 [imported] - Arabidopsis
  misc_feature (1)..(242): Homolog of NCBI NO: 18411153 NR Description: expressed protein
MMMRAEEDNYNLNPPPWLIPMLRANYFIPCSIHAASNKSECNMFCLDCSSEAFCSYCLLNHRNHRVLQIRRSSYHNVVRVNEIQKFIDISCVQTYIINSARIVFLNERPQPRIGKGVTNTCEICCRSLLDSFRFCSLGCKLGGMKRDPSLTFSLRGKHGREYEGEWESDEATTPTKIRKTCAFNRLMSGLSISTVKCDYLSGDQPSSSSGDESGFKLSPGTPPIYNHRNSSRRKGVPHRAPF

SEQ ID NO: 40444 - protein, 241 aa, Arabidopsis thaliana
  peptide (1)..(241): Ceres Seq. ID no. 12395369
  misc_feature (11)..(235): Pfam Name: Protein of unknown function, DUF597 Pfam Description: Protein of unknown function, DUF597
  misc_feature (2)..(145): Homolog of NCBI NO: 18398555 NR Description: expressed protein
  misc_feature (200)..(241): Homolog of NCBI NO: 37537092 NR Description: unknown protein [Oryza sativa (japonica
  misc_feature (14)..(175): Homolog of NCBI NO: 37537092 NR Description: unknown protein [Oryza sativa (japonica
  misc_feature (7)..(192): Homolog of NCBI NO: 15217560 NR Description: hypothetical protein; protein id: At1g43000.1
  misc_feature (1)..(241): Homolog of NCBI NO: 25337907 NR Description: hypothetical protein F9H16.1 - Arabidopsis
  misc_feature (1)..(241): Homolog of NCBI NO: 21537073 NR Description: unknown [Arabidopsis thaliana]
  misc_feature (1)..(241): Homolog of NCBI NO: 18394936 NR Description: expressed protein
  misc_feature (1)..(241): Homolog of NCBI NO: 21536890 NR Description: unknown [Arabidopsis thaliana]
  misc_feature (1)..(241): Homolog of NCBI NO: 25337904 NR Description: unknown protein F14G6.19 [imported] - Arabidopsis
  misc_feature (1)..(241): Homolog of NCBI NO: 18411153 NR Description: expressed protein
MMRAEEDNYNLNPPPWLIPMLRANYFIPCSIHAASNKSECNMFCLDCSSEAFCSYCLLNHRNHRVLQIRRSSYHNVVRVNEIQKFIDISCVQTYIINSARIVFLNERPQPRIGKGVTNTCEICCRSLLDSFRFCSLGCKLGGMKRDPSLTFSLRGKHGREYEGEWESDEATTPTKIRKTCAFNRLMSGLSISTVKCDYLSGDQPSSSSGDESGFKLSPGTPPIYNHRNSSRRKGVPHRAPF

SEQ ID NO: 40445 - DNA, 2001 bp, Arabidopsis thaliana; identical to SEQ ID NO: 38975
  misc_feature (1)..(2001): Ceres Seq. ID no. 13591393
  misc_feature: MA Experiment ID: 20000439 Result: Down-regulated in Transcription
  misc_feature: MA Experiment 20000439 PARAMETER Experiment Name: At_Roots__P Parameter: Age (day) Value: 14 vs. 21
  misc_feature: MA Experiment 20000439 PARAMETER Experiment Name: At_Roots__P Parameter: Organism Value: A. thaliana
  misc_feature: MA Experiment 20000439 PARAMETER Experiment Name: At_Roots__P Parameter: Tissue Value: Roots vs. Whole Plant
  misc_feature: MA Experiment ID: 20000709 Result: Up-regulated in Transcription
  misc_feature: MA Experiment 20000709 PARAMETER Experiment Name: At_15mM_NH4NO3_L-to-H_P Parameter: Age (hr) Value: 14
  misc_feature: MA Experiment 20000709 PARAMETER Experiment Name: At_15mM_NH4NO3_L-to-H_P Parameter: Organism Value: A. thaliana
  misc_feature: MA Experiment 20000709 PARAMETER Experiment Name: At_15mM_NH4NO3_L-to-H_P Parameter: Plant Line Value: WS
  misc_feature: MA Experiment 20000709 PARAMETER Experiment Name: At_15mM_NH4NO3_L-to-H_P Parameter: Timepoint (hr) Value: 4
  misc_feature: MA Experiment 20000709 PARAMETER Experiment Name: At_15mM_NH4NO3_L-to-H_P Parameter: Tissue Value: Aerial
  misc_feature: MA Experiment 20000709 PARAMETER Experiment Name: At_15mM_NH4NO3_L-to-H_P Parameter: Treatment Value: 15mM NH4NO3 vs. 30mM Mannitol
  misc_feature: MA Experiment ID: 20001557 Result: Up-regulated in Transcription
  misc_feature: MA Experiment 20001557 PARAMETER Experiment Name: At_Drought_Soil_Dry_P Parameter: Age (day) Value: 27
  misc_feature: MA Experiment 20001557 PARAMETER Experiment Name: At_Drought_Soil_Dry_P Parameter: Organism Value: A. thaliana
  misc_feature: MA Experiment 20001557 PARAMETER Experiment Name: At_Drought_Soil_Dry_P Parameter: Plant Line Value: WS
  misc_feature: MA Experiment 20001557 PARAMETER Experiment Name: At_Drought_Soil_Dry_P Parameter: Post Timepoint (hr) Value: 3
  misc_feature: MA Experiment 20001557 PARAMETER Experiment Name: At_Drought_Soil_Dry_P Parameter: Post-Treatment Value: Re-Water vs. No Drought
  misc_feature: MA Experiment 20001557 PARAMETER Experiment Name: At_Drought_Soil_Dry_P Parameter: Timepoint (day) Value: 13
  misc_feature: MA Experiment 20001557 PARAMETER Experiment Name: At_Drought_Soil_Dry_P Parameter: Treatment Value: Drought vs. No Drought

SEQ ID NO: 40446 - protein, 543 aa, Arabidopsis thaliana; identical to SEQ ID NO: 38976
  peptide (1)..(543): Ceres Seq. ID no. 13591394
  misc_feature (128)..(525): Homolog of NCBI NO: 15605862 NR Description: GTP cyclohydrolase II [Aquifex aeolicus]
  misc_feature (124)..(523): Homolog of NCBI NO: 23018011 NR Description: hypothetical protein [Thermobifida fusca]
  misc_feature (299)..(543): Homolog of NCBI NO: 1084339 NR Description: GTP cyclohydrolase II (EC 3.5.4.25) - Arabidopsis
  misc_feature (93)..(525): Homolog of NCBI NO: 18424277 NR Description: GTP cyclohydrolase II /
  misc_feature (96)..(536): Homolog of NCBI NO: 29367375 NR Description: GTP cyclohydrolase
  misc_feature (59)..(504): Homolog of NCBI NO: 25290324 NR Description: probable GTP cyclohydrolase [imported] -
  misc_feature (55)..(504): Homolog of NCBI NO: 30681714 NR Description: GTP cyclohydrolase -related [Arabidopsis thaliana]
  misc_feature (1)..(527): Homolog of NCBI NO: 7436011 NR Description: GTP cyclohydrolase II (EC 3.5.4.25) / 3,
  misc_feature (160)..(543): Homolog of NCBI NO: 30697989 NR Description: GTP cyclohydrolase II
  misc_feature (1)..(543): Homolog of NCBI NO: 27735197 NR Description: Riboflavin biosynthesis protein ribA
  misc_feature (128)..(525): Homolog of NCBI NO: 15605862 NR Description: GTP cyclohydrolase II [Aquifex aeolicus]
  misc_feature (124)..(523): Homolog of NCBI NO: 23018011 NR Description: hypothetical protein [Thermobifida fusca]
  misc_feature (299)..(543): Homolog of NCBI NO: 1084339 NR Description: GTP cyclohydrolase II (EC 3.5.4.25) - Arabidopsis
  misc_feature (93)..(525): Homolog of NCBI NO: 18424277 NR Description: GTP cyclohydrolase II /
  misc_feature (96)..(536): Homolog of NCBI NO: 29367375 NR Description: GTP cyclohydrolase
  misc_feature (59)..(504): Homolog of NCBI NO: 25290324 NR Description: probable GTP cyclohydrolase [imported] -
  misc_feature (55)..(504): Homolog of NCBI NO: 30681714 NR Description: GTP cyclohydrolase -related [Arabidopsis thaliana]
  misc_feature (1)..(527): Homolog of NCBI NO: 7436011 NR Description: GTP cyclohydrolase II (EC 3.5.4.25) / 3,
  misc_feature (160)..(543): Homolog of NCBI NO: 30697989 NR Description: GTP cyclohydrolase II
  misc_feature (1)..(543): Homolog of NCBI NO: 27735197 NR Description: Riboflavin biosynthesis protein ribA

SEQ ID NO: 40447 - protein, 384 aa, Arabidopsis thaliana; identical to SEQ ID NO: 38977
  peptide (1)..(384): Ceres Seq. ID no. 13591395
  misc_feature (1)..(366): Homolog of NCBI NO: 15605862 NR Description: GTP cyclohydrolase II [Aquifex aeolicus]
  misc_feature (1)..(364): Homolog of NCBI NO: 23018011 NR Description: hypothetical protein [Thermobifida fusca]
  misc_feature (140)..(384): Homolog of NCBI NO: 1084339 NR Description: GTP cyclohydrolase II (EC 3.5.4.25) - Arabidopsis
  misc_feature (1)..(366): Homolog of NCBI NO: 18424277 NR Description: GTP cyclohydrolase II /
  misc_feature (1)..(377): Homolog of NCBI NO: 29367375 NR Description: GTP cyclohydrolase
  misc_feature (1)..(345): Homolog of NCBI NO: 25290324 NR Description: probable GTP cyclohydrolase [imported] -
  misc_feature (1)..(345): Homolog of NCBI NO: 30681714 NR Description: GTP cyclohydrolase -related [Arabidopsis thaliana]
  misc_feature (1)..(368): Homolog of NCBI NO: 7436011 NR Description: GTP cyclohydrolase II (EC 3.5.4.25) / 3,
  misc_feature (1)..(384): Homolog of NCBI NO: 30697989 NR Description: GTP cyclohydrolase II
  misc_feature (1)..(384): Homolog of NCBI NO: 27735197 NR Description: Riboflavin biosynthesis protein ribA
  misc_feature (1)..(366): Homolog of NCBI NO: 15605862 NR Description: GTP cyclohydrolase II [Aquifex aeolicus]
  misc_feature (1)..(364): Homolog of NCBI NO: 23018011 NR Description: hypothetical protein [Thermobifida fusca]
  misc_feature (140)..(384): Homolog of NCBI NO: 1084339 NR Description: GTP cyclohydrolase II (EC 3.5.4.25) - Arabidopsis
  misc_feature (1)..(366): Homolog of NCBI NO: 18424277 NR Description: GTP cyclohydrolase II /
  misc_feature (1)..(377): Homolog of NCBI NO: 29367375 NR Description: GTP cyclohydrolase
  misc_feature (1)..(345): Homolog of NCBI NO: 25290324 NR Description: probable GTP cyclohydrolase [imported] -
  misc_feature (1)..(345): Homolog of NCBI NO: 30681714 NR Description: GTP cyclohydrolase -related [Arabidopsis thaliana]
  misc_feature (1)..(368): Homolog of NCBI NO: 7436011 NR Description: GTP cyclohydrolase II (EC 3.5.4.25) / 3,
  misc_feature (1)..(384): Homolog of NCBI NO: 30697989 NR Description: GTP cyclohydrolase II
  misc_feature (1)..(384): Homolog of NCBI NO: 27735197 NR Description: Riboflavin biosynthesis protein ribA

SEQ ID NO: 40448 - protein, 374 aa, Arabidopsis thaliana; identical to SEQ ID NO: 38978
  peptide (1)..(374): Ceres Seq. ID no. 13591396
  misc_feature (1)..(356): Homolog of NCBI NO: 15605862 NR Description: GTP cyclohydrolase II [Aquifex aeolicus]
  misc_feature (1)..(354): Homolog of NCBI NO: 23018011 NR Description: hypothetical protein [Thermobifida fusca]
  misc_feature (130)..(374): Homolog of NCBI NO: 1084339 NR Description: GTP cyclohydrolase II (EC 3.5.4.25) - Arabidopsis
  misc_feature (1)..(356): Homolog of NCBI NO: 18424277 NR Description: GTP cyclohydrolase II /
  misc_feature (1)..(367): Homolog of NCBI NO: 29367375 NR Description: GTP cyclohydrolase
  misc_feature (1)..(335): Homolog of NCBI NO: 25290324 NR Description: probable GTP cyclohydrolase [imported] -
  misc_feature (1)..(335): Homolog of NCBI NO: 30681714 NR Description: GTP cyclohydrolase -related [Arabidopsis thaliana]
  misc_feature (1)..(358): Homolog of NCBI NO: 7436011 NR Description: GTP cyclohydrolase II (EC 3.5.4.25) / 3,
  misc_feature (1)..(374): Homolog of NCBI NO: 30697989 NR Description: GTP cyclohydrolase II
  misc_feature (1)..(374): Homolog of NCBI NO: 27735197 NR Description: Riboflavin biosynthesis protein ribA
  misc_feature (1)..(356): Homolog of NCBI NO: 15605862 NR Description: GTP cyclohydrolase II [Aquifex aeolicus]
  misc_feature (1)..(354): Homolog of NCBI NO: 23018011 NR Description: hypothetical protein [Thermobifida fusca]
  misc_feature (130)..(374): Homolog of NCBI NO: 1084339 NR Description: GTP cyclohydrolase II (EC 3.5.4.25) - Arabidopsis
  misc_feature (1)..(356): Homolog of NCBI NO: 18424277 NR Description: GTP cyclohydrolase II /
  misc_feature (1)..(367): Homolog of NCBI NO: 29367375 NR Description: GTP cyclohydrolase
  misc_feature (1)..(335): Homolog of NCBI NO: 25290324 NR Description: probable GTP cyclohydrolase [imported] -
  misc_feature (1)..(335): Homolog of NCBI NO: 30681714 NR Description: GTP cyclohydrolase -related [Arabidopsis thaliana]
  misc_feature (1)..(358): Homolog of NCBI NO: 7436011 NR Description: GTP cyclohydrolase II (EC 3.5.4.25) / 3,
  misc_feature (1)..(374): Homolog of NCBI NO: 30697989 NR Description: GTP cyclohydrolase II
  misc_feature (1)..(374): Homolog of NCBI NO: 27735197 NR Description: Riboflavin biosynthesis protein ribA

SEQ ID NO: 40449 - DNA, 619 bp, Arabidopsis thaliana
  misc_feature (1)..(619): Ceres Seq. ID no. 12439760
  misc_feature: MA Experiment ID: 20000179 Result: Up-regulated in Transcription
  misc_feature: MA Experiment 20000179 PARAMETER Experiment Name: At_Germinating_Seeds_P Parameter: Age (hr) Value: 6 vs. 0
  misc_feature: MA Experiment 20000179 PARAMETER Experiment Name: At_Germinating_Seeds_P Parameter: Tissue Value: Germinating Seeds
  misc_feature: MA Experiment ID: 20000184 Result: Down-regulated in Transcription
  misc_feature: MA Experiment 20000184 PARAMETER Experiment Name: At_Shoots__P Parameter: Age (day) Value: 7
  misc_feature: MA Experiment 20000184 PARAMETER Experiment Name: At_Shoots__P Parameter: Tissue Value: Shoots vs. Whole Plant
  misc_feature: MA Experiment ID: 20000438 Result: Down-regulated in Transcription
  misc_feature: MA Experiment 20000438 PARAMETER Experiment Name: At_Shoots__P Parameter: Age (day) Value: 14
  misc_feature: MA Experiment 20000438 PARAMETER Experiment Name: At_Shoots__P Parameter: Tissue Value: Shoots vs. Whole Plant
  misc_feature: MA Experiment ID: 20000451 Result: Down-regulated in Transcription
  misc_feature: MA Experiment 20000451 PARAMETER Experiment Name: At_CS6879_Shoots-Roots_P Parameter: Age (day) Value: 14
  misc_feature: MA Experiment 20000451 PARAMETER Experiment Name: At_CS6879_Shoots-Roots_P Parameter: Organism Value: A. thaliana
  misc_feature: MA Experiment 20000451 PARAMETER Experiment Name: At_CS6879_Shoots-Roots_P Parameter: Plant Line Value: CS6879 vs. WS
  misc_feature: MA Experiment 20000451 PARAMETER Experiment Name: At_CS6879_Shoots-Roots_P Parameter: Tissue Value: Roots
  misc_feature: MA Experiment ID: 20000794 Result: Up-regulated in Transcription
  misc_feature: MA Experiment 20000794 PARAMETER Experiment Name: At_Petals_P Parameter: Age (day) Value: 23-25 days
  misc_feature: MA Experiment 20000794 PARAMETER Experiment Name: At_Petals_P Parameter: Plant Line Value: WS
  misc_feature: MA Experiment 20000794 PARAMETER Experiment Name: At_Petals_P Parameter: Tissue Value: Petals vs. Whole plant
  misc_feature: MA Experiment ID: 20001248 Result: Up-regulated in Transcription
  misc_feature: MA Experiment 20001248 PARAMETER Experiment Name: At_Far-red-induction_P Parameter: Age (day) Value: 7
  misc_feature: MA Experiment 20001248 PARAMETER Experiment Name: At_Far-red-induction_P Parameter: Light Value: Far-red vs. White
  misc_feature: MA Experiment 20001248 PARAMETER Experiment Name: At_Far-red-induction_P Parameter: Organism Value: A. thaliana
  misc_feature: MA Experiment 20001248 PARAMETER Experiment Name: At_Far-red-induction_P Parameter: Plant Line Value: Columbia
  misc_feature: MA Experiment 20001248 PARAMETER Experiment Name: At_Far-red-induction_P Parameter: Timepoint (hr) Value: 4
  misc_feature: MA Experiment 20001248 PARAMETER Experiment Name: At_Far-red-induction_P Parameter: Tissue Value: Whole Plant
tgtttttgataacaaagtggagtggggaatcgacttggcctcagagcatgaaagatacttgacagaggttgagtttgatcaaaagccaataattgtgtataactacccgaaaggaatcaaagctttttacatgagacttaacgatgatgagaagacagttgctgccatggatgtccttgttccaaagattaattaggttggagaactcattggtggaagccaaagggaagaacgatatgatgttatcaaacagaggatcgaggagatgtgtctaccaatggagccatatgagtggtacctagacttgcgtcgttatggaacagtgaagcattgtggatttggacttggcttcgaacgtatgattcagttcgctacaggaattgataacatcagagatgttattcctttccctcgctatcctggaaaagctgatctctgattcctctctagacacacaattctggtctggtctcgacatggttttagtttccttttaaattggttaaatgaaaattgtattgatttttatctatactctgtttctcaagctgtgagagctaatatgaagggaaacaaagttatatgaagggaaacaaagttatacttttgggttagcttc

SEQ ID NO: 40450 - protein, 64 aa, Arabidopsis thaliana
  peptide (1)..(64): Ceres Seq. ID no. 12439761
  misc_feature (1)..(64): Pfam Name: tRNA synthetases class II (D, K and N) Pfam Description: tRNA synthetases class II (D, K and N)
  misc_feature (2)..(64): Homolog of NCBI NO: 23040758 NR Description: hypothetical protein [Trichodesmium erythraeum
  misc_feature (2)..(64): Homolog of NCBI NO: 37525688 NR Description: asparaginyl-tRNA synthetase
  misc_feature (2)..(64): Homolog of NCBI NO: 20139977 NR Description: Asparaginyl-tRNA synthetase,
  misc_feature (2)..(64): Homolog of NCBI NO: 15236037 NR Description: asparagine--tRNA ligase
  misc_feature (2)..(64): Homolog of NCBI NO: 2664210 NR Description: asparaginyl-tRNA synthetase [Arabidopsis thaliana]
  misc_feature (2)..(64): Homolog of NCBI NO: 22775674 NR Description: putative asparaginyl-tRNA synthetase,
  misc_feature (2)..(64): Homolog of NCBI NO: 22300015 NR Description: asparaginyl-tRNA synthetase [Thermosynechococcus
  misc_feature (2)..(64): Homolog of NCBI NO: 34914792 NR Description: putative asparaginyl-tRNA synthetase
  misc_feature (2)..(64): Homolog of NCBI NO: 15241897 NR Description: SYNC1 protein (gb|AAD46681.1)
  misc_feature (1)..(64): Homolog of NCBI NO: 15223302 NR Description: asparaginyl-tRNA synthetase(SYNC1)
VFDNKVEWGIDLASEHERYLTEVEFDQKPIIVYNYPKGIKAFYMRLNDDEKTVAAMDVLVPKIN

SEQ ID NO: 40451 - protein, 57 aa, Arabidopsis thaliana
  peptide (1)..(57): Ceres Seq. ID no. 12439762
  misc_feature (1)..(53): Pfam Name: tRNA synthetases class II (D, K and N) Pfam Description: tRNA synthetases class II (D, K and N)
  misc_feature (1)..(56): Homolog of NCBI NO: 23040758 NR Description: hypothetical protein [Trichodesmium erythraeum
  misc_feature (1)..(56): Homolog of NCBI NO: 37525688 NR Description: asparaginyl-tRNA synthetase
  misc_feature (1)..(56): Homolog of NCBI NO: 20139977 NR Description: Asparaginyl-tRNA synthetase,
  misc_feature (1)..(56): Homolog of NCBI NO: 15236037 NR Description: asparagine--tRNA ligase
  misc_feature (1)..(56): Homolog of NCBI NO: 2664210 NR Description: asparaginyl-tRNA synthetase [Arabidopsis thaliana]
  misc_feature (1)..(56): Homolog of NCBI NO: 22775674 NR Description: putative asparaginyl-tRNA synthetase,
  misc_feature (1)..(56): Homolog of NCBI NO: 22300015 NR Description: asparaginyl-tRNA synthetase [Thermosynechococcus
  misc_feature (1)..(57): Homolog of NCBI NO: 34914792 NR Description: putative asparaginyl-tRNA synthetase
  misc_feature (1)..(57): Homolog of NCBI NO: 15241897 NR Description: SYNC1 protein (gb|AAD46681.1)
  misc_feature (1)..(57): Homolog of NCBI NO: 15223302 NR Description: asparaginyl-tRNA synthetase(SYNC1)
MCLPMEPYEWYLDLRRYGTVKHCGFGLGFERMIQFATGIDNIRDVIPFPRYPGKADL

SEQ ID NO: 40452 - protein, 53 aa, Arabidopsis thaliana
  peptide (1)..(53): Ceres Seq. ID no. 12439763
  misc_feature (1)..(52): Homolog of NCBI NO: 23040758 NR Description: hypothetical protein [Trichodesmium erythraeum
  misc_feature (1)..(52): Homolog of NCBI NO: 37525688 NR Description: asparaginyl-tRNA synthetase
  misc_feature (1)..(52): Homolog of NCBI NO: 15236037 NR Description: asparagine--tRNA ligase
  misc_feature (1)..(52): Homolog of NCBI NO: 20139977 NR Description: Asparaginyl-tRNA synthetase,
  misc_feature (1)..(52): Homolog of NCBI NO: 2664210 NR Description: asparaginyl-tRNA synthetase [Arabidopsis thaliana]
  misc_feature (1)..(52): Homolog of NCBI NO: 22775674 NR Description: putative asparaginyl-tRNA synthetase,
  misc_feature (1)..(52): Homolog of NCBI NO: 22300015 NR Description: asparaginyl-tRNA synthetase [Thermosynechococcus
  misc_feature (1)..(53): Homolog of NCBI NO: 34914792 NR Description: putative asparaginyl-tRNA synthetase
  misc_feature (1)..(53): Homolog of NCBI NO: 15241897 NR Description: SYNC1 protein (gb|AAD46681.1)
  misc_feature (1)..(53): Homolog of NCBI NO: 15223302 NR Description: asparaginyl-tRNA synthetase(SYNC1)
MEPYEWYLDLRRYGTVKHCGFGLGFERMIQFATGIDNIRDVIPFPRYPGKADL

SEQ ID NO: 40453 - DNA, 1235 bp, Arabidopsis thaliana
  misc_feature (1)..(1235): Ceres Seq. ID no. 12340437
  misc_feature: MA Experiment ID: 108462 Result: Down-regulated in Transcription
  misc_feature: MA Experiment 108462 PARAMETER Experiment Name: At_Germinating_Seeds_cDNA_P Parameter: Age (day) Value: 2 vs. 0
  misc_feature: MA Experiment 108462 PARAMETER Experiment Name: At_Germinating_Seeds_cDNA_P Parameter: Tissue Value: Germinating Seeds
  misc_feature: MA Experiment ID: 108573 Result: Up-regulated in Transcription
  misc_feature: MA Experiment 108573 PARAMETER Experiment Name: At_Drought_cDNA_P Parameter: Timepoint (hr) Value: 6
  misc_feature: MA Experiment 108573 PARAMETER Experiment Name: At_Drought_cDNA_P Parameter: Tissue Value: Aerial
  misc_feature: MA Experiment 108573 PARAMETER Experiment Name: At_Drought_cDNA_P Parameter: Treatment Value: Drought vs. No Drought
  misc_feature: MA Experiment ID: 108579 Result: Down-regulated in Transcription
  misc_feature: MA Experiment 108579 PARAMETER Experiment Name: At_4deg_Cold_cDNA_P Parameter: Temperature (deg C) Value: 4 vs. 22
  misc_feature: MA Experiment 108579 PARAMETER Experiment Name: At_4deg_Cold_cDNA_P Parameter: Timepoint (hr) Value: 6
  misc_feature: MA Experiment 108579 PARAMETER Experiment Name: At_4deg_Cold_cDNA_P Parameter: Tissue Value: Aerial
  misc_feature: MA Experiment ID: 20000111 Result: Down-regulated in Transcription
  misc_feature: MA Experiment 20000111 PARAMETER Experiment Name: At_42deg_Heat_cDNA_P Parameter: Temperature (deg C) Value: 42 vs. 22
  misc_feature: MA Experiment 20000111 PARAMETER Experiment Name: At_42deg_Heat_cDNA_P Parameter: Timepoint (hr) Value: 6
  misc_feature: MA Experiment 20000111 PARAMETER Experiment Name: At_42deg_Heat_cDNA_P Parameter: Tissue Value: Aerial
  misc_feature: MA Experiment ID: 20000184 Result: Down-regulated in Transcription
  misc_feature: MA Experiment 20000184 PARAMETER Experiment Name: At_Shoots__P Parameter: Age (day) Value: 7
  misc_feature: MA Experiment 20000184 PARAMETER Experiment Name: At_Shoots__P Parameter: Tissue Value: Shoots vs. Whole Plant
  misc_feature: MA Experiment ID: 20000227 Result: Down-regulated in Transcription
  misc_feature: MA Experiment 20000227 PARAMETER Experiment Name: At_Root-Tips-vs-Tops_P Parameter: Tissue Value: Root Tips vs. Root Tops
  misc_feature: MA Experiment ID: 20001450 Result: Up-regulated in Transcription
  misc_feature: MA Experiment 20001450 PARAMETER Experiment Name: At_Far-red-induction_P Parameter: Age (day) Value: 7
  misc_feature: MA Experiment 20001450 PARAMETER Experiment Name: At_Far-red-induction_P Parameter: Light Value: Far-red vs. White
  misc_feature: MA Experiment 20001450 PARAMETER Experiment Name: At_Far-red-induction_P Parameter: Organism Value: A. thaliana
  misc_feature: MA Experiment 20001450 PARAMETER Experiment Name: At_Far-red-induction_P Parameter: Plant Line Value: Columbia
  misc_feature: MA Experiment 20001450 PARAMETER Experiment Name: At_Far-red-induction_P Parameter: Timepoint (hr) Value: 8
  misc_feature: MA Experiment 20001450 PARAMETER Experiment Name: At_Far-red-induction_P Parameter: Tissue Value: Whole Plant
  misc_feature: MA Experiment ID: 20001451 Result: Up-regulated in Transcription
  misc_feature: MA Experiment 20001451 PARAMETER Experiment Name: At_Far-red-induction_P Parameter: Age (day) Value: 7
  misc_feature: MA Experiment 20001451 PARAMETER Experiment Name: At_Far-red-induction_P Parameter: Light Value: Far-red vs. White
  misc_feature: MA Experiment 20001451 PARAMETER Experiment Name: At_Far-red-induction_P Parameter: Organism Value: A. thaliana
  misc_feature: MA Experiment 20001451 PARAMETER Experiment Name: At_Far-red-induction_P Parameter: Plant Line Value: Columbia
  misc_feature: MA Experiment 20001451 PARAMETER Experiment Name: At_Far-red-induction_P Parameter: Timepoint (hr) Value: 24
  misc_feature: MA Experiment 20001451 PARAMETER Experiment Name: At_Far-red-induction_P Parameter: Tissue Value: Whole Plant
  misc_feature: MA Experiment ID: 20001911 Result: Up-regulated in Transcription
  misc_feature: MA Experiment 20001911 PARAMETER Experiment Name: At_Drought_Reproduction_P Parameter: Age (day) Value: 40
  misc_feature: MA Experiment 20001911 PARAMETER Experiment Name: At_Drought_Reproduction_P Parameter: Organism Value: A. thaliana
  misc_feature: MA Experiment 20001911 PARAMETER Experiment Name: At_Drought_Reproduction_P Parameter: Plant Line Value: WS
  misc_feature: MA Experiment 20001911 PARAMETER Experiment Name: At_Drought_Reproduction_P Parameter: Timepoint (day) Value: 10
  misc_feature: MA Experiment 20001911 PARAMETER Experiment Name: At_Drought_Reproduction_P Parameter: Tissue Value: Flowers
  misc_feature: MA Experiment 20001911 PARAMETER Experiment Name: At_Drought_Reproduction_P Parameter: Treatment Value: Drought vs. No Drought
aaaaaaccatttccatcatcggtttcctccgatacatctcctcgtcgccgttcttcggattttcactcttctgctcgaaagggcagtgcttgagaatcattgaagaaggtgatcgctggtgctgttttgataactcaaagccgttttgctgaaagagggttaccaaagttagaagctcaagaacttggagctgtgtcttctttttgtatcatgccatattttattcagaggcttttcaatacttgcaagtcatctctctcacctaatggtcctgtgtctgaggaggccttagacaaggttcgcaatgtcttggagaaaatcaagccgtctgatgttggtctcgaacaggaagctcaattggtgcgtaattggcctggtcctgggaacgagcgtaatggaaaccatcattctctgccagcaataaaataccttcagttacatgagtgtgacagcttctcgattggaattttctgcatgccacctgggtctatcataccacttcataatcatccaggcatgacagtgctaagcaagcttgtttatggttcaatgcacgttaagtcatatgattgggctgagcctgaccaatcagagctagacgatccattacaagcaagacccgcgaagctggtcaaggatattgatatgacttcccctagcccagcaaccactctatatccaacaaccggtggcaacattcattgtttcaaagccattactcattgtgcaatcttcgacatcttatctcctccatactcttctactcatggcagacactgcaactacttccgaaaatccccaatgctagacttacctggtgagattgaagtgatgaatggagaagtgatctcaaatgtgacatggcttgaagagtatcaacctccagataactttgtgatatggagagttccgtacagaggtccagtgattagaaaatgagaaatacaaaaaggattaaacatattaaaaaagagcagaaagagaaaggtgcttatgatcaggagaataattggtaaaccattcagaggctggctgcataatggtcgaggttcttacataattgtgaccacattaagttccagcctatgtcgttgtatgataatgtttactacatacaactttatgattacttcactagtttaatattataattttttccccctatttttatatgcagctacacaaaaaattgctcataaacagtgttctatttagttatcataaattttgtttcc

SEQ ID NO: 40454 - protein, 242 aa, Arabidopsis thaliana
  peptide (1)..(242): Ceres Seq. ID no. 12340438
  misc_feature (5)..(241): Homolog of NCBI NO: 18394617 NR Description: expressed protein
  misc_feature (5)..(242): Homolog of NCBI NO: 15242505 NR Description: putative protein
  misc_feature (5)..(242): Homolog of NCBI NO: 10176982 NR Description: contains similarity to unknown
  misc_feature (5)..(240): Homolog of NCBI NO: 34906308 NR Description: unnamed protein product [Oryza sativa (japonica
  misc_feature (5)..(240): Homolog of NCBI NO: 15242218 NR Description: putative protein; protein id: At5g15120.1
  misc_feature (1)..(242): Homolog of NCBI NO: 38345647 NR Description: OSJNBb0040D15.1 [Oryza sativa (japonica
  misc_feature (1)..(241): Homolog of NCBI NO: 21536850 NR Description: unknown [Arabidopsis thaliana]
  misc_feature (1)..(241): Homolog of NCBI NO: 25370572 NR Description: hypothetical protein At2g42670 [imported] -
  misc_feature (1)..(241): Homolog of NCBI NO: 18406030 NR Description: expressed protein
  misc_feature (1)..(242): Homolog of NCBI NO: 15231104 NR Description: putative protein
MPYFIQRLFNTCKSSLSPNGPVSEEALDKVRNVLEKIKPSDVGLEQEAQLVRNWPGPGNERNGNHHSLPAIKYLQLHECDSFSIGIFCMPPGSIIPLHNHPGMTVLSKLVYGSMHVKSYDWAEPDQSELDDPLQARPAKLVKDIDMTSPSPATTLYPTTGGNIHCFKAITHCAIFDILSPPYSSTHGRHCNYFRKSPMLDLPGEIEVMNGEVISNVTWLEEYQPPDNFVIWRVPYRGPVIRK

SEQ ID NO: 40455 - protein, 154 aa, Arabidopsis thaliana
  peptide (1)..(154): Ceres Seq. ID no. 12340439
  misc_feature (1)..(153): Homolog of NCBI NO: 18394617 NR Description: expressed protein
  misc_feature (1)..(154): Homolog of NCBI NO: 15242505 NR Description: putative protein
  misc_feature (1)..(154): Homolog of NCBI NO: 10176982 NR Description: contains similarity to unknown
  misc_feature (1)..(152): Homolog of NCBI NO: 34906308 NR Description: unnamed protein product [Oryza sativa (japonica
  misc_feature (1)..(152): Homolog of NCBI NO: 15242218 NR Description: putative protein; protein id: At5g15120.1
  misc_feature (1)..(154): Homolog of NCBI NO: 38345647 NR Description: OSJNBb0040D15.1 [Oryza sativa (japonica
  misc_feature (1)..(153): Homolog of NCBI NO: 21536850 NR Description: unknown [Arabidopsis thaliana]
  misc_feature (1)..(153): Homolog of NCBI NO: 25370572 NR Description: hypothetical protein At2g42670 [imported] -
  misc_feature (1)..(153): Homolog of NCBI NO: 18406030 NR Description: expressed protein
  misc_feature (1)..(154): Homolog of NCBI NO: 15231104 NR Description: putative protein
MPPGSIIPLHNHPGMTVLSKLVYGSMHVKSYDWAEPDQSELDDPLQARPAKLVKDIDMTSPSPATTLYPTTGGNIHCFKAITHCAIFDILSPPYSSTHGRHCNYFRKSPMLDLPGEIEVMNGEVISNVTWLEEYQPPDNFVIWRVPYRGPVIRK

SEQ ID NO: 40456 - protein, 140 aa, Arabidopsis thaliana
  peptide (1)..(140): Ceres Seq. ID no. 12340440
  misc_feature (1)..(139): Homolog of NCBI NO: 18394617 NR Description: expressed protein
  misc_feature (1)..(140): Homolog of NCBI NO: 15242505 NR Description: putative protein
  misc_feature (1)..(140): Homolog of NCBI NO: 10176982 NR Description: contains similarity to unknown
  misc_feature (1)..(138): Homolog of NCBI NO: 34906308 NR Description: unnamed protein product [Oryza sativa (japonica
  misc_feature (1)..(138): Homolog of NCBI NO: 15242218 NR Description: putative protein; protein id: At5g15120.1
  misc_feature (1)..(140): Homolog of NCBI NO: 38345647 NR Description: OSJNBb0040D15.1 [Oryza sativa (japonica
  misc_feature (1)..(139): Homolog of NCBI NO: 21536850 NR Description: unknown [Arabidopsis thaliana]
  misc_feature (1)..(139): Homolog of NCBI NO: 25370572 NR Description: hypothetical protein At2g42670 [imported] -
  misc_feature (1)..(139): Homolog of NCBI NO: 18406030 NR Description: expressed protein
  misc_feature (1)..(140): Homolog of NCBI NO: 15231104 NR Description: putative protein
MTVLSKLVYGSMHVKSYDWAEPDQSELDDPLQARPAKLVKDIDMTSPSPATTLYPTTGGNIHCFKAITHCAIFDILSPPYSSTHGRHCNYFRKSPMLDLPGEIEVMNGEVISNVTWLEEYQPPDNFVIWRVPYRGPVIRK

SEQ ID NO: 40457 - DNA, 1214 bp, Arabidopsis thaliana
  misc_feature (1)..(1214): Ceres Seq. ID no. 12370965
  misc_feature: MA Experiment ID: 20000173 Result: Down-regulated in Transcription
  misc_feature: MA Experiment 20000173 PARAMETER Experiment Name: At_42deg_Heat_P Parameter: Age (day) Value: 14
  misc_feature: MA Experiment 20000173 PARAMETER Experiment Name: At_42deg_Heat_P Parameter: Organism Value: A. thaliana
  misc_feature: MA Experiment 20000173 PARAMETER Experiment Name: At_42deg_Heat_P Parameter: Plant Line Value: WS
  misc_feature: MA Experiment 20000173 PARAMETER Experiment Name: At_42deg_Heat_P Parameter: Temperature (deg C) Value: 42 vs. 22
  misc_feature: MA Experiment 20000173 PARAMETER Experiment Name: At_42deg_Heat_P Parameter: Timepoint (hr) Value: 6
  misc_feature: MA Experiment 20000173 PARAMETER Experiment Name: At_42deg_Heat_P Parameter: Tissue Value: Aerial
  misc_feature: MA Experiment ID: 20000180 Result: Up-regulated in Transcription
  misc_feature: MA Experiment 20000180 PARAMETER Experiment Name: At_Germinating_Seeds_P Parameter: Age (hr) Value: 24 vs. 0
  misc_feature: MA Experiment 20000180 PARAMETER Experiment Name: At_Germinating_Seeds_P Parameter: Tissue Value: Germinating Seeds
  misc_feature: MA Experiment ID: 20000184 Result: Down-regulated in Transcription
  misc_feature: MA Experiment 20000184 PARAMETER Experiment Name: At_Shoots__P Parameter: Age (day) Value: 7
  misc_feature: MA Experiment 20000184 PARAMETER Experiment Name: At_Shoots__P Parameter: Tissue Value: Shoots vs. Whole Plant
  misc_feature: MA Experiment ID: 20000227 Result: Up-regulated in Transcription
  misc_feature: MA Experiment 20000227 PARAMETER Experiment Name: At_Root-Tips-vs-Tops_P Parameter: Tissue Value: Root Tips vs. Root Tops
  misc_feature: MA Experiment ID: 20000264 Result: Down-regulated in Transcription
  misc_feature: MA Experiment 20000264 PARAMETER Experiment Name: At_Open_Flower_P Parameter: Age (day) Value: 21
  misc_feature: MA Experiment 20000264 PARAMETER Experiment Name: At_Open_Flower_P Parameter: Plant Line Value: WS
  misc_feature: MA Experiment 20000264 PARAMETER Experiment Name: At_Open_Flower_P Parameter: Tissue Value: Open Flower vs. Whole Plant
  misc_feature: MA Experiment ID: 20000265 Result: Down-regulated in Transcription
  misc_feature: MA Experiment 20000265 PARAMETER Experiment Name: At_Open_Flower_P Parameter: Age (day) Value: 21
  misc_feature: MA Experiment 20000265 PARAMETER Experiment Name: At_Open_Flower_P Parameter: Plant Line Value: WS
  misc_feature: MA Experiment 20000265 PARAMETER Experiment Name: At_Open_Flower_P Parameter: Tissue Value: Closed Flower vs. Whole Plant
  misc_feature: MA Experiment ID: 20000286 Result: Down-regulated in Transcription
  misc_feature: MA Experiment 20000286 PARAMETER Experiment Name: At_Open_Flower_P Parameter: Age (day) Value: 21
  misc_feature: MA Experiment 20000286 PARAMETER Experiment Name: At_Open_Flower_P Parameter: Plant Line Value: WS
  misc_feature: MA Experiment 20000286 PARAMETER Experiment Name: At_Open_Flower_P Parameter: Tissue Value: Half Open vs. Whole Plant
  misc_feature: MA Experiment ID: 20000438 Result: Down-regulated in Transcription
  misc_feature: MA Experiment 20000438 PARAMETER Experiment Name: At_Shoots__P Parameter: Age (day) Value: 14
  misc_feature: MA Experiment 20000438 PARAMETER Experiment Name: At_Shoots__P Parameter: Tissue Value: Shoots vs. Whole Plant
  misc_feature: MA Experiment ID: 20000527 Result: Down-regulated in Transcription
  misc_feature: MA Experiment 20000527 PARAMETER Experiment Name: At_10percent_PEG_P Parameter: Age (day) Value: 20
  misc_feature: MA Experiment 20000527 PARAMETER Experiment Name: At_10percent_PEG_P Parameter: Organism Value: A. thaliana
  misc_feature: MA Experiment 20000527 PARAMETER Experiment Name: At_10percent_PEG_P Parameter: Plant Line Value: WS
  misc_feature: MA Experiment 20000527 PARAMETER Experiment Name: At_10percent_PEG_P Parameter: Timepoint (day) Value: 20
  misc_feature: MA Experiment 20000527 PARAMETER Experiment Name: At_10percent_PEG_P Parameter: Tissue Value: Whole Plant
  misc_feature: MA Experiment 20000527 PARAMETER Experiment Name: At_10percent_PEG_P Parameter: Treatment Value: 10percent PEG vs. No Treatment
  misc_feature: MA Experiment ID: 20000794 Result: Down-regulated in Transcription
  misc_feature: MA Experiment 20000794 PARAMETER Experiment Name: At_Petals_P Parameter: Age (day) Value: 23-25 days
  misc_feature: MA Experiment 20000794 PARAMETER Experiment Name: At_Petals_P Parameter: Plant Line Value: WS
  misc_feature: MA Experiment 20000794 PARAMETER Experiment Name: At_Petals_P Parameter: Tissue Value: Petals vs. Whole plant
  misc_feature: MA Experiment ID: 20001248 Result: Down-regulated in Transcription
  misc_feature: MA Experiment 20001248 PARAMETER Experiment Name: At_Far-red-induction_P Parameter: Age (day) Value: 7
  misc_feature: MA Experiment 20001248 PARAMETER Experiment Name: At_Far-red-induction_P Parameter: Light Value: Far-red vs. White
  misc_feature: MA Experiment 20001248 PARAMETER Experiment Name: At_Far-red-induction_P Parameter: Organism Value: A. thaliana
  misc_feature: MA Experiment 20001248 PARAMETER Experiment Name: At_Far-red-induction_P Parameter: Plant Line Value: Columbia
  misc_feature: MA Experiment 20001248 PARAMETER Experiment Name: At_Far-red-induction_P Parameter: Timepoint (hr) Value: 4
  misc_feature: MA Experiment 20001248 PARAMETER Experiment Name: At_Far-red-induction_P Parameter: Tissue Value: Whole Plant
  misc_feature: MA Experiment ID: 20001450 Result: Down-regulated in Transcription
  misc_feature: MA Experiment 20001450 PARAMETER Experiment Name: At_Far-red-induction_P Parameter: Age (day) Value: 7
  misc_feature: MA Experiment 20001450 PARAMETER Experiment Name: At_Far-red-induction_P Parameter: Light Value: Far-red vs. White
  misc_feature: MA Experiment 20001450 PARAMETER Experiment Name: At_Far-red-induction_P Parameter: Organism Value: A. thaliana
  misc_feature: MA Experiment 20001450 PARAMETER Experiment Name: At_Far-red-induction_P Parameter: Plant Line Value: Columbia
  misc_feature: MA Experiment 20001450 PARAMETER Experiment Name: At_Far-red-induction_P Parameter: Timepoint (hr) Value: 8
  misc_feature: MA Experiment 20001450 PARAMETER Experiment Name: At_Far-red-induction_P Parameter: Tissue Value: Whole Plant
  misc_feature: MA Experiment ID: 20001556 Result: Down-regulated in Transcription
  misc_feature: MA Experiment 20001556 PARAMETER Experiment Name: At_Drought_Soil_Dry_P Parameter: Age (day) Value: 26
  misc_feature: MA Experiment 20001556 PARAMETER Experiment Name: At_Drought_Soil_Dry_P Parameter: Organism Value: A. thaliana
  misc_feature: MA Experiment 20001556 PARAMETER Experiment Name: At_Drought_Soil_Dry_P Parameter: Plant Line Value: WS
  misc_feature: MA Experiment 20001556 PARAMETER Experiment Name: At_Drought_Soil_Dry_P Parameter: Post Timepoint (hr) Value: None
  misc_feature: MA Experiment 20001556 PARAMETER Experiment Name: At_Drought_Soil_Dry_P Parameter: Post-Treatment Value: None
  misc_feature: MA Experiment 20001556 PARAMETER Experiment Name: At_Drought_Soil_Dry_P Parameter: Timepoint (day) Value: 12
  misc_feature: MA Experiment 20001556 PARAMETER Experiment Name: At_Drought_Soil_Dry_P Parameter: Treatment Value: Drought vs. No Drought
  misc_feature: MA Experiment ID: 20001558 Result: Down-regulated in Transcription
  misc_feature: MA Experiment 20001558 PARAMETER Experiment Name: At_Drought_Soil_Dry_P Parameter: Age (day) Value: 27
  misc_feature: MA Experiment 20001558 PARAMETER Experiment Name: At_Drought_Soil_Dry_P Parameter: Organism Value: A. thaliana
  misc_feature: MA Experiment 20001558 PARAMETER Experiment Name: At_Drought_Soil_Dry_P Parameter: Plant Line Value: WS
  misc_feature: MA Experiment 20001558 PARAMETER Experiment Name: At_Drought_Soil_Dry_P Parameter: Post Timepoint (hr) Value: 6
  misc_feature: MA Experiment 20001558 PARAMETER Experiment Name: At_Drought_Soil_Dry_P Parameter: Post-Treatment Value: Re-Water vs. No Drought
  misc_feature: MA Experiment 20001558 PARAMETER Experiment Name: At_Drought_Soil_Dry_P Parameter: Timepoint (day) Value: 13
  misc_feature: MA Experiment 20001558 PARAMETER Experiment Name: At_Drought_Soil_Dry_P Parameter: Treatment Value: Drought vs. No Drought
  misc_feature: MA Experiment ID: 20001757 Result: Up-regulated in Transcription
  misc_feature: MA Experiment 20001757 PARAMETER Experiment Name: At_50mM_NH4NO3_L-to-H_P Parameter: Timepoint (hr) Value: 6
  misc_feature: MA Experiment 20001757 PARAMETER Experiment Name: At_50mM_NH4NO3_L-to-H_P Parameter: Tissue Value: Leaf
  misc_feature: MA Experiment 20001757 PARAMETER Experiment Name: At_50mM_NH4NO3_L-to-H_P Parameter: Treatment Value: 50mM NH4NO3 vs 100mM Mannitol
  misc_feature: MA Experiment ID: 20001768 Result: Up-regulated in Transcription
  misc_feature: MA Experiment 20001768 PARAMETER Experiment Name: At_Far-red-enriched-adult_P Parameter: Age (day) Value: 28
  misc_feature: MA Experiment 20001768 PARAMETER Experiment Name: At_Far-red-enriched-adult_P Parameter: Light Value: Far-red enriched vs. White
  misc_feature: MA Experiment 20001768 PARAMETER Experiment Name: At_Far-red-enriched-adult_P Parameter: Organism Value: A. thaliana
  misc_feature: MA Experiment 20001768 PARAMETER Experiment Name: At_Far-red-enriched-adult_P Parameter: Plant Line Value: Columbia
  misc_feature: MA Experiment 20001768 PARAMETER Experiment Name: At_Far-red-enriched-adult_P Parameter: Timepoint (hr) Value: 1
  misc_feature: MA Experiment 20001768 PARAMETER Experiment Name: At_Far-red-enriched-adult_P Parameter: Tissue Value: Aerial
  misc_feature: MA Experiment ID: 20001773 Result: Up-regulated in Transcription
  misc_feature: MA Experiment 20001773 PARAMETER Experiment Name: At_Far-red-enriched-adult_P Parameter: Age (day) Value: 30
  misc_feature: MA Experiment 20001773 PARAMETER Experiment Name: At_Far-red-enriched-adult_P Parameter: Light Value: Far-red enriched vs. White
  misc_feature: MA Experiment 20001773 PARAMETER Experiment Name: At_Far-red-enriched-adult_P Parameter: Organism Value: A. thaliana
  misc_feature: MA Experiment 20001773 PARAMETER Experiment Name: At_Far-red-enriched-adult_P Parameter: Plant Line Value: Columbia
  misc_feature: MA Experiment 20001773 PARAMETER Experiment Name: At_Far-red-enriched-adult_P Parameter: Timepoint (hr) Value: 48
  misc_feature: MA Experiment 20001773 PARAMETER Experiment Name: At_Far-red-enriched-adult_P Parameter: Tissue Value: Aerial
  misc_feature: MA Experiment ID: 20001911 Result: Down-regulated in Transcription
  misc_feature: MA Experiment 20001911 PARAMETER Experiment Name: At_Drought_Reproduction_P Parameter: Age (day) Value: 40
  misc_feature: MA Experiment 20001911 PARAMETER Experiment Name: At_Drought_Reproduction_P Parameter: Organism Value: A. thaliana
  misc_feature: MA Experiment 20001911 PARAMETER Experiment Name: At_Drought_Reproduction_P Parameter: Plant Line Value: WS
  misc_feature: MA Experiment 20001911 PARAMETER Experiment Name: At_Drought_Reproduction_P Parameter: Timepoint (day) Value: 10
  misc_feature: MA Experiment 20001911 PARAMETER Experiment Name: At_Drought_Reproduction_P Parameter: Tissue Value: Flowers
  misc_feature: MA Experiment 20001911 PARAMETER Experiment Name: At_Drought_Reproduction_P Parameter: Treatment Value: Drought vs. No Drought
atcttcctcattcatagatccaaaaacccaaatcgaaaaatcgattctttagtcagaaaaaatgaggaccaaatctccatcttctcttaatctcaaggtcatattcataggttcctcaatcttgatcttgatcatcatctacttagcaagatcaaacatctcttcttcctcttcaaagccaatctccaaaacaaatctctcccaagaagaagaagaaactcagcataaacaagaaggatgtccaacaacacaacaatgcacaaagatgccactttctttatccgatgcattggttcattacgtcactagtaacgtcactccacaacaaacatttgatgaagtctctgtctcaaagagagtcttggacaagaagtctccttgtaacttccttgtctttggcttaggtcacgacagtttaatgtgggcatctcttaaccatggtggtcgtaccttgtttattgaagaagaccaagcttggattgcgatagtaactaagaagttcccaaacttagaatcttaccacgtagtttacgacacaaaagtcaaagattcagacaagctgatggaactaggaagatcagaagagtgtagatctgtgtctgatccgagaaactccaaatgtgatcttgcgttgaaagatttcccggcggacttttacgagacgaaatgggatctgatcatggttgatgcaccaactggttaccatgaagaagctccggggaggatgagtgctatttacacggcggggcttttggctcgtaaccgtgaagatggtgaaactgacgtttttgttcacgacgttaaccgtccggtggaagatgagttctcggcgactttcttgtgtaaaggttatatgagggagcaaaatgggagacttagacattttactattcctagtcatcgggctcgtgctggacgacctttttgtccggtggaagttgatcgccgccgttaattttgtggtgggagatttatttagttcaccgtcgttggtcggtcaacggactcagggctggtaaattgttttacctagtggacattgaaggacttgcttagctggcattttgtatttgttttgttttgtttttgcttgatttaaatacgtttttcaagattttagtgcatttactgaaatcgatacatactagtattcgcatgattatttgtgatttcattatcccttttgattaatgaatacaaataaggaatttatc

SEQ ID NO: 40458 - protein, 297 aa, Arabidopsis thaliana
  peptide (1)..(297): Ceres Seq. ID no. 12370966
  misc_feature (51)..(289): Pfam Name: Protein of unknown function (DUF579) Pfam Description: Protein of unknown function (DUF579)
  misc_feature (70)..(284): Homolog of NCBI NO: 21537399 NR Description: unknown [Arabidopsis thaliana]
  misc_feature (70)..(284): Homolog of NCBI NO: 18396558 NR Description: expressed protein
  misc_feature (67)..(289): Homolog of NCBI NO: 15220402 NR Description: unknown protein; protein id: At1g67330.1
  misc_feature (135)..(296): Homolog of NCBI NO: 27754730 NR Description: unknown protein [Arabidopsis thaliana]
  misc_feature (19)..(290): Homolog of NCBI NO: 25354648 NR Description: hypothetical protein F14O23.3 [imported] -
  misc_feature (1)..(290): Homolog of NCBI NO: 18409879 NR Description: hypothetical protein; protein id: At1g71690.1
  misc_feature (44)..(290): Homolog of NCBI NO: 25402555 NR Description: hypothetical protein [imported] - Arabidopsis
  misc_feature (1)..(290): Homolog of NCBI NO: 15217566 NR Description: unknown protein; protein id: At1g09610.1
  misc_feature (1)..(296): Homolog of NCBI NO: 15234881 NR Description: putative protein; protein id: At4g09990.1
  misc_feature (1)..(297): Homolog of NCBI NO: 18398986 NR Description: expressed protein
MRTKSPSSLNLKVIFIGSSILILIIIYLARSNISSSSSKPISKTNLSQEEEETQHKQEGCPTTQQCTKMPLSLSDALVHYVTSNVTPQQTFDEVSVSKRVLDKKSPCNFLVFGLGHDSLMWASLNHGGRTLFIEEDQAWIAIVTKKFPNLESYHVVYDTKVKDSDKLMELGRSEECRSVSDPRNSKCDLALKDFPADFYETKWDLIMVDAPTGYHEEAPGRMSAIYTAGLLARNREDGETDVFVHDVNRPVEDEFSATFLCKGYMREQNGRLRHFTIPSHRARAGRPFCPVEVDRRR

SEQ ID NO: 40459 - protein, 229 aa, Arabidopsis thaliana
  peptide (1)..(229): Ceres Seq. ID no. 12370967
  misc_feature (1)..(221): Pfam Name: Protein of unknown function (DUF579) Pfam Description: Protein of unknown function (DUF579)
  misc_feature (2)..(216): Homolog of NCBI NO: 21537399 NR Description: unknown [Arabidopsis thaliana]
  misc_feature (2)..(216): Homolog of NCBI NO: 18396558 NR Description: expressed protein
  misc_feature (1)..(221): Homolog of NCBI NO: 15220402 NR Description: unknown protein; protein id: At1g67330.1
  misc_feature (67)..(228): Homolog of NCBI NO: 27754730 NR Description: unknown protein [Arabidopsis thaliana]
  misc_feature (1)..(222): Homolog of NCBI NO: 25354648 NR Description: hypothetical protein F14O23.3 [imported] -
  misc_feature (1)..(222): Homolog of NCBI NO: 18409879 NR Description: hypothetical protein; protein id: At1g71690.1
  misc_feature (1)..(222): Homolog of NCBI NO: 25402555 NR Description: hypothetical protein [imported] - Arabidopsis
  misc_feature (1)..(222): Homolog of NCBI NO: 15217566 NR Description: unknown protein; protein id: At1g09610.1
  misc_feature (1)..(228): Homolog of NCBI NO: 15234881 NR Description: putative protein; protein id: At4g09990.1
  misc_feature (1)..(229): Homolog of NCBI NO: 18398986 NR Description: expressed protein
MPLSLSDALVHYVTSNVTPQQTFDEVSVSKRVLDKKSPCNFLVFGLGHDSLMWASLNHGGRTLFIEEDQAWIAIVTKKFPNLESYHVVYDTKVKDSDKLMELGRSEECRSVSDPRNSKCDLALKDFPADFYETKWDLIMVDAPTGYHEEAPGRMSAIYTAGLLARNREDGETDVFVHDVNRPVEDEFSATFLCKGYMREQNGRLRHFTIPSHRARAGRPFCPVEVDRRR

SEQ ID NO: 40460 - protein, 178 aa, Arabidopsis thaliana
  peptide (1)..(178): Ceres Seq. ID no. 12370968
  misc_feature (1)..(170): Pfam Name: Protein of unknown function (DUF579) Pfam Description: Protein of unknown function (DUF579)
  misc_feature (1)..(165): Homolog of NCBI NO: 21537399 NR Description: unknown [Arabidopsis thaliana]
  misc_feature (1)..(165): Homolog of NCBI NO: 18396558 NR Description: expressed protein
  misc_feature (1)..(170): Homolog of NCBI NO: 15220402 NR Description: unknown protein; protein id: At1g67330.1
  misc_feature (16)..(177): Homolog of NCBI NO: 27754730 NR Description: unknown protein [Arabidopsis thaliana]
  misc_feature (1)..(171): Homolog of NCBI NO: 25354648 NR Description: hypothetical protein F14O23.3 [imported] -
  misc_feature (1)..(171): Homolog of NCBI NO: 18409879 NR Description: hypothetical protein; protein id: At1g71690.1
  misc_feature (1)..(171): Homolog of NCBI NO: 25402555 NR Description: hypothetical protein [imported] - Arabidopsis
  misc_feature (1)..(171): Homolog of NCBI NO: 15217566 NR Description: unknown protein; protein id: At1g09610.1
  misc_feature (1)..(177): Homolog of NCBI NO: 15234881 NR Description: putative protein; protein id: At4g09990.1
  misc_feature (1)..(178): Homolog of NCBI NO: 18398986 NR Description: expressed protein
MWASLNHGGRTLFIEEDQAWIAIVTKKFPNLESYHVVYDTKVKDSDKLMELGRSEECRSVSDPRNSKCDLALKDFPADFYETKWDLIMVDAPTGYHEEAPGRMSAIYTAGLLARNREDGETDVFVHDVNRPVEDEFSATFLCKGYMREQNGRLRHFTIPSHRARAGRPFCPVEVDRRR

SEQ ID NO: 40461 - DNA, 1128 bp, Arabidopsis thaliana
  misc_feature (1)..(1128): Ceres Seq. ID no. 12323867
  misc_feature: MA Experiment ID: 108434 Result: Down-regulated in Transcription
  misc_feature: MA Experiment 108434 PARAMETER Experiment Name: At_Root_Tips_cDNA_P Parameter: Tissue Value: Root Tips
acaacaatctcactttgtctttttttctctctctctctctctctcatagaaaaggaagtggtggaagatgccgaggccagggccaagaccgtacgactgtatcagaagagcttggcatagtgacagacaccaacccatgaggggtttgctcatccaagagattttcaggtcatcatcatcatctctctctcactttggatatctatctgtgtatctataggtttgtgtgtgtgcatgtctttctttagctcaattgttctttgaactatttgtaggattgtttatgagattcacagccaatccaccaggaaaaacacagaatggcaagagaagctccctgttgttgtcttgagagctgaagaaatcatgtattccaaagccaattctgaggctgagtatatggacatgaagacccttttagaccgtacaaacgacgccatcaacacaatcatacgacttgatgagaccaccgaaacaggggaatttcttcagccttgtattgaagctgcattgcatttggggtgcacaccaaggagagcttcaaggagccaacggaacattaacccgagatgttatcttagccaagactcaactaacttggacaacatgttgtcccaagtattcatgaaaccaaacaactttgctccaaagaatcttgcagtagcacaagagaattgccctgtctccaagtactctgcctaccctttatgctattcattccggccaatcagtgactcgtgtaagtccaagaacagtagaccggcgagtctcattgacgcaacaaatggcattacctttggtgggtgtgaatgtgatctatctctgcgcttaggtcctcttggacctcctactcaaaaacgaagtaagataagcagcaacaataacaactgaaaaggagagcaagattgggttttgattagcaagtcttgtgttagaagaatgtgtgcttagttaggccttttagtctcctctctagaccctaggtttaggtttgtgaacatgtaaatagagagacgaagtaacaaaacaggagatgaagtcgttttcttctacctgcatcaatctcgaatcatcagacttcacgaatgtatttttacattgcaacactgttcgagaaatatccattcc

SEQ ID NO: 40462 - protein, 174 aa, Arabidopsis thaliana
  peptide (1)..(174): Ceres Seq. ID no. 12323868
  misc_feature (1)..(71): Homolog of NCBI NO: 11994234 NR Description: gene_id:MUJ8.5~unknown protein [Arabidopsis
  misc_feature (1)..(71): Homolog of NCBI NO: 15230072 NR Description: hypothetical protein; protein id: At3g24150.1
  misc_feature (1)..(174): Homolog of NCBI NO: 22329083 NR Description: unknown protein; protein id: At4g32295.1
MYSKANSEAEYMDMKTLLDRTNDAINTIIRLDETTETGEFLQPCIEAALHLGCTPRRASRSQRNINPRCYLSQDSTNLDNMLSQVFMKPNNFAPKNLAVAQENCPVSKYSAYPLCYSFRPISDSCKSKNSRPASLIDATNGITFGGCECDLSLRLGPLGPPTQKRSKISSNNNN

SEQ ID NO: 40463 - protein, 163 aa, Arabidopsis thaliana
  peptide (1)..(163): Ceres Seq. ID no. 12323869
  misc_feature (1)..(60): Homolog of NCBI NO: 11994234 NR Description: gene_id:MUJ8.5~unknown protein [Arabidopsis
  misc_feature (1)..(60): Homolog of NCBI NO: 15230072 NR Description: hypothetical protein; protein id: At3g24150.1
  misc_feature (1)..(163): Homolog of NCBI NO: 22329083 NR Description: unknown protein; protein id: At4g32295.1
MDMKTLLDRTNDAINTIIRLDETTETGEFLQPCIEAALHLGCTPRRASRSQRNINPRCYLSQDSTNLDNMLSQVFMKPNNFAPKNLAVAQENCPVSKYSAYPLCYSFRPISDSCKSKNSRPASLIDATNGITFGGCECDLSLRLGPLGPPTQKRSKISSNNNN

SEQ ID NO: 40464 - protein, 161 aa, Arabidopsis thaliana
  peptide (1)..(161): Ceres Seq. ID no. 12323870
  misc_feature (1)..(58): Homolog of NCBI NO: 11994234 NR Description: gene_id:MUJ8.5~unknown protein [Arabidopsis
  misc_feature (1)..(58): Homolog of NCBI NO: 15230072 NR Description: hypothetical protein; protein id: At3g24150.1
  misc_feature (1)..(161): Homolog of NCBI NO: 22329083 NR Description: unknown protein; protein id: At4g32295.1
MKTLLDRTNDAINTIIRLDETTETGEFLQPCIEAALHLGCTPRRASRSQRNINPRCYLSQDSTNLDNMLSQVFMKPNNFAPKNLAVAQENCPVSKYSAYPLCYSFRPISDSCKSKNSRPASLIDATNGITFGGCECDLSLRLGPLGPPTQKRSKISSNNNN

SEQ ID NO: 40465 - DNA, 1737 bp, Arabidopsis thaliana
  misc_feature (1)..(1737): Ceres Seq. ID no. 13491401
  misc_feature: MA Experiment ID: 108595 Result: Down-regulated in Transcription
  misc_feature: MA Experiment 108595 PARAMETER Experiment Name: At_Ler-pi_Ovule_cDNA_P Parameter: Plant Line Value: null
  misc_feature: MA Experiment ID: 20000179 Result: Up-regulated in Transcription
  misc_feature: MA Experiment 20000179 PARAMETER Experiment Name: At_Germinating_Seeds_P Parameter: Age (hr) Value: 6 vs. 0
  misc_feature: MA Experiment 20000179 PARAMETER Experiment Name: At_Germinating_Seeds_P Parameter: Tissue Value: Germinating Seeds
  misc_feature: MA Experiment ID: 20000180 Result: Up-regulated in Transcription
  misc_feature: MA Experiment 20000180 PARAMETER Experiment Name: At_Germinating_Seeds_P Parameter: Age (hr) Value: 24 vs. 0
  misc_feature: MA Experiment 20000180 PARAMETER Experiment Name: At_Germinating_Seeds_P Parameter: Tissue Value: Germinating Seeds
  misc_feature: MA Experiment ID: 20000185 Result: Down-regulated in Transcription
  misc_feature: MA Experiment 20000185 PARAMETER Experiment Name: At_Roots__P Parameter: Age (day) Value: 7 vs. 21
  misc_feature: MA Experiment 20000185 PARAMETER Experiment Name: At_Roots__P Parameter: Organism Value: A. thaliana
  misc_feature: MA Experiment 20000185 PARAMETER Experiment Name: At_Roots__P Parameter: Tissue Value: Roots vs. Whole Plant
  misc_feature: MA Experiment ID: 20000269 Result: Down-regulated in Transcription
  misc_feature: MA Experiment 20000269 PARAMETER Experiment Name: At_1mM_KNO3_L-vs-H_Roots_P Parameter: Age (day) Value: 7,10,12
  misc_feature: MA Experiment 20000269 PARAMETER Experiment Name: At_1mM_KNO3_L-vs-H_Roots_P Parameter: Organism Value: A. thaliana
  misc_feature: MA Experiment 20000269 PARAMETER Experiment Name: At_1mM_KNO3_L-vs-H_Roots_P Parameter: Plant Line Value: WS
  misc_feature: MA Experiment 20000269 PARAMETER Experiment Name: At_1mM_KNO3_L-vs-H_Roots_P Parameter: Timepoint (day) Value: 7,10,12
  misc_feature: MA Experiment 20000269 PARAMETER Experiment Name: At_1mM_KNO3_L-vs-H_Roots_P Parameter: Tissue Value: Roots
  misc_feature: MA Experiment 20000269 PARAMETER Experiment Name: At_1mM_KNO3_L-vs-H_Roots_P Parameter: Treatment Value: 1mM KNO3 vs. 50mM KNO3
  misc_feature: MA Experiment ID: 20000439 Result: Down-regulated in Transcription
  misc_feature: MA Experiment 20000439 PARAMETER Experiment Name: At_Roots__P Parameter: Age (day) Value: 14 vs. 21
  misc_feature: MA Experiment 20000439 PARAMETER Experiment Name: At_Roots__P Parameter: Organism Value: A. thaliana
  misc_feature: MA Experiment 20000439 PARAMETER Experiment Name: At_Roots__P Parameter: Tissue Value: Roots vs. Whole Plant
  misc_feature: MA Experiment ID: 20000794 Result: Down-regulated in Transcription
  misc_feature: MA Experiment 20000794 PARAMETER Experiment Name: At_Petals_P Parameter: Age (day) Value: 23-25 days
  misc_feature: MA Experiment 20000794 PARAMETER Experiment Name: At_Petals_P Parameter: Plant Line Value: WS
  misc_feature: MA Experiment 20000794 PARAMETER Experiment Name: At_Petals_P Parameter: Tissue Value: Petals vs. Whole plant
  misc_feature: MA Experiment ID: 20001905 Result: Down-regulated in Transcription
  misc_feature: MA Experiment 20001905 PARAMETER Experiment Name: At_Drought_Reproduction_P Parameter: Age (day) Value: 40
  misc_feature: MA Experiment 20001905 PARAMETER Experiment Name: At_Drought_Reproduction_P Parameter: Organism Value: A. thaliana
  misc_feature: MA Experiment 20001905 PARAMETER Experiment Name: At_Drought_Reproduction_P Parameter: Plant Line Value: WS
  misc_feature: MA Experiment 20001905 PARAMETER Experiment Name: At_Drought_Reproduction_P Parameter: Timepoint (day) Value: 10
  misc_feature: MA Experiment 20001905 PARAMETER Experiment Name: At_Drought_Reproduction_P Parameter: Tissue Value: Rosettes
  misc_feature: MA Experiment 20001905 PARAMETER Experiment Name: At_Drought_Reproduction_P Parameter: Treatment Value: Drought vs. No Drought
aaagctccgttattcaagattattccgataatgcagtcactctccaccccacacaccatctctcttcttctccccagaacctctccgtctcgtctttctccctctcttcactcccttgctttccccactcgattacggtctctttcctattcttctcaaacgtcgatcctccccgatgccggcgatgatttcattgtcggtgactgtctcgtctacgaggacggcgtcttcgaagacccttaccttgataaggaggtcactcaggttgcgaagcaggagcgcaagaagaatcggcgtggcggggctaagagattagatgaatccgagattgagcccgagaacctcgtgccagaggaatggagggatattcaggcggaggtgaatctgacgaagaaggacaagcgcaaaatagcgcaggagatggagttcggggttcgggtggagaagaagaggcaagggctaattccgctgaggaaagttgacttgaatgactttctcacgtacaaggaagccaagttggctcaattgaggcctgtcattctcgataaaccgggaaatttctccgacgacagtggagcgtcaagcgatggagagaccgctgtatcatctcccagcgagcgagtggctcctaagaaccctagatgggcagtttacggaaagggattcgaccacgttgccaagttcttcaatagcgacaagtacgatcccagcgacaagaaatccgacggccctcgaaagctgctttcaaaagaagagaagtttatgctcaatagccggaatcctgacctagccgttgccacatcaaaaaaatggcttcctcttcacacagttaattaaattaatccccccccccccccgctccacacttcacccaaaactccagaaccctagaattcgaaatctccaaagaacccgacaaagcgccatgtcgctcactatcccggcgaatctcgttctcaacccgagatctaacaaatctctcactcaatccgtacctaaatcctccgcaagattcgtctgctccgatgacaaatcctcctcctccacacctcaatccatgaaagctttctccgccgccgtcgccctctcttccatcctcctctctgctcctatgccagctgtcgctgatatctcaggtttgactccttgcaaggactcaaaacagttcgctaaaagagagaagcaacagatcaagaagcttgaatcttctcttaagctctacgctcctgaatctgcccctgctcttgctctcaatgctcagatcgagaaaaccaaacgcaggttcgacaactacgggaagtacggattgttatgcgggtcagacggtttaccgcacttgatagtgaacggagaccagcggcattggggagagttcattactccagggattcttttcctctacattgctggatggatcgggtgggttggaagaagctacttaatagctattagtggtgagaagaaacccgcgatgaaagagatcatcatcgatgttcctttggctagtcggatcatcttccgtggtttcatttggcccgttgctgcctacagagagtttctcaatggtgatctcattgctaaggatgtttaaaaagggaacttgttttctgcttttgtgttactctctctaatctctttgttttccattgtacttattgaaaaacaatgcattgtcgaaaaccttataaaatttggattgcgcaagtagaaagaattatggctaaaatggtgattgac

SEQ ID NO: 40466 - protein, 278 aa, Arabidopsis thaliana
  peptide (1)..(278): Ceres Seq. ID no. 13491402
  misc_feature (17)..(277): Homolog of NCBI NO: 22758264 NR Description: Putative ankyrin-repeat protein
  misc_feature (11)..(277): Homolog of NCBI NO: 26450056 NR Description: unknown protein [Arabidopsis thaliana]
  misc_feature (11)..(277): Homolog of NCBI NO: 30698188 NR Description: expressed protein [Arabidopsis thaliana]
  misc_feature (1)..(277): Homolog of NCBI NO: 322461 NR Description: ankyrin-repeat protein - Arabidopsis thaliana
KAPLFKIIPIMQSLSTPHTISLLLPRTSPSRLSPSLHSLAFPTRLRSLSYSSQTSILPDAGDDFIVGDCLVYEDGVFEDPYLDKEVTQVAKQERKKNRRGGAKRLDESEIEPENLVPEEWRDIQAEVNLTKKDKRKIAQEMEFGVRVEKKRQGLIPLRKVDLNDFLTYKEAKLAQLRPVILDKPGNFSDDSGASSDGETAVSSPSERVAPKNPRWAVYGKGFDHVAKFFNSDKYDPSDKKSDGPRKLLSKEEKFMLNSRNPDLAVATSKKWLPLHTVN

SEQ ID NO: 40467 - protein, 268 aa, Arabidopsis thaliana
  peptide (1)..(268): Ceres Seq. ID no. 13491403
  misc_feature (7)..(267): Homolog of NCBI NO: 22758264 NR Description: Putative ankyrin-repeat protein
  misc_feature (1)..(267): Homolog of NCBI NO: 26450056 NR Description: unknown protein [Arabidopsis thaliana]
  misc_feature (1)..(267): Homolog of NCBI NO: 30698188 NR Description: expressed protein [Arabidopsis thaliana]
  misc_feature (1)..(267): Homolog of NCBI NO: 322461 NR Description: ankyrin-repeat protein - Arabidopsis thaliana
MQSLSTPHTISLLLPRTSPSRLSPSLHSLAFPTRLRSLSYSSQTSILPDAGDDFIVGDCLVYEDGVFEDPYLDKEVTQVAKQERKKNRRGGAKRLDESEIEPENLVPEEWRDIQAEVNLTKKDKRKIAQEMEFGVRVEKKRQGLIPLRKVDLNDFLTYKEAKLAQLRPVILDKPGNFSDDSGASSDGETAVSSPSERVAPKNPRWAVYGKGFDHVAKFFNSDKYDPSDKKSDGPRKLLSKEEKFMLNSRNPDLAVATSKKWLPLHTVN

SEQ ID NO: 40468 - protein, 221 aa, Arabidopsis thaliana
  peptide (1)..(221): Ceres Seq. ID no. 13491404
  misc_feature (47)..(221): Pfam Name: Photosystem I reaction centre subunit III Pfam Description: Photosystem I reaction centre subunit III
  misc_feature (51)..(220): Homolog of NCBI NO: 33863584 NR Description: Photosystem I PsaF protein (subunit III)
  misc_feature (40)..(216): Homolog of NCBI NO: 37522301 NR Description: photosystem I subunit III [Gloeobacter violaceus]
  misc_feature (38)..(220): Homolog of NCBI NO: 34897038 NR Description: photosystem-1 F subunit precursor
  misc_feature (1)..(220): Homolog of NCBI NO: 548604 NR Description: Photosystem I reaction centre subunit III,
  misc_feature (1)..(217): Homolog of NCBI NO: 1172664 NR Description: Photosystem I reaction centre subunit III,
  misc_feature (1)..(217): Homolog of NCBI NO: 30013659 NR Description: putative photosystem I subunit III precursor
  misc_feature (1)..(221): Homolog of NCBI NO: 8954295 NR Description: photosystem I reaction center subunit III [Vigna
  misc_feature (1)..(221): Homolog of NCBI NO: 5734518 NR Description: photosystem I subunit III precursor [Arabidopsis
  misc_feature (1)..(221): Homolog of NCBI NO: 15450361 NR Description: At1g31330/T19E23_1 [Arabidopsis thaliana]
  misc_feature (1)..(221): Homolog of NCBI NO: 15221681 NR Description: photosystem I subunit III precursor -related
MSLTIPANLVLNPRSNKSLTQSVPKSSARFVCSDDKSSSSTPQSMKAFSAAVALSSILLSAPMPAVADISGLTPCKDSKQFAKREKQQIKKLESSLKLYAPESAPALALNAQIEKTKRRFDNYGKYGLLCGSDGLPHLIVNGDQRHWGEFITPGILFLYIAGWIGWVGRSYLIAISGEKKPAMKEIIIDVPLASRIIFRGFIWPVAAYREFLNGDLIAKDV

SEQ ID NO: 40469 - DNA, 1224 bp, Arabidopsis thaliana
  misc_feature (1)..(1224): Ceres Seq. ID no. 12327591
  misc_feature: MA Experiment ID: 108462 Result: Down-regulated in Transcription
  misc_feature: MA Experiment 108462 PARAMETER Experiment Name: At_Germinating_Seeds_cDNA_P Parameter: Age (day) Value: 2 vs. 0
  misc_feature: MA Experiment 108462 PARAMETER Experiment Name: At_Germinating_Seeds_cDNA_P Parameter: Tissue Value: Germinating Seeds
  misc_feature: MA Experiment ID: 108463 Result: Down-regulated in Transcription
  misc_feature: MA Experiment 108463 PARAMETER Experiment Name: At_Germinating_Seeds_cDNA_P Parameter: Age (day) Value: 3 vs. 0
  misc_feature: MA Experiment 108463 PARAMETER Experiment Name: At_Germinating_Seeds_cDNA_P Parameter: Tissue Value: Germinating Seeds
  misc_feature: MA Experiment ID: 108464 Result: Down-regulated in Transcription
  misc_feature: MA Experiment 108464 PARAMETER Experiment Name: At_Germinating_Seeds_cDNA_P Parameter: Age (day) Value: 4 vs. 0
  misc_feature: MA Experiment 108464 PARAMETER Experiment Name: At_Germinating_Seeds_cDNA_P Parameter: Tissue Value: Germinating Seeds
  misc_feature: MA Experiment ID: 108573 Result: Down-regulated in Transcription
  misc_feature: MA Experiment 108573 PARAMETER Experiment Name: At_Drought_cDNA_P Parameter: Timepoint (hr) Value: 6
  misc_feature: MA Experiment 108573 PARAMETER Experiment Name: At_Drought_cDNA_P Parameter: Tissue Value: Aerial
  misc_feature: MA Experiment 108573 PARAMETER Experiment Name: At_Drought_cDNA_P Parameter: Treatment Value: Drought vs. No Drought
  misc_feature: MA Experiment ID: 108595 Result: Down-regulated in Transcription
  misc_feature: MA Experiment 108595 PARAMETER Experiment Name: At_Ler-pi_Ovule_cDNA_P Parameter: Plant Line Value: null
  misc_feature: MA Experiment ID: 20000173 Result: Down-regulated in Transcription
  misc_feature: MA Experiment 20000173 PARAMETER Experiment Name: At_42deg_Heat_P Parameter: Age (day) Value: 14
  misc_feature: MA Experiment 20000173 PARAMETER Experiment Name: At_42deg_Heat_P Parameter: Organism Value: A. thaliana
  misc_feature: MA Experiment 20000173 PARAMETER Experiment Name: At_42deg_Heat_P Parameter: Plant Line Value: WS
  misc_feature: MA Experiment 20000173 PARAMETER Experiment Name: At_42deg_Heat_P Parameter: Temperature (deg C) Value: 42 vs. 22
  misc_feature: MA Experiment 20000173 PARAMETER Experiment Name: At_42deg_Heat_P Parameter: Timepoint (hr) Value: 6
  misc_feature: MA Experiment 20000173 PARAMETER Experiment Name: At_42deg_Heat_P Parameter: Tissue Value: Aerial
  misc_feature: MA Experiment ID: 20000436 Result: Down-regulated in Transcription
  misc_feature: MA Experiment 20000436 PARAMETER Experiment Name: At_Drought_P Parameter: Age (day) Value: 7
  misc_feature: MA Experiment 20000436 PARAMETER Experiment Name: At_Drought_P Parameter: Organism Value: A. thaliana
  misc_feature: MA Experiment 20000436 PARAMETER Experiment Name: At_Drought_P Parameter: Plant Line Value: WS
  misc_feature: MA Experiment 20000436 PARAMETER Experiment Name: At_Drought_P Parameter: Timepoint (hr) Value: 12
  misc_feature: MA Experiment 20000436 PARAMETER Experiment Name: At_Drought_P Parameter: Tissue Value: Whole Plant
  misc_feature: MA Experiment 20000436 PARAMETER Experiment Name: At_Drought_P Parameter: Treatment Value: Drought vs. No Drought
  misc_feature: MA Experiment ID: 20000437 Result: Down-regulated in Transcription
  misc_feature: MA Experiment 20000437 PARAMETER Experiment Name: At_Drought_P Parameter: Age (day) Value: 8
  misc_feature: MA Experiment 20000437 PARAMETER Experiment Name: At_Drought_P Parameter: Organism Value: A. thaliana
  misc_feature: MA Experiment 20000437 PARAMETER Experiment Name: At_Drought_P Parameter: Plant Line Value: WS
  misc_feature: MA Experiment 20000437 PARAMETER Experiment Name: At_Drought_P Parameter: Timepoint (hr) Value: 24
  misc_feature: MA Experiment 20000437 PARAMETER Experiment Name: At_Drought_P Parameter: Tissue Value: Whole Plant
  misc_feature: MA Experiment 20000437 PARAMETER Experiment Name: At_Drought_P Parameter: Treatment Value: Drought vs. No Drought
aacaaaactctcaaagtcgcaacagaaaagaaacgagagagatatggtggtaggcggcggaggagaaggagatcagaagagaagcagcggagaaatgatggcgatggcgagtttattcaacgatcagcagaatccaattcaacagtttcaggttaaattcaaagaagtagaaactaatttcaagacatggttgtcgaaacagtcgattccggtggaagccgccgtcgtatccaccatgagcggtgtacaaggagctttcattggtggtctcatgggaacactctctcctgaaatgcctcaagccggcgttgaccctcaagccatagcttcgatgaaacaagctcaggtttcaactctatataaaccctatcctcattcaaatgtttgtaaaattgaggtatgagaattagggtttttgaatctgtaggctcttgtgggtggtccttgggtccaagctcggaattttgctgcaattactggtgtgaatgctggaattgcttctgttatgaagcggattagaggcaaagaggatattgaatctgcagtggtggcagcgttaggatctggatttgcatactcattggtgagccaaggattgcaaggacaacctatgaatgcaatcactactgctgctggttttgctgtttttcaaggagtgttttttaaattggagaaagattctctaaaccgagtactgaagatccatttttcacaagaggaaggacaatgctagtaaagctaggtttggagaaatacgagaagaacttcaagaaaggacttttaactgatcccacattgccattgctcactgatagcgcgctgaaagatgcgaacatcccaccagggccaagacttatgatactagatcatatccagagggacccggagataaagggcaaacgaaagtaggagccatgttgtttaatcaaatatgttttgatggtaacgatcttcaaacacatatgtaatgccttttacttttagctgctattgccatgaagagctcttgttagatacttctgtttctattaccaatgtttgattctctttaaaaaattgagtagttcgtctcaaatcaaattggatataggttctgaataaaacgaaaatgaaatatgctttgtatgagaataagatgtttatattatgtatagttgattgacttaagatcaagactcgataaaattttggttcatacaattggccaatcaccaaagtgattcg

SEQ ID NO: 40470 - protein, 133 aa, Arabidopsis thaliana
  peptide (1)..(133): Ceres Seq. ID no. 12327592
  misc_feature (33)..(115): Homolog of NCBI NO: 21593899 NR Description: unknown [Arabidopsis thaliana]
  misc_feature (17)..(115): Homolog of NCBI NO: 15238598 NR Description: putative protein
  misc_feature (15)..(115): Homolog of NCBI NO: 15229167 NR Description: putative protein
TKLSKSQQKRNERDMVVGGGGEGDQKRSSGEMMAMASLFNDQQNPIQQFQVKFKEVETNFKTWLSKQSIPVEAAVVSTMSGVQGAFIGGLMGTLSPEMPQAGVDPQAIASMKQAQVSTLYKPYPHSNVCKIEV

SEQ ID NO: 40471 - protein, 119 aa, Arabidopsis thaliana
  peptide (1)..(119): Ceres Seq. ID no. 12327593
  misc_feature (19)..(101): Homolog of NCBI NO: 21593899 NR Description: unknown [Arabidopsis thaliana]
  misc_feature (3)..(101): Homolog of NCBI NO: 15238598 NR Description: putative protein
  misc_feature (1)..(101): Homolog of NCBI NO: 15229167 NR Description: putative protein
MVVGGGGEGDQKRSSGEMMAMASLFNDQQNPIQQFQVKFKEVETNFKTWLSKQSIPVEAAVVSTMSGVQGAFIGGLMGTLSPEMPQAGVDPQAIASMKQAQVSTLYKPYPHSNVCKIEV

SEQ ID NO: 40472 - protein, 102 aa, Arabidopsis thaliana
  peptide (1)..(102): Ceres Seq. ID no. 12327594
  misc_feature (2)..(84): Homolog of NCBI NO: 21593899 NR Description: unknown [Arabidopsis thaliana]
  misc_feature (1)..(84): Homolog of NCBI NO: 15238598 NR Description: putative protein
  misc_feature (1)..(84): Homolog of NCBI NO: 15229167 NR Description: putative protein
MMAMASLFNDQQNPIQQFQVKFKEVETNFKTWLSKQSIPVEAAVVSTMSGVQGAFIGGLMGTLSPEMPQAGVDPQAIASMKQAQVSTLYKPYPHSNVCKIEV

SEQ ID NO: 40473 - DNA, 1400 bp, Arabidopsis thaliana
  misc_feature (1)..(1400): Ceres Seq. ID no. 12422192
  misc_feature: MA Experiment ID: 108461 Result: Up-regulated in Transcription
  misc_feature: MA Experiment 108461 PARAMETER Experiment Name: At_Germinating_Seeds_cDNA_P Parameter: Age (day) Value: 1 vs. 0
  misc_feature: MA Experiment 108461 PARAMETER Experiment Name: At_Germinating_Seeds_cDNA_P Parameter: Tissue Value: Germinating Seeds
  misc_feature: MA Experiment ID: 108462 Result: Up-regulated in Transcription
  misc_feature: MA Experiment 108462 PARAMETER Experiment Name: At_Germinating_Seeds_cDNA_P Parameter: Age (day) Value: 2 vs. 0
  misc_feature: MA Experiment 108462 PARAMETER Experiment Name: At_Germinating_Seeds_cDNA_P Parameter: Tissue Value: Germinating Seeds
  misc_feature: MA Experiment ID: 108463 Result: Up-regulated in Transcription
  misc_feature: MA Experiment 108463 PARAMETER Experiment Name: At_Germinating_Seeds_cDNA_P Parameter: Age (day) Value: 3 vs. 0
  misc_feature: MA Experiment 108463 PARAMETER Experiment Name: At_Germinating_Seeds_cDNA_P Parameter: Tissue Value: Germinating Seeds
  misc_feature: MA Experiment ID: 108464 Result: Up-regulated in Transcription
  misc_feature: MA Experiment 108464 PARAMETER Experiment Name: At_Germinating_Seeds_cDNA_P Parameter: Age (day) Value: 4 vs. 0
  misc_feature: MA Experiment 108464 PARAMETER Experiment Name: At_Germinating_Seeds_cDNA_P Parameter: Tissue Value: Germinating Seeds
  misc_feature: MA Experiment ID: 108489 Result: Down-regulated in Transcription
  misc_feature: MA Experiment ID: 20000111 Result: Down-regulated in Transcription
  misc_feature: MA Experiment 20000111 PARAMETER Experiment Name: At_42deg_Heat_cDNA_P Parameter: Temperature (deg C) Value: 42 vs. 22
  misc_feature: MA Experiment 20000111 PARAMETER Experiment Name: At_42deg_Heat_cDNA_P Parameter: Timepoint (hr) Value: 6
  misc_feature: MA Experiment 20000111 PARAMETER Experiment Name: At_42deg_Heat_cDNA_P Parameter: Tissue Value: Aerial
  misc_feature: MA Experiment ID: 20000180 Result: Up-regulated in Transcription
  misc_feature: MA Experiment 20000180 PARAMETER Experiment Name: At_Germinating_Seeds_P Parameter: Age (hr) Value: 24 vs. 0
  misc_feature: MA Experiment 20000180 PARAMETER Experiment Name: At_Germinating_Seeds_P Parameter: Tissue Value: Germinating Seeds
  misc_feature: MA Experiment ID: 20001248 Result: Down-regulated in Transcription
  misc_feature: MA Experiment 20001248 PARAMETER Experiment Name: At_Far-red-induction_P Parameter: Age (day) Value: 7
  misc_feature: MA Experiment 20001248 PARAMETER Experiment Name: At_Far-red-induction_P Parameter: Light Value: Far-red vs. White
  misc_feature: MA Experiment 20001248 PARAMETER Experiment Name: At_Far-red-induction_P Parameter: Organism Value: A. thaliana
  misc_feature: MA Experiment 20001248 PARAMETER Experiment Name: At_Far-red-induction_P Parameter: Plant Line Value: Columbia
  misc_feature: MA Experiment 20001248 PARAMETER Experiment Name: At_Far-red-induction_P Parameter: Timepoint (hr) Value: 4
  misc_feature: MA Experiment 20001248 PARAMETER Experiment Name: At_Far-red-induction_P Parameter: Tissue Value: Whole Plant
  misc_feature: MA Experiment ID: 20001557 Result: Down-regulated in Transcription
  misc_feature: MA Experiment 20001557 PARAMETER Experiment Name: At_Drought_Soil_Dry_P Parameter: Age (day) Value: 27
  misc_feature: MA Experiment 20001557 PARAMETER Experiment Name: At_Drought_Soil_Dry_P Parameter: Organism Value: A. thaliana
  misc_feature: MA Experiment 20001557 PARAMETER Experiment Name: At_Drought_Soil_Dry_P Parameter: Plant Line Value: WS
  misc_feature: MA Experiment 20001557 PARAMETER Experiment Name: At_Drought_Soil_Dry_P Parameter: Post Timepoint (hr) Value: 3
  misc_feature: MA Experiment 20001557 PARAMETER Experiment Name: At_Drought_Soil_Dry_P Parameter: Post-Treatment Value: Re-Water vs. No Drought
  misc_feature: MA Experiment 20001557 PARAMETER Experiment Name: At_Drought_Soil_Dry_P Parameter: Timepoint (day) Value: 13
  misc_feature: MA Experiment 20001557 PARAMETER Experiment Name: At_Drought_Soil_Dry_P Parameter: Treatment Value: Drought vs. No Drought
  misc_feature: MA Experiment ID: 20001558 Result: Down-regulated in Transcription
  misc_feature: MA Experiment 20001558 PARAMETER Experiment Name: At_Drought_Soil_Dry_P Parameter: Age (day) Value: 27
  misc_feature: MA Experiment 20001558 PARAMETER Experiment Name: At_Drought_Soil_Dry_P Parameter: Organism Value: A. thaliana
  misc_feature: MA Experiment 20001558 PARAMETER Experiment Name: At_Drought_Soil_Dry_P Parameter: Plant Line Value: WS
  misc_feature: MA Experiment 20001558 PARAMETER Experiment Name: At_Drought_Soil_Dry_P Parameter: Post Timepoint (hr) Value: 6
  misc_feature: MA Experiment 20001558 PARAMETER Experiment Name: At_Drought_Soil_Dry_P Parameter: Post-Treatment Value: Re-Water vs. No Drought
  misc_feature: MA Experiment 20001558 PARAMETER Experiment Name: At_Drought_Soil_Dry_P Parameter: Timepoint (day) Value: 13
  misc_feature: MA Experiment 20001558 PARAMETER Experiment Name: At_Drought_Soil_Dry_P Parameter: Treatment Value: Drought vs. No Drought
  misc_feature: MA Experiment ID: 20001905 Result: Down-regulated in Transcription
  misc_feature: MA Experiment 20001905 PARAMETER Experiment Name: At_Drought_Reproduction_P Parameter: Age (day) Value: 40
  misc_feature: MA Experiment 20001905 PARAMETER Experiment Name: At_Drought_Reproduction_P Parameter: Organism Value: A. thaliana
  misc_feature: MA Experiment 20001905 PARAMETER Experiment Name: At_Drought_Reproduction_P Parameter: Plant Line Value: WS
  misc_feature: MA Experiment 20001905 PARAMETER Experiment Name: At_Drought_Reproduction_P Parameter: Timepoint (day) Value: 10
  misc_feature: MA Experiment 20001905 PARAMETER Experiment Name: At_Drought_Reproduction_P Parameter: Tissue Value: Rosettes
  misc_feature: MA Experiment 20001905 PARAMETER Experiment Name: At_Drought_Reproduction_P Parameter: Treatment Value: Drought vs. No Drought
  misc_feature: MA Experiment ID: 20001911 Result: Down-regulated in Transcription
  misc_feature: MA Experiment 20001911 PARAMETER Experiment Name: At_Drought_Reproduction_P Parameter: Age (day) Value: 40
  misc_feature: MA Experiment 20001911 PARAMETER Experiment Name: At_Drought_Reproduction_P Parameter: Organism Value: A. thaliana
  misc_feature: MA Experiment 20001911 PARAMETER Experiment Name: At_Drought_Reproduction_P Parameter: Plant Line Value: WS
  misc_feature: MA Experiment 20001911 PARAMETER Experiment Name: At_Drought_Reproduction_P Parameter: Timepoint (day) Value: 10
  misc_feature: MA Experiment 20001911 PARAMETER Experiment Name: At_Drought_Reproduction_P Parameter: Tissue Value: Flowers
  misc_feature: MA Experiment 20001911 PARAMETER Experiment Name: At_Drought_Reproduction_P Parameter: Treatment Value: Drought vs. No Drought
atctgtcgtgttctgtttgttctcacttctcacttctcagatttttataaacatgaatgaaacctgaattgttccactaactctcagcaaaaatgcgatcactttacttaatcgtcttcatcgttattagtcttgttaaagcttcgaaaagcgatgatgggttttgttcagcgccttcgattgttgaatcggatgagaagacgaaacccatttattggaaagccacgaatccaacactctctccttcacacctccaagacttgcctggtttcacacgaagtgtatacaaacgagatcatgcgttaataacaccggaaagtcatgtatacagccctttacctgactggacaaacacattaggggcgtatttgatcacaccggcaacgggttcccattttgtcatgtacttggcgaaaatgaaagaaatgtcaagttcaggtttgcctccacaagacatagagcggtattattacttatatgagctctatctttaacatatgcttgcacttatgatctataatctgctttttaactcctttcaatattctgaatctttttcaagtcttatattcgtggtcgagggtgctgtgacactcactaacacatccagttcttcaaaaaaattgacggtatgatttgtacaaaggaaaatttaccacagtattcttctggttacatcacgttctgcccagatttgatggtgaaatggttgcaagatttctccattagttttatcattttctgctgataatccatttttcctgtaggttgattcatatgcgtacctacctccaaactttcaccattccttggactgtgttgagtctgcaacacttgttgtcttcgagcggaggtatgaatatctaggaagtcacaccacagagcttattgttggctccacagacaagcaaccactactcgagactcctggtgaggtttttgaactgcggaaacttcttccgatgtccgttgcttatgacttcaacatccatattatggattttcagcctggagagtttctgaatgttaaggaagttcattataaccagcatggtttgttgcttctggaggggcaaggcatttatcgcttgggtgataactggtatccagttcaggctggtgatgtcatatggatggctccttttgtccctcaatggtatgctgcactcggaaagactaggtctcggtatttgttgtacaaagatgtgaatcgaaatccattgtgatcaaagattgatatgactttgcagtaaaagtcagaatcttgttgttcagcttcttgtcttataaacgccatgtccactctaagcactagctacgtgagacttagttgtatgaatcttataacaattgtgaaaagaaacacattgataaatgatgaaatgactctctctctctcc

SEQ ID NO: 40474 - protein, 133 aa, Arabidopsis thaliana
  peptide (1)..(133): Ceres Seq. ID no. 12422193
  misc_feature (61)..(130): Pfam Name: Protein of unknown function (DUF923) Pfam Description: Protein of unknown function (DUF923)
  misc_feature (59)..(128): Homolog of NCBI NO: 27375364 NR Description: blr0253 [Bradyrhizobium japonicum]
  misc_feature (2)..(109): Homolog of NCBI NO: 34901774 NR Description: OJ1058_B11.16 [Oryza sativa (japonica
  misc_feature (2)..(130): Homolog of NCBI NO: 34393580 NR Description: putative glyoxylate induced protein
  misc_feature (1)..(130): Homolog of NCBI NO: 22328740 NR Description: hypothetical protein; protein id: At4g17050.1
MRSLYLIVFIVISLVKASKSDDGFCSAPSIVESDEKTKPIYWKATNPTLSPSHLQDLPGFTRSVYKRDHALITPESHVYSPLPDWTNTLGAYLITPATGSHFVMYLAKMKEMSSSGLPPQDIERYYYLYELYL

SEQ ID NO: 40475 - protein, 87 aa, Arabidopsis thaliana
  peptide (1)..(87): Ceres Seq. ID no. 12422194
  misc_feature (1)..(87): Pfam Name: Protein of unknown function (DUF923) Pfam Description: Protein of unknown function (DUF923)
  misc_feature (1)..(85): Homolog of NCBI NO: 16265139 NR Description: conserved hypothetical protein [Sinorhizobium
  misc_feature (1)..(85): Homolog of NCBI NO: 23501251 NR Description: conserved hypothetical protein [Brucella suis
  misc_feature (1)..(85): Homolog of NCBI NO: 23113628 NR Description: hypothetical protein [Desulfitobacterium
  misc_feature (1)..(86): Homolog of NCBI NO: 29377458 NR Description: conserved hypothetical protein [Enterococcus
  misc_feature (1)..(87): Homolog of NCBI NO: 15806172 NR Description: conserved hypothetical protein [Deinococcus
  misc_feature (1)..(85): Homolog of NCBI NO: 27375364 NR Description: blr0253 [Bradyrhizobium japonicum]
  misc_feature (1)..(81): Homolog of NCBI NO: 7485211 NR Description: hypothetical protein - Arabidopsis thaliana
  misc_feature (1)..(23): Homolog of NCBI NO: 34901774 NR Description: OJ1058_B11.16 [Oryza sativa (japonica
  misc_feature (1)..(87): Homolog of NCBI NO: 34393580 NR Description: putative glyoxylate induced protein
  misc_feature (1)..(87): Homolog of NCBI NO: 22328740 NR Description: hypothetical protein; protein id: At4g17050.1
MSVAYDFNIHIMDFQPGEFLNVKEVHYNQHGLLLLEGQGIYRLGDNWYPVQAGDVIWMAPFVPQWYAALGKTRSRYLLYKDVNRNPL

SEQ ID NO: 40476 - protein, 76 aa, Arabidopsis thaliana
  peptide (1)..(76): Ceres Seq. ID no. 12422195
  misc_feature (1)..(76): Pfam Name: Protein of unknown function (DUF923) Pfam Description: Protein of unknown function (DUF923)
  misc_feature (1)..(74): Homolog of NCBI NO: 16265139 NR Description: conserved hypothetical protein [Sinorhizobium
  misc_feature (1)..(74): Homolog of NCBI NO: 23501251 NR Description: conserved hypothetical protein [Brucella suis
  misc_feature (1)..(74): Homolog of NCBI NO: 23113628 NR Description: hypothetical protein [Desulfitobacterium
  misc_feature (1)..(75): Homolog of NCBI NO: 29377458 NR Description: conserved hypothetical protein [Enterococcus
  misc_feature (1)..(76): Homolog of NCBI NO: 15806172 NR Description: conserved hypothetical protein [Deinococcus
  misc_feature (1)..(74): Homolog of NCBI NO: 27375364 NR Description: blr0253 [Bradyrhizobium japonicum]
  misc_feature (1)..(70): Homolog of NCBI NO: 7485211 NR Description: hypothetical protein - Arabidopsis thaliana
  misc_feature (1)..(12): Homolog of NCBI NO: 34901774 NR Description: OJ1058_B11.16 [Oryza sativa (japonica
  misc_feature (1)..(76): Homolog of NCBI NO: 34393580 NR Description: putative glyoxylate induced protein
  misc_feature (1)..(76): Homolog of NCBI NO: 22328740 NR Description: hypothetical protein; protein id: At4g17050.1
MDFQPGEFLNVKEVHYNQHGLLLLEGQGIYRLGDNWYPVQAGDVIWMAPFVPQWYAALGKTRSRYLLYKDVNRNPL

SEQ ID NO: 40477 - DNA, 2154 bp, Arabidopsis thaliana
  misc_feature (1)..(2154): Ceres Seq. ID no. 13499967
  misc_feature: MA Experiment ID: 108434 Result: Up-regulated in Transcription
  misc_feature: MA Experiment 108434 PARAMETER Experiment Name: At_Root_Tips_cDNA_P Parameter: Tissue Value: Root Tips
  misc_feature: MA Experiment ID: 108576 Result: Down-regulated in Transcription
  misc_feature: MA Experiment 108576 PARAMETER Experiment Name: At_42deg_Heat_cDNA_P Parameter: Temperature (deg C) Value: 42 vs. 22
  misc_feature: MA Experiment 108576 PARAMETER Experiment Name: At_42deg_Heat_cDNA_P Parameter: Timepoint (hr) Value: 1
  misc_feature: MA Experiment 108576 PARAMETER Experiment Name: At_42deg_Heat_cDNA_P Parameter: Tissue Value: Aerial
  misc_feature: MA Experiment ID: 108577 Result: Down-regulated in Transcription
  misc_feature: MA Experiment 108577 PARAMETER Experiment Name: At_42deg_Heat_cDNA_P Parameter: Temperature (deg C) Value: 42 vs. 22
  misc_feature: MA Experiment 108577 PARAMETER Experiment Name: At_42deg_Heat_cDNA_P Parameter: Timepoint (hr) Value: 6
  misc_feature: MA Experiment 108577 PARAMETER Experiment Name: At_42deg_Heat_cDNA_P Parameter: Tissue Value: Aerial
  misc_feature: MA Experiment ID: 20000113 Result: Down-regulated in Transcription
  misc_feature: MA Experiment 20000113 PARAMETER Experiment Name: At_42deg_Heat_cDNA_P Parameter: Temperature (deg C) Value: 42 vs. 22
  misc_feature: MA Experiment 20000113 PARAMETER Experiment Name: At_42deg_Heat_cDNA_P Parameter: Timepoint (hr) Value: 8
  misc_feature: MA Experiment 20000113 PARAMETER Experiment Name: At_42deg_Heat_cDNA_P Parameter: Tissue Value: Aerial
  misc_feature: MA Experiment ID: 20000235 Result: Up-regulated in Transcription
  misc_feature: MA Experiment 20000235 PARAMETER Experiment Name: At_Siliques_P Parameter: Age (day) Value: 21
  misc_feature: MA Experiment 20000235 PARAMETER Experiment Name: At_Siliques_P Parameter: Organism Value: A. thaliana
  misc_feature: MA Experiment 20000235 PARAMETER Experiment Name: At_Siliques_P Parameter: Plant Line Value: WS
  misc_feature: MA Experiment 20000235 PARAMETER Experiment Name: At_Siliques_P Parameter: Tissue Value: 5-10mm Siliques vs. Whole Plant
gagacaaaaaggaaaaaaacaaaattaaaattaggaaagttaaaataattttcctgcaaatttcttctttctcagaaatctaaaaaaaaacaatgaagaaaacaccgtaacgaatcataaaatttctcaaaatccaaactctgttttttgttcttcctcttccagatttggtttctttttttgaaaaactctctagcttcagttttttttttctctctctctctctctctaggaatgtttttgttcgtggatactggaatcatgagaataagattttgaaggagaaagcaagatccatgttctttgtcggagaatttagggctaatatgtggatttgagcttctttgattcccaatttgtgaaagttttgaaatttttgggaaagagagaatgtttaagcagtttctgagtaaacttccgaggaagtcttcaaaatctgattcaggagagctgaatcgttcgagttcgggtccggtatcgtctccggttcagagatccggtactagtggtggtggttcgggtccggttcgatctaactcagggaagcgtatgtcatctgctgtgttcccagctagtgttgttgctggtattgagcctttggtaccgtttaaggatgtaccaagctctgagaagttgaatctctttgtgagtaaagttagtctctgttgtgtgacatttgatttctctgaccctggtaaaaactctatagagaaagatgttaaaaggcagacattgttggagcttttggattttgtagcttcagggtctgttaagttcactgagccagctattcttgcaatgtgtagaatgtgtgctgttaatctctttagggtctttcctccgaattatcggtctagttctggtggcgaaaacgatgatgatgaaccgatgtttgaccctgcttggcctcatttgcagattgtgtatgatttgttgcttaagtttatcacttctccgtgtcttgatgctaaagtggcaaaaaagtatttagatcatgctttcattgtgaggttgcttgacttgtttgattcggaggatcctagagaacgggagtgtttgaagacgattctgcatcgggtatatgggaagttcatggttcataggccatttgtacgcaagtccatgagcaatatattctaccggtttgtgtttgagacagagaagcatagcggaatcgctgagcttttggagattttcgggagtatagtgagtggatttgcgttgcctttgaaagaagagcataagatcttcttgtggagagtgttgattccattgcacaagcctaaatctgttggaaactactttcagcagctttcttattgtatcactcagttcatagataaagagccgaaactaggcagtgttgtgataaagggtttgttgaagttctggcctatcacgaatagtcagaaggaagtgatgtttctcggggaggtcgaagaaattgtagaagcaatgagtgtgatggagtttcaaaagatcatggtccctttgttcttgcggattgcttgttgtgtcaccagttcccactttcaggtttctgaaagagctttattcttgtggaacaacgatcaaattgtaaacttgattggacataaccggcaagccatcctaccaatcatgttcactgctttagaaaagaatgctcagaaccactggaaccaatccgtgctaaacttaaccttaaacgtacgaaaaatgttctgcgaaatggacgaggctctgttcatgtcttgccacgcccgctttaaggaggacgaagcaaagcaatgttctgctgcggaaaagaggaaagaagtatgggcaaggctagagaatgcagcaagtatgaagccgataacaggaaagactgctgttctggtaactcctcgagcaacctccatcgcctgctaaatagcgtttaaaccaattcacagacagtttatccaaagcaacaacatcgagaagatgatggagtggctgttgcttaagctatagtcttgggaacttttcatcgaggttgatctctgtaatattatataactttgatgttgttagctgtgtgggttttaatgctaattctattgctttcttttaaagcaatgaaaccatgctgcagatttttatcaaactctttgtatcaatcaattaagtttatatatcctttttctttcg

SEQ ID NO: 40478 - protein, 500 aa, Arabidopsis thaliana
  peptide (1)..(500): Ceres Seq. ID no. 13499968
  misc_feature (73)..(475): Pfam Name: Protein phosphatase 2A regulatory B subunit (B56 Pfam Description: Protein phosphatase 2A regulatory B subunit
  misc_feature (6)..(497): Homolog of NCBI NO: 15233119 NR Description: B regulatory subunit of PP2A -related
  misc_feature (1)..(497): Homolog of NCBI NO: 11994401 NR Description: protein phosphatase 2A B' regulatory subunit
  misc_feature (1)..(481): Homolog of NCBI NO: 21537284 NR Description: B regulatory subunit of protein phosphatase 2A,
  misc_feature (1)..(481): Homolog of NCBI NO: 15222851 NR Description: B regulatory subunit of protein phosphatase 2A
  misc_feature (1)..(497): Homolog of NCBI NO: 21530784 NR Description: putative protein phosphatase 2A B'zeta subunit
  misc_feature (1)..(497): Homolog of NCBI NO: 20147343 NR Description: AT4g15410/dl3750w [Arabidopsis thaliana]
  misc_feature (1)..(497): Homolog of NCBI NO: 18414444 NR Description: B' regulatory subunit of PP2A (AtB'gamma)
  misc_feature (1)..(497): Homolog of NCBI NO: 7485149 NR Description: hypothetical protein - Arabidopsis thaliana
  misc_feature (1)..(499): Homolog of NCBI NO: 21530782 NR Description: protein phosphatase 2A B'kappa subunit
  misc_feature (1)..(500): Homolog of NCBI NO: 15239451 NR Description: AtBgamma - like protein [Arabidopsis thaliana]
MFKQFLSKLPRKSSKSDSGELNRSSSGPVSSPVQRSGTSGGGSGPVRSNSGKRMSSAVFPASVVAGIEPLVPFKDVPSSEKLNLFVSKVSLCCVTFDFSDPGKNSIEKDVKRQTLLELLDFVASGSVKFTEPAILAMCRMCAVNLFRVFPPNYRSSSGGENDDDEPMFDPAWPHLQIVYDLLLKFITSPCLDAKVAKKYLDHAFIVRLLDLFDSEDPRERECLKTILHRVYGKFMVHRPFVRKSMSNIFYRFVFETEKHSGIAELLEIFGSIVSGFALPLKEEHKIFLWRVLIPLHKPKSVGNYFQQLSYCITQFIDKEPKLGSVVIKGLLKFWPITNSQKEVMFLGEVEEIVEAMSVMEFQKIMVPLFLRIACCVTSSHFQVSERALFLWNNDQIVNLIGHNRQAILPIMFTALEKNAQNHWNQSVLNLTLNVRKMFCEMDEALFMSCHARFKEDEAKQCSAAEKRKEVWARLENAASMKPITGKTAVLVTPRATSIAC

SEQ ID NO: 40479 - protein, 447 aa, Arabidopsis thaliana
  peptide (1)..(447): Ceres Seq. ID no. 13499969
  misc_feature (20)..(422): Pfam Name: Protein phosphatase 2A regulatory B subunit (B56 Pfam Description: Protein phosphatase 2A regulatory B subunit
  misc_feature (1)..(444): Homolog of NCBI NO: 15233119 NR Description: B regulatory subunit of PP2A -related
  misc_feature (1)..(444): Homolog of NCBI NO: 11994401 NR Description: protein phosphatase 2A B' regulatory subunit
  misc_feature (1)..(428): Homolog of NCBI NO: 21537284 NR Description: B regulatory subunit of protein phosphatase 2A,
  misc_feature (1)..(428): Homolog of NCBI NO: 15222851 NR Description: B regulatory subunit of protein phosphatase 2A
  misc_feature (1)..(444): Homolog of NCBI NO: 21530784 NR Description: putative protein phosphatase 2A B'zeta subunit
  misc_feature (1)..(444): Homolog of NCBI NO: 20147343 NR Description: AT4g15410/dl3750w [Arabidopsis thaliana]
  misc_feature (1)..(444): Homolog of NCBI NO: 18414444 NR Description: B' regulatory subunit of PP2A (AtB'gamma)
  misc_feature (1)..(444): Homolog of NCBI NO: 7485149 NR Description: hypothetical protein - Arabidopsis thaliana
  misc_feature (1)..(446): Homolog of NCBI NO: 21530782 NR Description: protein phosphatase 2A B'kappa subunit
  misc_feature (1)..(447): Homolog of NCBI NO: 15239451 NR Description: AtBgamma - like protein [Arabidopsis thaliana]
MSSAVFPASVVAGIEPLVPFKDVPSSEKLNLFVSKVSLCCVTFDFSDPGKNSIEKDVKRQTLLELLDFVASGSVKFTEPAILAMCRMCAVNLFRVFPPNYRSSSGGENDDDEPMFDPAWPHLQIVYDLLLKFITSPCLDAKVAKKYLDHAFIVRLLDLFDSEDPRERECLKTILHRVYGKFMVHRPFVRKSMSNIFYRFVFETEKHSGIAELLEIFGSIVSGFALPLKEEHKIFLWRVLIPLHKPKSVGNYFQQLSYCITQFIDKEPKLGSVVIKGLLKFWPITNSQKEVMFLGEVEEIVEAMSVMEFQKIMVPLFLRIACCVTSSHFQVSERALFLWNNDQIVNLIGHNRQAILPIMFTALEKNAQNHWNQSVLNLTLNVRKMFCEMDEALFMSCHARFKEDEAKQCSAAEKRKEVWARLENAASMKPITGKTAVLVTPRATSIAC

SEQ ID NO: 40480 - protein, 364 aa, Arabidopsis thaliana
  peptide (1)..(364): Ceres Seq. ID no. 13499970
  misc_feature (1)..(339): Pfam Name: Protein phosphatase 2A regulatory B subunit (B56 Pfam Description: Protein phosphatase 2A regulatory B subunit
  misc_feature (1)..(361): Homolog of NCBI NO: 15233119 NR Description: B regulatory subunit of PP2A -related
  misc_feature (1)..(361): Homolog of NCBI NO: 11994401 NR Description: protein phosphatase 2A B' regulatory subunit
  misc_feature (1)..(345): Homolog of NCBI NO: 21537284 NR Description: B regulatory subunit of protein phosphatase 2A,
  misc_feature (1)..(345): Homolog of NCBI NO: 15222851 NR Description: B regulatory subunit of protein phosphatase 2A
  misc_feature (1)..(361): Homolog of NCBI NO: 21530784 NR Description: putative protein phosphatase 2A B'zeta subunit
  misc_feature (1)..(361): Homolog of NCBI NO: 20147343 NR Description: AT4g15410/dl3750w [Arabidopsis thaliana]
  misc_feature (1)..(361): Homolog of NCBI NO: 18414444 NR Description: B' regulatory subunit of PP2A (AtB'gamma)
  misc_feature (1)..(361): Homolog of NCBI NO: 7485149 NR Description: hypothetical protein - Arabidopsis thaliana
  misc_feature (1)..(363): Homolog of NCBI NO: 21530782 NR Description: protein phosphatase 2A B'kappa subunit
  misc_feature (1)..(364): Homolog of NCBI NO: 15239451 NR Description: AtBgamma - like protein [Arabidopsis thaliana]
MCRMCAVNLFRVFPPNYRSSSGGENDDDEPMFDPAWPHLQIVYDLLLKFITSPCLDAKVAKKYLDHAFIVRLLDLFDSEDPRERECLKTILHRVYGKFMVHRPFVRKSMSNIFYRFVFETEKHSGIAELLEIFGSIVSGFALPLKEEHKIFLWRVLIPLHKPKSVGNYFQQLSYCITQFIDKEPKLGSVVIKGLLKFWPITNSQKEVMFLGEVEEIVEAMSVMEFQKIMVPLFLRIACCVTSSHFQVSERALFLWNNDQIVNLIGHNRQAILPIMFTALEKNAQNHWNQSVLNLTLNVRKMFCEMDEALFMSCHARFKEDEAKQCSAAEKRKEVWARLENAASMKPITGKTAVLVTPRATSIAC

SEQ ID NO: 40481 - DNA, 1761 bp, Arabidopsis thaliana
  misc_feature (1)..(1761): Ceres Seq. ID no. 13488981
  misc_feature: MA Experiment ID: 108433 Result: Up-regulated in Transcription
  misc_feature: MA Experiment 108433 PARAMETER Experiment Name: At_rhl_Mutant2_cDNA_P Parameter: Age (day) Value: 7
  misc_feature: MA Experiment 108433 PARAMETER Experiment Name: At_rhl_Mutant2_cDNA_P Parameter: Organism Value: A. thaliana
  misc_feature: MA Experiment 108433 PARAMETER Experiment Name: At_rhl_Mutant2_cDNA_P Parameter: Plant Line Value: rhl Mutant vs. wt landsburg
  misc_feature: MA Experiment 108433 PARAMETER Experiment Name: At_rhl_Mutant2_cDNA_P Parameter: Tissue Value: Roots
  misc_feature: MA Experiment ID: 108434 Result: Down-regulated in Transcription
  misc_feature: MA Experiment 108434 PARAMETER Experiment Name: At_Root_Tips_cDNA_P Parameter: Tissue Value: Root Tips
  misc_feature: MA Experiment ID: 108435 Result: Up-regulated in Transcription
  misc_feature: MA Experiment 108435 PARAMETER Experiment Name: At_stm_Mutants_cDNA_P Parameter: Plant Line Value: wt Landsburg vs stm
  misc_feature: MA Experiment 108435 PARAMETER Experiment Name: At_stm_Mutants_cDNA_P Parameter: Tissue Value: Shoot Apical Meristem Region
  misc_feature: MA Experiment ID: 108462 Result: Up-regulated in Transcription
  misc_feature: MA Experiment 108462 PARAMETER Experiment Name: At_Germinating_Seeds_cDNA_P Parameter: Age (day) Value: 2 vs. 0
  misc_feature: MA Experiment 108462 PARAMETER Experiment Name: At_Germinating_Seeds_cDNA_P Parameter: Tissue Value: Germinating Seeds
  misc_feature: MA Experiment ID: 108463 Result: Up-regulated in Transcription
  misc_feature: MA Experiment 108463 PARAMETER Experiment Name: At_Germinating_Seeds_cDNA_P Parameter: Age (day) Value: 3 vs. 0
  misc_feature: MA Experiment 108463 PARAMETER Experiment Name: At_Germinating_Seeds_cDNA_P Parameter: Tissue Value: Germinating Seeds
  misc_feature: MA Experiment ID: 108464 Result: Up-regulated in Transcription
  misc_feature: MA Experiment 108464 PARAMETER Experiment Name: At_Germinating_Seeds_cDNA_P Parameter: Age (day) Value: 4 vs. 0
  misc_feature: MA Experiment 108464 PARAMETER Experiment Name: At_Germinating_Seeds_cDNA_P Parameter: Tissue Value: Germinating Seeds
  misc_feature: MA Experiment ID: 108572 Result: Up-regulated in Transcription
  misc_feature: MA Experiment 108572 PARAMETER Experiment Name: At_Drought_cDNA_P Parameter: Timepoint (hr) Value: 1
  misc_feature: MA Experiment 108572 PARAMETER Experiment Name: At_Drought_cDNA_P Parameter: Tissue Value: Aerial
  misc_feature: MA Experiment 108572 PARAMETER Experiment Name: At_Drought_cDNA_P Parameter: Treatment Value: Drought vs. No Drought
  misc_feature: MA Experiment ID: 108573 Result: Up-regulated in Transcription
  misc_feature: MA Experiment 108573 PARAMETER Experiment Name: At_Drought_cDNA_P Parameter: Timepoint (hr) Value: 6
  misc_feature: MA Experiment 108573 PARAMETER Experiment Name: At_Drought_cDNA_P Parameter: Tissue Value: Aerial
  misc_feature: MA Experiment 108573 PARAMETER Experiment Name: At_Drought_cDNA_P Parameter: Treatment Value: Drought vs. No Drought
  misc_feature: MA Experiment ID: 108594 Result: Down-regulated in Transcription
  misc_feature: MA Experiment 108594 PARAMETER Experiment Name: At_Ler-rhl_Root_cDNA_P Parameter: Plant Line Value: null
  misc_feature: MA Experiment ID: 108595 Result: Down-regulated in Transcription
  misc_feature: MA Experiment 108595 PARAMETER Experiment Name: At_Ler-pi_Ovule_cDNA_P Parameter: Plant Line Value: null
  misc_feature: MA Experiment ID: 20000090 Result: Down-regulated in Transcription
  misc_feature: MA Experiment ID: 20000185 Result: Up-regulated in Transcription
  misc_feature: MA Experiment 20000185 PARAMETER Experiment Name: At_Roots__P Parameter: Age (day) Value: 7 vs. 21
  misc_feature: MA Experiment 20000185 PARAMETER Experiment Name: At_Roots__P Parameter: Organism Value: A. thaliana
  misc_feature: MA Experiment 20000185 PARAMETER Experiment Name: At_Roots__P Parameter: Tissue Value: Roots vs. Whole Plant
  misc_feature: MA Experiment ID: 20000227 Result: Down-regulated in Transcription
  misc_feature: MA Experiment 20000227 PARAMETER Experiment Name: At_Root-Tips-vs-Tops_P Parameter: Tissue Value: Root Tips vs. Root Tops
  misc_feature: MA Experiment ID: 20000234 Result: Down-regulated in Transcription
  misc_feature: MA Experiment 20000234 PARAMETER Experiment Name: At_Siliques_P Parameter: Age (day) Value: 21
  misc_feature: MA Experiment 20000234 PARAMETER Experiment Name: At_Siliques_P Parameter: Organism Value: A. thaliana
  misc_feature: MA Experiment 20000234 PARAMETER Experiment Name: At_Siliques_P Parameter: Plant Line Value: WS
  misc_feature: MA Experiment 20000234 PARAMETER Experiment Name: At_Siliques_P Parameter: Tissue Value: Less Than 5mm Siliques vs. Whole Plant
  misc_feature: MA Experiment ID: 20000235 Result: Down-regulated in Transcription
  misc_feature: MA Experiment 20000235 PARAMETER Experiment Name: At_Siliques_P Parameter: Age (day) Value: 21
  misc_feature: MA Experiment 20000235 PARAMETER Experiment Name: At_Siliques_P Parameter: Organism Value: A. thaliana
  misc_feature: MA Experiment 20000235 PARAMETER Experiment Name: At_Siliques_P Parameter: Plant Line Value: WS
  misc_feature: MA Experiment 20000235 PARAMETER Experiment Name: At_Siliques_P Parameter: Tissue Value: 5-10mm Siliques vs. Whole Plant
  misc_feature: MA Experiment ID: 20000265 Result: Down-regulated in Transcription
  misc_feature: MA Experiment 20000265 PARAMETER Experiment Name: At_Open_Flower_P Parameter: Age (day) Value: 21
  misc_feature: MA Experiment 20000265 PARAMETER Experiment Name: At_Open_Flower_P Parameter: Plant Line Value: WS
  misc_feature: MA Experiment 20000265 PARAMETER Experiment Name: At_Open_Flower_P Parameter: Tissue Value: Closed Flower vs. Whole Plant
  misc_feature: MA Experiment ID: 20000286 Result: Down-regulated in Transcription
  misc_feature: MA Experiment 20000286 PARAMETER Experiment Name: At_Open_Flower_P Parameter: Age (day) Value: 21
  misc_feature: MA Experiment 20000286 PARAMETER Experiment Name: At_Open_Flower_P Parameter: Plant Line Value: WS
  misc_feature: MA Experiment 20000286 PARAMETER Experiment Name: At_Open_Flower_P Parameter: Tissue Value: Half Open vs. Whole Plant
  misc_feature: MA Experiment ID: 20000439 Result: Up-regulated in Transcription
  misc_feature: MA Experiment 20000439 PARAMETER Experiment Name: At_Roots__P Parameter: Age (day) Value: 14 vs. 21
  misc_feature: MA Experiment 20000439 PARAMETER Experiment Name: At_Roots__P Parameter: Organism Value: A. thaliana
  misc_feature: MA Experiment 20000439 PARAMETER Experiment Name: At_Roots__P Parameter: Tissue Value: Roots vs. Whole Plant
  misc_feature: MA Experiment ID: 20000451 Result: Down-regulated in Transcription
  misc_feature: MA Experiment 20000451 PARAMETER Experiment Name: At_CS6879_Shoots-Roots_P Parameter: Age (day) Value: 14
  misc_feature: MA Experiment 20000451 PARAMETER Experiment Name: At_CS6879_Shoots-Roots_P Parameter: Organism Value: A. thaliana
  misc_feature: MA Experiment 20000451 PARAMETER Experiment Name: At_CS6879_Shoots-Roots_P Parameter: Plant Line Value: CS6879 vs. WS
  misc_feature: MA Experiment 20000451 PARAMETER Experiment Name: At_CS6879_Shoots-Roots_P Parameter: Tissue Value: Roots
  misc_feature: MA Experiment ID: 20000495 Result: Up-regulated in Transcription
  misc_feature: MA Experiment 20000495 PARAMETER Experiment Name: At_Guard_Cells_P Parameter: Harvest Date Value: 8/2/2002
  misc_feature: MA Experiment 20000495 PARAMETER Experiment Name: At_Guard_Cells_P Parameter: Organism Value: A. thaliana
  misc_feature: MA Experiment 20000495 PARAMETER Experiment Name: At_Guard_Cells_P Parameter: Tissue Value: Guard Cells vs. Leaves
  misc_feature: MA Experiment ID: 20001556 Result: Down-regulated in Transcription
  misc_feature: MA Experiment 20001556 PARAMETER Experiment Name: At_Drought_Soil_Dry_P Parameter: Age (day) Value: 26
  misc_feature: MA Experiment 20001556 PARAMETER Experiment Name: At_Drought_Soil_Dry_P Parameter: Organism Value: A. thaliana
  misc_feature: MA Experiment 20001556 PARAMETER Experiment Name: At_Drought_Soil_Dry_P Parameter: Plant Line Value: WS
  misc_feature: MA Experiment 20001556 PARAMETER Experiment Name: At_Drought_Soil_Dry_P Parameter: Post Timepoint (hr) Value: None
  misc_feature: MA Experiment 20001556 PARAMETER Experiment Name: At_Drought_Soil_Dry_P Parameter: Post-Treatment Value: None
  misc_feature: MA Experiment 20001556 PARAMETER Experiment Name: At_Drought_Soil_Dry_P Parameter: Timepoint (day) Value: 12
  misc_feature: MA Experiment 20001556 PARAMETER Experiment Name: At_Drought_Soil_Dry_P Parameter: Treatment Value: Drought vs. No Drought
  misc_feature: MA Experiment ID: 20001557 Result: Down-regulated in Transcription
  misc_feature: MA Experiment 20001557 PARAMETER Experiment Name: At_Drought_Soil_Dry_P Parameter: Age (day) Value: 27
  misc_feature: MA Experiment 20001557 PARAMETER Experiment Name: At_Drought_Soil_Dry_P Parameter: Organism Value: A. thaliana
  misc_feature: MA Experiment 20001557 PARAMETER Experiment Name: At_Drought_Soil_Dry_P Parameter: Plant Line Value: WS
  misc_feature: MA Experiment 20001557 PARAMETER Experiment Name: At_Drought_Soil_Dry_P Parameter: Post Timepoint (hr) Value: 3
  misc_feature: MA Experiment 20001557 PARAMETER Experiment Name: At_Drought_Soil_Dry_P Parameter: Post-Treatment Value: Re-Water vs. No Drought
  misc_feature: MA Experiment 20001557 PARAMETER Experiment Name: At_Drought_Soil_Dry_P Parameter: Timepoint (day) Value: 13
  misc_feature: MA Experiment 20001557 PARAMETER Experiment Name: At_Drought_Soil_Dry_P Parameter: Treatment Value: Drought vs. No Drought
  misc_feature: MA Experiment ID: 20001558 Result: Down-regulated in Transcription
  misc_feature: MA Experiment 20001558 PARAMETER Experiment Name: At_Drought_Soil_Dry_P Parameter: Age (day) Value: 27
  misc_feature: MA Experiment 20001558 PARAMETER Experiment Name: At_Drought_Soil_Dry_P Parameter: Organism Value: A. thaliana
  misc_feature: MA Experiment 20001558 PARAMETER Experiment Name: At_Drought_Soil_Dry_P Parameter: Plant Line Value: WS
  misc_feature: MA Experiment 20001558 PARAMETER Experiment Name: At_Drought_Soil_Dry_P Parameter: Post Timepoint (hr) Value: 6
  misc_feature: MA Experiment 20001558 PARAMETER Experiment Name: At_Drought_Soil_Dry_P Parameter: Post-Treatment Value: Re-Water vs. No Drought
  misc_feature: MA Experiment 20001558 PARAMETER Experiment Name: At_Drought_Soil_Dry_P Parameter: Timepoint (day) Value: 13
  misc_feature: MA Experiment 20001558 PARAMETER Experiment Name: At_Drought_Soil_Dry_P Parameter: Treatment Value: Drought vs. No Drought
  misc_feature: MA Experiment ID: 20001559 Result: Down-regulated in Transcription
  misc_feature: MA Experiment 20001559 PARAMETER Experiment Name: At_Drought_Soil_Dry_P Parameter: Age (day) Value: 28
  misc_feature: MA Experiment 20001559 PARAMETER Experiment Name: At_Drought_Soil_Dry_P Parameter: Organism Value: A. thaliana
  misc_feature: MA Experiment 20001559 PARAMETER Experiment Name: At_Drought_Soil_Dry_P Parameter: Plant Line Value: WS
  misc_feature: MA Experiment 20001559 PARAMETER Experiment Name: At_Drought_Soil_Dry_P Parameter: Post Timepoint (hr) Value: 29
  misc_feature: MA Experiment 20001559 PARAMETER Experiment Name: At_Drought_Soil_Dry_P Parameter: Post-Treatment Value: Re-Water vs. No Drought
  misc_feature: MA Experiment 20001559 PARAMETER Experiment Name: At_Drought_Soil_Dry_P Parameter: Timepoint (day) Value: 14
  misc_feature: MA Experiment 20001559 PARAMETER Experiment Name: At_Drought_Soil_Dry_P Parameter: Treatment Value: Drought vs. No Drought
  misc_feature: MA Experiment ID: 20001560 Result: Down-regulated in Transcription
  misc_feature: MA Experiment 20001560 PARAMETER Experiment Name: At_Drought_Soil_Dry_P Parameter: Age (day) Value: 28
  misc_feature: MA Experiment 20001560 PARAMETER Experiment Name: At_Drought_Soil_Dry_P Parameter: Organism Value: A. thaliana
  misc_feature: MA Experiment 20001560 PARAMETER Experiment Name: At_Drought_Soil_Dry_P Parameter: Plant Line Value: WS
  misc_feature: MA Experiment 20001560 PARAMETER Experiment Name: At_Drought_Soil_Dry_P Parameter: Post Timepoint (hr) Value: None
  misc_feature: MA Experiment 20001560 PARAMETER Experiment Name: At_Drought_Soil_Dry_P Parameter: Post-Treatment Value: None
  misc_feature: MA Experiment 20001560 PARAMETER Experiment Name: At_Drought_Soil_Dry_P Parameter: Timepoint (day) Value: 14
  misc_feature: MA Experiment 20001560 PARAMETER Experiment Name: At_Drought_Soil_Dry_P Parameter: Treatment Value: Drought vs. No Drought
  misc_feature: MA Experiment ID: 20001904 Result: Down-regulated in Transcription
  misc_feature: MA Experiment 20001904 PARAMETER Experiment Name: At_Drought_Reproduction_P Parameter: Age (day) Value: 37
  misc_feature: MA Experiment 20001904 PARAMETER Experiment Name: At_Drought_Reproduction_P Parameter: Organism Value: A. thaliana
  misc_feature: MA Experiment 20001904 PARAMETER Experiment Name: At_Drought_Reproduction_P Parameter: Plant Line Value: WS
  misc_feature: MA Experiment 20001904 PARAMETER Experiment Name: At_Drought_Reproduction_P Parameter: Timepoint (day) Value: 7
  misc_feature: MA Experiment 20001904 PARAMETER Experiment Name: At_Drought_Reproduction_P Parameter: Tissue Value: Rosettes
  misc_feature: MA Experiment 20001904 PARAMETER Experiment Name: At_Drought_Reproduction_P Parameter: Treatment Value: Drought vs. No Drought
  misc_feature: MA Experiment ID: 20001905 Result: Down-regulated in Transcription
  misc_feature: MA Experiment 20001905 PARAMETER Experiment Name: At_Drought_Reproduction_P Parameter: Age (day) Value: 40
  misc_feature: MA Experiment 20001905 PARAMETER Experiment Name: At_Drought_Reproduction_P Parameter: Organism Value: A. thaliana
  misc_feature: MA Experiment 20001905 PARAMETER Experiment Name: At_Drought_Reproduction_P Parameter: Plant Line Value: WS
  misc_feature: MA Experiment 20001905 PARAMETER Experiment Name: At_Drought_Reproduction_P Parameter: Timepoint (day) Value: 10
  misc_feature: MA Experiment 20001905 PARAMETER Experiment Name: At_Drought_Reproduction_P Parameter: Tissue Value: Rosettes
  misc_feature: MA Experiment 20001905 PARAMETER Experiment Name: At_Drought_Reproduction_P Parameter: Treatment Value: Drought vs. No Drought
gcagcagcaaatactatcatcacccatctccttagttctattttataattcctcttctttttgttcatagctttgtaattatagtcttatttctctttaaggctcaataagaggagatgggtgaaaccgctgccgccaataaccaccgtcaccaccaccatcacggccaccaggtctttgacgtggccagccacgatttcgtccctccacaaccggcttttaaatgcttcgatgatgatggccgcctcaaaagaactgggactgtttggaccgcgagcgctcatataataactgcggttatcggatccggcgttttgtcattggcgtgggcgattgcacagctcggatggatcgctggccctgctgtgatgctattgttctctcttgttactctttactcctccacacttcttagcgactgctacagaaccggcgatgcagtgtctggcaagagaaactacacttacatggatgccgttcgatcaattctcggtgggttcaagttcaagatttgtgggttgattcaatacttgaatctctttggtatcgcaattggatacacgatagcagcttccataagcatgatggcgatcaagagatccaactgcttccacaagagtggaggaaaagacccatgtcacatgtccagtaatccttacatgatcgtatttggtgtggcagagatcttgctctctcaggttcctgatttcgatcagatttggtggatctccattgttgcagctgttatgtccttcacttactctgccattggtctagctcttggaatcgttcaagttgcagcgaatggagttttcaaaggaagtctcactggaataagcatcggaacagtgactcaaacacagaagatatggagaaccttccaagcacttggagacattgcctttgcgtactcatactctgttgtcctaatcgagattcaggatactgtaagatccccaccggcggaatcgaaaacgatgaagaaagcaacaaaaatcagtattgccgtcacaactatcttctacatgctatgtggctcaatgggttatgccgcttttggagatgcagcaccgggaaacctcctcaccggttttggattctacaacccgttttggctccttgacatagctaacgccgccattgttgtccacctcgttggagcttaccaagtctttgctcagcccatctttgcctttattgaaaaatcagtcgcagagagatatccagacaatgacttcctcagcaaggaatttgaaatcagaatccccggatttaagtctccttacaaagtaaacgttttcaggatggtttacaggagtggctttgtcgttacaaccaccgtgatatcgatgctgatgccgttttttaacgacgtggtcgggatcttaggggcgttagggttttggcccttgacggtttattttccggtggagatgtatattaagcagaggaaggttgagaaatggagcacgagatgggtgtgtttacagatgcttagtgttgcttgtcttgtgatctcggtggtcgccggggttggatcaatcgccggagtgatgcttgatcttaaggtctataagccattcaagtctacatattgatgattatggaccatgaacaacagagagagttggtgtgtaaagtttaccatttcaaagaaaactccaaaaatgtgtatattgtatgttgttctcatttcgtatggtctcatctttgtaataaaatttaaaacttatgttataaattataaaaccgtgtgtttcc

SEQ ID NO: 40482 - protein, 493 aa, Arabidopsis thaliana
  peptide (1)..(493): Ceres Seq. ID no. 13488982
  misc_feature (18)..(491): Homolog of NCBI NO: 27447657 NR Description: amino acid transporter [Lycopersicon esculentum]
  misc_feature (29)..(493): Homolog of NCBI NO: 15223930 NR Description: amino acid carrier, putative [Arabidopsis
  misc_feature (29)..(493): Homolog of NCBI NO: 21553710 NR Description: amino acid carrier, putative [Arabidopsis
  misc_feature (1)..(493): Homolog of NCBI NO: 7442735 NR Description: amino acid transport protein AAP1 - castor bean
  misc_feature (31)..(493): Homolog of NCBI NO: 21536979 NR Description: amino acid transporter AAP4 [Arabidopsis thaliana]
  misc_feature (31)..(493): Homolog of NCBI NO: 20260650 NR Description: amino acid transporter AAP4 [Arabidopsis
  misc_feature (31)..(493): Homolog of NCBI NO: 15237539 NR Description: amino acid transporter 4 (AAP4) [Arabidopsis
  misc_feature (31)..(493): Homolog of NCBI NO: 608671 NR Description: amino acid transporter [Arabidopsis thaliana]
  misc_feature (1)..(493): Homolog of NCBI NO: 21536895 NR Description: amino acid transport protein AAP2 [Arabidopsis
  misc_feature (1)..(493): Homolog of NCBI NO: 15242347 NR Description: amino acid permease 2 (AAP2) [Arabidopsis
MGETAAANNHRHHHHHGHQVFDVASHDFVPPQPAFKCFDDDGRLKRTGTVWTASAHIITAVIGSGVLSLAWAIAQLGWIAGPAVMLLFSLVTLYSSTLLSDCYRTGDAVSGKRNYTYMDAVRSILGGFKFKICGLIQYLNLFGIAIGYTIAASISMMAIKRSNCFHKSGGKDPCHMSSNPYMIVFGVAEILLSQVPDFDQIWWISIVAAVMSFTYSAIGLALGIVQVAANGVFKGSLTGISIGTVTQTQKIWRTFQALGDIAFAYSYSVVLIEIQDTVRSPPAESKTMKKATKISIAVTTIFYMLCGSMGYAAFGDAAPGNLLTGFGFYNPFWLLDIANAAIVVHLVGAYQVFAQPIFAFIEKSVAERYPDNDFLSKEFEIRIPGFKSPYKVNVFRMVYRSGFVVTTTVISMLMPFFNDVVGILGALGFWPLTVYFPVEMYIKQRKVEKWSTRWVCLQMLSVACLVISVVAGVGSIAGVMLDLKVYKPFKSTY

SEQ ID NO: 40483 - protein, 409 aa, Arabidopsis thaliana
  peptide (1)..(409): Ceres Seq. ID no. 13488983
  misc_feature (1)..(407): Homolog of NCBI NO: 27447657 NR Description: amino acid transporter [Lycopersicon esculentum]
  misc_feature (1)..(409): Homolog of NCBI NO: 15223930 NR Description: amino acid carrier, putative [Arabidopsis
  misc_feature (1)..(409): Homolog of NCBI NO: 21553710 NR Description: amino acid carrier, putative [Arabidopsis
  misc_feature (1)..(409): Homolog of NCBI NO: 7442735 NR Description: amino acid transport protein AAP1 - castor bean
  misc_feature (1)..(409): Homolog of NCBI NO: 21536979 NR Description: amino acid transporter AAP4 [Arabidopsis thaliana]
  misc_feature (1)..(409): Homolog of NCBI NO: 20260650 NR Description: amino acid transporter AAP4 [Arabidopsis
  misc_feature (1)..(409): Homolog of NCBI NO: 15237539 NR Description: amino acid transporter 4 (AAP4) [Arabidopsis
  misc_feature (1)..(409): Homolog of NCBI NO: 608671 NR Description: amino acid transporter [Arabidopsis thaliana]
  misc_feature (1)..(409): Homolog of NCBI NO: 21536895 NR Description: amino acid transport protein AAP2 [Arabidopsis
  misc_feature (1)..(409): Homolog of NCBI NO: 15242347 NR Description: amino acid permease 2 (AAP2) [Arabidopsis
MLLFSLVTLYSSTLLSDCYRTGDAVSGKRNYTYMDAVRSILGGFKFKICGLIQYLNLFGIAIGYTIAASISMMAIKRSNCFHKSGGKDPCHMSSNPYMIVFGVAEILLSQVPDFDQIWWISIVAAVMSFTYSAIGLALGIVQVAANGVFKGSLTGISIGTVTQTQKIWRTFQALGDIAFAYSYSVVLIEIQDTVRSPPAESKTMKKATKISIAVTTIFYMLCGSMGYAAFGDAAPGNLLTGFGFYNPFWLLDIANAAIVVHLVGAYQVFAQPIFAFIEKSVAERYPDNDFLSKEFEIRIPGFKSPYKVNVFRMVYRSGFVVTTTVISMLMPFFNDVVGILGALGFWPLTVYFPVEMYIKQRKVEKWSTRWVCLQMLSVACLVISVVAGVGSIAGVMLDLKVYKPFKSTY

SEQ ID NO: 40484 - protein, 376 aa, Arabidopsis thaliana
  peptide (1)..(376): Ceres Seq. ID no. 13488984
  misc_feature (1)..(374): Homolog of NCBI NO: 27447657 NR Description: amino acid transporter [Lycopersicon esculentum]
  misc_feature (1)..(376): Homolog of NCBI NO: 15223930 NR Description: amino acid carrier, putative [Arabidopsis
  misc_feature (1)..(376): Homolog of NCBI NO: 21553710 NR Description: amino acid carrier, putative [Arabidopsis
  misc_feature (1)..(376): Homolog of NCBI NO: 7442735 NR Description: amino acid transport protein AAP1 - castor bean
  misc_feature (1)..(376): Homolog of NCBI NO: 21536979 NR Description: amino acid transporter AAP4 [Arabidopsis thaliana]
  misc_feature (1)..(376): Homolog of NCBI NO: 20260650 NR Description: amino acid transporter AAP4 [Arabidopsis
  misc_feature (1)..(376): Homolog of NCBI NO: 15237539 NR Description: amino acid transporter 4 (AAP4) [Arabidopsis
  misc_feature (1)..(376): Homolog of NCBI NO: 608671 NR Description: amino acid transporter [Arabidopsis thaliana]
  misc_feature (1)..(376): Homolog of NCBI NO: 21536895 NR Description: amino acid transport protein AAP2 [Arabidopsis
  misc_feature (1)..(376): Homolog of NCBI NO: 15242347 NR Description: amino acid permease 2 (AAP2) [Arabidopsis
MDAVRSILGGFKFKICGLIQYLNLFGIAIGYTIAASISMMAIKRSNCFHKSGGKDPCHMSSNPYMIVFGVAEILLSQVPDFDQIWWISIVAAVMSFTYSAIGLALGIVQVAANGVFKGSLTGISIGTVTQTQKIWRTFQALGDIAFAYSYSVVLIEIQDTVRSPPAESKTMKKATKISIAVTTIFYMLCGSMGYAAFGDAAPGNLLTGFGFYNPFWLLDIANAAIVVHLVGAYQVFAQPIFAFIEKSVAERYPDNDFLSKEFEIRIPGFKSPYKVNVFRMVYRSGFVVTTTVISMLMPFFNDVVGILGALGFWPLTVYFPVEMYIKQRKVEKWSTRWVCLQMLSVACLVISVVAGVGSIAGVMLDLKVYKPFKSTY

SEQ ID NO: 40485 - DNA, 1270 bp, Arabidopsis thaliana
  misc_feature (1)..(1270): Ceres Seq. ID no. 13488957
  misc_feature: MA Experiment ID: 108434 Result: Up-regulated in Transcription
  misc_feature: MA Experiment 108434 PARAMETER Experiment Name: At_Root_Tips_cDNA_P Parameter: Tissue Value: Root Tips
  misc_feature: MA Experiment ID: 108462 Result: Down-regulated in Transcription
  misc_feature: MA Experiment 108462 PARAMETER Experiment Name: At_Germinating_Seeds_cDNA_P Parameter: Age (day) Value: 2 vs. 0
  misc_feature: MA Experiment 108462 PARAMETER Experiment Name: At_Germinating_Seeds_cDNA_P Parameter: Tissue Value: Germinating Seeds
  misc_feature: MA Experiment ID: 20000112 Result: Up-regulated in Transcription
  misc_feature: MA Experiment 20000112 PARAMETER Experiment Name: At_42deg_Heat_cDNA_P Parameter: Temperature (deg C) Value: 42 vs. 22
  misc_feature: MA Experiment 20000112 PARAMETER Experiment Name: At_42deg_Heat_cDNA_P Parameter: Timepoint (hr) Value: 2
  misc_feature: MA Experiment 20000112 PARAMETER Experiment Name: At_42deg_Heat_cDNA_P Parameter: Tissue Value: Aerial
gagtgagagagagagagagagagaagatgggggttgatttctataaggttcttgaagttgatcgaagtgctaatgacgacgagcttaagaaagcttatcgcaaactcgccatgaaatggcatcctgataagaaccctaacaacaaaaaagaagccgaagctaaattcaagcagatctctgaagcttacgatgttttgagtgatcctcagaaacgagcaatctacgagcaatacggagaagaaggtttaaaccaagccccacctcccggcgccggtggtggctatcctggaggatcagacgccggagcttctttccggttcaatcccagaagcgctgatgatatcttctccgagttctttggtttcacgaggccttcttttggtacgggaagcgactcacgcgcaggaccttctggctttaggtatggcgatgatatcttcgcttccttcagggctgctactaccggaggagaagcctccattccttctaggaaatctgctcctattgagagacaattgccttgtagcttggaggatttgtataaaggtgtctccaagaagatgaagatctctcgtgatgttcttgactcttccgggaggccaacaccggttgaggagatcttgacgatagaaattaaacccggttggaaaaaaggaacaaagataaccttcctggaaaaaggtaatgagcatcgtggagtcataccatccgatctcgttttcatcgtagacgagaaaccgcatcccgttttcaaacgagacgggaatgatcttgtggtaatgcaaaagatttctctagtggatgctctcacaggttacaccgcacaggtcactactcttgacggaagaaccttaacagttccggtaaacaatgtgatcagtccgtcgtacgaagaggtggtgaaaggagaaggcatgccgatccctaaagatccgtcaagaaaaggaaacttgagaatcagattcatcatcaagttcccttcgaagctaaccactgagcagaaatcagggatcaagcggatgttatcaccttgaatgtccaaagattgaagcatctcgtttcagttttttcaatctgctagcttttttggaatcttttagaagcagaatatgtgcttatggtttttttaatttattttggttgcattttggtaaggtttttaagggaaatacataccaccaaatgatgccggtttagttagtaatgactgacgactagtgaagtaaagtctctccttatatctctttgctaaaagcttcaatatttgttc

SEQ ID NO: 40486 - protein, 343 aa, Arabidopsis thaliana
  peptide (1)..(343): Ceres Seq. ID no. 13488958
  misc_feature (219)..(341): Pfam Name: DnaJ C terminal region Pfam Description: DnaJ C terminal region
  misc_feature (9)..(341): Homolog of NCBI NO: 21593202 NR Description: putative heat-shock protein [Arabidopsis thaliana]
  misc_feature (9)..(341): Homolog of NCBI NO: 15218515 NR Description: heat shock protein, putative [Arabidopsis
  misc_feature (9)..(341): Homolog of NCBI NO: 34904486 NR Description: putative heat shock protein 40
  misc_feature (9)..(341): Homolog of NCBI NO: 11863723 NR Description: DnaJ like protein [Lycopersicon esculentum]
  misc_feature (9)..(341): Homolog of NCBI NO: 15225377 NR Description: heat shock protein, putative [Arabidopsis
  misc_feature (9)..(341): Homolog of NCBI NO: 6179940 NR Description: DnaJ-like protein [Nicotiana tabacum]
  misc_feature (9)..(341): Homolog of NCBI NO: 15235310 NR Description: heat shock protein, putative [Arabidopsis
  misc_feature (9)..(342): Homolog of NCBI NO: 21618097 NR Description: putative heat shock protein [Arabidopsis thaliana]
  misc_feature (9)..(342): Homolog of NCBI NO: 15231987 NR Description: DnaJ protein family [Arabidopsis thaliana]
  misc_feature (9)..(343): Homolog of NCBI NO: 15240968 NR Description: DnaJ protein family [Arabidopsis thaliana]
VREREREKMGVDFYKVLEVDRSANDDELKKAYRKLAMKWHPDKNPNNKKEAEAKFKQISEAYDVLSDPQKRAIYEQYGEEGLNQAPPPGAGGGYPGGSDAGASFRFNPRSADDIFSEFFGFTRPSFGTGSDSRAGPSGFRYGDDIFASFRAATTGGEASIPSRKSAPIERQLPCSLEDLYKGVSKKMKISRDVLDSSGRPTPVEEILTIEIKPGWKKGTKITFLEKGNEHRGVIPSDLVFIVDEKPHPVFKRDGNDLVVMQKISLVDALTGYTAQVTTLDGRTLTVPVNNVISPSYEEVVKGEGMPIPKDPSRKGNLRIRFIIKFPSKLTTEQKSGIKRMLSP

SEQ ID NO: 40487 - protein, 335 aa, Arabidopsis thaliana
  peptide (1)..(335): Ceres Seq. ID no. 13488959
  misc_feature (211)..(333): Pfam Name: DnaJ C terminal region Pfam Description: DnaJ C terminal region
  misc_feature (1)..(333): Homolog of NCBI NO: 21593202 NR Description: putative heat-shock protein [Arabidopsis thaliana]
  misc_feature (1)..(333): Homolog of NCBI NO: 15218515 NR Description: heat shock protein, putative [Arabidopsis
  misc_feature (1)..(333): Homolog of NCBI NO: 34904486 NR Description: putative heat shock protein 40
  misc_feature (1)..(333): Homolog of NCBI NO: 11863723 NR Description: DnaJ like protein [Lycopersicon esculentum]
  misc_feature (1)..(333): Homolog of NCBI NO: 15225377 NR Description: heat shock protein, putative [Arabidopsis
  misc_feature (1)..(333): Homolog of NCBI NO: 6179940 NR Description: DnaJ-like protein [Nicotiana tabacum]
  misc_feature (1)..(333): Homolog of NCBI NO: 15235310 NR Description: heat shock protein, putative [Arabidopsis
  misc_feature (1)..(334): Homolog of NCBI NO: 21618097 NR Description: putative heat shock protein [Arabidopsis thaliana]
  misc_feature (1)..(334): Homolog of NCBI NO: 15231987 NR Description: DnaJ protein family [Arabidopsis thaliana]
  misc_feature (1)..(335): Homolog of NCBI NO: 15240968 NR Description: DnaJ protein family [Arabidopsis thaliana]
MGVDFYKVLEVDRSANDDELKKAYRKLAMKWHPDKNPNNKKEAEAKFKQISEAYDVLSDPQKRAIYEQYGEEGLNQAPPPGAGGGYPGGSDAGASFRFNPRSADDIFSEFFGFTRPSFGTGSDSRAGPSGFRYGDDIFASFRAATTGGEASIPSRKSAPIERQLPCSLEDLYKGVSKKMKISRDVLDSSGRPTPVEEILTIEIKPGWKKGTKITFLEKGNEHRGVIPSDLVFIVDEKPHPVFKRDGNDLVVMQKISLVDALTGYTAQVTTLDGRTLTVPVNNVISPSYEEVVKGEGMPIPKDPSRKGNLRIRFIIKFPSKLTTEQKSGIKRMLSP

SEQ ID NO: 40488 - protein, 307 aa, Arabidopsis thaliana
  peptide (1)..(307): Ceres Seq. ID no. 13488960
  misc_feature (183)..(305): Pfam Name: DnaJ C terminal region Pfam Description: DnaJ C terminal region
  misc_feature (1)..(305): Homolog of NCBI NO: 21593202 NR Description: putative heat-shock protein [Arabidopsis thaliana]
  misc_feature (1)..(305): Homolog of NCBI NO: 15218515 NR Description: heat shock protein, putative [Arabidopsis
  misc_feature (1)..(305): Homolog of NCBI NO: 34904486 NR Description: putative heat shock protein 40
  misc_feature (1)..(305): Homolog of NCBI NO: 11863723 NR Description: DnaJ like protein [Lycopersicon esculentum]
  misc_feature (1)..(305): Homolog of NCBI NO: 15225377 NR Description: heat shock protein, putative [Arabidopsis
  misc_feature (1)..(305): Homolog of NCBI NO: 6179940 NR Description: DnaJ-like protein [Nicotiana tabacum]
  misc_feature (1)..(305): Homolog of NCBI NO: 15235310 NR Description: heat shock protein, putative [Arabidopsis
  misc_feature (1)..(306): Homolog of NCBI NO: 21618097 NR Description: putative heat shock protein [Arabidopsis thaliana]
  misc_feature (1)..(306): Homolog of NCBI NO: 15231987 NR Description: DnaJ protein family [Arabidopsis thaliana]
  misc_feature (1)..(307): Homolog of NCBI NO: 15240968 NR Description: DnaJ protein family [Arabidopsis thaliana]
MKWHPDKNPNNKKEAEAKFKQISEAYDVLSDPQKRAIYEQYGEEGLNQAPPPGAGGGYPGGSDAGASFRFNPRSADDIFSEFFGFTRPSFGTGSDSRAGPSGFRYGDDIFASFRAATTGGEASIPSRKSAPIERQLPCSLEDLYKGVSKKMKISRDVLDSSGRPTPVEEILTIEIKPGWKKGTKITFLEKGNEHRGVIPSDLVFIVDEKPHPVFKRDGNDLVVMQKISLVDALTGYTAQVTTLDGRTLTVPVNNVISPSYEEVVKGEGMPIPKDPSRKGNLRIRFIIKFPSKLTTEQKSGIKRMLSP

SEQ ID NO: 40489 - DNA, 1267 bp, Arabidopsis thaliana
  misc_feature (1)..(1267): Ceres Seq. ID no. 12323871
  misc_feature: MA Experiment ID: 108434 Result: Up-regulated in Transcription
  misc_feature: MA Experiment 108434 PARAMETER Experiment Name: At_Root_Tips_cDNA_P Parameter: Tissue Value: Root Tips
  misc_feature: MA Experiment ID: 108573 Result: Up-regulated in Transcription
  misc_feature: MA Experiment 108573 PARAMETER Experiment Name: At_Drought_cDNA_P Parameter: Timepoint (hr) Value: 6
  misc_feature: MA Experiment 108573 PARAMETER Experiment Name: At_Drought_cDNA_P Parameter: Tissue Value: Aerial
  misc_feature: MA Experiment 108573 PARAMETER Experiment Name: At_Drought_cDNA_P Parameter: Treatment Value: Drought vs. No Drought
  misc_feature: MA Experiment ID: 20000437 Result: Up-regulated in Transcription
  misc_feature: MA Experiment 20000437 PARAMETER Experiment Name: At_Drought_P Parameter: Age (day) Value: 8
  misc_feature: MA Experiment 20000437 PARAMETER Experiment Name: At_Drought_P Parameter: Organism Value: A. thaliana
  misc_feature: MA Experiment 20000437 PARAMETER Experiment Name: At_Drought_P Parameter: Plant Line Value: WS
  misc_feature: MA Experiment 20000437 PARAMETER Experiment Name: At_Drought_P Parameter: Timepoint (hr) Value: 24
  misc_feature: MA Experiment 20000437 PARAMETER Experiment Name: At_Drought_P Parameter: Tissue Value: Whole Plant
  misc_feature: MA Experiment 20000437 PARAMETER Experiment Name: At_Drought_P Parameter: Treatment Value: Drought vs. No Drought
  misc_feature: MA Experiment ID: 20000495 Result: Up-regulated in Transcription
  misc_feature: MA Experiment 20000495 PARAMETER Experiment Name: At_Guard_Cells_P Parameter: Harvest Date Value: 8/2/2002
  misc_feature: MA Experiment 20000495 PARAMETER Experiment Name: At_Guard_Cells_P Parameter: Organism Value: A. thaliana
  misc_feature: MA Experiment 20000495 PARAMETER Experiment Name: At_Guard_Cells_P Parameter: Tissue Value: Guard Cells vs. Leaves
  misc_feature: MA Experiment ID: 20001248 Result: Up-regulated in Transcription
  misc_feature: MA Experiment 20001248 PARAMETER Experiment Name: At_Far-red-induction_P Parameter: Age (day) Value: 7
  misc_feature: MA Experiment 20001248 PARAMETER Experiment Name: At_Far-red-induction_P Parameter: Light Value: Far-red vs. White
  misc_feature: MA Experiment 20001248 PARAMETER Experiment Name: At_Far-red-induction_P Parameter: Organism Value: A. thaliana
  misc_feature: MA Experiment 20001248 PARAMETER Experiment Name: At_Far-red-induction_P Parameter: Plant Line Value: Columbia
  misc_feature: MA Experiment 20001248 PARAMETER Experiment Name: At_Far-red-induction_P Parameter: Timepoint (hr) Value: 4
  misc_feature: MA Experiment 20001248 PARAMETER Experiment Name: At_Far-red-induction_P Parameter: Tissue Value: Whole Plant
  misc_feature: MA Experiment ID: 20001450 Result: Up-regulated in Transcription
  misc_feature: MA Experiment 20001450 PARAMETER Experiment Name: At_Far-red-induction_P Parameter: Age (day) Value: 7
  misc_feature: MA Experiment 20001450 PARAMETER Experiment Name: At_Far-red-induction_P Parameter: Light Value: Far-red vs. White
  misc_feature: MA Experiment 20001450 PARAMETER Experiment Name: At_Far-red-induction_P Parameter: Organism Value: A. thaliana
  misc_feature: MA Experiment 20001450 PARAMETER Experiment Name: At_Far-red-induction_P Parameter: Plant Line Value: Columbia
  misc_feature: MA Experiment 20001450 PARAMETER Experiment Name: At_Far-red-induction_P Parameter: Timepoint (hr) Value: 8
  misc_feature: MA Experiment 20001450 PARAMETER Experiment Name: At_Far-red-induction_P Parameter: Tissue Value: Whole Plant
  misc_feature: MA Experiment ID: 20001451 Result: Up-regulated in Transcription
  misc_feature: MA Experiment 20001451 PARAMETER Experiment Name: At_Far-red-induction_P Parameter: Age (day) Value: 7
  misc_feature: MA Experiment 20001451 PARAMETER Experiment Name: At_Far-red-induction_P Parameter: Light Value: Far-red vs. White
  misc_feature: MA Experiment 20001451 PARAMETER Experiment Name: At_Far-red-induction_P Parameter: Organism Value: A. thaliana
  misc_feature: MA Experiment 20001451 PARAMETER Experiment Name: At_Far-red-induction_P Parameter: Plant Line Value: Columbia
  misc_feature: MA Experiment 20001451 PARAMETER Experiment Name: At_Far-red-induction_P Parameter: Timepoint (hr) Value: 24
  misc_feature: MA Experiment 20001451 PARAMETER Experiment Name: At_Far-red-induction_P Parameter: Tissue Value: Whole Plant
  misc_feature: MA Experiment ID: 20001906 Result: Up-regulated in Transcription
  misc_feature: MA Experiment 20001906 PARAMETER Experiment Name: At_Drought_Reproduction_P Parameter: Age (day) Value: 35
  misc_feature: MA Experiment 20001906 PARAMETER Experiment Name: At_Drought_Reproduction_P Parameter: Organism Value: A. thaliana
  misc_feature: MA Experiment 20001906 PARAMETER Experiment Name: At_Drought_Reproduction_P Parameter: Plant Line Value: WS
  misc_feature: MA Experiment 20001906 PARAMETER Experiment Name: At_Drought_Reproduction_P Parameter: Timepoint (day) Value: 5
  misc_feature: MA Experiment 20001906 PARAMETER Experiment Name: At_Drought_Reproduction_P Parameter: Tissue Value: Siliques
  misc_feature: MA Experiment 20001906 PARAMETER Experiment Name: At_Drought_Reproduction_P Parameter: Treatment Value: Drought vs. No Drought
aaaataagctctctttctactatttctctttctctttctactatttctctcctgtggagaaactcaggagatagagagagagagagagaagagaagagagcatgtatgtttggttttataatctctctactcataccaaagatttgtctcagacccaccacttggacagagagaacccaagctcctttctctctttttctcgatctactccttcttaatctccttttttgaaacttgaagccactttcaacatcatccttaaacttttgttcccttattcacaatctcctgccacctctcatttctctagctacatatatgggttctattagaggaaacattgaagagcctatatctcagtcattaacgaggcagaactctctctatagcttaaagctccatgaggttcaaacccacttaggaagttctggaaaaccactaggaagcatgaaccttgatgagcttctcaagactgtcttgccaccagctgaggaagggcttgttcgtcagggaagcttgacgttacctcgagatctcagtaaaaagacagttgatgaggtctggagagatatccaacaggacaagaatggaaacggtactagtactactactactcataagcagcctacactcggtgaaataacacttgaggatttgttgttgagagctggtgtagtgactgagacagtagtccctcaagaaaatgttgttaacatagcttcaaatgggcaatgggttgagtatcatcatcagcctcaacaacaacaagggtttatgacatatccggtttgcgagatgcaagatatggtgatgatgggtggattatcggatacaccacaagcgcctgggaggaaaagagtagctggagagattgtggagaagactgttgagaggagacagaagaggatgatcaagaacagagaatctgcagcacgttcacgagctaggaaacaggcttatacacatgaattagagatcaaggtttcaaggttagaagaagaaaacgaaaaacttcggaggctaaaggaggtggagaagatcctaccaagtgaaccaccaccagatcctaagtggaagctccggcgaacaaactctgcttctctctgatcctaaagactcttctttctttcttcttctttgtgttggtttatatcagaccgctttgttctttgtatattgtgtagactttattgactttgaacagcatgtctttataaacatttcttgagtgtattcctcttttgcagctagttcaaactttttgagt

SEQ ID NO: 40490 - protein, 262 aa, Arabidopsis thaliana
  peptide (1)..(262): Ceres Seq. ID no. 12323872
  misc_feature (187)..(245): Pfam Name: bZIP transcription factor Pfam Description: bZIP transcription factor
  misc_feature (165)..(237): Homolog of NCBI NO: 34909206 NR Description: putative promoter-binding factor-like protein
  misc_feature (14)..(140): Homolog of NCBI NO: 34909206 NR Description: putative promoter-binding factor-like protein
  misc_feature (132)..(260): Homolog of NCBI NO: 13346155 NR Description: bZIP protein DPBF3 [Arabidopsis thaliana]
  misc_feature (1)..(129): Homolog of NCBI NO: 13346155 NR Description: bZIP protein DPBF3 [Arabidopsis thaliana]
  misc_feature (132)..(260): Homolog of NCBI NO: 15230146 NR Description: ABA-responsive element binding protein 3
  misc_feature (1)..(129): Homolog of NCBI NO: 15230146 NR Description: ABA-responsive element binding protein 3
  misc_feature (44)..(262): Homolog of NCBI NO: 7487620 NR Description: probable bZIP transcription factor
  misc_feature (37)..(262): Homolog of NCBI NO: 21694632 NR Description: basic leucine zipper transcription factor
  misc_feature (1)..(262): Homolog of NCBI NO: 26451276 NR Description: putative bZIP transcription factor AtbZIP12 /
  misc_feature (1)..(262): Homolog of NCBI NO: 18405590 NR Description: bZIP family transcription factor
MGSIRGNIEEPISQSLTRQNSLYSLKLHEVQTHLGSSGKPLGSMNLDELLKTVLPPAEEGLVRQGSLTLPRDLSKKTVDEVWRDIQQDKNGNGTSTTTTHKQPTLGEITLEDLLLRAGVVTETVVPQENVVNIASNGQWVEYHHQPQQQQGFMTYPVCEMQDMVMMGGLSDTPQAPGRKRVAGEIVEKTVERRQKRMIKNRESAARSRARKQAYTHELEIKVSRLEEENEKLRRLKEVEKILPSEPPPDPKWKLRRTNSASL

SEQ ID NO: 40491 - protein, 219 aa, Arabidopsis thaliana
  peptide (1)..(219): Ceres Seq. ID no. 12323873
  misc_feature (144)..(202): Pfam Name: bZIP transcription factor Pfam Description: bZIP transcription factor
  misc_feature (122)..(194): Homolog of NCBI NO: 34909206 NR Description: putative promoter-binding factor-like protein
  misc_feature (1)..(97): Homolog of NCBI NO: 34909206 NR Description: putative promoter-binding factor-like protein
  misc_feature (89)..(217): Homolog of NCBI NO: 13346155 NR Description: bZIP protein DPBF3 [Arabidopsis thaliana]
  misc_feature (1)..(86): Homolog of NCBI NO: 13346155 NR Description: bZIP protein DPBF3 [Arabidopsis thaliana]
  misc_feature (89)..(217): Homolog of NCBI NO: 15230146 NR Description: ABA-responsive element binding protein 3
  misc_feature (1)..(86): Homolog of NCBI NO: 15230146 NR Description: ABA-responsive element binding protein 3
  misc_feature (1)..(219): Homolog of NCBI NO: 7487620 NR Description: probable bZIP transcription factor
  misc_feature (1)..(219): Homolog of NCBI NO: 21694632 NR Description: basic leucine zipper transcription factor
  misc_feature (1)..(219): Homolog of NCBI NO: 26451276 NR Description: putative bZIP transcription factor AtbZIP12 /
  misc_feature (1)..(219): Homolog of NCBI NO: 18405590 NR Description: bZIP family transcription factor
MNLDELLKTVLPPAEEGLVRQGSLTLPRDLSKKTVDEVWRDIQQDKNGNGTSTTTTHKQPTLGEITLEDLLLRAGVVTETVVPQENVVNIASNGQWVEYHHQPQQQQGFMTYPVCEMQDMVMMGGLSDTPQAPGRKRVAGEIVEKTVERRQKRMIKNRESAARSRARKQAYTHELEIKVSRLEEENEKLRRLKEVEKILPSEPPPDPKWKLRRTNSASL

SEQ ID NO: 40492 - DNA, 1353 bp, Arabidopsis thaliana
  misc_feature (1)..(1353): Ceres Seq. ID no. 13494668
  misc_feature: MA Experiment ID: 108474 Result: Down-regulated in Transcription
  misc_feature: MA Experiment 108474 PARAMETER Experiment Name: At_Drought_Flowers_cDNA_P Parameter: Timepoint (hr) Value: null
  misc_feature: MA Experiment 108474 PARAMETER Experiment Name: At_Drought_Flowers_cDNA_P Parameter: Treatment Value: Drought vs. No Drought
  misc_feature: MA Experiment ID: 20000171 Result: Up-regulated in Transcription
  misc_feature: MA Experiment 20000171 PARAMETER Experiment Name: At_42deg_Heat_P Parameter: Age (day) Value: 14
  misc_feature: MA Experiment 20000171 PARAMETER Experiment Name: At_42deg_Heat_P Parameter: Organism Value: A. thaliana
  misc_feature: MA Experiment 20000171 PARAMETER Experiment Name: At_42deg_Heat_P Parameter: Plant Line Value: WS
  misc_feature: MA Experiment 20000171 PARAMETER Experiment Name: At_42deg_Heat_P Parameter: Temperature (deg C) Value: 42 vs. 22
  misc_feature: MA Experiment 20000171 PARAMETER Experiment Name: At_42deg_Heat_P Parameter: Timepoint (hr) Value: 1
  misc_feature: MA Experiment 20000171 PARAMETER Experiment Name: At_42deg_Heat_P Parameter: Tissue Value: Aerial
  misc_feature: MA Experiment ID: 20000173 Result: Up-regulated in Transcription
  misc_feature: MA Experiment 20000173 PARAMETER Experiment Name: At_42deg_Heat_P Parameter: Age (day) Value: 14
  misc_feature: MA Experiment 20000173 PARAMETER Experiment Name: At_42deg_Heat_P Parameter: Organism Value: A. thaliana
  misc_feature: MA Experiment 20000173 PARAMETER Experiment Name: At_42deg_Heat_P Parameter: Plant Line Value: WS
  misc_feature: MA Experiment 20000173 PARAMETER Experiment Name: At_42deg_Heat_P Parameter: Temperature (deg C) Value: 42 vs. 22
  misc_feature: MA Experiment 20000173 PARAMETER Experiment Name: At_42deg_Heat_P Parameter: Timepoint (hr) Value: 6
  misc_feature: MA Experiment 20000173 PARAMETER Experiment Name: At_42deg_Heat_P Parameter: Tissue Value: Aerial
  misc_feature: MA Experiment ID: 20000180 Result: Up-regulated in Transcription
  misc_feature: MA Experiment 20000180 PARAMETER Experiment Name: At_Germinating_Seeds_P Parameter: Age (hr) Value: 24 vs. 0
  misc_feature: MA Experiment 20000180 PARAMETER Experiment Name: At_Germinating_Seeds_P Parameter: Tissue Value: Germinating Seeds
  misc_feature: MA Experiment ID: 20000185 Result: Up-regulated in Transcription
  misc_feature: MA Experiment 20000185 PARAMETER Experiment Name: At_Roots__P Parameter: Age (day) Value: 7 vs. 21
  misc_feature: MA Experiment 20000185 PARAMETER Experiment Name: At_Roots__P Parameter: Organism Value: A. thaliana
  misc_feature: MA Experiment 20000185 PARAMETER Experiment Name: At_Roots__P Parameter: Tissue Value: Roots vs. Whole Plant
  misc_feature: MA Experiment ID: 20000227 Result: Down-regulated in Transcription
  misc_feature: MA Experiment 20000227 PARAMETER Experiment Name: At_Root-Tips-vs-Tops_P Parameter: Tissue Value: Root Tips vs. Root Tops
  misc_feature: MA Experiment ID: 20000265 Result: Up-regulated in Transcription
  misc_feature: MA Experiment 20000265 PARAMETER Experiment Name: At_Open_Flower_P Parameter: Age (day) Value: 21
  misc_feature: MA Experiment 20000265 PARAMETER Experiment Name: At_Open_Flower_P Parameter: Plant Line Value: WS
  misc_feature: MA Experiment 20000265 PARAMETER Experiment Name: At_Open_Flower_P Parameter: Tissue Value: Closed Flower vs. Whole Plant
  misc_feature: MA Experiment ID: 20000286 Result: Up-regulated in Transcription
  misc_feature: MA Experiment 20000286 PARAMETER Experiment Name: At_Open_Flower_P Parameter: Age (day) Value: 21
  misc_feature: MA Experiment 20000286 PARAMETER Experiment Name: At_Open_Flower_P Parameter: Plant Line Value: WS
  misc_feature: MA Experiment 20000286 PARAMETER Experiment Name: At_Open_Flower_P Parameter: Tissue Value: Half Open vs. Whole Plant
  misc_feature: MA Experiment ID: 20000439 Result: Up-regulated in Transcription
  misc_feature: MA Experiment 20000439 PARAMETER Experiment Name: At_Roots__P Parameter: Age (day) Value: 14 vs. 21
  misc_feature: MA Experiment 20000439 PARAMETER Experiment Name: At_Roots__P Parameter: Organism Value: A. thaliana
  misc_feature: MA Experiment 20000439 PARAMETER Experiment Name: At_Roots__P Parameter: Tissue Value: Roots vs. Whole Plant
  misc_feature: MA Experiment ID: 20000451 Result: Up-regulated in Transcription
  misc_feature: MA Experiment 20000451 PARAMETER Experiment Name: At_CS6879_Shoots-Roots_P Parameter: Age (day) Value: 14
  misc_feature: MA Experiment 20000451 PARAMETER Experiment Name: At_CS6879_Shoots-Roots_P Parameter: Organism Value: A. thaliana
  misc_feature: MA Experiment 20000451 PARAMETER Experiment Name: At_CS6879_Shoots-Roots_P Parameter: Plant Line Value: CS6879 vs. WS
  misc_feature: MA Experiment 20000451 PARAMETER Experiment Name: At_CS6879_Shoots-Roots_P Parameter: Tissue Value: Roots
  misc_feature: MA Experiment ID: 20001556 Result: Up-regulated in Transcription
  misc_feature: MA Experiment 20001556 PARAMETER Experiment Name: At_Drought_Soil_Dry_P Parameter: Age (day) Value: 26
  misc_feature: MA Experiment 20001556 PARAMETER Experiment Name: At_Drought_Soil_Dry_P Parameter: Organism Value: A. thaliana
  misc_feature: MA Experiment 20001556 PARAMETER Experiment Name: At_Drought_Soil_Dry_P Parameter: Plant Line Value: WS
  misc_feature: MA Experiment 20001556 PARAMETER Experiment Name: At_Drought_Soil_Dry_P Parameter: Post Timepoint (hr) Value: None
  misc_feature: MA Experiment 20001556 PARAMETER Experiment Name: At_Drought_Soil_Dry_P Parameter: Post-Treatment Value: None
  misc_feature: MA Experiment 20001556 PARAMETER Experiment Name: At_Drought_Soil_Dry_P Parameter: Timepoint (day) Value: 12
  misc_feature: MA Experiment 20001556 PARAMETER Experiment Name: At_Drought_Soil_Dry_P Parameter: Treatment Value: Drought vs. No Drought
  misc_feature: MA Experiment ID: 20001904 Result: Up-regulated in Transcription
  misc_feature: MA Experiment 20001904 PARAMETER Experiment Name: At_Drought_Reproduction_P Parameter: Age (day) Value: 37
  misc_feature: MA Experiment 20001904 PARAMETER Experiment Name: At_Drought_Reproduction_P Parameter: Organism Value: A. thaliana
  misc_feature: MA Experiment 20001904 PARAMETER Experiment Name: At_Drought_Reproduction_P Parameter: Plant Line Value: WS
  misc_feature: MA Experiment 20001904 PARAMETER Experiment Name: At_Drought_Reproduction_P Parameter: Timepoint (day) Value: 7
  misc_feature: MA Experiment 20001904 PARAMETER Experiment Name: At_Drought_Reproduction_P Parameter: Tissue Value: Rosettes
  misc_feature: MA Experiment 20001904 PARAMETER Experiment Name: At_Drought_Reproduction_P Parameter: Treatment Value: Drought vs. No Drought
  misc_feature: MA Experiment ID: 20001905 Result: Up-regulated in Transcription
  misc_feature: MA Experiment 20001905 PARAMETER Experiment Name: At_Drought_Reproduction_P Parameter: Age (day) Value: 40
  misc_feature: MA Experiment 20001905 PARAMETER Experiment Name: At_Drought_Reproduction_P Parameter: Organism Value: A. thaliana
  misc_feature: MA Experiment 20001905 PARAMETER Experiment Name: At_Drought_Reproduction_P Parameter: Plant Line Value: WS
  misc_feature: MA Experiment 20001905 PARAMETER Experiment Name: At_Drought_Reproduction_P Parameter: Timepoint (day) Value: 10
  misc_feature: MA Experiment 20001905 PARAMETER Experiment Name: At_Drought_Reproduction_P Parameter: Tissue Value: Rosettes
  misc_feature: MA Experiment 20001905 PARAMETER Experiment Name: At_Drought_Reproduction_P Parameter: Treatment Value: Drought vs. No Drought
  misc_feature: MA Experiment ID: 20001906 Result: Up-regulated in Transcription
  misc_feature: MA Experiment 20001906 PARAMETER Experiment Name: At_Drought_Reproduction_P Parameter: Age (day) Value: 35
  misc_feature: MA Experiment 20001906 PARAMETER Experiment Name: At_Drought_Reproduction_P Parameter: Organism Value: A. thaliana
  misc_feature: MA Experiment 20001906 PARAMETER Experiment Name: At_Drought_Reproduction_P Parameter: Plant Line Value: WS
  misc_feature: MA Experiment 20001906 PARAMETER Experiment Name: At_Drought_Reproduction_P Parameter: Timepoint (day) Value: 5
  misc_feature: MA Experiment 20001906 PARAMETER Experiment Name: At_Drought_Reproduction_P Parameter: Tissue Value: Siliques
  misc_feature: MA Experiment 20001906 PARAMETER Experiment Name: At_Drought_Reproduction_P Parameter: Treatment Value: Drought vs. No Drought
ctaacttctctgttcatctttttctctctttatttataaatttatctgcatagtactctctgaatctatatcttcaaaaaaaaaaaacgtccaagatcaaatcaagaaacccattaaaaaaaaaaatcaggttttggtttcagttttaagggtttaaggtttcttggggaagaaacgatggagactttttgtgggtttcaaaaggaggaagagcagatggatttacctcctgggttcaggtttcatccaacagatgaagaactcataactcactatctccataagaaggttcttgacaccagcttctcagctaaagctatcggtgaagttgatttaaacaaatcagagccatgggagttaccatggatggcaaaaatgggtgagaaagaatggtattttttctgtgtgagagacagaaagtatcccaccggtttaagaactaaccgagcaactgaagccggttattggaaggcgaccgggaaggataaagagatataccgaggcaaatcacttgttgggatgaagaagacacttgttttctatagaggaagagctcctaaaggtcagaaaaccaactgggtgatgcatgagtacaggcttgaaggaaaattctctgcccataacttgccgaaaaccgcaaagaatgaatgggtgatatgcagggtgttccaaaagagtgctggagggaagaagatcccgatttcgagtctaatccgaatcggttcactcggaaccgactttaacccttcgcttttgccctctttaaccgattcttcgccttacaacgataaaaccaaaacagaaccggtctacgtgccctgcttctccaaccaaacggatcaaaaccaaggaaccacactcaattgcttcagcagccctgttcttaactcgatccaagccgacatttttcacaggattccactctatcaaactcagtccctccaggtttctatgaatctacagagcccggttctcacgcaagaacactcagttctacatgctatgatcgagaacaacagaagacaaagtctcaaaacgatgagtgtctcacaagaaaccggagtttcaactgacatgaacactgatatctcatcggattttgaatttggtaagagacggtttgattctcaagaagatccgtcttcctctactggaccggttgatcttgaacctttctggaattactgaagatgattcaagattctcatgtccattaatttactgtggtgtgttaaagtttgtataggctattgtcatatactctcatatcaacttccactatatattataacaatttaaagaaacttaaaaatatgatttgatatatgactaaagtattataatacaattttg

SEQ ID NO: 40493 - protein, 336 aa, Arabidopsis thaliana; identical to SEQ ID NO: 29064
  peptide (1)..(336): Ceres Seq. ID no. 13494669
  misc_feature (16)..(142): Pfam Name: No apical meristem (NAM) protein Pfam Description: No apical meristem (NAM) protein
  misc_feature (16)..(142): Pfam Name: No apical meristem (NAM) protein Pfam Description: No apical meristem (NAM) protein
  misc_feature (14)..(336): Homolog of NCBI NO: 30682054 NR Description: NAM (no apical meristem)-related protein
  misc_feature (1)..(336): Homolog of NCBI NO: 30682048 NR Description: NAM (no apical meristem)-related protein
  misc_feature (14)..(336): Homolog of NCBI NO: 30682054 NR Description: NAM (no apical meristem)-related protein
  misc_feature (14)..(336): Homolog of NCBI NO: 21537315 NR Description: NAM, no apical meristem,-like protein
  misc_feature (1)..(336): Homolog of NCBI NO: 15240252 NR Description: NAM, no apical meristem, - like protein
  misc_feature (1)..(336): Homolog of NCBI NO: 30682048 NR Description: NAM (no apical meristem)-related protein
  misc_feature (14)..(336): Homolog of NCBI NO: 21537315 NR Description: NAM, no apical meristem,-like protein
  misc_feature (1)..(336): Homolog of NCBI NO: 15240252 NR Description: NAM, no apical meristem, - like protein

SEQ ID NO: 40494 - protein, 323 aa, Arabidopsis thaliana; identical to SEQ ID NO: 29065
  peptide (1)..(323): Ceres Seq. ID no. 13494670
  misc_feature (3)..(129): Pfam Name: No apical meristem (NAM) protein Pfam Description: No apical meristem (NAM) protein
  misc_feature (3)..(129): Pfam Name: No apical meristem (NAM) protein Pfam Description: No apical meristem (NAM) protein
  misc_feature (1)..(323): Homolog of NCBI NO: 30682054 NR Description: NAM (no apical meristem)-related protein
  misc_feature (1)..(323): Homolog of NCBI NO: 30682048 NR Description: NAM (no apical meristem)-related protein
  misc_feature (1)..(323): Homolog of NCBI NO: 30682054 NR Description: NAM (no apical meristem)-related protein
  misc_feature (1)..(323): Homolog of NCBI NO: 21537315 NR Description: NAM, no apical meristem,-like protein
  misc_feature (1)..(323): Homolog of NCBI NO: 15240252 NR Description: NAM, no apical meristem, - like protein
  misc_feature (1)..(323): Homolog of NCBI NO: 30682048 NR Description: NAM (no apical meristem)-related protein
  misc_feature (1)..(323): Homolog of NCBI NO: 21537315 NR Description: NAM, no apical meristem,-like protein
  misc_feature (1)..(323): Homolog of NCBI NO: 15240252 NR Description: NAM, no apical meristem, - like protein

SEQ ID NO: 40495 - protein, 273 aa, Arabidopsis thaliana
  peptide (1)..(273): Ceres Seq. ID no. 13494671
  misc_feature (1)..(79): Pfam Name: No apical meristem (NAM) protein Pfam Description: No apical meristem (NAM) protein
  misc_feature (1)..(79): Pfam Name: No apical meristem (NAM) protein Pfam Description: No apical meristem (NAM) protein
  misc_feature (1)..(273): Homolog of NCBI NO: 30682054 NR Description: NAM (no apical meristem)-related protein
  misc_feature (1)..(273): Homolog of NCBI NO: 30682048 NR Description: NAM (no apical meristem)-related protein
  misc_feature (1)..(273): Homolog of NCBI NO: 30682054 NR Description: NAM (no apical meristem)-related protein
  misc_feature (1)..(273): Homolog of NCBI NO: 21537315 NR Description: NAM, no apical meristem,-like protein
  misc_feature (1)..(273): Homolog of NCBI NO: 15240252 NR Description: NAM, no apical meristem, - like protein
  misc_feature (1)..(273): Homolog of NCBI NO: 30682048 NR Description: NAM (no apical meristem)-related protein
  misc_feature (1)..(273): Homolog of NCBI NO: 21537315 NR Description: NAM, no apical meristem,-like protein
  misc_feature (1)..(273): Homolog of NCBI NO: 15240252 NR Description: NAM, no apical meristem, - like protein
MAKMGEKEWYFFCVRDRKYPTGLRTNRATEAGYWKATGKDKEIYRGKSLVGMKKTLVFYRGRAPKGQKTNWVMHEYRLEGKFSAHNLPKTAKNEWVICRVFQKSAGGKKIPISSLIRIGSLGTDFNPSLLPSLTDSSPYNDKTKTEPVYVPCFSNQTDQNQGTTLNCFSSPVLNSIQADIFHRIPLYQTQSLQVSMNLQSPVLTQEHSVLHAMIENNRRQSLKTMSVSQETGVSTDMNTDISSDFEFGKRRFDSQEDPSSSTGPVDLEPFWNY

SEQ ID NO: 40496 - DNA, 2730 bp, Arabidopsis thaliana
  misc_feature (1)..(2730): Ceres Seq. ID no. 12323874
  misc_feature: MA Experiment ID: 20000307 Result: Up-regulated in Transcription
  misc_feature: MA Experiment 20000307 PARAMETER Experiment Name: At_Germinating_Seeds_Sub_P Parameter: Age (hr) Value: 24 vs. 0
  misc_feature: MA Experiment 20000307 PARAMETER Experiment Name: At_Germinating_Seeds_Sub_P Parameter: Organism Value: A. thaliana
  misc_feature: MA Experiment 20000307 PARAMETER Experiment Name: At_Germinating_Seeds_Sub_P Parameter: Plant Line Value: WS
  misc_feature: MA Experiment 20000307 PARAMETER Experiment Name: At_Germinating_Seeds_Sub_P Parameter: Tissue Value: Germinating Seeds
  misc_feature: MA Experiment ID: 20000315 Result: Down-regulated in Transcription
  misc_feature: MA Experiment 20000315 PARAMETER Experiment Name: At_14day_Shoots-Roots_Sub_P Parameter: Age (day) Value: 14
  misc_feature: MA Experiment 20000315 PARAMETER Experiment Name: At_14day_Shoots-Roots_Sub_P Parameter: Organism Value: A. thaliana
  misc_feature: MA Experiment 20000315 PARAMETER Experiment Name: At_14day_Shoots-Roots_Sub_P Parameter: Plant Line Value: WS
  misc_feature: MA Experiment 20000315 PARAMETER Experiment Name: At_14day_Shoots-Roots_Sub_P Parameter: Tissue Value: Shoots vs. Whole Plant
ctctgtttctttctccactctctctctctctcgttgcaagcaacttgttttctgaatccaaagaagacgataacgatgaatggagctataggaggtgaccttttgctcaattttcctgacatgtcggtcctagagcgccaaagggctcacctcaagtacctcaatcccacctttgattctcctctcgccggcttctttgccgattcttcaatgattaccggcggcgagatggacagctatctttcgactgccggtttgaatcttccgatgatgtacggtgagacgacggtggaaggtgattcaagactctcaatttcgccggaaacgacgcttgggactggaaatttcaagaaacggaagtttgatacagagactaaggattgtaatgagaagaagaagaagatgacgatgaacagagatgacctagtagaagaaggagaagaagagaagtcgaaaataacagagcaaaacaatgggagcacaaaaagcatcaagaagatgaaacacaaagccaagaaagaagagaacaatttctctaatgattcatctaaagtgacgaaggaattggagaaaacggattatattcatgttcgtgcacgacgaggccaagccactgatagtcacagcatagcagaacgagttagaagagaaaagatcagtgagagaatgaagtttctacaagatttggttcctggatgcgacaagatcacaggcaaagcagggatgcttgatgaaatcattaactatgttcagtctcttcagagacaaatcgagttcttatcgatgaaactagcaattgtgaatccaaggccggattttgatatggatgacatttttgccaaagaggttgcctcaactccaatgactgtggtgccatctcctgaaatggttctttccggttattctcatgagatggttcactctggttattctagtgagatggttaactccggttaccttcatgtcaatccaatgcagcaagtgaataccagttctgatccattgtcatgcttcaacaatggcgaagctccttcgatgtgggactctcatgtgcagaatctctatggcaatttaggagtttgattaagaaaccaatccacaacataacaatgttccctaattcaaattattcatcggaagagagagcaaaccagtagctgttatttactaattccactagattattgacttgagatcccccgcccattagttgatgtatcaaagagtgtagacattattgtgtataatttgcaaaccagtccagtaatatatttcttatcggtggacttgtgtctttaattcaaggtgtgttctcatcttcttgtggtgaatgatcatccattagtatttttttttttagtatacaatgccacaagtcatgcgaccatgaaatcaagaaacaagacaccagtcgtttaacgttatgttttacatcttatcactaacaatcttctaatctatgttttggttactttgaaaaagcgggactaatcccaaatttaaagcaattgaataaacaacacctgttaagcgtggcggacaaaacgacgacaatgtaagagaactgagtcagagattaaaacctatgaccaacccattggaactaaactatcctaattctctatacggagagtatatataaatggaggaggagaagaagaagagcagagttttgatcatcggagcaacaggaagattagggaactatttgacccgtttcagcatcgaatcgggtcacccgactttcgctctcatcagaaacaccactctctccgataagctgaaatctctctccgacgccggcgttaccctcctcaaaggttcattggaggatgaaggaagcttagcagaagcagtgagtaaagtagatgtggtgatctctgcaattccatcaaaacatgttcttgatcagaaactcctcgtcagagttatcaaacaagctggttccatcaagaggtttattcctgctgaatatggagcaaatcctgataaaactcaagtctcggatcttgatcatgacttctattcgaagaaatcagagattaggcatatgatagaatcagaggggattccatatacatacatttgctgcggactgttcatgagagttctacttccatcgcttgtgcaaccggggcttcaatctcctccaacagataaagtcacagtttttggagatggaaacgttaaagctgttttcgtgaatgatgtcgatgttgcagcatttactatcaagacgatagatgatcctcgaacactgaataagaccttgtaccttagcccgcccggaaacatatgttccatgaatgatcttgtcgagctctgggagggcaagattgagaagaagcttgagaaaacgtttgctacagagaatcaacttctcaagaagatcaaagaaactccatatccggataacatggagatggtattcatatactctgtctttatcaaaggagatcacacatacttcgacatcgagtcttgtggtggagtgaatggtactgagctttaccctgatgtcaaatacatgaccgtgagcgagtttcttgatactcttctctagaattataaaccaaacagcaaagggatcactctcatttttcagagtttaccttttacacttccaaaatttctctgtttttgagggctgaatcaatctatctcatgtagcactatctttaccctattgatctgagtttcgaccttaatcgtgtaacacattacttctgc

SEQ ID NO: 40497 - protein, 360 aa, Arabidopsis thaliana
  peptide (1)..(360): Ceres Seq. ID no. 12323875
  misc_feature (204)..(254): Pfam Name: Helix-loop-helix DNA-binding domain Pfam Description: Helix-loop-helix DNA-binding domain
  misc_feature (121)..(358): Homolog of NCBI NO: 30690689 NR Description: expressed protein [Arabidopsis thaliana]
  misc_feature (85)..(298): Homolog of NCBI NO: 20127068 NR Description: putative bHLH transcription factor [Arabidopsis
  misc_feature (26)..(298): Homolog of NCBI NO: 30680338 NR Description: bHLH064 putative bHLH transcription factor
  misc_feature (104)..(359): Homolog of NCBI NO: 15221563 NR Description: putative DNA-binding protein; protein id:
  misc_feature (104)..(359): Homolog of NCBI NO: 30697769 NR Description: DNA-binding protein -related [Arabidopsis
  misc_feature (94)..(359): Homolog of NCBI NO: 20127044 NR Description: putative bHLH transcription factor [Arabidopsis
  misc_feature (26)..(339): Homolog of NCBI NO: 7487656 NR Description: hypothetical protein T4L20.110 - Arabidopsis
  misc_feature (26)..(360): Homolog of NCBI NO: 21539493 NR Description: unknown protein [Arabidopsis thaliana]
  misc_feature (26)..(360): Homolog of NCBI NO: 20127066 NR Description: putative bHLH transcription factor [Arabidopsis
  misc_feature (26)..(360): Homolog of NCBI NO: 22329164 NR Description: bHLH protein
LCFFLHSLSLSLQATCFLNPKKTITMNGAIGGDLLLNFPDMSVLERQRAHLKYLNPTFDSPLAGFFADSSMITGGEMDSYLSTAGLNLPMMYGETTVEGDSRLSISPETTLGTGNFKKRKFDTETKDCNEKKKKMTMNRDDLVEEGEEEKSKITEQNNGSTKSIKKMKHKAKKEENNFSNDSSKVTKELEKTDYIHVRARRGQATDSHSIAERVRREKISERMKFLQDLVPGCDKITGKAGMLDEIINYVQSLQRQIEFLSMKLAIVNPRPDFDMDDIFAKEVASTPMTVVPSPEMVLSGYSHEMVHSGYSSEMVNSGYLHVNPMQQVNTSSDPLSCFNNGEAPSMWDSHVQNLYGNLGV

SEQ ID NO: 40498 - protein, 335 aa, Arabidopsis thaliana
  peptide (1)..(335): Ceres Seq. ID no. 12323876
  misc_feature (179)..(229): Pfam Name: Helix-loop-helix DNA-binding domain Pfam Description: Helix-loop-helix DNA-binding domain
  misc_feature (96)..(333): Homolog of NCBI NO: 30690689 NR Description: expressed protein [Arabidopsis thaliana]
  misc_feature (60)..(273): Homolog of NCBI NO: 20127068 NR Description: putative bHLH transcription factor [Arabidopsis
  misc_feature (1)..(273): Homolog of NCBI NO: 30680338 NR Description: bHLH064 putative bHLH transcription factor
  misc_feature (79)..(334): Homolog of NCBI NO: 15221563 NR Description: putative DNA-binding protein; protein id:
  misc_feature (79)..(334): Homolog of NCBI NO: 30697769 NR Description: DNA-binding protein -related [Arabidopsis
  misc_feature (69)..(334): Homolog of NCBI NO: 20127044 NR Description: putative bHLH transcription factor [Arabidopsis
  misc_feature (1)..(314): Homolog of NCBI NO: 7487656 NR Description: hypothetical protein T4L20.110 - Arabidopsis
  misc_feature (1)..(335): Homolog of NCBI NO: 21539493 NR Description: unknown protein [Arabidopsis thaliana]
  misc_feature (1)..(335): Homolog of NCBI NO: 20127066 NR Description: putative bHLH transcription factor [Arabidopsis
  misc_feature (1)..(335): Homolog of NCBI NO: 22329164 NR Description: bHLH protein
MNGAIGGDLLLNFPDMSVLERQRAHLKYLNPTFDSPLAGFFADSSMITGGEMDSYLSTAGLNLPMMYGETTVEGDSRLSISPETTLGTGNFKKRKFDTETKDCNEKKKKMTMNRDDLVEEGEEEKSKITEQNNGSTKSIKKMKHKAKKEENNFSNDSSKVTKELEKTDYIHVRARRGQATDSHSIAERVRREKISERMKFLQDLVPGCDKITGKAGMLDEIINYVQSLQRQIEFLSMKLAIVNPRPDFDMDDIFAKEVASTPMTVVPSPEMVLSGYSHEMVHSGYSSEMVNSGYLHVNPMQQVNTSSDPLSCFNNGEAPSMWDSHVQNLYGNLGV

SEQ ID NO: 40499 - protein, 320 aa, Arabidopsis thaliana
  peptide (1)..(320): Ceres Seq. ID no. 12323877
  misc_feature (164)..(214): Pfam Name: Helix-loop-helix DNA-binding domain Pfam Description: Helix-loop-helix DNA-binding domain
  misc_feature (81)..(318): Homolog of NCBI NO: 30690689 NR Description: expressed protein [Arabidopsis thaliana]
  misc_feature (45)..(258): Homolog of NCBI NO: 20127068 NR Description: putative bHLH transcription factor [Arabidopsis
  misc_feature (1)..(258): Homolog of NCBI NO: 30680338 NR Description: bHLH064 putative bHLH transcription factor
  misc_feature (64)..(319): Homolog of NCBI NO: 15221563 NR Description: putative DNA-binding protein; protein id:
  misc_feature (64)..(319): Homolog of NCBI NO: 30697769 NR Description: DNA-binding protein -related [Arabidopsis
  misc_feature (54)..(319): Homolog of NCBI NO: 20127044 NR Description: putative bHLH transcription factor [Arabidopsis
  misc_feature (1)..(299): Homolog of NCBI NO: 7487656 NR Description: hypothetical protein T4L20.110 - Arabidopsis
  misc_feature (1)..(320): Homolog of NCBI NO: 21539493 NR Description: unknown protein [Arabidopsis thaliana]
  misc_feature (1)..(320): Homolog of NCBI NO: 20127066 NR Description: putative bHLH transcription factor [Arabidopsis
  misc_feature (1)..(320): Homolog of NCBI NO: 22329164 NR Description: bHLH protein
MSVLERQRAHLKYLNPTFDSPLAGFFADSSMITGGEMDSYLSTAGLNLPMMYGETTVEGDSRLSISPETTLGTGNFKKRKFDTETKDCNEKKKKMTMNRDDLVEEGEEEKSKITEQNNGSTKSIKKMKHKAKKEENNFSNDSSKVTKELEKTDYIHVRARRGQATDSHSIAERVRREKISERMKFLQDLVPGCDKITGKAGMLDEIINYVQSLQRQIEFLSMKLAIVNPRPDFDMDDIFAKEVASTPMTVVPSPEMVLSGYSHEMVHSGYSSEMVNSGYLHVNPMQQVNTSSDPLSCFNNGEAPSMWDSHVQNLYGNLGV

SEQ ID NO: 40500 - DNA, 1746 bp, Arabidopsis thaliana
  misc_feature (1)..(1746): Ceres Seq. ID no. 12328914
  misc_feature: MA Experiment ID: 108488 Result: Down-regulated in Transcription
  misc_feature: MA Experiment ID: 108595 Result: Down-regulated in Transcription
  misc_feature: MA Experiment 108595 PARAMETER Experiment Name: At_Ler-pi_Ovule_cDNA_P Parameter: Plant Line Value: null
  misc_feature: MA Experiment ID: 20000069 Result: Down-regulated in Transcription
  misc_feature: MA Experiment 20000069 PARAMETER Experiment Name: At_100uM_ABA_Mutants_cDNA_P Parameter: Plant Line Value: CS23
  misc_feature: MA Experiment 20000069 PARAMETER Experiment Name: At_100uM_ABA_Mutants_cDNA_P Parameter: Timepoint (hr) Value: 6
  misc_feature: MA Experiment 20000069 PARAMETER Experiment Name: At_100uM_ABA_Mutants_cDNA_P Parameter: Tissue Value: Aerial
  misc_feature: MA Experiment 20000069 PARAMETER Experiment Name: At_100uM_ABA_Mutants_cDNA_P Parameter: Treatment Value: 100uM ABA vs. No Treatment
  misc_feature: MA Experiment ID: 20000089 Result: Down-regulated in Transcription
  misc_feature: MA Experiment ID: 20000090 Result: Down-regulated in Transcription
  misc_feature: MA Experiment ID: 20000117 Result: Down-regulated in Transcription
  misc_feature: MA Experiment 20000117 PARAMETER Experiment Name: At_100uM_ABA_Mutants_cDNA_P Parameter: Plant Line Value: Columbia
  misc_feature: MA Experiment 20000117 PARAMETER Experiment Name: At_100uM_ABA_Mutants_cDNA_P Parameter: Timepoint (hr) Value: 6
  misc_feature: MA Experiment 20000117 PARAMETER Experiment Name: At_100uM_ABA_Mutants_cDNA_P Parameter: Tissue Value: Aerial
  misc_feature: MA Experiment 20000117 PARAMETER Experiment Name: At_100uM_ABA_Mutants_cDNA_P Parameter: Treatment Value: 100uM ABA vs. No Treatment
  misc_feature: MA Experiment ID: 20000265 Result: Down-regulated in Transcription
  misc_feature: MA Experiment 20000265 PARAMETER Experiment Name: At_Open_Flower_P Parameter: Age (day) Value: 21
  misc_feature: MA Experiment 20000265 PARAMETER Experiment Name: At_Open_Flower_P Parameter: Plant Line Value: WS
  misc_feature: MA Experiment 20000265 PARAMETER Experiment Name: At_Open_Flower_P Parameter: Tissue Value: Closed Flower vs. Whole Plant
  misc_feature: MA Experiment ID: 20001247 Result: Up-regulated in Transcription
  misc_feature: MA Experiment 20001247 PARAMETER Experiment Name: At_Far-red-induction_P Parameter: Age (day) Value: 7
  misc_feature: MA Experiment 20001247 PARAMETER Experiment Name: At_Far-red-induction_P Parameter: Light Value: Far-red vs. White
  misc_feature: MA Experiment 20001247 PARAMETER Experiment Name: At_Far-red-induction_P Parameter: Organism Value: A. thaliana
  misc_feature: MA Experiment 20001247 PARAMETER Experiment Name: At_Far-red-induction_P Parameter: Plant Line Value: Columbia
  misc_feature: MA Experiment 20001247 PARAMETER Experiment Name: At_Far-red-induction_P Parameter: Timepoint (hr) Value: 1
  misc_feature: MA Experiment 20001247 PARAMETER Experiment Name: At_Far-red-induction_P Parameter: Tissue Value: Whole Plant
  misc_feature: MA Experiment ID: 20001554 Result: Down-regulated in Transcription
  misc_feature: MA Experiment 20001554 PARAMETER Experiment Name: At_Drought_Soil_Dry_P Parameter: Age (day) Value: 21
  misc_feature: MA Experiment 20001554 PARAMETER Experiment Name: At_Drought_Soil_Dry_P Parameter: Organism Value: A. thaliana
  misc_feature: MA Experiment 20001554 PARAMETER Experiment Name: At_Drought_Soil_Dry_P Parameter: Plant Line Value: WS
  misc_feature: MA Experiment 20001554 PARAMETER Experiment Name: At_Drought_Soil_Dry_P Parameter: Post Timepoint (hr) Value: None
  misc_feature: MA Experiment 20001554 PARAMETER Experiment Name: At_Drought_Soil_Dry_P Parameter: Post-Treatment Value: None
  misc_feature: MA Experiment 20001554 PARAMETER Experiment Name: At_Drought_Soil_Dry_P Parameter: Timepoint (day) Value: 7
  misc_feature: MA Experiment 20001554 PARAMETER Experiment Name: At_Drought_Soil_Dry_P Parameter: Treatment Value: Drought vs. No Drought
  misc_feature: MA Experiment ID: 20001555 Result: Down-regulated in Transcription
  misc_feature: MA Experiment 20001555 PARAMETER Experiment Name: At_Drought_Soil_Dry_P Parameter: Age (day) Value: 24
  misc_feature: MA Experiment 20001555 PARAMETER Experiment Name: At_Drought_Soil_Dry_P Parameter: Organism Value: A. thaliana
  misc_feature: MA Experiment 20001555 PARAMETER Experiment Name: At_Drought_Soil_Dry_P Parameter: Plant Line Value: WS
  misc_feature: MA Experiment 20001555 PARAMETER Experiment Name: At_Drought_Soil_Dry_P Parameter: Post Timepoint (hr) Value: None
  misc_feature: MA Experiment 20001555 PARAMETER Experiment Name: At_Drought_Soil_Dry_P Parameter: Post-Treatment Value: None
  misc_feature: MA Experiment 20001555 PARAMETER Experiment Name: At_Drought_Soil_Dry_P Parameter: Timepoint (day) Value: 10
  misc_feature: MA Experiment 20001555 PARAMETER Experiment Name: At_Drought_Soil_Dry_P Parameter: Treatment Value: Drought vs. No Drought
  misc_feature: MA Experiment ID: 20001556 Result: Down-regulated in Transcription
  misc_feature: MA Experiment 20001556 PARAMETER Experiment Name: At_Drought_Soil_Dry_P Parameter: Age (day) Value: 26
  misc_feature: MA Experiment 20001556 PARAMETER Experiment Name: At_Drought_Soil_Dry_P Parameter: Organism Value: A. thaliana
  misc_feature: MA Experiment 20001556 PARAMETER Experiment Name: At_Drought_Soil_Dry_P Parameter: Plant Line Value: WS
  misc_feature: MA Experiment 20001556 PARAMETER Experiment Name: At_Drought_Soil_Dry_P Parameter: Post Timepoint (hr) Value: None
  misc_feature: MA Experiment 20001556 PARAMETER Experiment Name: At_Drought_Soil_Dry_P Parameter: Post-Treatment Value: None
  misc_feature: MA Experiment 20001556 PARAMETER Experiment Name: At_Drought_Soil_Dry_P Parameter: Timepoint (day) Value: 12
  misc_feature: MA Experiment 20001556 PARAMETER Experiment Name: At_Drought_Soil_Dry_P Parameter: Treatment Value: Drought vs. No Drought
aaaataaatttttagaaaccaaaaaaaaaattgtagagagagaaaaaaaaaactcagaggagagaaagagaagacgacgaagacgaccattttttttttttttgtcaagagagaagacggagacaacaatggcggaagcgaaggaggagaatagggagaaaaacgaagaagaagagagcgtaaagcttttcgtcggacaaattccgaaacatatgtcggaatctcaactcttaacattgtttcaagagttcgctgtcgttgacgaggtcaatatcatcaaggacaagattacacgcgcctctcgaggatgttgttttctgctatgtccatcgagagaagaagcagataagttggtcaatgcttgccataacaagaagacattgcctggggctaacagtctattgcaagtaaagtatgcagatggcgaattagaaaggctagagcataagctatttgttggtatgcttccaaagaatgtctctgaagctgaagttcaatctttattctccaagtacgggaccataaaggatctacagattctaagaggtgctcaacaaacgagcaaaggctgtgcatttctgaagtatgagacaaaagaacaagctgtttccgccatggaatctatcaacggaaaacataaaatggagggttcaactgttcctttagttgtcaaatgggcagacacagaacgagaaagacacacaagaagacttcaaaaggctcaatctcacatcgcccgactagggaacggtgatccaacaaatccctcattgtttggagcattacctatgggttatgtaccaccatataatggatatggttatcatcagcctcctggaacttatggttacatgctaccaccaattcagaaccaagctgcattttccaatatgattgcacaaccaaaccaaggtaataacaatgcattgcaaggaacatcgcctgactctgtgccgcctcgtttggcccgtagaaactttcctatgcctcctggaaactacatgggatctggttatcctgctatgcgaggtcatccttttccatttgcttatcccagaggaattgttagtcctcgccctctaagtagctctcctggatctatatcacctggcatgtcaacacctttaggcattggtttgagttctgtggttcaaaccgaaggtccagaaggtgcaaatctgtttatctataacatacctcgggagttcggggatcaagaactcgcggctgcatttcaatctttcggtattgttctgagtgccaaggtttttgtagacaaagccactggtgtaagcaaatgtttcggttttgttagctatgactcacaagccgcggcgcagaacgctattgacatgatgaatggtcgccatttaggcggtaagaaattgaaagtccagcttaagagagacagcaacaatggccaaccgagtagtaatccttccttaatctcctgaaagtgctaaaactcctcctctcttcaacttgaaagttcataacagaaaaaaacaaaaaacatattcgggcttatgggtcgacccggttcaaagatttggaccgatcttgaatggatgcatctgtatagatccaaatctcattgtgggtcaaaatgtcccatcaactcaaaagctccaaactggatcatctcttttcttttttttttttaatctgcaaataacaatttgtaatttatgtttattattgaaactcatgtagaaattttatgatttattaacattaaattcattg

SEQ ID NO: 40501 - protein, 483 aa, Arabidopsis thaliana
  peptide (1)..(483): Ceres Seq. ID no. 12328915
  misc_feature (62)..(134): Pfam Name: RNA recognition motif. (a.k.a. RRM, RBD, or RNP domain) Pfam Description: RNA recognition motif. (a.k.a. RRM, RBD, or RNP
  misc_feature (384)..(475): Homolog of NCBI NO: 27369577 NR Description: CUG-BP and ETR-3 like factor 3 [Mus musculus]
  misc_feature (55)..(369): Homolog of NCBI NO: 27369577 NR Description: CUG-BP and ETR-3 like factor 3 [Mus musculus]
  misc_feature (58)..(470): Homolog of NCBI NO: 33354192 NR Description: putative CUG triplet repeat RNA-binding protein 1
  misc_feature (52)..(337): Homolog of NCBI NO: 7488302 NR Description: ribonucleoprotein homolog F21B7.26 - Arabidopsis
  misc_feature (56)..(475): Homolog of NCBI NO: 34907248 NR Description: putative ribonucleoprotein
  misc_feature (55)..(479): Homolog of NCBI NO: 25386552 NR Description: protein F21B7.8 [imported] - Arabidopsis thaliana
  misc_feature (52)..(479): Homolog of NCBI NO: 22329313 NR Description: RNA-binding CELF protein, putative; protein id:
  misc_feature (43)..(440): Homolog of NCBI NO: 30679366 NR Description: RNA-binding protein, putative [Arabidopsis
  misc_feature (43)..(476): Homolog of NCBI NO: 7488303 NR Description: ribonucleoprotein homolog T4I9.1 - Arabidopsis
  misc_feature (43)..(483): Homolog of NCBI NO: 18412143 NR Description: RNA-binding CELF protein, putative
NKFLETKKKIVEREKKNSEERKRRRRRRPFFFFLSREKTETTMAEAKEENREKNEEEESVKLFVGQIPKHMSESQLLTLFQEFAVVDEVNIIKDKITRASRGCCFLLCPSREEADKLVNACHNKKTLPGANSLLQVKYADGELERLEHKLFVGMLPKNVSEAEVQSLFSKYGTIKDLQILRGAQQTSKGCAFLKYETKEQAVSAMESINGKHKMEGSTVPLVVKWADTERERHTRRLQKAQSHIARLGNGDPTNPSLFGALPMGYVPPYNGYGYHQPPGTYGYMLPPIQNQAAFSNMIAQPNQGNNNALQGTSPDSVPPRLARRNFPMPPGNYMGSGYPAMRGHPFPFAYPRGIVSPRPLSSSPGSISPGMSTPLGIGLSSVVQTEGPEGANLFIYNIPREFGDQELAAAFQSFGIVLSAKVFVDKATGVSKCFGFVSYDSQAAAQNAIDMMNGRHLGGKKLKVQLKRDSNNGQPSSNPSLIS

SEQ ID NO: 40502 - protein, 441 aa, Arabidopsis thaliana
  peptide (1)..(441): Ceres Seq. ID no. 12328916
  misc_feature (20)..(92): Pfam Name: RNA recognition motif. (a.k.a. RRM, RBD, or RNP domain) Pfam Description: RNA recognition motif. (a.k.a. RRM, RBD, or RNP
  misc_feature (342)..(433): Homolog of NCBI NO: 27369577 NR Description: CUG-BP and ETR-3 like factor 3 [Mus musculus]
  misc_feature (13)..(327): Homolog of NCBI NO: 27369577 NR Description: CUG-BP and ETR-3 like factor 3 [Mus musculus]
  misc_feature (16)..(428): Homolog of NCBI NO: 33354192 NR Description: putative CUG triplet repeat RNA-binding protein 1
  misc_feature (10)..(295): Homolog of NCBI NO: 7488302 NR Description: ribonucleoprotein homolog F21B7.26 - Arabidopsis
  misc_feature (14)..(433): Homolog of NCBI NO: 34907248 NR Description: putative ribonucleoprotein
  misc_feature (13)..(437): Homolog of NCBI NO: 25386552 NR Description: protein F21B7.8 [imported] - Arabidopsis thaliana
  misc_feature (10)..(437): Homolog of NCBI NO: 22329313 NR Description: RNA-binding CELF protein, putative; protein id:
  misc_feature (1)..(398): Homolog of NCBI NO: 30679366 NR Description: RNA-binding protein, putative [Arabidopsis
  misc_feature (1)..(434): Homolog of NCBI NO: 7488303 NR Description: ribonucleoprotein homolog T4I9.1 - Arabidopsis
  misc_feature (1)..(441): Homolog of NCBI NO: 18412143 NR Description: RNA-binding CELF protein, putative
MAEAKEENREKNEEEESVKLFVGQIPKHMSESQLLTLFQEFAVVDEVNIIKDKITRASRGCCFLLCPSREEADKLVNACHNKKTLPGANSLLQVKYADGELERLEHKLFVGMLPKNVSEAEVQSLFSKYGTIKDLQILRGAQQTSKGCAFLKYETKEQAVSAMESINGKHKMEGSTVPLVVKWADTERERHTRRLQKAQSHIARLGNGDPTNPSLFGALPMGYVPPYNGYGYHQPPGTYGYMLPPIQNQAAFSNMIAQPNQGNNNALQGTSPDSVPPRLARRNFPMPPGNYMGSGYPAMRGHPFPFAYPRGIVSPRPLSSSPGSISPGMSTPLGIGLSSVVQTEGPEGANLFIYNIPREFGDQELAAAFQSFGIVLSAKVFVDKATGVSKCFGFVSYDSQAAAQNAIDMMNGRHLGGKKLKVQLKRDSNNGQPSSNPSLIS

SEQ ID NO: 40503 - protein, 413 aa, Arabidopsis thaliana
  peptide (1)..(413): Ceres Seq. ID no. 12328917
  misc_feature (1)..(64): Pfam Name: RNA recognition motif. (a.k.a. RRM, RBD, or RNP domain) Pfam Description: RNA recognition motif. (a.k.a. RRM, RBD, or RNP
  misc_feature (314)..(405): Homolog of NCBI NO: 27369577 NR Description: CUG-BP and ETR-3 like factor 3 [Mus musculus]
  misc_feature (1)..(299): Homolog of NCBI NO: 27369577 NR Description: CUG-BP and ETR-3 like factor 3 [Mus musculus]
  misc_feature (1)..(400): Homolog of NCBI NO: 33354192 NR Description: putative CUG triplet repeat RNA-binding protein 1
  misc_feature (1)..(267): Homolog of NCBI NO: 7488302 NR Description: ribonucleoprotein homolog F21B7.26 - Arabidopsis
  misc_feature (1)..(405): Homolog of NCBI NO: 34907248 NR Description: putative ribonucleoprotein
  misc_feature (1)..(409): Homolog of NCBI NO: 25386552 NR Description: protein F21B7.8 [imported] - Arabidopsis thaliana
  misc_feature (1)..(409): Homolog of NCBI NO: 22329313 NR Description: RNA-binding CELF protein, putative; protein id:
  misc_feature (1)..(370): Homolog of NCBI NO: 30679366 NR Description: RNA-binding protein, putative [Arabidopsis
  misc_feature (1)..(406): Homolog of NCBI NO: 7488303 NR Description: ribonucleoprotein homolog T4I9.1 - Arabidopsis
  misc_feature (1)..(413): Homolog of NCBI NO: 18412143 NR Description: RNA-binding CELF protein, putative
MSESQLLTLFQEFAVVDEVNIIKDKITRASRGCCFLLCPSREEADKLVNACHNKKTLPGANSLLQVKYADGELERLEHKLFVGMLPKNVSEAEVQSLFSKYGTIKDLQILRGAQQTSKGCAFLKYETKEQAVSAMESINGKHKMEGSTVPLVVKWADTERERHTRRLQKAQSHIARLGNGDPTNPSLFGALPMGYVPPYNGYGYHQPPGTYGYMLPPIQNQAAFSNMIAQPNQGNNNALQGTSPDSVPPRLARRNFPMPPGNYMGSGYPAMRGHPFPFAYPRGIVSPRPLSSSPGSISPGMSTPLGIGLSSVVQTEGPEGANLFIYNIPREFGDQELAAAFQSFGIVLSAKVFVDKATGVSKCFGFVSYDSQAAAQNAIDMMNGRHLGGKKLKVQLKRDSNNGQPSSNPSLIS

SEQ ID NO: 40504 - DNA, 1268 bp, Arabidopsis thaliana
  misc_feature (1)..(1268): Ceres Seq. ID no. 12482111
  misc_feature: MA Experiment ID: 108434 Result: Up-regulated in Transcription
  misc_feature: MA Experiment 108434 PARAMETER Experiment Name: At_Root_Tips_cDNA_P Parameter: Tissue Value: Root Tips
  misc_feature: MA Experiment ID: 108461 Result: Down-regulated in Transcription
  misc_feature: MA Experiment 108461 PARAMETER Experiment Name: At_Germinating_Seeds_cDNA_P Parameter: Age (day) Value: 1 vs. 0
  misc_feature: MA Experiment 108461 PARAMETER Experiment Name: At_Germinating_Seeds_cDNA_P Parameter: Tissue Value: Germinating Seeds
  misc_feature: MA Experiment ID: 108462 Result: Down-regulated in Transcription
  misc_feature: MA Experiment 108462 PARAMETER Experiment Name: At_Germinating_Seeds_cDNA_P Parameter: Age (day) Value: 2 vs. 0
  misc_feature: MA Experiment 108462 PARAMETER Experiment Name: At_Germinating_Seeds_cDNA_P Parameter: Tissue Value: Germinating Seeds
  misc_feature: MA Experiment ID: 108463 Result: Down-regulated in Transcription
  misc_feature: MA Experiment 108463 PARAMETER Experiment Name: At_Germinating_Seeds_cDNA_P Parameter: Age (day) Value: 3 vs. 0
  misc_feature: MA Experiment 108463 PARAMETER Experiment Name: At_Germinating_Seeds_cDNA_P Parameter: Tissue Value: Germinating Seeds
  misc_feature: MA Experiment ID: 108464 Result: Down-regulated in Transcription
  misc_feature: MA Experiment 108464 PARAMETER Experiment Name: At_Germinating_Seeds_cDNA_P Parameter: Age (day) Value: 4 vs. 0
  misc_feature: MA Experiment 108464 PARAMETER Experiment Name: At_Germinating_Seeds_cDNA_P Parameter: Tissue Value: Germinating Seeds
  misc_feature: MA Experiment ID: 108561 Result: Down-regulated in Transcription
  misc_feature: MA Experiment 108561 PARAMETER Experiment Name: At_100uM_ABA_cDNA_P Parameter: Timepoint (hr) Value: 6
  misc_feature: MA Experiment 108561 PARAMETER Experiment Name: At_100uM_ABA_cDNA_P Parameter: Tissue Value: Aerial
  misc_feature: MA Experiment 108561 PARAMETER Experiment Name: At_100uM_ABA_cDNA_P Parameter: Treatment Value: 100uM ABA vs. No Treatment
  misc_feature: MA Experiment ID: 108569 Result: Up-regulated in Transcription
  misc_feature: MA Experiment 108569 PARAMETER Experiment Name: At_0.001%_MeJA__cDNA_P Parameter: Timepoint (hr) Value: 6
  misc_feature: MA Experiment 108569 PARAMETER Experiment Name: At_0.001%_MeJA__cDNA_P Parameter: Tissue Value: Aerial
  misc_feature: MA Experiment 108569 PARAMETER Experiment Name: At_0.001%_MeJA__cDNA_P Parameter: Treatment Value: 0.001% MeJA vs. No Treatment
  misc_feature: MA Experiment ID: 108572 Result: Down-regulated in Transcription
  misc_feature: MA Experiment 108572 PARAMETER Experiment Name: At_Drought_cDNA_P Parameter: Timepoint (hr) Value: 1
  misc_feature: MA Experiment 108572 PARAMETER Experiment Name: At_Drought_cDNA_P Parameter: Tissue Value: Aerial
  misc_feature: MA Experiment 108572 PARAMETER Experiment Name: At_Drought_cDNA_P Parameter: Treatment Value: Drought vs. No Drought
  misc_feature: MA Experiment ID: 108573 Result: Down-regulated in Transcription
  misc_feature: MA Experiment 108573 PARAMETER Experiment Name: At_Drought_cDNA_P Parameter: Timepoint (hr) Value: 6
  misc_feature: MA Experiment 108573 PARAMETER Experiment Name: At_Drought_cDNA_P Parameter: Tissue Value: Aerial
  misc_feature: MA Experiment 108573 PARAMETER Experiment Name: At_Drought_cDNA_P Parameter: Treatment Value: Drought vs. No Drought
  misc_feature: MA Experiment ID: 108576 Result: Down-regulated in Transcription
  misc_feature: MA Experiment 108576 PARAMETER Experiment Name: At_42deg_Heat_cDNA_P Parameter: Temperature (deg C) Value: 42 vs. 22
  misc_feature: MA Experiment 108576 PARAMETER Experiment Name: At_42deg_Heat_cDNA_P Parameter: Timepoint (hr) Value: 1
  misc_feature: MA Experiment 108576 PARAMETER Experiment Name: At_42deg_Heat_cDNA_P Parameter: Tissue Value: Aerial
  misc_feature: MA Experiment ID: 108577 Result: Down-regulated in Transcription
  misc_feature: MA Experiment 108577 PARAMETER Experiment Name: At_42deg_Heat_cDNA_P Parameter: Temperature (deg C) Value: 42 vs. 22
  misc_feature: MA Experiment 108577 PARAMETER Experiment Name: At_42deg_Heat_cDNA_P Parameter: Timepoint (hr) Value: 6
  misc_feature: MA Experiment 108577 PARAMETER Experiment Name: At_42deg_Heat_cDNA_P Parameter: Tissue Value: Aerial
  misc_feature: MA Experiment ID: 108579 Result: Down-regulated in Transcription
  misc_feature: MA Experiment 108579 PARAMETER Experiment Name: At_4deg_Cold_cDNA_P Parameter: Temperature (deg C) Value: 4 vs. 22
  misc_feature: MA Experiment 108579 PARAMETER Experiment Name: At_4deg_Cold_cDNA_P Parameter: Timepoint (hr) Value: 6
  misc_feature: MA Experiment 108579 PARAMETER Experiment Name: At_4deg_Cold_cDNA_P Parameter: Tissue Value: Aerial
  misc_feature: MA Experiment ID: 108585 Result: Down-regulated in Transcription
  misc_feature: MA Experiment 108585 PARAMETER Experiment Name: At_5mM_NaNP_cDNA_P Parameter: Timepoint (hr) Value: 6
  misc_feature: MA Experiment 108585 PARAMETER Experiment Name: At_5mM_NaNP_cDNA_P Parameter: Tissue Value: Aerial
  misc_feature: MA Experiment 108585 PARAMETER Experiment Name: At_5mM_NaNP_cDNA_P Parameter: Treatment Value: null
  misc_feature: MA Experiment ID: 108595 Result: Down-regulated in Transcription
  misc_feature: MA Experiment 108595 PARAMETER Experiment Name: At_Ler-pi_Ovule_cDNA_P Parameter: Plant Line Value: null
  misc_feature: MA Experiment ID: 108605 Result: Down-regulated in Transcription
  misc_feature: MA Experiment 108605 PARAMETER Experiment Name: At_100uM_ABA_cDNA_P Parameter: Timepoint (hr) Value: 6
  misc_feature: MA Experiment 108605 PARAMETER Experiment Name: At_100uM_ABA_cDNA_P Parameter: Tissue Value: Aerial
  misc_feature: MA Experiment 108605 PARAMETER Experiment Name: At_100uM_ABA_cDNA_P Parameter: Treatment Value: 100uM ABA vs. No Treatment
  misc_feature: MA Experiment ID: 108607 Result: Down-regulated in Transcription
  misc_feature: MA Experiment 108607 PARAMETER Experiment Name: At_100uM_ABA_cDNA_P Parameter: Timepoint (hr) Value: 4
  misc_feature: MA Experiment 108607 PARAMETER Experiment Name: At_100uM_ABA_cDNA_P Parameter: Tissue Value: Aerial
  misc_feature: MA Experiment 108607 PARAMETER Experiment Name: At_100uM_ABA_cDNA_P Parameter: Treatment Value: 100uM ABA vs. No Treatment
  misc_feature: MA Experiment ID: 108609 Result: Down-regulated in Transcription
  misc_feature: MA Experiment 108609 PARAMETER Experiment Name: At_100uM_ABA_cDNA_P Parameter: Timepoint (hr) Value: 24
  misc_feature: MA Experiment 108609 PARAMETER Experiment Name: At_100uM_ABA_cDNA_P Parameter: Tissue Value: Aerial
  misc_feature: MA Experiment 108609 PARAMETER Experiment Name: At_100uM_ABA_cDNA_P Parameter: Treatment Value: 100uM ABA vs. No Treatment
  misc_feature: MA Experiment ID: 20000069 Result: Down-regulated in Transcription
  misc_feature: MA Experiment 20000069 PARAMETER Experiment Name: At_100uM_ABA_Mutants_cDNA_P Parameter: Plant Line Value: CS23
  misc_feature: MA Experiment 20000069 PARAMETER Experiment Name: At_100uM_ABA_Mutants_cDNA_P Parameter: Timepoint (hr) Value: 6
  misc_feature: MA Experiment 20000069 PARAMETER Experiment Name: At_100uM_ABA_Mutants_cDNA_P Parameter: Tissue Value: Aerial
  misc_feature: MA Experiment 20000069 PARAMETER Experiment Name: At_100uM_ABA_Mutants_cDNA_P Parameter: Treatment Value: 100uM ABA vs. No Treatment
  misc_feature: MA Experiment ID: 20000070 Result: Down-regulated in Transcription
  misc_feature: MA Experiment 20000070 PARAMETER Experiment Name: At_100uM_ABA_Mutants_cDNA_P Parameter: Plant Line Value: CS24
  misc_feature: MA Experiment 20000070 PARAMETER Experiment Name: At_100uM_ABA_Mutants_cDNA_P Parameter: Timepoint (hr) Value: 6
  misc_feature: MA Experiment 20000070 PARAMETER Experiment Name: At_100uM_ABA_Mutants_cDNA_P Parameter: Tissue Value: Aerial
  misc_feature: MA Experiment 20000070 PARAMETER Experiment Name: At_100uM_ABA_Mutants_cDNA_P Parameter: Treatment Value: 100uM ABA vs. No Treatment
  misc_feature: MA Experiment ID: 20000071 Result: Down-regulated in Transcription
  misc_feature: MA Experiment 20000071 PARAMETER Experiment Name: At_100uM_ABA_Mutants_cDNA_P Parameter: Plant Line Value: CS8104
  misc_feature: MA Experiment 20000071 PARAMETER Experiment Name: At_100uM_ABA_Mutants_cDNA_P Parameter: Timepoint (hr) Value: 6
  misc_feature: MA Experiment 20000071 PARAMETER Experiment Name: At_100uM_ABA_Mutants_cDNA_P Parameter: Tissue Value: Aerial
  misc_feature: MA Experiment 20000071 PARAMETER Experiment Name: At_100uM_ABA_Mutants_cDNA_P Parameter: Treatment Value: 100uM ABA vs. No Treatment
  misc_feature: MA Experiment ID: 20000072 Result: Down-regulated in Transcription
  misc_feature: MA Experiment 20000072 PARAMETER Experiment Name: At_100uM_ABA_Mutants_cDNA_P Parameter: Plant Line Value: CS8105
  misc_feature: MA Experiment 20000072 PARAMETER Experiment Name: At_100uM_ABA_Mutants_cDNA_P Parameter: Timepoint (hr) Value: 6
  misc_feature: MA Experiment 20000072 PARAMETER Experiment Name: At_100uM_ABA_Mutants_cDNA_P Parameter: Tissue Value: Aerial
  misc_feature: MA Experiment 20000072 PARAMETER Experiment Name: At_100uM_ABA_Mutants_cDNA_P Parameter: Treatment Value: 100uM ABA vs. No Treatment
  misc_feature: MA Experiment ID: 20000086 Result: Down-regulated in Transcription
  misc_feature: MA Experiment 20000086 PARAMETER Experiment Name: At_100uM_ABA_Mutants_cDNA_P Parameter: Plant Line Value: CS22
  misc_feature: MA Experiment 20000086 PARAMETER Experiment Name: At_100uM_ABA_Mutants_cDNA_P Parameter: Timepoint (hr) Value: 6
  misc_feature: MA Experiment 20000086 PARAMETER Experiment Name: At_100uM_ABA_Mutants_cDNA_P Parameter: Tissue Value: Aerial
  misc_feature: MA Experiment 20000086 PARAMETER Experiment Name: At_100uM_ABA_Mutants_cDNA_P Parameter: Treatment Value: 100uM ABA vs. No Treatment
  misc_feature: MA Experiment ID: 20000087 Result: Down-regulated in Transcription
  misc_feature: MA Experiment 20000087 PARAMETER Experiment Name: At_100uM_ABA_Mutants_cDNA_P Parameter: Plant Line Value: WS
  misc_feature: MA Experiment 20000087 PARAMETER Experiment Name: At_100uM_ABA_Mutants_cDNA_P Parameter: Timepoint (hr) Value: 6
  misc_feature: MA Experiment 20000087 PARAMETER Experiment Name: At_100uM_ABA_Mutants_cDNA_P Parameter: Tissue Value: Aerial
  misc_feature: MA Experiment 20000087 PARAMETER Experiment Name: At_100uM_ABA_Mutants_cDNA_P Parameter: Treatment Value: 100uM ABA vs. No Treatment
  misc_feature: MA Experiment ID: 20000088 Result: Down-regulated in Transcription
  misc_feature: MA Experiment 20000088 PARAMETER Experiment Name: At_100uM_ABA_Mutants_cDNA_P Parameter: Plant Line Value: Landsberg
  misc_feature: MA Experiment 20000088 PARAMETER Experiment Name: At_100uM_ABA_Mutants_cDNA_P Parameter: Timepoint (hr) Value: 6
  misc_feature: MA Experiment 20000088 PARAMETER Experiment Name: At_100uM_ABA_Mutants_cDNA_P Parameter: Tissue Value: Aerial
  misc_feature: MA Experiment 20000088 PARAMETER Experiment Name: At_100uM_ABA_Mutants_cDNA_P Parameter: Treatment Value: 100uM ABA vs. No Treatment
  misc_feature: MA Experiment ID: 20000111 Result: Down-regulated in Transcription
  misc_feature: MA Experiment 20000111 PARAMETER Experiment Name: At_42deg_Heat_cDNA_P Parameter: Temperature (deg C) Value: 42 vs. 22
  misc_feature: MA Experiment 20000111 PARAMETER Experiment Name: At_42deg_Heat_cDNA_P Parameter: Timepoint (hr) Value: 6
  misc_feature: MA Experiment 20000111 PARAMETER Experiment Name: At_42deg_Heat_cDNA_P Parameter: Tissue Value: Aerial
  misc_feature: MA Experiment ID: 20000112 Result: Down-regulated in Transcription
  misc_feature: MA Experiment 20000112 PARAMETER Experiment Name: At_42deg_Heat_cDNA_P Parameter: Temperature (deg C) Value: 42 vs. 22
  misc_feature: MA Experiment 20000112 PARAMETER Experiment Name: At_42deg_Heat_cDNA_P Parameter: Timepoint (hr) Value: 2
  misc_feature: MA Experiment 20000112 PARAMETER Experiment Name: At_42deg_Heat_cDNA_P Parameter: Tissue Value: Aerial
  misc_feature: MA Experiment ID: 20000117 Result: Down-regulated in Transcription
  misc_feature: MA Experiment 20000117 PARAMETER Experiment Name: At_100uM_ABA_Mutants_cDNA_P Parameter: Plant Line Value: Columbia
  misc_feature: MA Experiment 20000117 PARAMETER Experiment Name: At_100uM_ABA_Mutants_cDNA_P Parameter: Timepoint (hr) Value: 6
  misc_feature: MA Experiment 20000117 PARAMETER Experiment Name: At_100uM_ABA_Mutants_cDNA_P Parameter: Tissue Value: Aerial
  misc_feature: MA Experiment 20000117 PARAMETER Experiment Name: At_100uM_ABA_Mutants_cDNA_P Parameter: Treatment Value: 100uM ABA vs. No Treatment
  misc_feature: MA Experiment ID: 20000144 Result: Down-regulated in Transcription
  misc_feature: MA Experiment 20000144 PARAMETER Experiment Name: At_42deg_Heat_cDNA_P Parameter: Temperature (deg C) Value: 42 vs. 22
  misc_feature: MA Experiment 20000144 PARAMETER Experiment Name: At_42deg_Heat_cDNA_P Parameter: Timepoint (hr) Value: 1
  misc_feature: MA Experiment 20000144 PARAMETER Experiment Name: At_42deg_Heat_cDNA_P Parameter: Tissue Value: Aerial
  misc_feature: MA Experiment ID: 20000169 Result: Down-regulated in Transcription
  misc_feature: MA Experiment 20000169 PARAMETER Experiment Name: At_100uM_ABA_P Parameter: Age (day) Value: 14
  misc_feature: MA Experiment 20000169 PARAMETER Experiment Name: At_100uM_ABA_P Parameter: Organism Value: A. thaliana
  misc_feature: MA Experiment 20000169 PARAMETER Experiment Name: At_100uM_ABA_P Parameter: Plant Line Value: WS
  misc_feature: MA Experiment 20000169 PARAMETER Experiment Name: At_100uM_ABA_P Parameter: Timepoint (hr) Value: 6
  misc_feature: MA Experiment 20000169 PARAMETER Experiment Name: At_100uM_ABA_P Parameter: Tissue Value: Aerial
  misc_feature: MA Experiment 20000169 PARAMETER Experiment Name: At_100uM_ABA_P Parameter: Treatment Value: 100uM ABA vs. No Treatment
  misc_feature: MA Experiment ID: 20000180 Result: Down-regulated in Transcription
  misc_feature: MA Experiment 20000180 PARAMETER Experiment Name: At_Germinating_Seeds_P Parameter: Age (hr) Value: 24 vs. 0
  misc_feature: MA Experiment 20000180 PARAMETER Experiment Name: At_Germinating_Seeds_P Parameter: Tissue Value: Germinating Seeds
  misc_feature: MA Experiment ID: 20000184 Result: Up-regulated in Transcription
  misc_feature: MA Experiment 20000184 PARAMETER Experiment Name: At_Shoots__P Parameter: Age (day) Value: 7
  misc_feature: MA Experiment 20000184 PARAMETER Experiment Name: At_Shoots__P Parameter: Tissue Value: Shoots vs. Whole Plant
  misc_feature: MA Experiment ID: 20000267 Result: Down-regulated in Transcription
  misc_feature: MA Experiment 20000267 PARAMETER Experiment Name: At_Drought_P Parameter: Age (day) Value: 7
  misc_feature: MA Experiment 20000267 PARAMETER Experiment Name: At_Drought_P Parameter: Organism Value: A. thaliana
  misc_feature: MA Experiment 20000267 PARAMETER Experiment Name: At_Drought_P Parameter: Plant Line Value: WS
  misc_feature: MA Experiment 20000267 PARAMETER Experiment Name: At_Drought_P Parameter: Timepoint (hr) Value: 6
  misc_feature: MA Experiment 20000267 PARAMETER Experiment Name: At_Drought_P Parameter: Tissue Value: Whole Plant
  misc_feature: MA Experiment 20000267 PARAMETER Experiment Name: At_Drought_P Parameter: Treatment Value: Drought vs. No Drought
  misc_feature: MA Experiment ID: 20000286 Result: Up-regulated in Transcription
  misc_feature: MA Experiment 20000286 PARAMETER Experiment Name: At_Open_Flower_P Parameter: Age (day) Value: 21
  misc_feature: MA Experiment 20000286 PARAMETER Experiment Name: At_Open_Flower_P Parameter: Plant Line Value: WS
  misc_feature: MA Experiment 20000286 PARAMETER Experiment Name: At_Open_Flower_P Parameter: Tissue Value: Half Open vs. Whole Plant
  misc_feature: MA Experiment ID: 20000436 Result: Down-regulated in Transcription
  misc_feature: MA Experiment 20000436 PARAMETER Experiment Name: At_Drought_P Parameter: Age (day) Value: 7
  misc_feature: MA Experiment 20000436 PARAMETER Experiment Name: At_Drought_P Parameter: Organism Value: A. thaliana
  misc_feature: MA Experiment 20000436 PARAMETER Experiment Name: At_Drought_P Parameter: Plant Line Value: WS
  misc_feature: MA Experiment 20000436 PARAMETER Experiment Name: At_Drought_P Parameter: Timepoint (hr) Value: 12
  misc_feature: MA Experiment 20000436 PARAMETER Experiment Name: At_Drought_P Parameter: Tissue Value: Whole Plant
  misc_feature: MA Experiment 20000436 PARAMETER Experiment Name: At_Drought_P Parameter: Treatment Value: Drought vs. No Drought
  misc_feature: MA Experiment ID: 20000437 Result: Down-regulated in Transcription
  misc_feature: MA Experiment 20000437 PARAMETER Experiment Name: At_Drought_P Parameter: Age (day) Value: 8
  misc_feature: MA Experiment 20000437 PARAMETER Experiment Name: At_Drought_P Parameter: Organism Value: A. thaliana
  misc_feature: MA Experiment 20000437 PARAMETER Experiment Name: At_Drought_P Parameter: Plant Line Value: WS
  misc_feature: MA Experiment 20000437 PARAMETER Experiment Name: At_Drought_P Parameter: Timepoint (hr) Value: 24
  misc_feature: MA Experiment 20000437 PARAMETER Experiment Name: At_Drought_P Parameter: Tissue Value: Whole Plant
  misc_feature: MA Experiment 20000437 PARAMETER Experiment Name: At_Drought_P Parameter: Treatment Value: Drought vs. No Drought
  misc_feature: MA Experiment ID: 20000438 Result: Up-regulated in Transcription
  misc_feature: MA Experiment 20000438 PARAMETER Experiment Name: At_Shoots__P Parameter: Age (day) Value: 14
  misc_feature: MA Experiment 20000438 PARAMETER Experiment Name: At_Shoots__P Parameter: Tissue Value: Shoots vs. Whole Plant
  misc_feature: MA Experiment ID: 20000451 Result: Up-regulated in Transcription
  misc_feature: MA Experiment 20000451 PARAMETER Experiment Name: At_CS6879_Shoots-Roots_P Parameter: Age (day) Value: 14
  misc_feature: MA Experiment 20000451 PARAMETER Experiment Name: At_CS6879_Shoots-Roots_P Parameter: Organism Value: A. thaliana
  misc_feature: MA Experiment 20000451 PARAMETER Experiment Name: At_CS6879_Shoots-Roots_P Parameter: Plant Line Value: CS6879 vs. WS
  misc_feature: MA Experiment 20000451 PARAMETER Experiment Name: At_CS6879_Shoots-Roots_P Parameter: Tissue Value: Roots
  misc_feature: MA Experiment ID: 20000453 Result: Down-regulated in Transcription
  misc_feature: MA Experiment 20000453 PARAMETER Experiment Name: At_100uM_ABA_P Parameter: Age (day) Value: 15
  misc_feature: MA Experiment 20000453 PARAMETER Experiment Name: At_100uM_ABA_P Parameter: Organism Value: A. thaliana
  misc_feature: MA Experiment 20000453 PARAMETER Experiment Name: At_100uM_ABA_P Parameter: Plant Line Value: WS
  misc_feature: MA Experiment 20000453 PARAMETER Experiment Name: At_100uM_ABA_P Parameter: Timepoint (hr) Value: 24
  misc_feature: MA Experiment 20000453 PARAMETER Experiment Name: At_100uM_ABA_P Parameter: Tissue Value: Aerial
  misc_feature: MA Experiment 20000453 PARAMETER Experiment Name: At_100uM_ABA_P Parameter: Treatment Value: 100uM ABA vs. No Treatment
  misc_feature: MA Experiment ID: 20000573 Result: Down-regulated in Transcription
  misc_feature: MA Experiment 20000573 PARAMETER Experiment Name: At_100uM_ABA_Mutants__P Parameter: Organism Value: A. thaliana
  misc_feature: MA Experiment 20000573 PARAMETER Experiment Name: At_100uM_ABA_Mutants__P Parameter: Plant Line Value: CS22 vs. Ler wt
  misc_feature: MA Experiment 20000573 PARAMETER Experiment Name: At_100uM_ABA_Mutants__P Parameter: Timepoint (hr) Value: N/A
  misc_feature: MA Experiment 20000573 PARAMETER Experiment Name: At_100uM_ABA_Mutants__P Parameter: Tissue Value: Whole Plant
  misc_feature: MA Experiment 20000573 PARAMETER Experiment Name: At_100uM_ABA_Mutants__P Parameter: Treatment Value: None
  misc_feature: MA Experiment ID: 20001248 Result: Up-regulated in Transcription
  misc_feature: MA Experiment 20001248 PARAMETER Experiment Name: At_Far-red-induction_P Parameter: Age (day) Value: 7
  misc_feature: MA Experiment 20001248 PARAMETER Experiment Name: At_Far-red-induction_P Parameter: Light Value: Far-red vs. White
  misc_feature: MA Experiment 20001248 PARAMETER Experiment Name: At_Far-red-induction_P Parameter: Organism Value: A. thaliana
  misc_feature: MA Experiment 20001248 PARAMETER Experiment Name: At_Far-red-induction_P Parameter: Plant Line Value: Columbia
  misc_feature: MA Experiment 20001248 PARAMETER Experiment Name: At_Far-red-induction_P Parameter: Timepoint (hr) Value: 4
  misc_feature: MA Experiment 20001248 PARAMETER Experiment Name: At_Far-red-induction_P Parameter: Tissue Value: Whole Plant
  misc_feature: MA Experiment ID: 20001450 Result: Up-regulated in Transcription
  misc_feature: MA Experiment 20001450 PARAMETER Experiment Name: At_Far-red-induction_P Parameter: Age (day) Value: 7
  misc_feature: MA Experiment 20001450 PARAMETER Experiment Name: At_Far-red-induction_P Parameter: Light Value: Far-red vs. White
  misc_feature: MA Experiment 20001450 PARAMETER Experiment Name: At_Far-red-induction_P Parameter: Organism Value: A. thaliana
  misc_feature: MA Experiment 20001450 PARAMETER Experiment Name: At_Far-red-induction_P Parameter: Plant Line Value: Columbia
  misc_feature: MA Experiment 20001450 PARAMETER Experiment Name: At_Far-red-induction_P Parameter: Timepoint (hr) Value: 8
  misc_feature: MA Experiment 20001450 PARAMETER Experiment Name: At_Far-red-induction_P Parameter: Tissue Value: Whole Plant
  misc_feature: MA Experiment ID: 20001554 Result: Down-regulated in Transcription
  misc_feature: MA Experiment 20001554 PARAMETER Experiment Name: At_Drought_Soil_Dry_P Parameter: Age (day) Value: 21
  misc_feature: MA Experiment 20001554 PARAMETER Experiment Name: At_Drought_Soil_Dry_P Parameter: Organism Value: A. thaliana
  misc_feature: MA Experiment 20001554 PARAMETER Experiment Name: At_Drought_Soil_Dry_P Parameter: Plant Line Value: WS
  misc_feature: MA Experiment 20001554 PARAMETER Experiment Name: At_Drought_Soil_Dry_P Parameter: Post Timepoint (hr) Value: None
  misc_feature: MA Experiment 20001554 PARAMETER Experiment Name: At_Drought_Soil_Dry_P Parameter: Post-Treatment Value: None
  misc_feature: MA Experiment 20001554 PARAMETER Experiment Name: At_Drought_Soil_Dry_P Parameter: Timepoint (day) Value: 7
  misc_feature: MA Experiment 20001554 PARAMETER Experiment Name: At_Drought_Soil_Dry_P Parameter: Treatment Value: Drought vs. No Drought
  misc_feature: MA Experiment ID: 20001555 Result: Down-regulated in Transcription
  misc_feature: MA Experiment 20001555 PARAMETER Experiment Name: At_Drought_Soil_Dry_P Parameter: Age (day) Value: 24
  misc_feature: MA Experiment 20001555 PARAMETER Experiment Name: At_Drought_Soil_Dry_P Parameter: Organism Value: A. thaliana
  misc_feature: MA Experiment 20001555 PARAMETER Experiment Name: At_Drought_Soil_Dry_P Parameter: Plant Line Value: WS
  misc_feature: MA Experiment 20001555 PARAMETER Experiment Name: At_Drought_Soil_Dry_P Parameter: Post Timepoint (hr) Value: None
  misc_feature: MA Experiment 20001555 PARAMETER Experiment Name: At_Drought_Soil_Dry_P Parameter: Post-Treatment Value: None
  misc_feature: MA Experiment 20001555 PARAMETER Experiment Name: At_Drought_Soil_Dry_P Parameter: Timepoint (day) Value: 10
  misc_feature: MA Experiment 20001555 PARAMETER Experiment Name: At_Drought_Soil_Dry_P Parameter: Treatment Value: Drought vs. No Drought
  misc_feature: MA Experiment ID: 20001556 Result: Down-regulated in Transcription
  misc_feature: MA Experiment 20001556 PARAMETER Experiment Name: At_Drought_Soil_Dry_P Parameter: Age (day) Value: 26
  misc_feature: MA Experiment 20001556 PARAMETER Experiment Name: At_Drought_Soil_Dry_P Parameter: Organism Value: A. thaliana
  misc_feature: MA Experiment 20001556 PARAMETER Experiment Name: At_Drought_Soil_Dry_P Parameter: Plant Line Value: WS
  misc_feature: MA Experiment 20001556 PARAMETER Experiment Name: At_Drought_Soil_Dry_P Parameter: Post Timepoint (hr) Value: None
  misc_feature: MA Experiment 20001556 PARAMETER Experiment Name: At_Drought_Soil_Dry_P Parameter: Post-Treatment Value: None
  misc_feature: MA Experiment 20001556 PARAMETER Experiment Name: At_Drought_Soil_Dry_P Parameter: Timepoint (day) Value: 12
  misc_feature: MA Experiment 20001556 PARAMETER Experiment Name: At_Drought_Soil_Dry_P Parameter: Treatment Value: Drought vs. No Drought
  misc_feature: MA Experiment ID: 20001557 Result: Up-regulated in Transcription
  misc_feature: MA Experiment 20001557 PARAMETER Experiment Name: At_Drought_Soil_Dry_P Parameter: Age (day) Value: 27
  misc_feature: MA Experiment 20001557 PARAMETER Experiment Name: At_Drought_Soil_Dry_P Parameter: Organism Value: A. thaliana
  misc_feature: MA Experiment 20001557 PARAMETER Experiment Name: At_Drought_Soil_Dry_P Parameter: Plant Line Value: WS
  misc_feature: MA Experiment 20001557 PARAMETER Experiment Name: At_Drought_Soil_Dry_P Parameter: Post Timepoint (hr) Value: 3
  misc_feature: MA Experiment 20001557 PARAMETER Experiment Name: At_Drought_Soil_Dry_P Parameter: Post-Treatment Value: Re-Water vs. No Drought
  misc_feature: MA Experiment 20001557 PARAMETER Experiment Name: At_Drought_Soil_Dry_P Parameter: Timepoint (day) Value: 13
  misc_feature: MA Experiment 20001557 PARAMETER Experiment Name: At_Drought_Soil_Dry_P Parameter: Treatment Value: Drought vs. No Drought
  misc_feature: MA Experiment ID: 20001558 Result: Up-regulated in Transcription
  misc_feature: MA Experiment 20001558 PARAMETER Experiment Name: At_Drought_Soil_Dry_P Parameter: Age (day) Value: 27
  misc_feature: MA Experiment 20001558 PARAMETER Experiment Name: At_Drought_Soil_Dry_P Parameter: Organism Value: A. thaliana
  misc_feature: MA Experiment 20001558 PARAMETER Experiment Name: At_Drought_Soil_Dry_P Parameter: Plant Line Value: WS
  misc_feature: MA Experiment 20001558 PARAMETER Experiment Name: At_Drought_Soil_Dry_P Parameter: Post Timepoint (hr) Value: 6
  misc_feature: MA Experiment 20001558 PARAMETER Experiment Name: At_Drought_Soil_Dry_P Parameter: Post-Treatment Value: Re-Water vs. No Drought
  misc_feature: MA Experiment 20001558 PARAMETER Experiment Name: At_Drought_Soil_Dry_P Parameter: Timepoint (day) Value: 13
  misc_feature: MA Experiment 20001558 PARAMETER Experiment Name: At_Drought_Soil_Dry_P Parameter: Treatment Value: Drought vs. No Drought
  misc_feature: MA Experiment ID: 20001559 Result: Down-regulated in Transcription
  misc_feature: MA Experiment 20001559 PARAMETER Experiment Name: At_Drought_Soil_Dry_P Parameter: Age (day) Value: 28
  misc_feature: MA Experiment 20001559 PARAMETER Experiment Name: At_Drought_Soil_Dry_P Parameter: Organism Value: A. thaliana
  misc_feature: MA Experiment 20001559 PARAMETER Experiment Name: At_Drought_Soil_Dry_P Parameter: Plant Line Value: WS
  misc_feature: MA Experiment 20001559 PARAMETER Experiment Name: At_Drought_Soil_Dry_P Parameter: Post Timepoint (hr) Value: 29
  misc_feature: MA Experiment 20001559 PARAMETER Experiment Name: At_Drought_Soil_Dry_P Parameter: Post-Treatment Value: Re-Water vs. No Drought
  misc_feature: MA Experiment 20001559 PARAMETER Experiment Name: At_Drought_Soil_Dry_P Parameter: Timepoint (day) Value: 14
  misc_feature: MA Experiment 20001559 PARAMETER Experiment Name: At_Drought_Soil_Dry_P Parameter: Treatment Value: Drought vs. No Drought
  misc_feature: MA Experiment ID: 20001757 Result: Up-regulated in Transcription
  misc_feature: MA Experiment 20001757 PARAMETER Experiment Name: At_50mM_NH4NO3_L-to-H_P Parameter: Timepoint (hr) Value: 6
  misc_feature: MA Experiment 20001757 PARAMETER Experiment Name: At_50mM_NH4NO3_L-to-H_P Parameter: Tissue Value: Leaf
  misc_feature: MA Experiment 20001757 PARAMETER Experiment Name: At_50mM_NH4NO3_L-to-H_P Parameter: Treatment Value: 50mM NH4NO3 vs 100mM Mannitol
  misc_feature: MA Experiment ID: 20001905 Result: Down-regulated in Transcription
  misc_feature: MA Experiment 20001905 PARAMETER Experiment Name: At_Drought_Reproduction_P Parameter: Age (day) Value: 40
  misc_feature: MA Experiment 20001905 PARAMETER Experiment Name: At_Drought_Reproduction_P Parameter: Organism Value: A. thaliana
  misc_feature: MA Experiment 20001905 PARAMETER Experiment Name: At_Drought_Reproduction_P Parameter: Plant Line Value: WS
  misc_feature: MA Experiment 20001905 PARAMETER Experiment Name: At_Drought_Reproduction_P Parameter: Timepoint (day) Value: 10
  misc_feature: MA Experiment 20001905 PARAMETER Experiment Name: At_Drought_Reproduction_P Parameter: Tissue Value: Rosettes
  misc_feature: MA Experiment 20001905 PARAMETER Experiment Name: At_Drought_Reproduction_P Parameter: Treatment Value: Drought vs. No Drought
  misc_feature: MA Experiment ID: 20001906 Result: Down-regulated in Transcription
  misc_feature: MA Experiment 20001906 PARAMETER Experiment Name: At_Drought_Reproduction_P Parameter: Age (day) Value: 35
  misc_feature: MA Experiment 20001906 PARAMETER Experiment Name: At_Drought_Reproduction_P Parameter: Organism Value: A. thaliana
  misc_feature: MA Experiment 20001906 PARAMETER Experiment Name: At_Drought_Reproduction_P Parameter: Plant Line Value: WS
  misc_feature: MA Experiment 20001906 PARAMETER Experiment Name: At_Drought_Reproduction_P Parameter: Timepoint (day) Value: 5
  misc_feature: MA Experiment 20001906 PARAMETER Experiment Name: At_Drought_Reproduction_P Parameter: Tissue Value: Siliques
  misc_feature: MA Experiment 20001906 PARAMETER Experiment Name: At_Drought_Reproduction_P Parameter: Treatment Value: Drought vs. No Drought
  misc_feature: MA Experiment ID: 20001908 Result: Down-regulated in Transcription
  misc_feature: MA Experiment 20001908 PARAMETER Experiment Name: At_Drought_Reproduction_P Parameter: Age (day) Value: 40
  misc_feature: MA Experiment 20001908 PARAMETER Experiment Name: At_Drought_Reproduction_P Parameter: Organism Value: A. thaliana
  misc_feature: MA Experiment 20001908 PARAMETER Experiment Name: At_Drought_Reproduction_P Parameter: Plant Line Value: WS
  misc_feature: MA Experiment 20001908 PARAMETER Experiment Name: At_Drought_Reproduction_P Parameter: Timepoint (day) Value: 10
  misc_feature: MA Experiment 20001908 PARAMETER Experiment Name: At_Drought_Reproduction_P Parameter: Tissue Value: Siliques
  misc_feature: MA Experiment 20001908 PARAMETER Experiment Name: At_Drought_Reproduction_P Parameter: Treatment Value: Drought vs. No Drought
  misc_feature: MA Experiment ID: 20001911 Result: Down-regulated in Transcription
  misc_feature: MA Experiment 20001911 PARAMETER Experiment Name: At_Drought_Reproduction_P Parameter: Age (day) Value: 40
  misc_feature: MA Experiment 20001911 PARAMETER Experiment Name: At_Drought_Reproduction_P Parameter: Organism Value: A. thaliana
  misc_feature: MA Experiment 20001911 PARAMETER Experiment Name: At_Drought_Reproduction_P Parameter: Plant Line Value: WS
  misc_feature: MA Experiment 20001911 PARAMETER Experiment Name: At_Drought_Reproduction_P Parameter: Timepoint (day) Value: 10
  misc_feature: MA Experiment 20001911 PARAMETER Experiment Name: At_Drought_Reproduction_P Parameter: Tissue Value: Flowers
  misc_feature: MA Experiment 20001911 PARAMETER Experiment Name: At_Drought_Reproduction_P Parameter: Treatment Value: Drought vs. No Drought
acattttacactcatctcgttctctcttccgtcaatatggaaggcgtcaccgtcgtgtctttcttccttcttttcatcgccaccgccatggccgccaagtccaccgtctccttccgtgacggcatgttaccaaacggagacttcgagctaggaccaaaaccatcagacatgaaaggaacagaaatactaaacaaactagcaataccaaactgggaagtcacaggattcgtcgaatacattaaatcaggacataaacaaggagacatgcttctcgttgttcccgccggtaaattcgctgtaagacttgggaacgaagcatcgatcaaacaaagacttaaagtggttaaaggaatgtattactcactcacttttagtgctgctagaacttgtgcacaagacgagagacttaacatatctgtgattccgattcagacggtttatagtagtagtggttgggatttatatgcttgggcgtttcaagctgagagtgatgttgctgaagttgtgattcataatcctggtgttgaggaagatccagcttgtggtccacttattgatggtgttgctatgagatctctttaccctcctagaccaactaataagaacattttgaaaaacggaggatttgaagaaggtccattagtattacccggctcgacaactggagttttgatcccaccgtttatagaagacgaccactctcctttacctggatggatggtggagtctctcaaagctgtcaagtacttagacgttgaacatttctcagtcccacagggtcgcagagctattgagcttgtagcgggtaaagagagtgccatcgctcaagtggttcggactgtcattgggaagacttacgtgctgtcttttgcggttggagacgccaacaatgcttgcaaaggatcaatggtggttgaggcttttgcaggaaaagatacacttaaggtcccttacgagtcgaaaggcacaggagggtttaaacgagcttctattcgatttgtggcggtttcgacccgatcaagaattatgttctacagcactttctatgccatgaggagcgatgatttctcgtcattgtgtgggcctgtgatcgatgatgtcaagcttataagcgttcgtaaaccatagatgaatcaccaatcctattacaagaaaatgcatcgtgtggtcttcttttattttccttaaactgtctttggtgtgtgttggattttattgaaacgagaaggtgaaaaaaacagagttttatttacgagagttagggtttt

SEQ ID NO: 40505 - protein, 375 aa, Arabidopsis thaliana
  peptide (1)..(375): Ceres Seq. ID no. 12482112
  misc_feature (57)..(373): Pfam Name: Protein of unknown function, DUF642 Pfam Description: Protein of unknown function, DUF642
  misc_feature (12)..(374): Homolog of NCBI NO: 7488741 NR Description: hypothetical protein precursor - alfalfa
  misc_feature (57)..(375): Homolog of NCBI NO: 7486632 NR Description: hypothetical protein F8B4.160 - Arabidopsis
  misc_feature (23)..(375): Homolog of NCBI NO: 7488898 NR Description: hypothetical protein - castor bean
  misc_feature (38)..(375): Homolog of NCBI NO: 18418018 NR Description: putative protein
  misc_feature (13)..(375): Homolog of NCBI NO: 21554402 NR Description: unknown [Arabidopsis thaliana]
  misc_feature (13)..(375): Homolog of NCBI NO: 23397043 NR Description: unknown protein [Arabidopsis thaliana]
  misc_feature (13)..(375): Homolog of NCBI NO: 15239049 NR Description: putative protein
  misc_feature (13)..(375): Homolog of NCBI NO: 21537379 NR Description: unknown [Arabidopsis thaliana]
  misc_feature (13)..(375): Homolog of NCBI NO: 15809822 NR Description: AT5g25460/F18G18_200 [Arabidopsis thaliana]
  misc_feature (13)..(375): Homolog of NCBI NO: 15239438 NR Description: putative protein
TFYTHLVLSSVNMEGVTVVSFFLLFIATAMAAKSTVSFRDGMLPNGDFELGPKPSDMKGTEILNKLAIPNWEVTGFVEYIKSGHKQGDMLLVVPAGKFAVRLGNEASIKQRLKVVKGMYYSLTFSAARTCAQDERLNISVIPIQTVYSSSGWDLYAWAFQAESDVAEVVIHNPGVEEDPACGPLIDGVAMRSLYPPRPTNKNILKNGGFEEGPLVLPGSTTGVLIPPFIEDDHSPLPGWMVESLKAVKYLDVEHFSVPQGRRAIELVAGKESAIAQVVRTVIGKTYVLSFAVGDANNACKGSMVVEAFAGKDTLKVPYESKGTGGFKRASIRFVAVSTRSRIMFYSTFYAMRSDDFSSLCGPVIDDVKLISVRKP

SEQ ID NO: 40506 - protein, 363 aa, Arabidopsis thaliana
  peptide (1)..(363): Ceres Seq. ID no. 12482113
  misc_feature (45)..(361): Pfam Name: Protein of unknown function, DUF642 Pfam Description: Protein of unknown function, DUF642
  misc_feature (1)..(362): Homolog of NCBI NO: 7488741 NR Description: hypothetical protein precursor - alfalfa
  misc_feature (45)..(363): Homolog of NCBI NO: 7486632 NR Description: hypothetical protein F8B4.160 - Arabidopsis
  misc_feature (11)..(363): Homolog of NCBI NO: 7488898 NR Description: hypothetical protein - castor bean
  misc_feature (26)..(363): Homolog of NCBI NO: 18418018 NR Description: putative protein
  misc_feature (1)..(363): Homolog of NCBI NO: 21554402 NR Description: unknown [Arabidopsis thaliana]
  misc_feature (1)..(363): Homolog of NCBI NO: 23397043 NR Description: unknown protein [Arabidopsis thaliana]
  misc_feature (1)..(363): Homolog of NCBI NO: 15239049 NR Description: putative protein
  misc_feature (1)..(363): Homolog of NCBI NO: 21537379 NR Description: unknown [Arabidopsis thaliana]
  misc_feature (1)..(363): Homolog of NCBI NO: 15809822 NR Description: AT5g25460/F18G18_200 [Arabidopsis thaliana]
  misc_feature (1)..(363): Homolog of NCBI NO: 15239438 NR Description: putative protein
MEGVTVVSFFLLFIATAMAAKSTVSFRDGMLPNGDFELGPKPSDMKGTEILNKLAIPNWEVTGFVEYIKSGHKQGDMLLVVPAGKFAVRLGNEASIKQRLKVVKGMYYSLTFSAARTCAQDERLNISVIPIQTVYSSSGWDLYAWAFQAESDVAEVVIHNPGVEEDPACGPLIDGVAMRSLYPPRPTNKNILKNGGFEEGPLVLPGSTTGVLIPPFIEDDHSPLPGWMVESLKAVKYLDVEHFSVPQGRRAIELVAGKESAIAQVVRTVIGKTYVLSFAVGDANNACKGSMVVEAFAGKDTLKVPYESKGTGGFKRASIRFVAVSTRSRIMFYSTFYAMRSDDFSSLCGPVIDDVKLISVRKP

SEQ ID NO: 40507 - protein, 346 aa, Arabidopsis thaliana
  peptide (1)..(346): Ceres Seq. ID no. 12482114
  misc_feature (28)..(344): Pfam Name: Protein of unknown function, DUF642 Pfam Description: Protein of unknown function, DUF642
  misc_feature (1)..(345): Homolog of NCBI NO: 7488741 NR Description: hypothetical protein precursor - alfalfa
  misc_feature (28)..(346): Homolog of NCBI NO: 7486632 NR Description: hypothetical protein F8B4.160 - Arabidopsis
  misc_feature (1)..(346): Homolog of NCBI NO: 7488898 NR Description: hypothetical protein - castor bean
  misc_feature (9)..(346): Homolog of NCBI NO: 18418018 NR Description: putative protein
  misc_feature (1)..(346): Homolog of NCBI NO: 21554402 NR Description: unknown [Arabidopsis thaliana]
  misc_feature (1)..(346): Homolog of NCBI NO: 23397043 NR Description: unknown protein [Arabidopsis thaliana]
  misc_feature (1)..(346): Homolog of NCBI NO: 15239049 NR Description: putative protein
  misc_feature (1)..(346): Homolog of NCBI NO: 21537379 NR Description: unknown [Arabidopsis thaliana]
  misc_feature (1)..(346): Homolog of NCBI NO: 15809822 NR Description: AT5g25460/F18G18_200 [Arabidopsis thaliana]
  misc_feature (1)..(346): Homolog of NCBI NO: 15239438 NR Description: putative protein
MAAKSTVSFRDGMLPNGDFELGPKPSDMKGTEILNKLAIPNWEVTGFVEYIKSGHKQGDMLLVVPAGKFAVRLGNEASIKQRLKVVKGMYYSLTFSAARTCAQDERLNISVIPIQTVYSSSGWDLYAWAFQAESDVAEVVIHNPGVEEDPACGPLIDGVAMRSLYPPRPTNKNILKNGGFEEGPLVLPGSTTGVLIPPFIEDDHSPLPGWMVESLKAVKYLDVEHFSVPQGRRAIELVAGKESAIAQVVRTVIGKTYVLSFAVGDANNACKGSMVVEAFAGKDTLKVPYESKGTGGFKRASIRFVAVSTRSRIMFYSTFYAMRSDDFSSLCGPVIDDVKLISVRKP

SEQ ID NO: 40508 - DNA, 1250 bp, Arabidopsis thaliana
  misc_feature (1)..(1250): Ceres Seq. ID no. 13491571
  misc_feature: MA Experiment ID: 108473 Result: Down-regulated in Transcription
  misc_feature: MA Experiment 108473 PARAMETER Experiment Name: At_Drought_Flowers_cDNA_P Parameter: Timepoint (hr) Value: 7 d
  misc_feature: MA Experiment 108473 PARAMETER Experiment Name: At_Drought_Flowers_cDNA_P Parameter: Tissue Value: Flower
  misc_feature: MA Experiment 108473 PARAMETER Experiment Name: At_Drought_Flowers_cDNA_P Parameter: Treatment Value: Drought vs. No Drought
  misc_feature: MA Experiment ID: 108488 Result: Down-regulated in Transcription
  misc_feature: MA Experiment ID: 108572 Result: Down-regulated in Transcription
  misc_feature: MA Experiment 108572 PARAMETER Experiment Name: At_Drought_cDNA_P Parameter: Timepoint (hr) Value: 1
  misc_feature: MA Experiment 108572 PARAMETER Experiment Name: At_Drought_cDNA_P Parameter: Tissue Value: Aerial
  misc_feature: MA Experiment 108572 PARAMETER Experiment Name: At_Drought_cDNA_P Parameter: Treatment Value: Drought vs. No Drought
  misc_feature: MA Experiment ID: 108668 Result: Down-regulated in Transcription
  misc_feature: MA Experiment 108668 PARAMETER Experiment Name: At_2mM_SA_cDNA_P Parameter: Plant Line Value: WS
  misc_feature: MA Experiment 108668 PARAMETER Experiment Name: At_2mM_SA_cDNA_P Parameter: Timepoint (hr) Value: 6
  misc_feature: MA Experiment 108668 PARAMETER Experiment Name: At_2mM_SA_cDNA_P Parameter: Treatment Value: 2mM SA vs. No Treatment
  misc_feature: MA Experiment ID: 20000171 Result: Up-regulated in Transcription
  misc_feature: MA Experiment 20000171 PARAMETER Experiment Name: At_42deg_Heat_P Parameter: Age (day) Value: 14
  misc_feature: MA Experiment 20000171 PARAMETER Experiment Name: At_42deg_Heat_P Parameter: Organism Value: A. thaliana
  misc_feature: MA Experiment 20000171 PARAMETER Experiment Name: At_42deg_Heat_P Parameter: Plant Line Value: WS
  misc_feature: MA Experiment 20000171 PARAMETER Experiment Name: At_42deg_Heat_P Parameter: Temperature (deg C) Value: 42 vs. 22
  misc_feature: MA Experiment 20000171 PARAMETER Experiment Name: At_42deg_Heat_P Parameter: Timepoint (hr) Value: 1
  misc_feature: MA Experiment 20000171 PARAMETER Experiment Name: At_42deg_Heat_P Parameter: Tissue Value: Aerial
  misc_feature: MA Experiment ID: 20000264 Result: Up-regulated in Transcription
  misc_feature: MA Experiment 20000264 PARAMETER Experiment Name: At_Open_Flower_P Parameter: Age (day) Value: 21
  misc_feature: MA Experiment 20000264 PARAMETER Experiment Name: At_Open_Flower_P Parameter: Plant Line Value: WS
  misc_feature: MA Experiment 20000264 PARAMETER Experiment Name: At_Open_Flower_P Parameter: Tissue Value: Open Flower vs. Whole Plant
  misc_feature: MA Experiment ID: 20000265 Result: Up-regulated in Transcription
  misc_feature: MA Experiment 20000265 PARAMETER Experiment Name: At_Open_Flower_P Parameter: Age (day) Value: 21
  misc_feature: MA Experiment 20000265 PARAMETER Experiment Name: At_Open_Flower_P Parameter: Plant Line Value: WS
  misc_feature: MA Experiment 20000265 PARAMETER Experiment Name: At_Open_Flower_P Parameter: Tissue Value: Closed Flower vs. Whole Plant
  misc_feature: MA Experiment ID: 20000286 Result: Up-regulated in Transcription
  misc_feature: MA Experiment 20000286 PARAMETER Experiment Name: At_Open_Flower_P Parameter: Age (day) Value: 21
  misc_feature: MA Experiment 20000286 PARAMETER Experiment Name: At_Open_Flower_P Parameter: Plant Line Value: WS
  misc_feature: MA Experiment 20000286 PARAMETER Experiment Name: At_Open_Flower_P Parameter: Tissue Value: Half Open vs. Whole Plant
  misc_feature: MA Experiment ID: 20000438 Result: Down-regulated in Transcription
  misc_feature: MA Experiment 20000438 PARAMETER Experiment Name: At_Shoots__P Parameter: Age (day) Value: 14
  misc_feature: MA Experiment 20000438 PARAMETER Experiment Name: At_Shoots__P Parameter: Tissue Value: Shoots vs. Whole Plant
  misc_feature: MA Experiment ID: 20000439 Result: Down-regulated in Transcription
  misc_feature: MA Experiment 20000439 PARAMETER Experiment Name: At_Roots__P Parameter: Age (day) Value: 14 vs. 21
  misc_feature: MA Experiment 20000439 PARAMETER Experiment Name: At_Roots__P Parameter: Organism Value: A. thaliana
  misc_feature: MA Experiment 20000439 PARAMETER Experiment Name: At_Roots__P Parameter: Tissue Value: Roots vs. Whole Plant
  misc_feature: MA Experiment ID: 20000441 Result: Up-regulated in Transcription
  misc_feature: MA Experiment 20000441 PARAMETER Experiment Name: At_1uM_BR-BRZ__P Parameter: Tissue Value: Shoot Apices
  misc_feature: MA Experiment 20000441 PARAMETER Experiment Name: At_1uM_BR-BRZ__P Parameter: Treatment Value: 1uM BR vs. No Treatment
  misc_feature: MA Experiment ID: 20000443 Result: Up-regulated in Transcription
  misc_feature: MA Experiment 20000443 PARAMETER Experiment Name: At_1uM_BR-BRZ__P Parameter: Tissue Value: Shoot Apices
  misc_feature: MA Experiment 20000443 PARAMETER Experiment Name: At_1uM_BR-BRZ__P Parameter: Treatment Value: 1uM BRZ vs. No Treatment
  misc_feature: MA Experiment ID: 20000527 Result: Down-regulated in Transcription
  misc_feature: MA Experiment 20000527 PARAMETER Experiment Name: At_10percent_PEG_P Parameter: Age (day) Value: 20
  misc_feature: MA Experiment 20000527 PARAMETER Experiment Name: At_10percent_PEG_P Parameter: Organism Value: A. thaliana
  misc_feature: MA Experiment 20000527 PARAMETER Experiment Name: At_10percent_PEG_P Parameter: Plant Line Value: WS
  misc_feature: MA Experiment 20000527 PARAMETER Experiment Name: At_10percent_PEG_P Parameter: Timepoint (day) Value: 20
  misc_feature: MA Experiment 20000527 PARAMETER Experiment Name: At_10percent_PEG_P Parameter: Tissue Value: Whole Plant
  misc_feature: MA Experiment 20000527 PARAMETER Experiment Name: At_10percent_PEG_P Parameter: Treatment Value: 10percent PEG vs. No Treatment
  misc_feature: MA Experiment ID: 20000794 Result: Up-regulated in Transcription
  misc_feature: MA Experiment 20000794 PARAMETER Experiment Name: At_Petals_P Parameter: Age (day) Value: 23-25 days
  misc_feature: MA Experiment 20000794 PARAMETER Experiment Name: At_Petals_P Parameter: Plant Line Value: WS
  misc_feature: MA Experiment 20000794 PARAMETER Experiment Name: At_Petals_P Parameter: Tissue Value: Petals vs. Whole plant
  misc_feature: MA Experiment ID: 20001557 Result: Up-regulated in Transcription
  misc_feature: MA Experiment 20001557 PARAMETER Experiment Name: At_Drought_Soil_Dry_P Parameter: Age (day) Value: 27
  misc_feature: MA Experiment 20001557 PARAMETER Experiment Name: At_Drought_Soil_Dry_P Parameter: Organism Value: A. thaliana
  misc_feature: MA Experiment 20001557 PARAMETER Experiment Name: At_Drought_Soil_Dry_P Parameter: Plant Line Value: WS
  misc_feature: MA Experiment 20001557 PARAMETER Experiment Name: At_Drought_Soil_Dry_P Parameter: Post Timepoint (hr) Value: 3
  misc_feature: MA Experiment 20001557 PARAMETER Experiment Name: At_Drought_Soil_Dry_P Parameter: Post-Treatment Value: Re-Water vs. No Drought
  misc_feature: MA Experiment 20001557 PARAMETER Experiment Name: At_Drought_Soil_Dry_P Parameter: Timepoint (day) Value: 13
  misc_feature: MA Experiment 20001557 PARAMETER Experiment Name: At_Drought_Soil_Dry_P Parameter: Treatment Value: Drought vs. No Drought
  misc_feature: MA Experiment ID: 20001558 Result: Up-regulated in Transcription
  misc_feature: MA Experiment 20001558 PARAMETER Experiment Name: At_Drought_Soil_Dry_P Parameter: Age (day) Value: 27
  misc_feature: MA Experiment 20001558 PARAMETER Experiment Name: At_Drought_Soil_Dry_P Parameter: Organism Value: A. thaliana
  misc_feature: MA Experiment 20001558 PARAMETER Experiment Name: At_Drought_Soil_Dry_P Parameter: Plant Line Value: WS
  misc_feature: MA Experiment 20001558 PARAMETER Experiment Name: At_Drought_Soil_Dry_P Parameter: Post Timepoint (hr) Value: 6
  misc_feature: MA Experiment 20001558 PARAMETER Experiment Name: At_Drought_Soil_Dry_P Parameter: Post-Treatment Value: Re-Water vs. No Drought
  misc_feature: MA Experiment 20001558 PARAMETER Experiment Name: At_Drought_Soil_Dry_P Parameter: Timepoint (day) Value: 13
  misc_feature: MA Experiment 20001558 PARAMETER Experiment Name: At_Drought_Soil_Dry_P Parameter: Treatment Value: Drought vs. No Drought
  misc_feature: MA Experiment ID: 20001911 Result: Down-regulated in Transcription
  misc_feature: MA Experiment 20001911 PARAMETER Experiment Name: At_Drought_Reproduction_P Parameter: Age (day) Value: 40
  misc_feature: MA Experiment 20001911 PARAMETER Experiment Name: At_Drought_Reproduction_P Parameter: Organism Value: A. thaliana
  misc_feature: MA Experiment 20001911 PARAMETER Experiment Name: At_Drought_Reproduction_P Parameter: Plant Line Value: WS
  misc_feature: MA Experiment 20001911 PARAMETER Experiment Name: At_Drought_Reproduction_P Parameter: Timepoint (day) Value: 10
  misc_feature: MA Experiment 20001911 PARAMETER Experiment Name: At_Drought_Reproduction_P Parameter: Tissue Value: Flowers
  misc_feature: MA Experiment 20001911 PARAMETER Experiment Name: At_Drought_Reproduction_P Parameter: Treatment Value: Drought vs. No Drought
gtatcatacattgaacataattctcagtatgatcctgtagagtttactcgttcattcacttgtattctctttcatagaggaagagagagggagagagtttctaattaattagaagatttttctttctttattttctaaacaagtattagactactttgagagagatataaaaatggcaatttcacaagccgtcttggctactgtctttggcatcctagggaatatcatctcctttttcgtctgccttgccccaataccgacgttcgttcgtatatacaagaggaagtcatctgaagggtatcagtcgatcccttacgtgatttctctgttcagcgcgatgctatggatgtactacgcaatgatcaagaaagatgctatgatgttgatcactatcaactcctttgcctttgtcgtacaaatcgtctacatctccttattcttcttctacgctcctaagaaggaaaagactctaacggtgaagttcgtcctctttgtggatgttttgggtttcggcgcaatcttcgtgttgacatactttataattcatgccaataaacgtgttcaagttcttggatacatttgtatggtctttgctctatctgtttttgttgctccccttggcataattaggaaagtgatcaaaacgaagagcgccgagttcatgccattcggtctctccttcttcctcaccttatcggctgtcatgtggtttttctacggacttctccttaaagacatgaacattgccctgccaaatgttttgggtttcatctttggagtacttcagatgattcttttcttgatctacaagaaaccagggactaaagtcttggagccaccagggattaagcttcaggacatatctgagcatgtagtcgatgttgtgaggctaagtacgatggtttgcaactcacagatgagaactttggtgccacaagacagtgccgatatggaagcaaccattgatatagatgagaagatcaaaggagatattgagaagaataaggatgaaaaagaagtatttctcatttctaagaattaattagcttttaactatcaaatgtcgatgtgtgtgggtgtgtgtctcagtttgcttgcatgttaagatagggtttaatgtttttatttgggtctgatcagcgtcatcgtggatctctccctcttatctgtgatctttgtctctccctctctcatctcgaatgtaagatatgtgttgttaaattaataaatgattatgtcgtttgtctatt

SEQ ID NO: 40509 - protein, 289 aa, Arabidopsis thaliana
  peptide (1)..(289): Ceres Seq. ID no. 13491572
  misc_feature (10)..(97): Pfam Name: MtN3/saliva family Pfam Description: MtN3/saliva family
  misc_feature (9)..(243): Homolog of NCBI NO: 15229019 NR Description: nodulin MtN3 family protein [Arabidopsis
  misc_feature (9)..(243): Homolog of NCBI NO: 15237803 NR Description: nodulin MtN3 family protein [Arabidopsis
  misc_feature (1)..(281): Homolog of NCBI NO: 15234863 NR Description: nodulin MtN3 family protein [Arabidopsis
  misc_feature (3)..(218): Homolog of NCBI NO: 15240040 NR Description: nodulin MtN3 family protein [Arabidopsis
  misc_feature (3)..(243): Homolog of NCBI NO: 21593422 NR Description: senescence-associated protein (SAG29)
  misc_feature (1)..(258): Homolog of NCBI NO: 21593109 NR Description: MtN3-like protein [Arabidopsis thaliana]
  misc_feature (1)..(258): Homolog of NCBI NO: 15241278 NR Description: nodulin MtN3 family protein [Arabidopsis
  misc_feature (1)..(221): Homolog of NCBI NO: 1619602 NR Description: MtN3 [Medicago truncatula]
  misc_feature (1)..(242): Homolog of NCBI NO: 14715258 NR Description: N3 like protein [Medicago truncatula]
  misc_feature (1)..(289): Homolog of NCBI NO: 15241265 NR Description: nodulin MtN3 family protein [Arabidopsis
MAISQAVLATVFGILGNIISFFVCLAPIPTFVRIYKRKSSEGYQSIPYVISLFSAMLWMYYAMIKKDAMMLITINSFAFVVQIVYISLFFFYAPKKEKTLTVKFVLFVDVLGFGAIFVLTYFIIHANKRVQVLGYICMVFALSVFVAPLGIIRKVIKTKSAEFMPFGLSFFLTLSAVMWFFYGLLLKDMNIALPNVLGFIFGVLQMILFLIYKKPGTKVLEPPGIKLQDISEHVVDVVRLSTMVCNSQMRTLVPQDSADMEATIDIDEKIKGDIEKNKDEKEVFLISKN

SEQ ID NO: 40510 - protein, 234 aa, Arabidopsis thaliana
  peptide (1)..(234): Ceres Seq. ID no. 13491573
  misc_feature (1)..(188): Homolog of NCBI NO: 15229019 NR Description: nodulin MtN3 family protein [Arabidopsis
  misc_feature (1)..(188): Homolog of NCBI NO: 15237803 NR Description: nodulin MtN3 family protein [Arabidopsis
  misc_feature (1)..(226): Homolog of NCBI NO: 15234863 NR Description: nodulin MtN3 family protein [Arabidopsis
  misc_feature (1)..(163): Homolog of NCBI NO: 15240040 NR Description: nodulin MtN3 family protein [Arabidopsis
  misc_feature (1)..(188): Homolog of NCBI NO: 21593422 NR Description: senescence-associated protein (SAG29)
  misc_feature (1)..(203): Homolog of NCBI NO: 21593109 NR Description: MtN3-like protein [Arabidopsis thaliana]
  misc_feature (1)..(203): Homolog of NCBI NO: 15241278 NR Description: nodulin MtN3 family protein [Arabidopsis
  misc_feature (1)..(166): Homolog of NCBI NO: 1619602 NR Description: MtN3 [Medicago truncatula]
  misc_feature (1)..(187): Homolog of NCBI NO: 14715258 NR Description: N3 like protein [Medicago truncatula]
  misc_feature (1)..(234): Homolog of NCBI NO: 15241265 NR Description: nodulin MtN3 family protein [Arabidopsis
MLWMYYAMIKKDAMMLITINSFAFVVQIVYISLFFFYAPKKEKTLTVKFVLFVDVLGFGAIFVLTYFIIHANKRVQVLGYICMVFALSVFVAPLGIIRKVIKTKSAEFMPFGLSFFLTLSAVMWFFYGLLLKDMNIALPNVLGFIFGVLQMILFLIYKKPGTKVLEPPGIKLQDISEHVVDVVRLSTMVCNSQMRTLVPQDSADMEATIDIDEKIKGDIEKNKDEKEVFLISKN

SEQ ID NO: 40511 - protein, 231 aa, Arabidopsis thaliana
  peptide (1)..(231): Ceres Seq. ID no. 13491574
  misc_feature (1)..(185): Homolog of NCBI NO: 15229019 NR Description: nodulin MtN3 family protein [Arabidopsis
  misc_feature (1)..(185): Homolog of NCBI NO: 15237803 NR Description: nodulin MtN3 family protein [Arabidopsis
  misc_feature (1)..(223): Homolog of NCBI NO: 15234863 NR Description: nodulin MtN3 family protein [Arabidopsis
  misc_feature (1)..(160): Homolog of NCBI NO: 15240040 NR Description: nodulin MtN3 family protein [Arabidopsis
  misc_feature (1)..(185): Homolog of NCBI NO: 21593422 NR Description: senescence-associated protein (SAG29)
  misc_feature (1)..(200): Homolog of NCBI NO: 21593109 NR Description: MtN3-like protein [Arabidopsis thaliana]
  misc_feature (1)..(200): Homolog of NCBI NO: 15241278 NR Description: nodulin MtN3 family protein [Arabidopsis
  misc_feature (1)..(163): Homolog of NCBI NO: 1619602 NR Description: MtN3 [Medicago truncatula]
  misc_feature (1)..(184): Homolog of NCBI NO: 14715258 NR Description: N3 like protein [Medicago truncatula]
  misc_feature (1)..(231): Homolog of NCBI NO: 15241265 NR Description: nodulin MtN3 family protein [Arabidopsis
MYYAMIKKDAMMLITINSFAFVVQIVYISLFFFYAPKKEKTLTVKFVLFVDVLGFGAIFVLTYFIIHANKRVQVLGYICMVFALSVFVAPLGIIRKVIKTKSAEFMPFGLSFFLTLSAVMWFFYGLLLKDMNIALPNVLGFIFGVLQMILFLIYKKPGTKVLEPPGIKLQDISEHVVDVVRLSTMVCNSQMRTLVPQDSADMEATIDIDEKIKGDIEKNKDEKEVFLISKN

SEQ ID NO: 40512 - DNA, 891 bp, Arabidopsis thaliana
  misc_feature (1)..(891): Ceres Seq. ID no. 13487410
  misc_feature: MA Experiment ID: 108434 Result: Up-regulated in Transcription
  misc_feature: MA Experiment 108434 PARAMETER Experiment Name: At_Root_Tips_cDNA_P Parameter: Tissue Value: Root Tips
  misc_feature: MA Experiment ID: 108462 Result: Down-regulated in Transcription
  misc_feature: MA Experiment 108462 PARAMETER Experiment Name: At_Germinating_Seeds_cDNA_P Parameter: Age (day) Value: 2 vs. 0
  misc_feature: MA Experiment 108462 PARAMETER Experiment Name: At_Germinating_Seeds_cDNA_P Parameter: Tissue Value: Germinating Seeds
  misc_feature: MA Experiment ID: 108463 Result: Down-regulated in Transcription
  misc_feature: MA Experiment 108463 PARAMETER Experiment Name: At_Germinating_Seeds_cDNA_P Parameter: Age (day) Value: 3 vs. 0
  misc_feature: MA Experiment 108463 PARAMETER Experiment Name: At_Germinating_Seeds_cDNA_P Parameter: Tissue Value: Germinating Seeds
  misc_feature: MA Experiment ID: 108464 Result: Down-regulated in Transcription
  misc_feature: MA Experiment 108464 PARAMETER Experiment Name: At_Germinating_Seeds_cDNA_P Parameter: Age (day) Value: 4 vs. 0
  misc_feature: MA Experiment 108464 PARAMETER Experiment Name: At_Germinating_Seeds_cDNA_P Parameter: Tissue Value: Germinating Seeds
  misc_feature: MA Experiment ID: 20000184 Result: Down-regulated in Transcription
  misc_feature: MA Experiment 20000184 PARAMETER Experiment Name: At_Shoots__P Parameter: Age (day) Value: 7
  misc_feature: MA Experiment 20000184 PARAMETER Experiment Name: At_Shoots__P Parameter: Tissue Value: Shoots vs. Whole Plant
  misc_feature: MA Experiment ID: 20000224 Result: Up-regulated in Transcription
agggttttcgtctctttcactcgtaaccggaagagaggacaagatcctccactaatttcacaaaaagctcatctttttattcgttttcgaatcgattcgttatctgggttcaagtatcaaattctctggtttcgtttttcgtttttgatttgttctctctctttcggaaaaagtttggttttttttttttgtttgaaacaatgggaagaggcaagttcaagggtaaacctaccggccaacgccgattctctagtgctgctgatattcttgctggcacatctgctgcacgtcctcgatcattcaaacagaaagaagctgagtacgaagaagatgttgaagaagagtcagaggaggaatctgaagaagaatccgaagatgaagctgatgtgaagaagaaaggagctgaagctgttatcgaagttgataaccctaacagagtaagacaaaagaccttgaaagcaaaagacctcgatgctagtaaaaccactgaactctcaaggcgtgaaagagaggagctagagaagcagcgagctcatgagcgatacatgaggttgcaagagcaaggcaaaaccgaacaagcaaggaaggacttggatcgtttggctctgattcgccaacagagagaagaagctgccaagaagcgagaagaggaaaaagccgcaagagacgctaagaaagtcgaagggcgcaaatgagaagtgatcacactcaaaagacctgcctactatgcgattaagatgtgttgtttttactttgttctttttcgattgataaaagataaaacctctgctatttactctgttatctctcgattttaagttcggtttaaaaggattggatgtagttcaaaatataaactcgtttaagatttatgcgtggaagcttcctcag

SEQ ID NO: 40513 - protein, 164 aa, Arabidopsis thaliana
  peptide (1)..(164): Ceres Seq. ID no. 13487411
  misc_feature (12)..(164): Pfam Name: Caldesmon Pfam Description: Caldesmon
  misc_feature (25)..(164): Homolog of NCBI NO: 37550400 NR Description: similar to 28 kDa heat- and acid-stable (PDGF-associated protein) (PAP) (PDGFA-associated protein 1)
  misc_feature (53)..(164): Homolog of NCBI NO: 37779032 NR Description: kinase substrate HASPP28 [Pagrus major]
  misc_feature (1)..(156): Homolog of NCBI NO: 28278503 NR Description: Similar to PDGFA associated protein 1 [Danio
  misc_feature (3)..(156): Homolog of NCBI NO: 1518855 NR Description: HASPP28
  misc_feature (1)..(164): Homolog of NCBI NO: 30584165 NR Description: Homo sapiens PDGFA associated protein 1
  misc_feature (1)..(164): Homolog of NCBI NO: 7657441 NR Description: PDGFA associated protein 1; PDGF associated
  misc_feature (1)..(164): Homolog of NCBI NO: 1136586 NR Description: PDGF associated protein
  misc_feature (1)..(164): Homolog of NCBI NO: 12018258 NR Description: kinase substrate HASPP28 [Rattus norvegicus]
  misc_feature (1)..(164): Homolog of NCBI NO: 34909600 NR Description: P0435B05.20 [Oryza sativa (japonica
  misc_feature (1)..(164): Homolog of NCBI NO: 18422620 NR Description: expressed protein [Arabidopsis thaliana]
MGRGKFKGKPTGQRRFSSAADILAGTSAARPRSFKQKEAEYEEDVEEESEEESEEESEDEADVKKKGAEAVIEVDNPNRVRQKTLKAKDLDASKTTELSRREREELEKQRAHERYMRLQEQGKTEQARKDLDRLALIRQQREEAAKKREEEKAARDAKKVEGRK

SEQ ID NO: 40514 - protein, 129 aa, Arabidopsis thaliana
  peptide (1)..(129): Ceres Seq. ID no. 13487412
RVFVSFTRNRKRGQDPPLISQKAHLFIRFRIDSLSGFKYQILWFRFSFLICSLSFGKSLVFFFCLKQWEEASSRVNLPANADSLVLLIFLLAHLLHVLDHSNRKKLSTKKMLKKSQRRNLKKNPKMKLM

SEQ ID NO: 40515 - DNA, 1686 bp, Arabidopsis thaliana
  misc_feature (1)..(1686): Ceres Seq. ID no. 13575082
  misc_feature: MA Experiment ID: 20000265 Result: Up-regulated in Transcription
  misc_feature: MA Experiment 20000265 PARAMETER Experiment Name: At_Open_Flower_P Parameter: Age (day) Value: 21
  misc_feature: MA Experiment 20000265 PARAMETER Experiment Name: At_Open_Flower_P Parameter: Plant Line Value: WS
  misc_feature: MA Experiment 20000265 PARAMETER Experiment Name: At_Open_Flower_P Parameter: Tissue Value: Closed Flower vs. Whole Plant
  misc_feature: MA Experiment ID: 20000495 Result: Down-regulated in Transcription
  misc_feature: MA Experiment 20000495 PARAMETER Experiment Name: At_Guard_Cells_P Parameter: Harvest Date Value: 8/2/2002
  misc_feature: MA Experiment 20000495 PARAMETER Experiment Name: At_Guard_Cells_P Parameter: Organism Value: A. thaliana
  misc_feature: MA Experiment 20000495 PARAMETER Experiment Name: At_Guard_Cells_P Parameter: Tissue Value: Guard Cells vs. Leaves
aatctcatcgtcacagtcacggaaatggcggaacacgcaaaacgacgcgttttaagagcatattacctactcatccatgatgatgatctgttattcacactacagctgatttagatctatttcgtaagtgggtctttcaaagtcgtctcctttgatctactttgattcaggggtcgttgatttggtgataagtcagtagaaatggataaggagaaatctccagcacctccttgtggaggtcttcctcctccatctccatcaggtcgatgctctgcattctcagaagctggtcccattggtcatggttcagatgctaatcgaatgagtcatgatattagccgtatgcttgataacccacctaagaagattggacatcggcgagctcattctgaaatacttactctccctgatgatttgagctttgatagtgatcttggtgtggttggtaatgctgctgatggagcttctttctctgatgagactgaagaagatttgctctctatgtatcttgatatggataagtttaattcttctgctacatcttctgcccaagttggtgagccatcaggaactgcttggaaaaatgagacaatgatgcagacaggcacaggctcaacttccaatcctcagaatacggttaatagtcttggcgaaaggccaagaatcaggcatcaacatagccaatctatggatggttcaatgaatatcaatgagatgcttatgtcgggaaatgaagatgattctgctattgatgctaagaagtctatgtctgctactaaacttgctgagcttgctctcattgatcctaaacgtgctaagaggatatgggcaaacaggcagtccgcagcacgatcaaaagaaaggaagacgagatacatatttgagcttgagagaaaagtacagactttgcaaacagaggctacaactctctcagcccagttgaccctcttacagagagacacaaatggcttgactgttgaaaacaatgagctgaagctgcggttacaaacaatggagcagcaggttcacttgcaggatgaactaaacgaagcactaaaggaggaaatccagcatctgaaggtgttgactggccaagttgctccatcagcgttgaactatgggtcgtttggatcaaaccagcagcaattctattccaacaatcagtcaatgcaaacaatcttagctgcaaaacagttccagcaacttcagattcattcacagaagcagcaacaacaacaacaacaacaacaacagcaacaccaacagcagcagcagcaacagcaacagtatcagtttcaacagcaacagatgcaacagcttatgcagcagcggcttcaacagcaagaacaacaaaatggagtaagactcaagccttcacaagcccagaaagagaactgaggaatatgaatatgtcccacggtattggcgttttggtacgtagaagaaaccttttggtaaggtcattgaagataaacatttgggtaagcccaaagaaacagagttccgtgcattgcaaatatgcaatgcactgcaattattagttgtttggatttgatatagagactgagtctcgaaaccatagtatgtaaaaatataatcacgttcaaaagctgttaatttgttataatcttataacaattgtgttttaagatacaaacctactttgtgttatgatatttgttcact

SEQ ID NO: 40516 - protein, 398 aa, Arabidopsis thaliana
  peptide (1)..(398): Ceres Seq. ID no. 13575083
  misc_feature (201)..(263): Pfam Name: bZIP transcription factor Pfam Description: bZIP transcription factor
  misc_feature (185)..(361): Homolog of NCBI NO: 2921823 NR Description: shoot-forming PKSF1 [Paulownia kawakamii]
  misc_feature (166)..(360): Homolog of NCBI NO: 2921823 NR Description: shoot-forming PKSF1 [Paulownia kawakamii]
  misc_feature (150)..(357): Homolog of NCBI NO: 2921823 NR Description: shoot-forming PKSF1 [Paulownia kawakamii]
  misc_feature (120)..(378): Homolog of NCBI NO: 21740783 NR Description: OSJNBa0067K08.24 [Oryza sativa (japonica
  misc_feature (19)..(360): Homolog of NCBI NO: 21740783 NR Description: OSJNBa0067K08.24 [Oryza sativa (japonica
  misc_feature (75)..(386): Homolog of NCBI NO: 7489564 NR Description: probable transcription activator RF2a - rice
  misc_feature (1)..(251): Homolog of NCBI NO: 30684938 NR Description: bZIP transcription factor (POSF21) [Arabidopsis
  misc_feature (1)..(398): Homolog of NCBI NO: 21553831 NR Description: transcriptional activator RF2a, putative
  misc_feature (1)..(398): Homolog of NCBI NO: 15221391 NR Description: bZIP protein [Arabidopsis thaliana]
  misc_feature (1)..(398): Homolog of NCBI NO: 15224665 NR Description: bZIP transcription factor (POSF21) [Arabidopsis
MDKEKSPAPPCGGLPPPSPSGRCSAFSEAGPIGHGSDANRMSHDISRMLDNPPKKIGHRRAHSEILTLPDDLSFDSDLGVVGNAADGASFSDETEEDLLSMYLDMDKFNSSATSSAQVGEPSGTAWKNETMMQTGTGSTSNPQNTVNSLGERPRIRHQHSQSMDGSMNINEMLMSGNEDDSAIDAKKSMSATKLAELALIDPKRAKRIWANRQSAARSKERKTRYIFELERKVQTLQTEATTLSAQLTLLQRDTNGLTVENNELKLRLQTMEQQVHLQDELNEALKEEIQHLKVLTGQVAPSALNYGSFGSNQQQFYSNNQSMQTILAAKQFQQLQIHSQKQQQQQQQQQQQHQQQQQQQQQYQFQQQQMQQLMQQRLQQQEQQNGVRLKPSQAQKEN

SEQ ID NO: 40517 - protein, 358 aa, Arabidopsis thaliana
  peptide (1)..(358): Ceres Seq. ID no. 13575084
  misc_feature (161)..(223): Pfam Name: bZIP transcription factor Pfam Description: bZIP transcription factor
  misc_feature (145)..(321): Homolog of NCBI NO: 2921823 NR Description: shoot-forming PKSF1 [Paulownia kawakamii]
  misc_feature (126)..(320): Homolog of NCBI NO: 2921823 NR Description: shoot-forming PKSF1 [Paulownia kawakamii]
  misc_feature (110)..(317): Homolog of NCBI NO: 2921823 NR Description: shoot-forming PKSF1 [Paulownia kawakamii]
  misc_feature (80)..(338): Homolog of NCBI NO: 21740783 NR Description: OSJNBa0067K08.24 [Oryza sativa (japonica
  misc_feature (1)..(320): Homolog of NCBI NO: 21740783 NR Description: OSJNBa0067K08.24 [Oryza sativa (japonica
  misc_feature (35)..(346): Homolog of NCBI NO: 7489564 NR Description: probable transcription activator RF2a - rice
  misc_feature (1)..(211): Homolog of NCBI NO: 30684938 NR Description: bZIP transcription factor (POSF21) [Arabidopsis
  misc_feature (1)..(358): Homolog of NCBI NO: 21553831 NR Description: transcriptional activator RF2a, putative
  misc_feature (1)..(358): Homolog of NCBI NO: 15221391 NR Description: bZIP protein [Arabidopsis thaliana]
  misc_feature (1)..(358): Homolog of NCBI NO: 15224665 NR Description: bZIP transcription factor (POSF21) [Arabidopsis
MSHDISRMLDNPPKKIGHRRAHSEILTLPDDLSFDSDLGVVGNAADGASFSDETEEDLLSMYLDMDKFNSSATSSAQVGEPSGTAWKNETMMQTGTGSTSNPQNTVNSLGERPRIRHQHSQSMDGSMNINEMLMSGNEDDSAIDAKKSMSATKLAELALIDPKRAKRIWANRQSAARSKERKTRYIFELERKVQTLQTEATTLSAQLTLLQRDTNGLTVENNELKLRLQTMEQQVHLQDELNEALKEEIQHLKVLTGQVAPSALNYGSFGSNQQQFYSNNQSMQTILAAKQFQQLQIHSQKQQQQQQQQQQQHQQQQQQQQQYQFQQQQMQQLMQQRLQQQEQQNGVRLKPSQAQKEN

SEQ ID NO: 40518 - protein, 351 aa, Arabidopsis thaliana
  peptide (1)..(351): Ceres Seq. ID no. 13575085
  misc_feature (154)..(216): Pfam Name: bZIP transcription factor Pfam Description: bZIP transcription factor
  misc_feature (138)..(314): Homolog of NCBI NO: 2921823 NR Description: shoot-forming PKSF1 [Paulownia kawakamii]
  misc_feature (119)..(313): Homolog of NCBI NO: 2921823 NR Description: shoot-forming PKSF1 [Paulownia kawakamii]
  misc_feature (103)..(310): Homolog of NCBI NO: 2921823 NR Description: shoot-forming PKSF1 [Paulownia kawakamii]
  misc_feature (73)..(331): Homolog of NCBI NO: 21740783 NR Description: OSJNBa0067K08.24 [Oryza sativa (japonica
  misc_feature (1)..(313): Homolog of NCBI NO: 21740783 NR Description: OSJNBa0067K08.24 [Oryza sativa (japonica
  misc_feature (28)..(339): Homolog of NCBI NO: 7489564 NR Description: probable transcription activator RF2a - rice
  misc_feature (1)..(204): Homolog of NCBI NO: 30684938 NR Description: bZIP transcription factor (POSF21) [Arabidopsis
  misc_feature (1)..(351): Homolog of NCBI NO: 21553831 NR Description: transcriptional activator RF2a, putative
  misc_feature (1)..(351): Homolog of NCBI NO: 15221391 NR Description: bZIP protein [Arabidopsis thaliana]
  misc_feature (1)..(351): Homolog of NCBI NO: 15224665 NR Description: bZIP transcription factor (POSF21) [Arabidopsis
MLDNPPKKIGHRRAHSEILTLPDDLSFDSDLGVVGNAADGASFSDETEEDLLSMYLDMDKFNSSATSSAQVGEPSGTAWKNETMMQTGTGSTSNPQNTVNSLGERPRIRHQHSQSMDGSMNINEMLMSGNEDDSAIDAKKSMSATKLAELALIDPKRAKRIWANRQSAARSKERKTRYIFELERKVQTLQTEATTLSAQLTLLQRDTNGLTVENNELKLRLQTMEQQVHLQDELNEALKEEIQHLKVLTGQVAPSALNYGSFGSNQQQFYSNNQSMQTILAAKQFQQLQIHSQKQQQQQQQQQQQHQQQQQQQQQYQFQQQQMQQLMQQRLQQQEQQNGVRLKPSQAQKEN

SEQ ID NO: 40519 - DNA, 1853 bp, Arabidopsis thaliana
  misc_feature (1)..(1853): Ceres Seq. ID no. 12385130
  misc_feature: MA Experiment ID: 108434 Result: Down-regulated in Transcription
  misc_feature: MA Experiment 108434 PARAMETER Experiment Name: At_Root_Tips_cDNA_P Parameter: Tissue Value: Root Tips
  misc_feature: MA Experiment ID: 108435 Result: Down-regulated in Transcription
  misc_feature: MA Experiment 108435 PARAMETER Experiment Name: At_stm_Mutants_cDNA_P Parameter: Plant Line Value: wt Landsburg vs stm
  misc_feature: MA Experiment 108435 PARAMETER Experiment Name: At_stm_Mutants_cDNA_P Parameter: Tissue Value: Shoot Apical Meristem Region
  misc_feature: MA Experiment ID: 108461 Result: Up-regulated in Transcription
  misc_feature: MA Experiment 108461 PARAMETER Experiment Name: At_Germinating_Seeds_cDNA_P Parameter: Age (day) Value: 1 vs. 0
  misc_feature: MA Experiment 108461 PARAMETER Experiment Name: At_Germinating_Seeds_cDNA_P Parameter: Tissue Value: Germinating Seeds
  misc_feature: MA Experiment ID: 108462 Result: Up-regulated in Transcription
  misc_feature: MA Experiment 108462 PARAMETER Experiment Name: At_Germinating_Seeds_cDNA_P Parameter: Age (day) Value: 2 vs. 0
  misc_feature: MA Experiment 108462 PARAMETER Experiment Name: At_Germinating_Seeds_cDNA_P Parameter: Tissue Value: Germinating Seeds
  misc_feature: MA Experiment ID: 108463 Result: Up-regulated in Transcription
  misc_feature: MA Experiment 108463 PARAMETER Experiment Name: At_Germinating_Seeds_cDNA_P Parameter: Age (day) Value: 3 vs. 0
  misc_feature: MA Experiment 108463 PARAMETER Experiment Name: At_Germinating_Seeds_cDNA_P Parameter: Tissue Value: Germinating Seeds
  misc_feature: MA Experiment ID: 108464 Result: Up-regulated in Transcription
  misc_feature: MA Experiment 108464 PARAMETER Experiment Name: At_Germinating_Seeds_cDNA_P Parameter: Age (day) Value: 4 vs. 0
  misc_feature: MA Experiment 108464 PARAMETER Experiment Name: At_Germinating_Seeds_cDNA_P Parameter: Tissue Value: Germinating Seeds
  misc_feature: MA Experiment ID: 108501 Result: Down-regulated in Transcription
  misc_feature: MA Experiment 108501 PARAMETER Experiment Name: At_ap2_floral_buds_cDNA_P Parameter: Plant Line Value: ap2 (Ler.)
  misc_feature: MA Experiment 108501 PARAMETER Experiment Name: At_ap2_floral_buds_cDNA_P Parameter: Tissue Value: Closed Flower
  misc_feature: MA Experiment ID: 108577 Result: Down-regulated in Transcription
  misc_feature: MA Experiment 108577 PARAMETER Experiment Name: At_42deg_Heat_cDNA_P Parameter: Temperature (deg C) Value: 42 vs. 22
  misc_feature: MA Experiment 108577 PARAMETER Experiment Name: At_42deg_Heat_cDNA_P Parameter: Timepoint (hr) Value: 6
  misc_feature: MA Experiment 108577 PARAMETER Experiment Name: At_42deg_Heat_cDNA_P Parameter: Tissue Value: Aerial
  misc_feature: MA Experiment ID: 108595 Result: Down-regulated in Transcription
  misc_feature: MA Experiment 108595 PARAMETER Experiment Name: At_Ler-pi_Ovule_cDNA_P Parameter: Plant Line Value: null
  misc_feature: MA Experiment ID: 20000069 Result: Up-regulated in Transcription
  misc_feature: MA Experiment 20000069 PARAMETER Experiment Name: At_100uM_ABA_Mutants_cDNA_P Parameter: Plant Line Value: CS23
  misc_feature: MA Experiment 20000069 PARAMETER Experiment Name: At_100uM_ABA_Mutants_cDNA_P Parameter: Timepoint (hr) Value: 6
  misc_feature: MA Experiment 20000069 PARAMETER Experiment Name: At_100uM_ABA_Mutants_cDNA_P Parameter: Tissue Value: Aerial
  misc_feature: MA Experiment 20000069 PARAMETER Experiment Name: At_100uM_ABA_Mutants_cDNA_P Parameter: Treatment Value: 100uM ABA vs. No Treatment
  misc_feature: MA Experiment ID: 20000070 Result: Up-regulated in Transcription
  misc_feature: MA Experiment 20000070 PARAMETER Experiment Name: At_100uM_ABA_Mutants_cDNA_P Parameter: Plant Line Value: CS24
  misc_feature: MA Experiment 20000070 PARAMETER Experiment Name: At_100uM_ABA_Mutants_cDNA_P Parameter: Timepoint (hr) Value: 6
  misc_feature: MA Experiment 20000070 PARAMETER Experiment Name: At_100uM_ABA_Mutants_cDNA_P Parameter: Tissue Value: Aerial
  misc_feature: MA Experiment 20000070 PARAMETER Experiment Name: At_100uM_ABA_Mutants_cDNA_P Parameter: Treatment Value: 100uM ABA vs. No Treatment
  misc_feature: MA Experiment ID: 20000071 Result: Up-regulated in Transcription
  misc_feature: MA Experiment 20000071 PARAMETER Experiment Name: At_100uM_ABA_Mutants_cDNA_P Parameter: Plant Line Value: CS8104
  misc_feature: MA Experiment 20000071 PARAMETER Experiment Name: At_100uM_ABA_Mutants_cDNA_P Parameter: Timepoint (hr) Value: 6
  misc_feature: MA Experiment 20000071 PARAMETER Experiment Name: At_100uM_ABA_Mutants_cDNA_P Parameter: Tissue Value: Aerial
  misc_feature: MA Experiment 20000071 PARAMETER Experiment Name: At_100uM_ABA_Mutants_cDNA_P Parameter: Treatment Value: 100uM ABA vs. No Treatment
  misc_feature: MA Experiment ID: 20000072 Result: Up-regulated in Transcription
  misc_feature: MA Experiment 20000072 PARAMETER Experiment Name: At_100uM_ABA_Mutants_cDNA_P Parameter: Plant Line Value: CS8105
  misc_feature: MA Experiment 20000072 PARAMETER Experiment Name: At_100uM_ABA_Mutants_cDNA_P Parameter: Timepoint (hr) Value: 6
  misc_feature: MA Experiment 20000072 PARAMETER Experiment Name: At_100uM_ABA_Mutants_cDNA_P Parameter: Tissue Value: Aerial
  misc_feature: MA Experiment 20000072 PARAMETER Experiment Name: At_100uM_ABA_Mutants_cDNA_P Parameter: Treatment Value: 100uM ABA vs. No Treatment
  misc_feature: MA Experiment ID: 20000086 Result: Up-regulated in Transcription
  misc_feature: MA Experiment 20000086 PARAMETER Experiment Name: At_100uM_ABA_Mutants_cDNA_P Parameter: Plant Line Value: CS22
  misc_feature: MA Experiment 20000086 PARAMETER Experiment Name: At_100uM_ABA_Mutants_cDNA_P Parameter: Timepoint (hr) Value: 6
  misc_feature: MA Experiment 20000086 PARAMETER Experiment Name: At_100uM_ABA_Mutants_cDNA_P Parameter: Tissue Value: Aerial
  misc_feature: MA Experiment 20000086 PARAMETER Experiment Name: At_100uM_ABA_Mutants_cDNA_P Parameter: Treatment Value: 100uM ABA vs. No Treatment
  misc_feature: MA Experiment ID: 20000088 Result: Up-regulated in Transcription
  misc_feature: MA Experiment 20000088 PARAMETER Experiment Name: At_100uM_ABA_Mutants_cDNA_P Parameter: Plant Line Value: Landsberg
  misc_feature: MA Experiment 20000088 PARAMETER Experiment Name: At_100uM_ABA_Mutants_cDNA_P Parameter: Timepoint (hr) Value: 6
  misc_feature: MA Experiment 20000088 PARAMETER Experiment Name: At_100uM_ABA_Mutants_cDNA_P Parameter: Tissue Value: Aerial
  misc_feature: MA Experiment 20000088 PARAMETER Experiment Name: At_100uM_ABA_Mutants_cDNA_P Parameter: Treatment Value: 100uM ABA vs. No Treatment
  misc_feature: MA Experiment ID: 20000089 Result: Up-regulated in Transcription
  misc_feature: MA Experiment ID: 20000111 Result: Down-regulated in Transcription
  misc_feature: MA Experiment 20000111 PARAMETER Experiment Name: At_42deg_Heat_cDNA_P Parameter: Temperature (deg C) Value: 42 vs. 22
  misc_feature: MA Experiment 20000111 PARAMETER Experiment Name: At_42deg_Heat_cDNA_P Parameter: Timepoint (hr) Value: 6
  misc_feature: MA Experiment 20000111 PARAMETER Experiment Name: At_42deg_Heat_cDNA_P Parameter: Tissue Value: Aerial
  misc_feature: MA Experiment ID: 20000117 Result: Up-regulated in Transcription
  misc_feature: MA Experiment 20000117 PARAMETER Experiment Name: At_100uM_ABA_Mutants_cDNA_P Parameter: Plant Line Value: Columbia
  misc_feature: MA Experiment 20000117 PARAMETER Experiment Name: At_100uM_ABA_Mutants_cDNA_P Parameter: Timepoint (hr) Value: 6
  misc_feature: MA Experiment 20000117 PARAMETER Experiment Name: At_100uM_ABA_Mutants_cDNA_P Parameter: Tissue Value: Aerial
  misc_feature: MA Experiment 20000117 PARAMETER Experiment Name: At_100uM_ABA_Mutants_cDNA_P Parameter: Treatment Value: 100uM ABA vs. No Treatment
  misc_feature: MA Experiment ID: 20000180 Result: Up-regulated in Transcription
  misc_feature: MA Experiment 20000180 PARAMETER Experiment Name: At_Germinating_Seeds_P Parameter: Age (hr) Value: 24 vs. 0
  misc_feature: MA Experiment 20000180 PARAMETER Experiment Name: At_Germinating_Seeds_P Parameter: Tissue Value: Germinating Seeds
  misc_feature: MA Experiment ID: 20000184 Result: Down-regulated in Transcription
  misc_feature: MA Experiment 20000184 PARAMETER Experiment Name: At_Shoots__P Parameter: Age (day) Value: 7
  misc_feature: MA Experiment 20000184 PARAMETER Experiment Name: At_Shoots__P Parameter: Tissue Value: Shoots vs. Whole Plant
  misc_feature: MA Experiment ID: 20000214 Result: Down-regulated in Transcription
  misc_feature: MA Experiment 20000214 PARAMETER Experiment Name: At_4deg_Cold_P Parameter: Timepoint (hr) Value: 6
  misc_feature: MA Experiment ID: 20000234 Result: Down-regulated in Transcription
  misc_feature: MA Experiment 20000234 PARAMETER Experiment Name: At_Siliques_P Parameter: Age (day) Value: 21
  misc_feature: MA Experiment 20000234 PARAMETER Experiment Name: At_Siliques_P Parameter: Organism Value: A. thaliana
  misc_feature: MA Experiment 20000234 PARAMETER Experiment Name: At_Siliques_P Parameter: Plant Line Value: WS
  misc_feature: MA Experiment 20000234 PARAMETER Experiment Name: At_Siliques_P Parameter: Tissue Value: Less Than 5mm Siliques vs. Whole Plant
  misc_feature: MA Experiment ID: 20000286 Result: Down-regulated in Transcription
  misc_feature: MA Experiment 20000286 PARAMETER Experiment Name: At_Open_Flower_P Parameter: Age (day) Value: 21
  misc_feature: MA Experiment 20000286 PARAMETER Experiment Name: At_Open_Flower_P Parameter: Plant Line Value: WS
  misc_feature: MA Experiment 20000286 PARAMETER Experiment Name: At_Open_Flower_P Parameter: Tissue Value: Half Open vs. Whole Plant
  misc_feature: MA Experiment ID: 20000438 Result: Down-regulated in Transcription
  misc_feature: MA Experiment 20000438 PARAMETER Experiment Name: At_Shoots__P Parameter: Age (day) Value: 14
  misc_feature: MA Experiment 20000438 PARAMETER Experiment Name: At_Shoots__P Parameter: Tissue Value: Shoots vs. Whole Plant
  misc_feature: MA Experiment ID: 20000439 Result: Down-regulated in Transcription
  misc_feature: MA Experiment 20000439 PARAMETER Experiment Name: At_Roots__P Parameter: Age (day) Value: 14 vs. 21
  misc_feature: MA Experiment 20000439 PARAMETER Experiment Name: At_Roots__P Parameter: Organism Value: A. thaliana
  misc_feature: MA Experiment 20000439 PARAMETER Experiment Name: At_Roots__P Parameter: Tissue Value: Roots vs. Whole Plant
  misc_feature: MA Experiment ID: 20001248 Result: Up-regulated in Transcription
  misc_feature: MA Experiment 20001248 PARAMETER Experiment Name: At_Far-red-induction_P Parameter: Age (day) Value: 7
  misc_feature: MA Experiment 20001248 PARAMETER Experiment Name: At_Far-red-induction_P Parameter: Light Value: Far-red vs. White
  misc_feature: MA Experiment 20001248 PARAMETER Experiment Name: At_Far-red-induction_P Parameter: Organism Value: A. thaliana
  misc_feature: MA Experiment 20001248 PARAMETER Experiment Name: At_Far-red-induction_P Parameter: Plant Line Value: Columbia
  misc_feature: MA Experiment 20001248 PARAMETER Experiment Name: At_Far-red-induction_P Parameter: Timepoint (hr) Value: 4
  misc_feature: MA Experiment 20001248 PARAMETER Experiment Name: At_Far-red-induction_P Parameter: Tissue Value: Whole Plant
  misc_feature: MA Experiment ID: 20001556 Result: Down-regulated in Transcription
  misc_feature: MA Experiment 20001556 PARAMETER Experiment Name: At_Drought_Soil_Dry_P Parameter: Age (day) Value: 26
  misc_feature: MA Experiment 20001556 PARAMETER Experiment Name: At_Drought_Soil_Dry_P Parameter: Organism Value: A. thaliana
  misc_feature: MA Experiment 20001556 PARAMETER Experiment Name: At_Drought_Soil_Dry_P Parameter: Plant Line Value: WS
  misc_feature: MA Experiment 20001556 PARAMETER Experiment Name: At_Drought_Soil_Dry_P Parameter: Post Timepoint (hr) Value: None
  misc_feature: MA Experiment 20001556 PARAMETER Experiment Name: At_Drought_Soil_Dry_P Parameter: Post-Treatment Value: None
  misc_feature: MA Experiment 20001556 PARAMETER Experiment Name: At_Drought_Soil_Dry_P Parameter: Timepoint (day) Value: 12
  misc_feature: MA Experiment 20001556 PARAMETER Experiment Name: At_Drought_Soil_Dry_P Parameter: Treatment Value: Drought vs. No Drought
  misc_feature: MA Experiment ID: 20001557 Result: Down-regulated in Transcription
  misc_feature: MA Experiment 20001557 PARAMETER Experiment Name: At_Drought_Soil_Dry_P Parameter: Age (day) Value: 27
  misc_feature: MA Experiment 20001557 PARAMETER Experiment Name: At_Drought_Soil_Dry_P Parameter: Organism Value: A. thaliana
  misc_feature: MA Experiment 20001557 PARAMETER Experiment Name: At_Drought_Soil_Dry_P Parameter: Plant Line Value: WS
  misc_feature: MA Experiment 20001557 PARAMETER Experiment Name: At_Drought_Soil_Dry_P Parameter: Post Timepoint (hr) Value: 3
  misc_feature: MA Experiment 20001557 PARAMETER Experiment Name: At_Drought_Soil_Dry_P Parameter: Post-Treatment Value: Re-Water vs. No Drought
  misc_feature: MA Experiment 20001557 PARAMETER Experiment Name: At_Drought_Soil_Dry_P Parameter: Timepoint (day) Value: 13
  misc_feature: MA Experiment 20001557 PARAMETER Experiment Name: At_Drought_Soil_Dry_P Parameter: Treatment Value: Drought vs. No Drought
  misc_feature: MA Experiment ID: 20001558 Result: Down-regulated in Transcription
  misc_feature: MA Experiment 20001558 PARAMETER Experiment Name: At_Drought_Soil_Dry_P Parameter: Age (day) Value: 27
  misc_feature: MA Experiment 20001558 PARAMETER Experiment Name: At_Drought_Soil_Dry_P Parameter: Organism Value: A. thaliana
  misc_feature: MA Experiment 20001558 PARAMETER Experiment Name: At_Drought_Soil_Dry_P Parameter: Plant Line Value: WS
  misc_feature: MA Experiment 20001558 PARAMETER Experiment Name: At_Drought_Soil_Dry_P Parameter: Post Timepoint (hr) Value: 6
  misc_feature: MA Experiment 20001558 PARAMETER Experiment Name: At_Drought_Soil_Dry_P Parameter: Post-Treatment Value: Re-Water vs. No Drought
  misc_feature: MA Experiment 20001558 PARAMETER Experiment Name: At_Drought_Soil_Dry_P Parameter: Timepoint (day) Value: 13
  misc_feature: MA Experiment 20001558 PARAMETER Experiment Name: At_Drought_Soil_Dry_P Parameter: Treatment Value: Drought vs. No Drought
  misc_feature: MA Experiment ID: 20001560 Result: Down-regulated in Transcription
  misc_feature: MA Experiment 20001560 PARAMETER Experiment Name: At_Drought_Soil_Dry_P Parameter: Age (day) Value: 28
  misc_feature: MA Experiment 20001560 PARAMETER Experiment Name: At_Drought_Soil_Dry_P Parameter: Organism Value: A. thaliana
  misc_feature: MA Experiment 20001560 PARAMETER Experiment Name: At_Drought_Soil_Dry_P Parameter: Plant Line Value: WS
  misc_feature: MA Experiment 20001560 PARAMETER Experiment Name: At_Drought_Soil_Dry_P Parameter: Post Timepoint (hr) Value: None
  misc_feature: MA Experiment 20001560 PARAMETER Experiment Name: At_Drought_Soil_Dry_P Parameter: Post-Treatment Value: None
  misc_feature: MA Experiment 20001560 PARAMETER Experiment Name: At_Drought_Soil_Dry_P Parameter: Timepoint (day) Value: 14
  misc_feature: MA Experiment 20001560 PARAMETER Experiment Name: At_Drought_Soil_Dry_P Parameter: Treatment Value: Drought vs. No Drought
atttctcgataagcaacgcgctagagacggatctcacataatcaccagatcaattttctcgagaaaaagaaaatgtgattatccattcgattttttcgcagaagaagacgaaagagagaagaagagaaagagatttgaaatcatggcgaatgtagtgggacagctaaaacgaggaatctcgagacaattctcaactggatcgcttcgtcgtacgcttagtcgtcaattcacgcgtcaagcttcacatgatcctcgccggaacaatatgcgatttagttttggtcgacaatcgtctttagatccgattcgtcggagtcctgatggttctaacggtccgcagcttgctgtaccggataatctcgacgctactatgcagcttctatttgtggcttgtagaggtgatgttgaaggtgttcaggatctgcttgatgaaggtattgatgttaatagtatcgatcttgatggtcgtacggctcttcatatcgctgcttgtgaaggtcatgtcgatgttgtcaagcttcttcttactaggaaggctaatattgatgctcgtgatcgttggggaagcacggcagctgctgatgctaagtattatggtaacatggatgttttcaacattttgaaagcccgtggagctaaagttccgaaaaccaaaaggacacccatggttgtggcgaatcctcgtgaagttcctgagtacgagttaaatccgcaggaacttcaagttcggaaagctgatggtatctcaaagggaatatatcaagtggctaaatggaatgggactaaggtttctgtaaagatacttgataaggatctctacaaggattctgacactataaatgccttcaaacacgaacttactttattcgagaaggtacgtcatcctaatgttgtgcaatttgttggagctgttactcaaaatgtccccatgatgattgtgtccgagtatcatcctaaaggggaccttgggagctatcttcaaaaaaaaggtcgtctttctccagccaaagttctaagatttgccctcgatatagccaggggaatgaattatcttcacgagtgtaaaccagaaccagtaatccactgtgatctaaaacccaaaaatattatgctcgatagtggaggacatctgaaggtggcgggatttggtttgataagttttgcaaagttatcatctgataaatcaaaaatccttaatcacggggcccatatagatccttcaaattactgtatggcacctgaggtttacaaagatgaaatatttgacaggagtgtggattcttactcttttggtgtcgtattatatgagatgattgaaggagtacaacctttccatcctaaacccccagaagaggcagtgaagctaatgtgtttagaaggaagaagaccttcgtttaaagccaagtccaaaagttgtccccaagagatgagagaattgattgaggaatgctgggatacggaaacttttgttagaccaacattttctgagatcatagttcgattggacaagatctttgtacactgctcaaaacagggatggtggaaagatacattcaagttcccttggaaatagtacataagaacgtgagaggtttactcaggaacacgagaaactccacaattcaagagctctcttctcatgtttacaataaactcgatacaaagaatacaaaaagaaacggccctctccgatttgtcattgtcttatcgtgtaacagtgtacaatgtaaaccccaaaaagtactttcatcgagctatatagacttctctactgcacagaactgagcattttgagatacaatgtatcatatttatataagtatcaagaaagctctttattcttgttatgcttc

SEQ ID NO: 40520 - protein, 523 aa, Arabidopsis thaliana
  peptide (1)..(523): Ceres Seq. ID no. 12385131
  misc_feature (90)..(515): Homolog of NCBI NO: 18411024 NR Description: putative protein; protein id: At3g58760.1
  misc_feature (262)..(523): Homolog of NCBI NO: 22652536 NR Description: ankyrin-kinase protein [Arabidopsis thaliana]
  misc_feature (55)..(496): Homolog of NCBI NO: 34907560 NR Description: ankyrin-kinase -like protein
  misc_feature (241)..(523): Homolog of NCBI NO: 22652534 NR Description: ankyrin-kinase protein [Arabidopsis thaliana]
  misc_feature (48)..(523): Homolog of NCBI NO: 25408910 NR Description: probable protein kinase [imported] - Arabidopsis
  misc_feature (48)..(522): Homolog of NCBI NO: 15232181 NR Description: putative protein; protein id: At3g59830.1
  misc_feature (48)..(523): Homolog of NCBI NO: 30689517 NR Description: protein kinase -related [Arabidopsis thaliana]
  misc_feature (48)..(523): Homolog of NCBI NO: 18700703 NR Description: putative ankyrin-kinase [Medicago sativa]
  misc_feature (48)..(523): Homolog of NCBI NO: 18700701 NR Description: ankyrin-kinase [Medicago truncatula]
  misc_feature (48)..(522): Homolog of NCBI NO: 15225139 NR Description: putative protein kinase; protein id: At2g31800.1
FLDKQRARDGSHIITRSIFSRKRKCDYPFDFFAEEDEREKKRKRFEIMANVVGQLKRGISRQFSTGSLRRTLSRQFTRQASHDPRRNNMRFSFGRQSSLDPIRRSPDGSNGPQLAVPDNLDATMQLLFVACRGDVEGVQDLLDEGIDVNSIDLDGRTALHIAACEGHVDVVKLLLTRKANIDARDRWGSTAAADAKYYGNMDVFNILKARGAKVPKTKRTPMVVANPREVPEYELNPQELQVRKADGISKGIYQVAKWNGTKVSVKILDKDLYKDSDTINAFKHELTLFEKVRHPNVVQFVGAVTQNVPMMIVSEYHPKGDLGSYLQKKGRLSPAKVLRFALDIARGMNYLHECKPEPVIHCDLKPKNIMLDSGGHLKVAGFGLISFAKLSSDKSKILNHGAHIDPSNYCMAPEVYKDEIFDRSVDSYSFGVVLYEMIEGVQPFHPKPPEEAVKLMCLEGRRPSFKAKSKSCPQEMRELIEECWDTETFVRPTFSEIIVRLDKIFVHCSKQGWWKDTFKFPWK

SEQ ID NO: 40521 - protein, 476 aa, Arabidopsis thaliana
  peptide (1)..(476): Ceres Seq. ID no. 12385132
  misc_feature (43)..(468): Homolog of NCBI NO: 18411024 NR Description: putative protein; protein id: At3g58760.1
  misc_feature (215)..(476): Homolog of NCBI NO: 22652536 NR Description: ankyrin-kinase protein [Arabidopsis thaliana]
  misc_feature (8)..(449): Homolog of NCBI NO: 34907560 NR Description: ankyrin-kinase -like protein
  misc_feature (194)..(476): Homolog of NCBI NO: 22652534 NR Description: ankyrin-kinase protein [Arabidopsis thaliana]
  misc_feature (1)..(476): Homolog of NCBI NO: 25408910 NR Description: probable protein kinase [imported] - Arabidopsis
  misc_feature (1)..(475): Homolog of NCBI NO: 15232181 NR Description: putative protein; protein id: At3g59830.1
  misc_feature (1)..(476): Homolog of NCBI NO: 30689517 NR Description: protein kinase -related [Arabidopsis thaliana]
  misc_feature (1)..(476): Homolog of NCBI NO: 18700703 NR Description: putative ankyrin-kinase [Medicago sativa]
  misc_feature (1)..(476): Homolog of NCBI NO: 18700701 NR Description: ankyrin-kinase [Medicago truncatula]
  misc_feature (1)..(475): Homolog of NCBI NO: 15225139 NR Description: putative protein kinase; protein id: At2g31800.1
MANVVGQLKRGISRQFSTGSLRRTLSRQFTRQASHDPRRNNMRFSFGRQSSLDPIRRSPDGSNGPQLAVPDNLDATMQLLFVACRGDVEGVQDLLDEGIDVNSIDLDGRTALHIAACEGHVDVVKLLLTRKANIDARDRWGSTAAADAKYYGNMDVFNILKARGAKVPKTKRTPMVVANPREVPEYELNPQELQVRKADGISKGIYQVAKWNGTKVSVKILDKDLYKDSDTINAFKHELTLFEKVRHPNVVQFVGAVTQNVPMMIVSEYHPKGDLGSYLQKKGRLSPAKVLRFALDIARGMNYLHECKPEPVIHCDLKPKNIMLDSGGHLKVAGFGLISFAKLSSDKSKILNHGAHIDPSNYCMAPEVYKDEIFDRSVDSYSFGVVLYEMIEGVQPFHPKPPEEAVKLMCLEGRRPSFKAKSKSCPQEMRELIEECWDTETFVRPTFSEIIVRLDKIFVHCSKQGWWKDTFKFPWK

SEQ ID NO: 40522 - protein, 435 aa, Arabidopsis thaliana
  peptide (1)..(435): Ceres Seq. ID no. 12385133
  misc_feature (2)..(427): Homolog of NCBI NO: 18411024 NR Description: putative protein; protein id: At3g58760.1
  misc_feature (174)..(435): Homolog of NCBI NO: 22652536 NR Description: ankyrin-kinase protein [Arabidopsis thaliana]
  misc_feature (1)..(408): Homolog of NCBI NO: 34907560 NR Description: ankyrin-kinase -like protein
  misc_feature (153)..(435): Homolog of NCBI NO: 22652534 NR Description: ankyrin-kinase protein [Arabidopsis thaliana]
  misc_feature (1)..(435): Homolog of NCBI NO: 25408910 NR Description: probable protein kinase [imported] - Arabidopsis
  misc_feature (1)..(434): Homolog of NCBI NO: 15232181 NR Description: putative protein; protein id: At3g59830.1
  misc_feature (1)..(435): Homolog of NCBI NO: 30689517 NR Description: protein kinase -related [Arabidopsis thaliana]
  misc_feature (1)..(435): Homolog of NCBI NO: 18700703 NR Description: putative ankyrin-kinase [Medicago sativa]
  misc_feature (1)..(435): Homolog of NCBI NO: 18700701 NR Description: ankyrin-kinase [Medicago truncatula]
  misc_feature (1)..(434): Homolog of NCBI NO: 15225139 NR Description: putative protein kinase; protein id: At2g31800.1
MRFSFGRQSSLDPIRRSPDGSNGPQLAVPDNLDATMQLLFVACRGDVEGVQDLLDEGIDVNSIDLDGRTALHIAACEGHVDVVKLLLTRKANIDARDRWGSTAAADAKYYGNMDVFNILKARGAKVPKTKRTPMVVANPREVPEYELNPQELQVRKADGISKGIYQVAKWNGTKVSVKILDKDLYKDSDTINAFKHELTLFEKVRHPNVVQFVGAVTQNVPMMIVSEYHPKGDLGSYLQKKGRLSPAKVLRFALDIARGMNYLHECKPEPVIHCDLKPKNIMLDSGGHLKVAGFGLISFAKLSSDKSKILNHGAHIDPSNYCMAPEVYKDEIFDRSVDSYSFGVVLYEMIEGVQPFHPKPPEEAVKLMCLEGRRPSFKAKSKSCPQEMRELIEECWDTETFVRPTFSEIIVRLDKIFVHCSKQGWWKDTFKFPWK

SEQ ID NO: 40523 - DNA, 1449 bp, Arabidopsis thaliana
  misc_feature (1)..(1449): Ceres Seq. ID no. 13488687
  misc_feature: MA Experiment ID: 108464 Result: Down-regulated in Transcription
  misc_feature: MA Experiment 108464 PARAMETER Experiment Name: At_Germinating_Seeds_cDNA_P Parameter: Age (day) Value: 4 vs. 0
  misc_feature: MA Experiment 108464 PARAMETER Experiment Name: At_Germinating_Seeds_cDNA_P Parameter: Tissue Value: Germinating Seeds
  misc_feature: MA Experiment ID: 108489 Result: Down-regulated in Transcription
  misc_feature: MA Experiment ID: 108573 Result: Down-regulated in Transcription
  misc_feature: MA Experiment 108573 PARAMETER Experiment Name: At_Drought_cDNA_P Parameter: Timepoint (hr) Value: 6
  misc_feature: MA Experiment 108573 PARAMETER Experiment Name: At_Drought_cDNA_P Parameter: Tissue Value: Aerial
  misc_feature: MA Experiment 108573 PARAMETER Experiment Name: At_Drought_cDNA_P Parameter: Treatment Value: Drought vs. No Drought
  misc_feature: MA Experiment ID: 108577 Result: Down-regulated in Transcription
  misc_feature: MA Experiment 108577 PARAMETER Experiment Name: At_42deg_Heat_cDNA_P Parameter: Temperature (deg C) Value: 42 vs. 22
  misc_feature: MA Experiment 108577 PARAMETER Experiment Name: At_42deg_Heat_cDNA_P Parameter: Timepoint (hr) Value: 6
  misc_feature: MA Experiment 108577 PARAMETER Experiment Name: At_42deg_Heat_cDNA_P Parameter: Tissue Value: Aerial
  misc_feature: MA Experiment ID: 108585 Result: Down-regulated in Transcription
  misc_feature: MA Experiment 108585 PARAMETER Experiment Name: At_5mM_NaNP_cDNA_P Parameter: Timepoint (hr) Value: 6
  misc_feature: MA Experiment 108585 PARAMETER Experiment Name: At_5mM_NaNP_cDNA_P Parameter: Tissue Value: Aerial
  misc_feature: MA Experiment 108585 PARAMETER Experiment Name: At_5mM_NaNP_cDNA_P Parameter: Treatment Value: null
  misc_feature: MA Experiment ID: 108668 Result: Down-regulated in Transcription
  misc_feature: MA Experiment 108668 PARAMETER Experiment Name: At_2mM_SA_cDNA_P Parameter: Plant Line Value: WS
  misc_feature: MA Experiment 108668 PARAMETER Experiment Name: At_2mM_SA_cDNA_P Parameter: Timepoint (hr) Value: 6
  misc_feature: MA Experiment 108668 PARAMETER Experiment Name: At_2mM_SA_cDNA_P Parameter: Treatment Value: 2mM SA vs. No Treatment
  misc_feature: MA Experiment ID: 20000069 Result: Up-regulated in Transcription
  misc_feature: MA Experiment 20000069 PARAMETER Experiment Name: At_100uM_ABA_Mutants_cDNA_P Parameter: Plant Line Value: CS23
  misc_feature: MA Experiment 20000069 PARAMETER Experiment Name: At_100uM_ABA_Mutants_cDNA_P Parameter: Timepoint (hr) Value: 6
  misc_feature: MA Experiment 20000069 PARAMETER Experiment Name: At_100uM_ABA_Mutants_cDNA_P Parameter: Tissue Value: Aerial
  misc_feature: MA Experiment 20000069 PARAMETER Experiment Name: At_100uM_ABA_Mutants_cDNA_P Parameter: Treatment Value: 100uM ABA vs. No Treatment
  misc_feature: MA Experiment ID: 20000070 Result: Up-regulated in Transcription
  misc_feature: MA Experiment 20000070 PARAMETER Experiment Name: At_100uM_ABA_Mutants_cDNA_P Parameter: Plant Line Value: CS24
  misc_feature: MA Experiment 20000070 PARAMETER Experiment Name: At_100uM_ABA_Mutants_cDNA_P Parameter: Timepoint (hr) Value: 6
  misc_feature: MA Experiment 20000070 PARAMETER Experiment Name: At_100uM_ABA_Mutants_cDNA_P Parameter: Tissue Value: Aerial
  misc_feature: MA Experiment 20000070 PARAMETER Experiment Name: At_100uM_ABA_Mutants_cDNA_P Parameter: Treatment Value: 100uM ABA vs. No Treatment
  misc_feature: MA Experiment ID: 20000071 Result: Up-regulated in Transcription
  misc_feature: MA Experiment 20000071 PARAMETER Experiment Name: At_100uM_ABA_Mutants_cDNA_P Parameter: Plant Line Value: CS8104
  misc_feature: MA Experiment 20000071 PARAMETER Experiment Name: At_100uM_ABA_Mutants_cDNA_P Parameter: Timepoint (hr) Value: 6
  misc_feature: MA Experiment 20000071 PARAMETER Experiment Name: At_100uM_ABA_Mutants_cDNA_P Parameter: Tissue Value: Aerial
  misc_feature: MA Experiment 20000071 PARAMETER Experiment Name: At_100uM_ABA_Mutants_cDNA_P Parameter: Treatment Value: 100uM ABA vs. No Treatment
  misc_feature: MA Experiment ID: 20000072 Result: Up-regulated in Transcription
  misc_feature: MA Experiment 20000072 PARAMETER Experiment Name: At_100uM_ABA_Mutants_cDNA_P Parameter: Plant Line Value: CS8105
  misc_feature: MA Experiment 20000072 PARAMETER Experiment Name: At_100uM_ABA_Mutants_cDNA_P Parameter: Timepoint (hr) Value: 6
  misc_feature: MA Experiment 20000072 PARAMETER Experiment Name: At_100uM_ABA_Mutants_cDNA_P Parameter: Tissue Value: Aerial
  misc_feature: MA Experiment 20000072 PARAMETER Experiment Name: At_100uM_ABA_Mutants_cDNA_P Parameter: Treatment Value: 100uM ABA vs. No Treatment
  misc_feature: MA Experiment ID: 20000086 Result: Up-regulated in Transcription
  misc_feature: MA Experiment 20000086 PARAMETER Experiment Name: At_100uM_ABA_Mutants_cDNA_P Parameter: Plant Line Value: CS22
  misc_feature: MA Experiment 20000086 PARAMETER Experiment Name: At_100uM_ABA_Mutants_cDNA_P Parameter: Timepoint (hr) Value: 6
  misc_feature: MA Experiment 20000086 PARAMETER Experiment Name: At_100uM_ABA_Mutants_cDNA_P Parameter: Tissue Value: Aerial
  misc_feature: MA Experiment 20000086 PARAMETER Experiment Name: At_100uM_ABA_Mutants_cDNA_P Parameter: Treatment Value: 100uM ABA vs. No Treatment
  misc_feature: MA Experiment ID: 20000087 Result: Up-regulated in Transcription
  misc_feature: MA Experiment 20000087 PARAMETER Experiment Name: At_100uM_ABA_Mutants_cDNA_P Parameter: Plant Line Value: WS
  misc_feature: MA Experiment 20000087 PARAMETER Experiment Name: At_100uM_ABA_Mutants_cDNA_P Parameter: Timepoint (hr) Value: 6
  misc_feature: MA Experiment 20000087 PARAMETER Experiment Name: At_100uM_ABA_Mutants_cDNA_P Parameter: Tissue Value: Aerial
  misc_feature: MA Experiment 20000087 PARAMETER Experiment Name: At_100uM_ABA_Mutants_cDNA_P Parameter: Treatment Value: 100uM ABA vs. No Treatment
  misc_feature: MA Experiment ID: 20000088 Result: Up-regulated in Transcription
  misc_feature: MA Experiment 20000088 PARAMETER Experiment Name: At_100uM_ABA_Mutants_cDNA_P Parameter: Plant Line Value: Landsberg
  misc_feature: MA Experiment 20000088 PARAMETER Experiment Name: At_100uM_ABA_Mutants_cDNA_P Parameter: Timepoint (hr) Value: 6
  misc_feature: MA Experiment 20000088 PARAMETER Experiment Name: At_100uM_ABA_Mutants_cDNA_P Parameter: Tissue Value: Aerial
  misc_feature: MA Experiment 20000088 PARAMETER Experiment Name: At_100uM_ABA_Mutants_cDNA_P Parameter: Treatment Value: 100uM ABA vs. No Treatment
  misc_feature: MA Experiment ID: 20000089 Result: Up-regulated in Transcription
  misc_feature: MA Experiment ID: 20000090 Result: Up-regulated in Transcription
  misc_feature: MA Experiment ID: 20000111 Result: Down-regulated in Transcription
  misc_feature: MA Experiment 20000111 PARAMETER Experiment Name: At_42deg_Heat_cDNA_P Parameter: Temperature (deg C) Value: 42 vs. 22
  misc_feature: MA Experiment 20000111 PARAMETER Experiment Name: At_42deg_Heat_cDNA_P Parameter: Timepoint (hr) Value: 6
  misc_feature: MA Experiment 20000111 PARAMETER Experiment Name: At_42deg_Heat_cDNA_P Parameter: Tissue Value: Aerial
  misc_feature: MA Experiment ID: 20000113 Result: Down-regulated in Transcription
  misc_feature: MA Experiment 20000113 PARAMETER Experiment Name: At_42deg_Heat_cDNA_P Parameter: Temperature (deg C) Value: 42 vs. 22
  misc_feature: MA Experiment 20000113 PARAMETER Experiment Name: At_42deg_Heat_cDNA_P Parameter: Timepoint (hr) Value: 8
  misc_feature: MA Experiment 20000113 PARAMETER Experiment Name: At_42deg_Heat_cDNA_P Parameter: Tissue Value: Aerial
  misc_feature: MA Experiment ID: 20000117 Result: Up-regulated in Transcription
  misc_feature: MA Experiment 20000117 PARAMETER Experiment Name: At_100uM_ABA_Mutants_cDNA_P Parameter: Plant Line Value: Columbia
  misc_feature: MA Experiment 20000117 PARAMETER Experiment Name: At_100uM_ABA_Mutants_cDNA_P Parameter: Timepoint (hr) Value: 6
  misc_feature: MA Experiment 20000117 PARAMETER Experiment Name: At_100uM_ABA_Mutants_cDNA_P Parameter: Tissue Value: Aerial
  misc_feature: MA Experiment 20000117 PARAMETER Experiment Name: At_100uM_ABA_Mutants_cDNA_P Parameter: Treatment Value: 100uM ABA vs. No Treatment
  misc_feature: MA Experiment ID: 20000173 Result: Down-regulated in Transcription
  misc_feature: MA Experiment 20000173 PARAMETER Experiment Name: At_42deg_Heat_P Parameter: Age (day) Value: 14
  misc_feature: MA Experiment 20000173 PARAMETER Experiment Name: At_42deg_Heat_P Parameter: Organism Value: A. thaliana
  misc_feature: MA Experiment 20000173 PARAMETER Experiment Name: At_42deg_Heat_P Parameter: Plant Line Value: WS
  misc_feature: MA Experiment 20000173 PARAMETER Experiment Name: At_42deg_Heat_P Parameter: Temperature (deg C) Value: 42 vs. 22
  misc_feature: MA Experiment 20000173 PARAMETER Experiment Name: At_42deg_Heat_P Parameter: Timepoint (hr) Value: 6
  misc_feature: MA Experiment 20000173 PARAMETER Experiment Name: At_42deg_Heat_P Parameter: Tissue Value: Aerial
  misc_feature: MA Experiment ID: 20000179 Result: Up-regulated in Transcription
  misc_feature: MA Experiment 20000179 PARAMETER Experiment Name: At_Germinating_Seeds_P Parameter: Age (hr) Value: 6 vs. 0
  misc_feature: MA Experiment 20000179 PARAMETER Experiment Name: At_Germinating_Seeds_P Parameter: Tissue Value: Germinating Seeds
  misc_feature: MA Experiment ID: 20000182 Result: Down-regulated in Transcription
  misc_feature: MA Experiment 20000182 PARAMETER Experiment Name: At_2mM_SA_P Parameter: Age (day) Value: 14
  misc_feature: MA Experiment 20000182 PARAMETER Experiment Name: At_2mM_SA_P Parameter: Organism Value: A. thaliana
  misc_feature: MA Experiment 20000182 PARAMETER Experiment Name: At_2mM_SA_P Parameter: Plant Line Value: WS
  misc_feature: MA Experiment 20000182 PARAMETER Experiment Name: At_2mM_SA_P Parameter: Timepoint (hr) Value: 6
  misc_feature: MA Experiment 20000182 PARAMETER Experiment Name: At_2mM_SA_P Parameter: Tissue Value: Aerial
  misc_feature: MA Experiment 20000182 PARAMETER Experiment Name: At_2mM_SA_P Parameter: Treatment Value: 2mM SA vs. No Treatment
  misc_feature: MA Experiment ID: 20000184 Result: Down-regulated in Transcription
  misc_feature: MA Experiment 20000184 PARAMETER Experiment Name: At_Shoots__P Parameter: Age (day) Value: 7
  misc_feature: MA Experiment 20000184 PARAMETER Experiment Name: At_Shoots__P Parameter: Tissue Value: Shoots vs. Whole Plant
  misc_feature: MA Experiment ID: 20000185 Result: Down-regulated in Transcription
  misc_feature: MA Experiment 20000185 PARAMETER Experiment Name: At_Roots__P Parameter: Age (day) Value: 7 vs. 21
  misc_feature: MA Experiment 20000185 PARAMETER Experiment Name: At_Roots__P Parameter: Organism Value: A. thaliana
  misc_feature: MA Experiment 20000185 PARAMETER Experiment Name: At_Roots__P Parameter: Tissue Value: Roots vs. Whole Plant
  misc_feature: MA Experiment ID: 20000224 Result: Up-regulated in Transcription
  misc_feature: MA Experiment ID: 20000437 Result: Up-regulated in Transcription
  misc_feature: MA Experiment 20000437 PARAMETER Experiment Name: At_Drought_P Parameter: Age (day) Value: 8
  misc_feature: MA Experiment 20000437 PARAMETER Experiment Name: At_Drought_P Parameter: Organism Value: A. thaliana
  misc_feature: MA Experiment 20000437 PARAMETER Experiment Name: At_Drought_P Parameter: Plant Line Value: WS
  misc_feature: MA Experiment 20000437 PARAMETER Experiment Name: At_Drought_P Parameter: Timepoint (hr) Value: 24
  misc_feature: MA Experiment 20000437 PARAMETER Experiment Name: At_Drought_P Parameter: Tissue Value: Whole Plant
  misc_feature: MA Experiment 20000437 PARAMETER Experiment Name: At_Drought_P Parameter: Treatment Value: Drought vs. No Drought
  misc_feature: MA Experiment ID: 20000438 Result: Down-regulated in Transcription
  misc_feature: MA Experiment 20000438 PARAMETER Experiment Name: At_Shoots__P Parameter: Age (day) Value: 14
  misc_feature: MA Experiment 20000438 PARAMETER Experiment Name: At_Shoots__P Parameter: Tissue Value: Shoots vs. Whole Plant
  misc_feature: MA Experiment ID: 20000439 Result: Down-regulated in Transcription
  misc_feature: MA Experiment 20000439 PARAMETER Experiment Name: At_Roots__P Parameter: Age (day) Value: 14 vs. 21
  misc_feature: MA Experiment 20000439 PARAMETER Experiment Name: At_Roots__P Parameter: Organism Value: A. thaliana
  misc_feature: MA Experiment 20000439 PARAMETER Experiment Name: At_Roots__P Parameter: Tissue Value: Roots vs. Whole Plant
  misc_feature: MA Experiment ID: 20000443 Result: Down-regulated in Transcription
  misc_feature: MA Experiment 20000443 PARAMETER Experiment Name: At_1uM_BR-BRZ__P Parameter: Tissue Value: Shoot Apices
  misc_feature: MA Experiment 20000443 PARAMETER Experiment Name: At_1uM_BR-BRZ__P Parameter: Treatment Value: 1uM BRZ vs. No Treatment
  misc_feature: MA Experiment ID: 20000452 Result: Up-regulated in Transcription
  misc_feature: MA Experiment 20000452 PARAMETER Experiment Name: At_CS6879_Shoots-Roots_P Parameter: Age (day) Value: 14
  misc_feature: MA Experiment 20000452 PARAMETER Experiment Name: At_CS6879_Shoots-Roots_P Parameter: Organism Value: A. thaliana
  misc_feature: MA Experiment 20000452 PARAMETER Experiment Name: At_CS6879_Shoots-Roots_P Parameter: Plant Line Value: CS6879 vs. WS
  misc_feature: MA Experiment 20000452 PARAMETER Experiment Name: At_CS6879_Shoots-Roots_P Parameter: Tissue Value: Shoots
  misc_feature: MA Experiment ID: 20000709 Result: Down-regulated in Transcription
  misc_feature: MA Experiment 20000709 PARAMETER Experiment Name: At_15mM_NH4NO3_L-to-H_P Parameter: Age (hr) Value: 14
  misc_feature: MA Experiment 20000709 PARAMETER Experiment Name: At_15mM_NH4NO3_L-to-H_P Parameter: Organism Value: A. thaliana
  misc_feature: MA Experiment 20000709 PARAMETER Experiment Name: At_15mM_NH4NO3_L-to-H_P Parameter: Plant Line Value: WS
  misc_feature: MA Experiment 20000709 PARAMETER Experiment Name: At_15mM_NH4NO3_L-to-H_P Parameter: Timepoint (hr) Value: 4
  misc_feature: MA Experiment 20000709 PARAMETER Experiment Name: At_15mM_NH4NO3_L-to-H_P Parameter: Tissue Value: Aerial
  misc_feature: MA Experiment 20000709 PARAMETER Experiment Name: At_15mM_NH4NO3_L-to-H_P Parameter: Treatment Value: 15mM NH4NO3 vs. 30mM Mannitol
  misc_feature: MA Experiment ID: 20000794 Result: Down-regulated in Transcription
  misc_feature: MA Experiment 20000794 PARAMETER Experiment Name: At_Petals_P Parameter: Age (day) Value: 23-25 days
  misc_feature: MA Experiment 20000794 PARAMETER Experiment Name: At_Petals_P Parameter: Plant Line Value: WS
  misc_feature: MA Experiment 20000794 PARAMETER Experiment Name: At_Petals_P Parameter: Tissue Value: Petals vs. Whole plant
  misc_feature: MA Experiment ID: 20001247 Result: Down-regulated in Transcription
  misc_feature: MA Experiment 20001247 PARAMETER Experiment Name: At_Far-red-induction_P Parameter: Age (day) Value: 7
  misc_feature: MA Experiment 20001247 PARAMETER Experiment Name: At_Far-red-induction_P Parameter: Light Value: Far-red vs. White
  misc_feature: MA Experiment 20001247 PARAMETER Experiment Name: At_Far-red-induction_P Parameter: Organism Value: A. thaliana
  misc_feature: MA Experiment 20001247 PARAMETER Experiment Name: At_Far-red-induction_P Parameter: Plant Line Value: Columbia
  misc_feature: MA Experiment 20001247 PARAMETER Experiment Name: At_Far-red-induction_P Parameter: Timepoint (hr) Value: 1
  misc_feature: MA Experiment 20001247 PARAMETER Experiment Name: At_Far-red-induction_P Parameter: Tissue Value: Whole Plant
  misc_feature: MA Experiment ID: 20001451 Result: Down-regulated in Transcription
  misc_feature: MA Experiment 20001451 PARAMETER Experiment Name: At_Far-red-induction_P Parameter: Age (day) Value: 7
  misc_feature: MA Experiment 20001451 PARAMETER Experiment Name: At_Far-red-induction_P Parameter: Light Value: Far-red vs. White
  misc_feature: MA Experiment 20001451 PARAMETER Experiment Name: At_Far-red-induction_P Parameter: Organism Value: A. thaliana
  misc_feature: MA Experiment 20001451 PARAMETER Experiment Name: At_Far-red-induction_P Parameter: Plant Line Value: Columbia
  misc_feature: MA Experiment 20001451 PARAMETER Experiment Name: At_Far-red-induction_P Parameter: Timepoint (hr) Value: 24
  misc_feature: MA Experiment 20001451 PARAMETER Experiment Name: At_Far-red-induction_P Parameter: Tissue Value: Whole Plant
  misc_feature: MA Experiment ID: 20001556 Result: Up-regulated in Transcription
  misc_feature: MA Experiment 20001556 PARAMETER Experiment Name: At_Drought_Soil_Dry_P Parameter: Age (day) Value: 26
  misc_feature: MA Experiment 20001556 PARAMETER Experiment Name: At_Drought_Soil_Dry_P Parameter: Organism Value: A. thaliana
  misc_feature: MA Experiment 20001556 PARAMETER Experiment Name: At_Drought_Soil_Dry_P Parameter: Plant Line Value: WS
  misc_feature: MA Experiment 20001556 PARAMETER Experiment Name: At_Drought_Soil_Dry_P Parameter: Post Timepoint (hr) Value: None
  misc_feature: MA Experiment 20001556 PARAMETER Experiment Name: At_Drought_Soil_Dry_P Parameter: Post-Treatment Value: None
  misc_feature: MA Experiment 20001556 PARAMETER Experiment Name: At_Drought_Soil_Dry_P Parameter: Timepoint (day) Value: 12
  misc_feature: MA Experiment 20001556 PARAMETER Experiment Name: At_Drought_Soil_Dry_P Parameter: Treatment Value: Drought vs. No Drought
  misc_feature: MA Experiment ID: 20001558 Result: Down-regulated in Transcription
  misc_feature: MA Experiment 20001558 PARAMETER Experiment Name: At_Drought_Soil_Dry_P Parameter: Age (day) Value: 27
  misc_feature: MA Experiment 20001558 PARAMETER Experiment Name: At_Drought_Soil_Dry_P Parameter: Organism Value: A. thaliana
  misc_feature: MA Experiment 20001558 PARAMETER Experiment Name: At_Drought_Soil_Dry_P Parameter: Plant Line Value: WS
  misc_feature: MA Experiment 20001558 PARAMETER Experiment Name: At_Drought_Soil_Dry_P Parameter: Post Timepoint (hr) Value: 6
  misc_feature: MA Experiment 20001558 PARAMETER Experiment Name: At_Drought_Soil_Dry_P Parameter: Post-Treatment Value: Re-Water vs. No Drought
  misc_feature: MA Experiment 20001558 PARAMETER Experiment Name: At_Drought_Soil_Dry_P Parameter: Timepoint (day) Value: 13
  misc_feature: MA Experiment 20001558 PARAMETER Experiment Name: At_Drought_Soil_Dry_P Parameter: Treatment Value: Drought vs. No Drought
  misc_feature: MA Experiment ID: 20001559 Result: Up-regulated in Transcription
  misc_feature: MA Experiment 20001559 PARAMETER Experiment Name: At_Drought_Soil_Dry_P Parameter: Age (day) Value: 28
  misc_feature: MA Experiment 20001559 PARAMETER Experiment Name: At_Drought_Soil_Dry_P Parameter: Organism Value: A. thaliana
  misc_feature: MA Experiment 20001559 PARAMETER Experiment Name: At_Drought_Soil_Dry_P Parameter: Plant Line Value: WS
  misc_feature: MA Experiment 20001559 PARAMETER Experiment Name: At_Drought_Soil_Dry_P Parameter: Post Timepoint (hr) Value: 29
  misc_feature: MA Experiment 20001559 PARAMETER Experiment Name: At_Drought_Soil_Dry_P Parameter: Post-Treatment Value: Re-Water vs. No Drought
  misc_feature: MA Experiment 20001559 PARAMETER Experiment Name: At_Drought_Soil_Dry_P Parameter: Timepoint (day) Value: 14
  misc_feature: MA Experiment 20001559 PARAMETER Experiment Name: At_Drought_Soil_Dry_P Parameter: Treatment Value: Drought vs. No Drought
  misc_feature: MA Experiment ID: 20001757 Result: Down-regulated in Transcription
  misc_feature: MA Experiment 20001757 PARAMETER Experiment Name: At_50mM_NH4NO3_L-to-H_P Parameter: Timepoint (hr) Value: 6
  misc_feature: MA Experiment 20001757 PARAMETER Experiment Name: At_50mM_NH4NO3_L-to-H_P Parameter: Tissue Value: Leaf
  misc_feature: MA Experiment 20001757 PARAMETER Experiment Name: At_50mM_NH4NO3_L-to-H_P Parameter: Treatment Value: 50mM NH4NO3 vs 100mM Mannitol
  misc_feature: MA Experiment ID: 20001905 Result: Down-regulated in Transcription
  misc_feature: MA Experiment 20001905 PARAMETER Experiment Name: At_Drought_Reproduction_P Parameter: Age (day) Value: 40
  misc_feature: MA Experiment 20001905 PARAMETER Experiment Name: At_Drought_Reproduction_P Parameter: Organism Value: A. thaliana
  misc_feature: MA Experiment 20001905 PARAMETER Experiment Name: At_Drought_Reproduction_P Parameter: Plant Line Value: WS
  misc_feature: MA Experiment 20001905 PARAMETER Experiment Name: At_Drought_Reproduction_P Parameter: Timepoint (day) Value: 10
  misc_feature: MA Experiment 20001905 PARAMETER Experiment Name: At_Drought_Reproduction_P Parameter: Tissue Value: Rosettes
  misc_feature: MA Experiment 20001905 PARAMETER Experiment Name: At_Drought_Reproduction_P Parameter: Treatment Value: Drought vs. No Drought
aacaaacatttttggacatgaattgaaaattattataattaccagattttttatctatcgtcgaacttgggactgagaaagtagcagcttcgtttgcttcctctgatatttttctacactctctgtctctctctaaagatgaattgtcttcagaatcttcccagatgttcagtctcacctctgctgggattcgggtgcattcaaagagatcattcttcttcttcttcttctttgaagatgctaatatcgcctccgatcaaagccaatgatccaaaatctcgacttgttttacatgcagtatcagagtcaaaatccagctcagagatgagtggtgttgcaaaggatgaagagaaatctgatgaatatagccaagacatgactcaagctatgggtgctgttctaacttacaggcacgagttaggaatgaactacaactttattcgtccagatctaattgttggatcctgcttacagacccctgaagatgttgacaagcttcgtaaaattggagttaaaaccatattttgcttgcaacaagatccagacctggaatattttggagtagacataagcagcatccaagcctatgctaagaaatatagtgatattcagcatattcgctgtgaaattagagactttgatgcatttgatttgagaatgcgtcttccagccgtggttggtactctttacaaagctgttaagcgaaatggaggagttacatatgtgcactgcactgctggaatgggaagggctcctgctgttgcgttgacatacatgttctgggtgcaaggctataagcttatggaagctcataaattacttatgagcaaaaggtcgtgctttccgaagctggatgctatcagaaatgcaacaattgatattcttacaggactcaagaggaagactgttactctgacactgaaagataaggggttctccagagtagaaatttctggccttgacattggatggggacagaggatacctctaacactggacaagggaacaggattctggatcctaaagagagaactgcctgaaggacagtttgaatataaatacatcatagatggtgaatggacacacaatgaggccgaaccgtttataggacctaacaaagacggccataccaacaattacgctaaagtagtggacgatccaacaagtgtggatggtacaactcgggagagactatcgagcgaagaccctgagctgttggaggaagaacgctcgaaactaatccagttcttggagacttgttctgaggcagaagtttgagagttgagagcatccgactagactatgtgaatgtacaacttactagtaacaataaaatgcttcatgttagtaatacatacagttacgcttatagcagcaaaagaaaaaaacatgaagttagtagtactatgttcaagtataatatatagtttaaaatctttgttttttctt

SEQ ID NO: 40524 - protein, 379 aa, Arabidopsis thaliana
  peptide (1)..(379): Ceres Seq. ID no. 13488688
  misc_feature (97)..(247): Pfam Name: Dual specificity phosphatase, catalytic domain Pfam Description: Dual specificity phosphatase, catalytic domain
  misc_feature (40)..(87): Homolog of NCBI NO: 34902388 NR Description: Unknown protein [Oryza sativa (japonica
  misc_feature (301)..(372): Homolog of NCBI NO: 34902388 NR Description: Unknown protein [Oryza sativa (japonica
  misc_feature (210)..(300): Homolog of NCBI NO: 34902388 NR Description: Unknown protein [Oryza sativa (japonica
  misc_feature (139)..(337): Homolog of NCBI NO: 11544661 NR Description: PTPKIS1 (truncated form) [Arabidopsis thaliana]
  misc_feature (1)..(378): Homolog of NCBI NO: 14970762 NR Description: protein tyrosine phosphatase [Lycopersicon
  misc_feature (281)..(379): Homolog of NCBI NO: 11288831 NR Description: hypothetical protein F4F15.290 - Arabidopsis
  misc_feature (1)..(265): Homolog of NCBI NO: 11288831 NR Description: hypothetical protein F4F15.290 - Arabidopsis
  misc_feature (1)..(379): Homolog of NCBI NO: 16612246 NR Description: AT3g52180/F4F15_290 [Arabidopsis thaliana]
  misc_feature (1)..(379): Homolog of NCBI NO: 21536905 NR Description: unknown [Arabidopsis thaliana]
  misc_feature (1)..(379): Homolog of NCBI NO: 18409505 NR Description: expressed protein [Arabidopsis thaliana]
MNCLQNLPRCSVSPLLGFGCIQRDHSSSSSSLKMLISPPIKANDPKSRLVLHAVSESKSSSEMSGVAKDEEKSDEYSQDMTQAMGAVLTYRHELGMNYNFIRPDLIVGSCLQTPEDVDKLRKIGVKTIFCLQQDPDLEYFGVDISSIQAYAKKYSDIQHIRCEIRDFDAFDLRMRLPAVVGTLYKAVKRNGGVTYVHCTAGMGRAPAVALTYMFWVQGYKLMEAHKLLMSKRSCFPKLDAIRNATIDILTGLKRKTVTLTLKDKGFSRVEISGLDIGWGQRIPLTLDKGTGFWILKRELPEGQFEYKYIIDGEWTHNEAEPFIGPNKDGHTNNYAKVVDDPTSVDGTTRERLSSEDPELLEEERSKLIQFLETCSEAEV

SEQ ID NO: 40525 - protein, 346 aa, Arabidopsis thaliana
  peptide (1)..(346): Ceres Seq. ID no. 13488689
  misc_feature (64)..(214): Pfam Name: Dual specificity phosphatase, catalytic domain Pfam Description: Dual specificity phosphatase, catalytic domain
  misc_feature (7)..(54): Homolog of NCBI NO: 34902388 NR Description: Unknown protein [Oryza sativa (japonica
  misc_feature (268)..(339): Homolog of NCBI NO: 34902388 NR Description: Unknown protein [Oryza sativa (japonica
  misc_feature (177)..(267): Homolog of NCBI NO: 34902388 NR Description: Unknown protein [Oryza sativa (japonica
  misc_feature (106)..(304): Homolog of NCBI NO: 11544661 NR Description: PTPKIS1 (truncated form) [Arabidopsis thaliana]
  misc_feature (1)..(345): Homolog of NCBI NO: 14970762 NR Description: protein tyrosine phosphatase [Lycopersicon
  misc_feature (248)..(346): Homolog of NCBI NO: 11288831 NR Description: hypothetical protein F4F15.290 - Arabidopsis
  misc_feature (1)..(232): Homolog of NCBI NO: 11288831 NR Description: hypothetical protein F4F15.290 - Arabidopsis
  misc_feature (1)..(346): Homolog of NCBI NO: 16612246 NR Description: AT3g52180/F4F15_290 [Arabidopsis thaliana]
  misc_feature (1)..(346): Homolog of NCBI NO: 21536905 NR Description: unknown [Arabidopsis thaliana]
  misc_feature (1)..(346): Homolog of NCBI NO: 18409505 NR Description: expressed protein [Arabidopsis thaliana]
MLISPPIKANDPKSRLVLHAVSESKSSSEMSGVAKDEEKSDEYSQDMTQAMGAVLTYRHELGMNYNFIRPDLIVGSCLQTPEDVDKLRKIGVKTIFCLQQDPDLEYFGVDISSIQAYAKKYSDIQHIRCEIRDFDAFDLRMRLPAVVGTLYKAVKRNGGVTYVHCTAGMGRAPAVALTYMFWVQGYKLMEAHKLLMSKRSCFPKLDAIRNATIDILTGLKRKTVTLTLKDKGFSRVEISGLDIGWGQRIPLTLDKGTGFWILKRELPEGQFEYKYIIDGEWTHNEAEPFIGPNKDGHTNNYAKVVDDPTSVDGTTRERLSSEDPELLEEERSKLIQFLETCSEAEV

SEQ ID NO: 40526 - protein, 317 aa, Arabidopsis thaliana
  peptide (1)..(317): Ceres Seq. ID no. 13488690
  misc_feature (35)..(185): Pfam Name: Dual specificity phosphatase, catalytic domain Pfam Description: Dual specificity phosphatase, catalytic domain
  misc_feature (1)..(25): Homolog of NCBI NO: 34902388 NR Description: Unknown protein [Oryza sativa (japonica
  misc_feature (239)..(310): Homolog of NCBI NO: 34902388 NR Description: Unknown protein [Oryza sativa (japonica
  misc_feature (148)..(238): Homolog of NCBI NO: 34902388 NR Description: Unknown protein [Oryza sativa (japonica
  misc_feature (77)..(275): Homolog of NCBI NO: 11544661 NR Description: PTPKIS1 (truncated form) [Arabidopsis thaliana]
  misc_feature (1)..(316): Homolog of NCBI NO: 14970762 NR Description: protein tyrosine phosphatase [Lycopersicon
  misc_feature (219)..(317): Homolog of NCBI NO: 11288831 NR Description: hypothetical protein F4F15.290 - Arabidopsis
  misc_feature (1)..(203): Homolog of NCBI NO: 11288831 NR Description: hypothetical protein F4F15.290 - Arabidopsis
  misc_feature (1)..(317): Homolog of NCBI NO: 16612246 NR Description: AT3g52180/F4F15_290 [Arabidopsis thaliana]
  misc_feature (1)..(317): Homolog of NCBI NO: 21536905 NR Description: unknown [Arabidopsis thaliana]
  misc_feature (1)..(317): Homolog of NCBI NO: 18409505 NR Description: expressed protein [Arabidopsis thaliana]
MSGVAKDEEKSDEYSQDMTQAMGAVLTYRHELGMNYNFIRPDLIVGSCLQTPEDVDKLRKIGVKTIFCLQQDPDLEYFGVDISSIQAYAKKYSDIQHIRCEIRDFDAFDLRMRLPAVVGTLYKAVKRNGGVTYVHCTAGMGRAPAVALTYMFWVQGYKLMEAHKLLMSKRSCFPKLDAIRNATIDILTGLKRKTVTLTLKDKGFSRVEISGLDIGWGQRIPLTLDKGTGFWILKRELPEGQFEYKYIIDGEWTHNEAEPFIGPNKDGHTNNYAKVVDDPTSVDGTTRERLSSEDPELLEEERSKLIQFLETCSEAEV

SEQ ID NO: 40527 - DNA, 1882 bp, Arabidopsis thaliana
  misc_feature (1)..(1882): Ceres Seq. ID no. 13497318
  misc_feature: MA Experiment ID: 108434 Result: Down-regulated in Transcription
  misc_feature: MA Experiment 108434 PARAMETER Experiment Name: At_Root_Tips_cDNA_P Parameter: Tissue Value: Root Tips
  misc_feature: MA Experiment ID: 108435 Result: Down-regulated in Transcription
  misc_feature: MA Experiment 108435 PARAMETER Experiment Name: At_stm_Mutants_cDNA_P Parameter: Plant Line Value: wt Landsburg vs stm
  misc_feature: MA Experiment 108435 PARAMETER Experiment Name: At_stm_Mutants_cDNA_P Parameter: Tissue Value: Shoot Apical Meristem Region
  misc_feature: MA Experiment ID: 108461 Result: Up-regulated in Transcription
  misc_feature: MA Experiment 108461 PARAMETER Experiment Name: At_Germinating_Seeds_cDNA_P Parameter: Age (day) Value: 1 vs. 0
  misc_feature: MA Experiment 108461 PARAMETER Experiment Name: At_Germinating_Seeds_cDNA_P Parameter: Tissue Value: Germinating Seeds
  misc_feature: MA Experiment ID: 108573 Result: Up-regulated in Transcription
  misc_feature: MA Experiment 108573 PARAMETER Experiment Name: At_Drought_cDNA_P Parameter: Timepoint (hr) Value: 6
  misc_feature: MA Experiment 108573 PARAMETER Experiment Name: At_Drought_cDNA_P Parameter: Tissue Value: Aerial
  misc_feature: MA Experiment 108573 PARAMETER Experiment Name: At_Drought_cDNA_P Parameter: Treatment Value: Drought vs. No Drought
  misc_feature: MA Experiment ID: 108577 Result: Down-regulated in Transcription
  misc_feature: MA Experiment 108577 PARAMETER Experiment Name: At_42deg_Heat_cDNA_P Parameter: Temperature (deg C) Value: 42 vs. 22
  misc_feature: MA Experiment 108577 PARAMETER Experiment Name: At_42deg_Heat_cDNA_P Parameter: Timepoint (hr) Value: 6
  misc_feature: MA Experiment 108577 PARAMETER Experiment Name: At_42deg_Heat_cDNA_P Parameter: Tissue Value: Aerial
  misc_feature: MA Experiment ID: 108585 Result: Down-regulated in Transcription
  misc_feature: MA Experiment 108585 PARAMETER Experiment Name: At_5mM_NaNP_cDNA_P Parameter: Timepoint (hr) Value: 6
  misc_feature: MA Experiment 108585 PARAMETER Experiment Name: At_5mM_NaNP_cDNA_P Parameter: Tissue Value: Aerial
  misc_feature: MA Experiment 108585 PARAMETER Experiment Name: At_5mM_NaNP_cDNA_P Parameter: Treatment Value: null
  misc_feature: MA Experiment ID: 108668 Result: Down-regulated in Transcription
  misc_feature: MA Experiment 108668 PARAMETER Experiment Name: At_2mM_SA_cDNA_P Parameter: Plant Line Value: WS
  misc_feature: MA Experiment 108668 PARAMETER Experiment Name: At_2mM_SA_cDNA_P Parameter: Timepoint (hr) Value: 6
  misc_feature: MA Experiment 108668 PARAMETER Experiment Name: At_2mM_SA_cDNA_P Parameter: Treatment Value: 2mM SA vs. No Treatment
  misc_feature: MA Experiment ID: 20000069 Result: Up-regulated in Transcription
  misc_feature: MA Experiment 20000069 PARAMETER Experiment Name: At_100uM_ABA_Mutants_cDNA_P Parameter: Plant Line Value: CS23
  misc_feature: MA Experiment 20000069 PARAMETER Experiment Name: At_100uM_ABA_Mutants_cDNA_P Parameter: Timepoint (hr) Value: 6
  misc_feature: MA Experiment 20000069 PARAMETER Experiment Name: At_100uM_ABA_Mutants_cDNA_P Parameter: Tissue Value: Aerial
  misc_feature: MA Experiment 20000069 PARAMETER Experiment Name: At_100uM_ABA_Mutants_cDNA_P Parameter: Treatment Value: 100uM ABA vs. No Treatment
  misc_feature: MA Experiment ID: 20000070 Result: Up-regulated in Transcription
  misc_feature: MA Experiment 20000070 PARAMETER Experiment Name: At_100uM_ABA_Mutants_cDNA_P Parameter: Plant Line Value: CS24
  misc_feature: MA Experiment 20000070 PARAMETER Experiment Name: At_100uM_ABA_Mutants_cDNA_P Parameter: Timepoint (hr) Value: 6
  misc_feature: MA Experiment 20000070 PARAMETER Experiment Name: At_100uM_ABA_Mutants_cDNA_P Parameter: Tissue Value: Aerial
  misc_feature: MA Experiment 20000070 PARAMETER Experiment Name: At_100uM_ABA_Mutants_cDNA_P Parameter: Treatment Value: 100uM ABA vs. No Treatment
  misc_feature: MA Experiment ID: 20000071 Result: Up-regulated in Transcription
  misc_feature: MA Experiment 20000071 PARAMETER Experiment Name: At_100uM_ABA_Mutants_cDNA_P Parameter: Plant Line Value: CS8104
  misc_feature: MA Experiment 20000071 PARAMETER Experiment Name: At_100uM_ABA_Mutants_cDNA_P Parameter: Timepoint (hr) Value: 6
  misc_feature: MA Experiment 20000071 PARAMETER Experiment Name: At_100uM_ABA_Mutants_cDNA_P Parameter: Tissue Value: Aerial
  misc_feature: MA Experiment 20000071 PARAMETER Experiment Name: At_100uM_ABA_Mutants_cDNA_P Parameter: Treatment Value: 100uM ABA vs. No Treatment
  misc_feature: MA Experiment ID: 20000072 Result: Up-regulated in Transcription
  misc_feature: MA Experiment 20000072 PARAMETER Experiment Name: At_100uM_ABA_Mutants_cDNA_P Parameter: Plant Line Value: CS8105
  misc_feature: MA Experiment 20000072 PARAMETER Experiment Name: At_100uM_ABA_Mutants_cDNA_P Parameter: Timepoint (hr) Value: 6
  misc_feature: MA Experiment 20000072 PARAMETER Experiment Name: At_100uM_ABA_Mutants_cDNA_P Parameter: Tissue Value: Aerial
  misc_feature: MA Experiment 20000072 PARAMETER Experiment Name: At_100uM_ABA_Mutants_cDNA_P Parameter: Treatment Value: 100uM ABA vs. No Treatment
  misc_feature: MA Experiment ID: 20000086 Result: Up-regulated in Transcription
  misc_feature: MA Experiment 20000086 PARAMETER Experiment Name: At_100uM_ABA_Mutants_cDNA_P Parameter: Plant Line Value: CS22
  misc_feature: MA Experiment 20000086 PARAMETER Experiment Name: At_100uM_ABA_Mutants_cDNA_P Parameter: Timepoint (hr) Value: 6
  misc_feature: MA Experiment 20000086 PARAMETER Experiment Name: At_100uM_ABA_Mutants_cDNA_P Parameter: Tissue Value: Aerial
  misc_feature: MA Experiment 20000086 PARAMETER Experiment Name: At_100uM_ABA_Mutants_cDNA_P Parameter: Treatment Value: 100uM ABA vs. No Treatment
  misc_feature: MA Experiment ID: 20000087 Result: Up-regulated in Transcription
  misc_feature: MA Experiment 20000087 PARAMETER Experiment Name: At_100uM_ABA_Mutants_cDNA_P Parameter: Plant Line Value: WS
  misc_feature: MA Experiment 20000087 PARAMETER Experiment Name: At_100uM_ABA_Mutants_cDNA_P Parameter: Timepoint (hr) Value: 6
  misc_feature: MA Experiment 20000087 PARAMETER Experiment Name: At_100uM_ABA_Mutants_cDNA_P Parameter: Tissue Value: Aerial
  misc_feature: MA Experiment 20000087 PARAMETER Experiment Name: At_100uM_ABA_Mutants_cDNA_P Parameter: Treatment Value: 100uM ABA vs. No Treatment
  misc_feature: MA Experiment ID: 20000088 Result: Up-regulated in Transcription
  misc_feature: MA Experiment 20000088 PARAMETER Experiment Name: At_100uM_ABA_Mutants_cDNA_P Parameter: Plant Line Value: Landsberg
  misc_feature: MA Experiment 20000088 PARAMETER Experiment Name: At_100uM_ABA_Mutants_cDNA_P Parameter: Timepoint (hr) Value: 6
  misc_feature: MA Experiment 20000088 PARAMETER Experiment Name: At_100uM_ABA_Mutants_cDNA_P Parameter: Tissue Value: Aerial
  misc_feature: MA Experiment 20000088 PARAMETER Experiment Name: At_100uM_ABA_Mutants_cDNA_P Parameter: Treatment Value: 100uM ABA vs. No Treatment
  misc_feature: MA Experiment ID: 20000089 Result: Up-regulated in Transcription
  misc_feature: MA Experiment ID: 20000090 Result: Up-regulated in Transcription
  misc_feature: MA Experiment ID: 20000111 Result: Down-regulated in Transcription
  misc_feature: MA Experiment 20000111 PARAMETER Experiment Name: At_42deg_Heat_cDNA_P Parameter: Temperature (deg C) Value: 42 vs. 22
  misc_feature: MA Experiment 20000111 PARAMETER Experiment Name: At_42deg_Heat_cDNA_P Parameter: Timepoint (hr) Value: 6
  misc_feature: MA Experiment 20000111 PARAMETER Experiment Name: At_42deg_Heat_cDNA_P Parameter: Tissue Value: Aerial
  misc_feature: MA Experiment ID: 20000113 Result: Down-regulated in Transcription
  misc_feature: MA Experiment 20000113 PARAMETER Experiment Name: At_42deg_Heat_cDNA_P Parameter: Temperature (deg C) Value: 42 vs. 22
  misc_feature: MA Experiment 20000113 PARAMETER Experiment Name: At_42deg_Heat_cDNA_P Parameter: Timepoint (hr) Value: 8
  misc_feature: MA Experiment 20000113 PARAMETER Experiment Name: At_42deg_Heat_cDNA_P Parameter: Tissue Value: Aerial
  misc_feature: MA Experiment ID: 20000117 Result: Up-regulated in Transcription
  misc_feature: MA Experiment 20000117 PARAMETER Experiment Name: At_100uM_ABA_Mutants_cDNA_P Parameter: Plant Line Value: Columbia
  misc_feature: MA Experiment 20000117 PARAMETER Experiment Name: At_100uM_ABA_Mutants_cDNA_P Parameter: Timepoint (hr) Value: 6
  misc_feature: MA Experiment 20000117 PARAMETER Experiment Name: At_100uM_ABA_Mutants_cDNA_P Parameter: Tissue Value: Aerial
  misc_feature: MA Experiment 20000117 PARAMETER Experiment Name: At_100uM_ABA_Mutants_cDNA_P Parameter: Treatment Value: 100uM ABA vs. No Treatment
  misc_feature: MA Experiment ID: 20000173 Result: Down-regulated in Transcription
  misc_feature: MA Experiment 20000173 PARAMETER Experiment Name: At_42deg_Heat_P Parameter: Age (day) Value: 14
  misc_feature: MA Experiment 20000173 PARAMETER Experiment Name: At_42deg_Heat_P Parameter: Organism Value: A. thaliana
  misc_feature: MA Experiment 20000173 PARAMETER Experiment Name: At_42deg_Heat_P Parameter: Plant Line Value: WS
  misc_feature: MA Experiment 20000173 PARAMETER Experiment Name: At_42deg_Heat_P Parameter: Temperature (deg C) Value: 42 vs. 22
  misc_feature: MA Experiment 20000173 PARAMETER Experiment Name: At_42deg_Heat_P Parameter: Timepoint (hr) Value: 6
  misc_feature: MA Experiment 20000173 PARAMETER Experiment Name: At_42deg_Heat_P Parameter: Tissue Value: Aerial
  misc_feature: MA Experiment ID: 20000179 Result: Up-regulated in Transcription
  misc_feature: MA Experiment 20000179 PARAMETER Experiment Name: At_Germinating_Seeds_P Parameter: Age (hr) Value: 6 vs. 0
  misc_feature: MA Experiment 20000179 PARAMETER Experiment Name: At_Germinating_Seeds_P Parameter: Tissue Value: Germinating Seeds
  misc_feature: MA Experiment ID: 20000182 Result: Down-regulated in Transcription
  misc_feature: MA Experiment 20000182 PARAMETER Experiment Name: At_2mM_SA_P Parameter: Age (day) Value: 14
  misc_feature: MA Experiment 20000182 PARAMETER Experiment Name: At_2mM_SA_P Parameter: Organism Value: A. thaliana
  misc_feature: MA Experiment 20000182 PARAMETER Experiment Name: At_2mM_SA_P Parameter: Plant Line Value: WS
  misc_feature: MA Experiment 20000182 PARAMETER Experiment Name: At_2mM_SA_P Parameter: Timepoint (hr) Value: 6
  misc_feature: MA Experiment 20000182 PARAMETER Experiment Name: At_2mM_SA_P Parameter: Tissue Value: Aerial
  misc_feature: MA Experiment 20000182 PARAMETER Experiment Name: At_2mM_SA_P Parameter: Treatment Value: 2mM SA vs. No Treatment
  misc_feature: MA Experiment ID: 20000184 Result: Down-regulated in Transcription
  misc_feature: MA Experiment 20000184 PARAMETER Experiment Name: At_Shoots__P Parameter: Age (day) Value: 7
  misc_feature: MA Experiment 20000184 PARAMETER Experiment Name: At_Shoots__P Parameter: Tissue Value: Shoots vs. Whole Plant
  misc_feature: MA Experiment ID: 20000185 Result: Down-regulated in Transcription
  misc_feature: MA Experiment 20000185 PARAMETER Experiment Name: At_Roots__P Parameter: Age (day) Value: 7 vs. 21
  misc_feature: MA Experiment 20000185 PARAMETER Experiment Name: At_Roots__P Parameter: Organism Value: A. thaliana
  misc_feature: MA Experiment 20000185 PARAMETER Experiment Name: At_Roots__P Parameter: Tissue Value: Roots vs. Whole Plant
  misc_feature: MA Experiment ID: 20000437 Result: Up-regulated in Transcription
  misc_feature: MA Experiment 20000437 PARAMETER Experiment Name: At_Drought_P Parameter: Age (day) Value: 8
  misc_feature: MA Experiment 20000437 PARAMETER Experiment Name: At_Drought_P Parameter: Organism Value: A. thaliana
  misc_feature: MA Experiment 20000437 PARAMETER Experiment Name: At_Drought_P Parameter: Plant Line Value: WS
  misc_feature: MA Experiment 20000437 PARAMETER Experiment Name: At_Drought_P Parameter: Timepoint (hr) Value: 24
  misc_feature: MA Experiment 20000437 PARAMETER Experiment Name: At_Drought_P Parameter: Tissue Value: Whole Plant
  misc_feature: MA Experiment 20000437 PARAMETER Experiment Name: At_Drought_P Parameter: Treatment Value: Drought vs. No Drought
  misc_feature: MA Experiment ID: 20000438 Result: Down-regulated in Transcription
  misc_feature: MA Experiment 20000438 PARAMETER Experiment Name: At_Shoots__P Parameter: Age (day) Value: 14
  misc_feature: MA Experiment 20000438 PARAMETER Experiment Name: At_Shoots__P Parameter: Tissue Value: Shoots vs. Whole Plant
  misc_feature: MA Experiment ID: 20000441 Result: Down-regulated in Transcription
  misc_feature: MA Experiment 20000441 PARAMETER Experiment Name: At_1uM_BR-BRZ__P Parameter: Tissue Value: Shoot Apices
  misc_feature: MA Experiment 20000441 PARAMETER Experiment Name: At_1uM_BR-BRZ__P Parameter: Treatment Value: 1uM BR vs. No Treatment
  misc_feature: MA Experiment ID: 20001247 Result: Down-regulated in Transcription
  misc_feature: MA Experiment 20001247 PARAMETER Experiment Name: At_Far-red-induction_P Parameter: Age (day) Value: 7
  misc_feature: MA Experiment 20001247 PARAMETER Experiment Name: At_Far-red-induction_P Parameter: Light Value: Far-red vs. White
  misc_feature: MA Experiment 20001247 PARAMETER Experiment Name: At_Far-red-induction_P Parameter: Organism Value: A. thaliana
  misc_feature: MA Experiment 20001247 PARAMETER Experiment Name: At_Far-red-induction_P Parameter: Plant Line Value: Columbia
  misc_feature: MA Experiment 20001247 PARAMETER Experiment Name: At_Far-red-induction_P Parameter: Timepoint (hr) Value: 1
  misc_feature: MA Experiment 20001247 PARAMETER Experiment Name: At_Far-red-induction_P Parameter: Tissue Value: Whole Plant
  misc_feature: MA Experiment ID: 20001248 Result: Up-regulated in Transcription
  misc_feature: MA Experiment 20001248 PARAMETER Experiment Name: At_Far-red-induction_P Parameter: Age (day) Value: 7
  misc_feature: MA Experiment 20001248 PARAMETER Experiment Name: At_Far-red-induction_P Parameter: Light Value: Far-red vs. White
  misc_feature: MA Experiment 20001248 PARAMETER Experiment Name: At_Far-red-induction_P Parameter: Organism Value: A. thaliana
  misc_feature: MA Experiment 20001248 PARAMETER Experiment Name: At_Far-red-induction_P Parameter: Plant Line Value: Columbia
  misc_feature: MA Experiment 20001248 PARAMETER Experiment Name: At_Far-red-induction_P Parameter: Timepoint (hr) Value: 4
  misc_feature: MA Experiment 20001248 PARAMETER Experiment Name: At_Far-red-induction_P Parameter: Tissue Value: Whole Plant
  misc_feature: MA Experiment ID: 20001458 Result: Up-regulated in Transcription
  misc_feature: MA Experiment 20001458 PARAMETER Experiment Name: At_50mM_NH4NO3_L-to-H_P Parameter: Age (day) Value: Undefined
  misc_feature: MA Experiment 20001458 PARAMETER Experiment Name: At_50mM_NH4NO3_L-to-H_P Parameter: Organism Value: Undefined
  misc_feature: MA Experiment 20001458 PARAMETER Experiment Name: At_50mM_NH4NO3_L-to-H_P Parameter: Plant Line Value: Undefined
  misc_feature: MA Experiment 20001458 PARAMETER Experiment Name: At_50mM_NH4NO3_L-to-H_P Parameter: Timepoint (hr) Value: 2
  misc_feature: MA Experiment 20001458 PARAMETER Experiment Name: At_50mM_NH4NO3_L-to-H_P Parameter: Tissue Value: Siliques
  misc_feature: MA Experiment 20001458 PARAMETER Experiment Name: At_50mM_NH4NO3_L-to-H_P Parameter: Treatment Value: 50mM NH4NO3 vs. 100mM Manitol
  misc_feature: MA Experiment ID: 20001558 Result: Down-regulated in Transcription
  misc_feature: MA Experiment 20001558 PARAMETER Experiment Name: At_Drought_Soil_Dry_P Parameter: Age (day) Value: 27
  misc_feature: MA Experiment 20001558 PARAMETER Experiment Name: At_Drought_Soil_Dry_P Parameter: Organism Value: A. thaliana
  misc_feature: MA Experiment 20001558 PARAMETER Experiment Name: At_Drought_Soil_Dry_P Parameter: Plant Line Value: WS
  misc_feature: MA Experiment 20001558 PARAMETER Experiment Name: At_Drought_Soil_Dry_P Parameter: Post Timepoint (hr) Value: 6
  misc_feature: MA Experiment 20001558 PARAMETER Experiment Name: At_Drought_Soil_Dry_P Parameter: Post-Treatment Value: Re-Water vs. No Drought
  misc_feature: MA Experiment 20001558 PARAMETER Experiment Name: At_Drought_Soil_Dry_P Parameter: Timepoint (day) Value: 13
  misc_feature: MA Experiment 20001558 PARAMETER Experiment Name: At_Drought_Soil_Dry_P Parameter: Treatment Value: Drought vs. No Drought
  misc_feature: MA Experiment ID: 20001559 Result: Up-regulated in Transcription
  misc_feature: MA Experiment 20001559 PARAMETER Experiment Name: At_Drought_Soil_Dry_P Parameter: Age (day) Value: 28
  misc_feature: MA Experiment 20001559 PARAMETER Experiment Name: At_Drought_Soil_Dry_P Parameter: Organism Value: A. thaliana
  misc_feature: MA Experiment 20001559 PARAMETER Experiment Name: At_Drought_Soil_Dry_P Parameter: Plant Line Value: WS
  misc_feature: MA Experiment 20001559 PARAMETER Experiment Name: At_Drought_Soil_Dry_P Parameter: Post Timepoint (hr) Value: 29
  misc_feature: MA Experiment 20001559 PARAMETER Experiment Name: At_Drought_Soil_Dry_P Parameter: Post-Treatment Value: Re-Water vs. No Drought
  misc_feature: MA Experiment 20001559 PARAMETER Experiment Name: At_Drought_Soil_Dry_P Parameter: Timepoint (day) Value: 14
  misc_feature: MA Experiment 20001559 PARAMETER Experiment Name: At_Drought_Soil_Dry_P Parameter: Treatment Value: Drought vs. No Drought
tggcttctgatctcactagtgttcgtcatctttgttcgattgaagtttgggaagtggtgatggtaataggagcagcagcgcgtgtagccatcggcggttgtcgaaagctcatctcgtcacatacctccctcctcctcgtctcttctcagtgtcgccagatgagtatggacgcacaaagcgtttctgaaaagcttaggagttctggtctattacgaactcaaggtctaattggaggcaagtggcttgactcgtatgacaataagacaatcaaggttaacaatccagcaaccggtgaaattatagctgatgttgcatgtatgggaacaaaagagacaaatgatgctattgcttcttcttatgaagcatttacttcttggagcagattgactgctggagagaggagtaaagttttacggagatggtatgacctcctgattgcacacaaggaagaacttggacaacttataactttggagcaaggaaaaccactcaaggaagccatcggagaggtagcatatggggcaagttttattgagtactatgcggaggaggcaaaacgtgtatatggtgatataattcctccgaatctgtctgatcgccgactgttggttctaaaacagcctgtcggtgttgttggtgcaattaccccttggaacttccccttagccatgattactcggaaggtcggccctgctcttgcttctggatgcacggtggttgttaaaccatctgaacttacgcccctaacagcacttgctgcggctgaacttgcacttcaagctggagttcctccgggggcacttaatgtggtcatgggaaatgctcctgaaattggggatgctttgcttacgagtccacaggtgagaaaaatcacgttcacgggatcaacagcagttgggaagaagttgatggcagctgctgcacctaccgtcaagaaggtttctctagaacttggcggcaacgcaccctctatagtatttgatgatgcagacctggatgtagctgtaaaaggaacgcttgcagcgaaatttaggaatagtggtcagacatgtgtttgtgcgaacagagtacttgtgcaagatggtatctatgataaatttgctgaggccttttctgaagcggttcaaaaattagaagtaggagatgggtttagggatgggacaacccagggtccacttataaatgatgcagcagtgcaaaaggtagagacatttgtacaagatgctgtttctaagggagcaaaaatcatcattggtggcaaaaggcacagtctagggatgactttctatgagcctactgttatccgcgatgtttcggataacatgatcatgtctaaggaggagatttttggacctgtagctccccttattcggttcaaaaccgaggaggacgctatcagaattgctaatgacacaattgcaggacttgctgcttatatattcacaaacagtgtccaaagatcttggcgtgtatttgaagcacttgaatatggacttgtaggggtgaacgaaggactcatatcaacagaggtggctccattcgggggagtgaagcagtctggtcttggaagggaaggatccaagtatggtatggacgaataccttgagatcaaatacgtatgcttgggagatatgaatagacactgatttggtttgtttgaaaagctttagaaattgtaagtttttctcctccactcgtatccttctaataaaagcttactgtggaacataataaggattcggaggatacttcttaagaaataaagatttggtctacgaccaattgttagcatgatttttaagtaataatttggggtttccattttatttatctttgtttacgttatttttttctttgttttacgttaatttttgtaattcgg

SEQ ID NO: 40528 - protein, 547 aa, Arabidopsis thaliana
  peptide (1)..(547): Ceres Seq. ID no. 13497319
  misc_feature (69)..(542): Homolog of NCBI NO: 27479656 NR Description: Orf17 [Photorhabdus luminescens]
  misc_feature (63)..(542): Homolog of NCBI NO: 15803178 NR Description: succinate-semialdehyde dehydrogenase,
  misc_feature (63)..(540): Homolog of NCBI NO: 17223783 NR Description: AttK [Agrobacterium tumefaciens]
  misc_feature (63)..(540): Homolog of NCBI NO: 17938723 NR Description: NAD-dependent succinate aldehyde dehydrogenases
  misc_feature (63)..(540): Homolog of NCBI NO: 16119363 NR Description: AGR_pAT_197p [Agrobacterium tumefaciens]
  misc_feature (63)..(542): Homolog of NCBI NO: 15595462 NR Description: succinate-semialdehyde dehydrogenase
  misc_feature (63)..(542): Homolog of NCBI NO: 16130575 NR Description: succinate-semialdehyde dehydrogenase,
  misc_feature (64)..(542): Homolog of NCBI NO: 23014760 NR Description: hypothetical protein [Magnetospirillum
  misc_feature (55)..(547): Homolog of NCBI NO: 25284177 NR Description: hypothetical protein T8K14.14 [imported] -
  misc_feature (20)..(547): Homolog of NCBI NO: 15219379 NR Description: succinate-semialdehyde dehydrogenase, putative
ASDLTSVRHLCSIEVWEVVMVIGAAARVAIGGCRKLISSHTSLLLVSSQCRQMSMDAQSVSEKLRSSGLLRTQGLIGGKWLDSYDNKTIKVNNPATGEIIADVACMGTKETNDAIASSYEAFTSWSRLTAGERSKVLRRWYDLLIAHKEELGQLITLEQGKPLKEAIGEVAYGASFIEYYAEEAKRVYGDIIPPNLSDRRLLVLKQPVGVVGAITPWNFPLAMITRKVGPALASGCTVVVKPSELTPLTALAAAELALQAGVPPGALNVVMGNAPEIGDALLTSPQVRKITFTGSTAVGKKLMAAAAPTVKKVSLELGGNAPSIVFDDADLDVAVKGTLAAKFRNSGQTCVCANRVLVQDGIYDKFAEAFSEAVQKLEVGDGFRDGTTQGPLINDAAVQKVETFVQDAVSKGAKIIIGGKRHSLGMTFYEPTVIRDVSDNMIMSKEEIFGPVAPLIRFKTEEDAIRIANDTIAGLAAYIFTNSVQRSWRVFEALEYGLVGVNEGLISTEVAPFGGVKQSGLGREGSKYGMDEYLEIKYVCLGDMNRH

SEQ ID NO: 40529 - protein, 528 aa, Arabidopsis thaliana
  peptide (1)..(528): Ceres Seq. ID no. 13497320
  misc_feature (50)..(523): Homolog of NCBI NO: 27479656 NR Description: Orf17 [Photorhabdus luminescens]
  misc_feature (44)..(523): Homolog of NCBI NO: 15803178 NR Description: succinate-semialdehyde dehydrogenase,
  misc_feature (44)..(521): Homolog of NCBI NO: 17223783 NR Description: AttK [Agrobacterium tumefaciens]
  misc_feature (44)..(521): Homolog of NCBI NO: 17938723 NR Description: NAD-dependent succinate aldehyde dehydrogenases
  misc_feature (44)..(521): Homolog of NCBI NO: 16119363 NR Description: AGR_pAT_197p [Agrobacterium tumefaciens]
  misc_feature (44)..(523): Homolog of NCBI NO: 15595462 NR Description: succinate-semialdehyde dehydrogenase
  misc_feature (44)..(523): Homolog of NCBI NO: 16130575 NR Description: succinate-semialdehyde dehydrogenase,
  misc_feature (45)..(523): Homolog of NCBI NO: 23014760 NR Description: hypothetical protein [Magnetospirillum
  misc_feature (36)..(528): Homolog of NCBI NO: 25284177 NR Description: hypothetical protein T8K14.14 [imported] -
  misc_feature (1)..(528): Homolog of NCBI NO: 15219379 NR Description: succinate-semialdehyde dehydrogenase, putative
MVIGAAARVAIGGCRKLISSHTSLLLVSSQCRQMSMDAQSVSEKLRSSGLLRTQGLIGGKWLDSYDNKTIKVNNPATGEIIADVACMGTKETNDAIASSYEAFTSWSRLTAGERSKVLRRWYDLLIAHKEELGQLITLEQGKPLKEAIGEVAYGASFIEYYAEEAKRVYGDIIPPNLSDRRLLVLKQPVGVVGAITPWNFPLAMITRKVGPALASGCTVVVKPSELTPLTALAAAELALQAGVPPGALNVVMGNAPEIGDALLTSPQVRKITFTGSTAVGKKLMAAAAPTVKKVSLELGGNAPSIVFDDADLDVAVKGTLAAKFRNSGQTCVCANRVLVQDGIYDKFAEAFSEAVQKLEVGDGFRDGTTQGPLINDAAVQKVETFVQDAVSKGAKIIIGGKRHSLGMTFYEPTVIRDVSDNMIMSKEEIFGPVAPLIRFKTEEDAIRIANDTIAGLAAYIFTNSVQRSWRVFEALEYGLVGVNEGLISTEVAPFGGVKQSGLGREGSKYGMDEYLEIKYVCLGDMNRH

SEQ ID NO: 40530 - protein, 495 aa, Arabidopsis thaliana
  peptide (1)..(495): Ceres Seq. ID no. 13497321
  misc_feature (17)..(490): Homolog of NCBI NO: 27479656 NR Description: Orf17 [Photorhabdus luminescens]
  misc_feature (11)..(490): Homolog of NCBI NO: 15803178 NR Description: succinate-semialdehyde dehydrogenase,
  misc_feature (11)..(488): Homolog of NCBI NO: 17223783 NR Description: AttK [Agrobacterium tumefaciens]
  misc_feature (11)..(488): Homolog of NCBI NO: 17938723 NR Description: NAD-dependent succinate aldehyde dehydrogenases
  misc_feature (11)..(488): Homolog of NCBI NO: 16119363 NR Description: AGR_pAT_197p [Agrobacterium tumefaciens]
  misc_feature (11)..(490): Homolog of NCBI NO: 15595462 NR Description: succinate-semialdehyde dehydrogenase
  misc_feature (11)..(490): Homolog of NCBI NO: 16130575 NR Description: succinate-semialdehyde dehydrogenase,
  misc_feature (12)..(490): Homolog of NCBI NO: 23014760 NR Description: hypothetical protein [Magnetospirillum
  misc_feature (3)..(495): Homolog of NCBI NO: 25284177 NR Description: hypothetical protein T8K14.14 [imported] -
  misc_feature (1)..(495): Homolog of NCBI NO: 15219379 NR Description: succinate-semialdehyde dehydrogenase, putative
MSMDAQSVSEKLRSSGLLRTQGLIGGKWLDSYDNKTIKVNNPATGEIIADVACMGTKETNDAIASSYEAFTSWSRLTAGERSKVLRRWYDLLIAHKEELGQLITLEQGKPLKEAIGEVAYGASFIEYYAEEAKRVYGDIIPPNLSDRRLLVLKQPVGVVGAITPWNFPLAMITRKVGPALASGCTVVVKPSELTPLTALAAAELALQAGVPPGALNVVMGNAPEIGDALLTSPQVRKITFTGSTAVGKKLMAAAAPTVKKVSLELGGNAPSIVFDDADLDVAVKGTLAAKFRNSGQTCVCANRVLVQDGIYDKFAEAFSEAVQKLEVGDGFRDGTTQGPLINDAAVQKVETFVQDAVSKGAKIIIGGKRHSLGMTFYEPTVIRDVSDNMIMSKEEIFGPVAPLIRFKTEEDAIRIANDTIAGLAAYIFTNSVQRSWRVFEALEYGLVGVNEGLISTEVAPFGGVKQSGLGREGSKYGMDEYLEIKYVCLGDMNRH

SEQ ID NO: 40531 - DNA, 668 bp, Arabidopsis thaliana
  misc_feature (1)..(668): Ceres Seq. ID no. 12338625
  misc_feature: MA Experiment ID: 108464 Result: Down-regulated in Transcription
  misc_feature: MA Experiment 108464 PARAMETER Experiment Name: At_Germinating_Seeds_cDNA_P Parameter: Age (day) Value: 4 vs. 0
  misc_feature: MA Experiment 108464 PARAMETER Experiment Name: At_Germinating_Seeds_cDNA_P Parameter: Tissue Value: Germinating Seeds
  misc_feature: MA Experiment ID: 108488 Result: Down-regulated in Transcription
  misc_feature: MA Experiment ID: 108572 Result: Down-regulated in Transcription
  misc_feature: MA Experiment 108572 PARAMETER Experiment Name: At_Drought_cDNA_P Parameter: Timepoint (hr) Value: 1
  misc_feature: MA Experiment 108572 PARAMETER Experiment Name: At_Drought_cDNA_P Parameter: Tissue Value: Aerial
  misc_feature: MA Experiment 108572 PARAMETER Experiment Name: At_Drought_cDNA_P Parameter: Treatment Value: Drought vs. No Drought
  misc_feature: MA Experiment ID: 108573 Result: Down-regulated in Transcription
  misc_feature: MA Experiment 108573 PARAMETER Experiment Name: At_Drought_cDNA_P Parameter: Timepoint (hr) Value: 6
  misc_feature: MA Experiment 108573 PARAMETER Experiment Name: At_Drought_cDNA_P Parameter: Tissue Value: Aerial
  misc_feature: MA Experiment 108573 PARAMETER Experiment Name: At_Drought_cDNA_P Parameter: Treatment Value: Drought vs. No Drought
  misc_feature: MA Experiment ID: 108576 Result: Down-regulated in Transcription
  misc_feature: MA Experiment 108576 PARAMETER Experiment Name: At_42deg_Heat_cDNA_P Parameter: Temperature (deg C) Value: 42 vs. 22
  misc_feature: MA Experiment 108576 PARAMETER Experiment Name: At_42deg_Heat_cDNA_P Parameter: Timepoint (hr) Value: 1
  misc_feature: MA Experiment 108576 PARAMETER Experiment Name: At_42deg_Heat_cDNA_P Parameter: Tissue Value: Aerial
  misc_feature: MA Experiment ID: 108577 Result: Down-regulated in Transcription
  misc_feature: MA Experiment 108577 PARAMETER Experiment Name: At_42deg_Heat_cDNA_P Parameter: Temperature (deg C) Value: 42 vs. 22
  misc_feature: MA Experiment 108577 PARAMETER Experiment Name: At_42deg_Heat_cDNA_P Parameter: Timepoint (hr) Value: 6
  misc_feature: MA Experiment 108577 PARAMETER Experiment Name: At_42deg_Heat_cDNA_P Parameter: Tissue Value: Aerial
  misc_feature: MA Experiment ID: 108579 Result: Up-regulated in Transcription
  misc_feature: MA Experiment 108579 PARAMETER Experiment Name: At_4deg_Cold_cDNA_P Parameter: Temperature (deg C) Value: 4 vs. 22
  misc_feature: MA Experiment 108579 PARAMETER Experiment Name: At_4deg_Cold_cDNA_P Parameter: Timepoint (hr) Value: 6
  misc_feature: MA Experiment 108579 PARAMETER Experiment Name: At_4deg_Cold_cDNA_P Parameter: Tissue Value: Aerial
  misc_feature: MA Experiment ID: 108605 Result: Down-regulated in Transcription
  misc_feature: MA Experiment 108605 PARAMETER Experiment Name: At_100uM_ABA_cDNA_P Parameter: Timepoint (hr) Value: 6
  misc_feature: MA Experiment 108605 PARAMETER Experiment Name: At_100uM_ABA_cDNA_P Parameter: Tissue Value: Aerial
  misc_feature: MA Experiment 108605 PARAMETER Experiment Name: At_100uM_ABA_cDNA_P Parameter: Treatment Value: 100uM ABA vs. No Treatment
  misc_feature: MA Experiment ID: 108607 Result: Down-regulated in Transcription
  misc_feature: MA Experiment 108607 PARAMETER Experiment Name: At_100uM_ABA_cDNA_P Parameter: Timepoint (hr) Value: 4
  misc_feature: MA Experiment 108607 PARAMETER Experiment Name: At_100uM_ABA_cDNA_P Parameter: Tissue Value: Aerial
  misc_feature: MA Experiment 108607 PARAMETER Experiment Name: At_100uM_ABA_cDNA_P Parameter: Treatment Value: 100uM ABA vs. No Treatment
  misc_feature: MA Experiment ID: 20000069 Result: Up-regulated in Transcription
  misc_feature: MA Experiment 20000069 PARAMETER Experiment Name: At_100uM_ABA_Mutants_cDNA_P Parameter: Plant Line Value: CS23
  misc_feature: MA Experiment 20000069 PARAMETER Experiment Name: At_100uM_ABA_Mutants_cDNA_P Parameter: Timepoint (hr) Value: 6
  misc_feature: MA Experiment 20000069 PARAMETER Experiment Name: At_100uM_ABA_Mutants_cDNA_P Parameter: Tissue Value: Aerial
  misc_feature: MA Experiment 20000069 PARAMETER Experiment Name: At_100uM_ABA_Mutants_cDNA_P Parameter: Treatment Value: 100uM ABA vs. No Treatment
  misc_feature: MA Experiment ID: 20000070 Result: Up-regulated in Transcription
  misc_feature: MA Experiment 20000070 PARAMETER Experiment Name: At_100uM_ABA_Mutants_cDNA_P Parameter: Plant Line Value: CS24
  misc_feature: MA Experiment 20000070 PARAMETER Experiment Name: At_100uM_ABA_Mutants_cDNA_P Parameter: Timepoint (hr) Value: 6
  misc_feature: MA Experiment 20000070 PARAMETER Experiment Name: At_100uM_ABA_Mutants_cDNA_P Parameter: Tissue Value: Aerial
  misc_feature: MA Experiment 20000070 PARAMETER Experiment Name: At_100uM_ABA_Mutants_cDNA_P Parameter: Treatment Value: 100uM ABA vs. No Treatment
  misc_feature: MA Experiment ID: 20000071 Result: Up-regulated in Transcription
  misc_feature: MA Experiment 20000071 PARAMETER Experiment Name: At_100uM_ABA_Mutants_cDNA_P Parameter: Plant Line Value: CS8104
  misc_feature: MA Experiment 20000071 PARAMETER Experiment Name: At_100uM_ABA_Mutants_cDNA_P Parameter: Timepoint (hr) Value: 6
  misc_feature: MA Experiment 20000071 PARAMETER Experiment Name: At_100uM_ABA_Mutants_cDNA_P Parameter: Tissue Value: Aerial
  misc_feature: MA Experiment 20000071 PARAMETER Experiment Name: At_100uM_ABA_Mutants_cDNA_P Parameter: Treatment Value: 100uM ABA vs. No Treatment
  misc_feature: MA Experiment ID: 20000072 Result: Up-regulated in Transcription
  misc_feature: MA Experiment 20000072 PARAMETER Experiment Name: At_100uM_ABA_Mutants_cDNA_P Parameter: Plant Line Value: CS8105
  misc_feature: MA Experiment 20000072 PARAMETER Experiment Name: At_100uM_ABA_Mutants_cDNA_P Parameter: Timepoint (hr) Value: 6
  misc_feature: MA Experiment 20000072 PARAMETER Experiment Name: At_100uM_ABA_Mutants_cDNA_P Parameter: Tissue Value: Aerial
  misc_feature: MA Experiment 20000072 PARAMETER Experiment Name: At_100uM_ABA_Mutants_cDNA_P Parameter: Treatment Value: 100uM ABA vs. No Treatment
  misc_feature: MA Experiment ID: 20000086 Result: Up-regulated in Transcription
  misc_feature: MA Experiment 20000086 PARAMETER Experiment Name: At_100uM_ABA_Mutants_cDNA_P Parameter: Plant Line Value: CS22
  misc_feature: MA Experiment 20000086 PARAMETER Experiment Name: At_100uM_ABA_Mutants_cDNA_P Parameter: Timepoint (hr) Value: 6
  misc_feature: MA Experiment 20000086 PARAMETER Experiment Name: At_100uM_ABA_Mutants_cDNA_P Parameter: Tissue Value: Aerial
  misc_feature: MA Experiment 20000086 PARAMETER Experiment Name: At_100uM_ABA_Mutants_cDNA_P Parameter: Treatment Value: 100uM ABA vs. No Treatment
  misc_feature: MA Experiment ID: 20000087 Result: Up-regulated in Transcription
  misc_feature: MA Experiment 20000087 PARAMETER Experiment Name: At_100uM_ABA_Mutants_cDNA_P Parameter: Plant Line Value: WS
  misc_feature: MA Experiment 20000087 PARAMETER Experiment Name: At_100uM_ABA_Mutants_cDNA_P Parameter: Timepoint (hr) Value: 6
  misc_feature: MA Experiment 20000087 PARAMETER Experiment Name: At_100uM_ABA_Mutants_cDNA_P Parameter: Tissue Value: Aerial
  misc_feature: MA Experiment 20000087 PARAMETER Experiment Name: At_100uM_ABA_Mutants_cDNA_P Parameter: Treatment Value: 100uM ABA vs. No Treatment
  misc_feature: MA Experiment ID: 20000088 Result: Up-regulated in Transcription
  misc_feature: MA Experiment 20000088 PARAMETER Experiment Name: At_100uM_ABA_Mutants_cDNA_P Parameter: Plant Line Value: Landsberg
  misc_feature: MA Experiment 20000088 PARAMETER Experiment Name: At_100uM_ABA_Mutants_cDNA_P Parameter: Timepoint (hr) Value: 6
  misc_feature: MA Experiment 20000088 PARAMETER Experiment Name: At_100uM_ABA_Mutants_cDNA_P Parameter: Tissue Value: Aerial
  misc_feature: MA Experiment 20000088 PARAMETER Experiment Name: At_100uM_ABA_Mutants_cDNA_P Parameter: Treatment Value: 100uM ABA vs. No Treatment
  misc_feature: MA Experiment ID: 20000089 Result: Up-regulated in Transcription
  misc_feature: MA Experiment ID: 20000090 Result: Up-regulated in Transcription
  misc_feature: MA Experiment ID: 20000111 Result: Down-regulated in Transcription
  misc_feature: MA Experiment 20000111 PARAMETER Experiment Name: At_42deg_Heat_cDNA_P Parameter: Temperature (deg C) Value: 42 vs. 22
  misc_feature: MA Experiment 20000111 PARAMETER Experiment Name: At_42deg_Heat_cDNA_P Parameter: Timepoint (hr) Value: 6
  misc_feature: MA Experiment 20000111 PARAMETER Experiment Name: At_42deg_Heat_cDNA_P Parameter: Tissue Value: Aerial
  misc_feature: MA Experiment ID: 20000112 Result: Down-regulated in Transcription
  misc_feature: MA Experiment 20000112 PARAMETER Experiment Name: At_42deg_Heat_cDNA_P Parameter: Temperature (deg C) Value: 42 vs. 22
  misc_feature: MA Experiment 20000112 PARAMETER Experiment Name: At_42deg_Heat_cDNA_P Parameter: Timepoint (hr) Value: 2
  misc_feature: MA Experiment 20000112 PARAMETER Experiment Name: At_42deg_Heat_cDNA_P Parameter: Tissue Value: Aerial
  misc_feature: MA Experiment ID: 20000113 Result: Down-regulated in Transcription
  misc_feature: MA Experiment 20000113 PARAMETER Experiment Name: At_42deg_Heat_cDNA_P Parameter: Temperature (deg C) Value: 42 vs. 22
  misc_feature: MA Experiment 20000113 PARAMETER Experiment Name: At_42deg_Heat_cDNA_P Parameter: Timepoint (hr) Value: 8
  misc_feature: MA Experiment 20000113 PARAMETER Experiment Name: At_42deg_Heat_cDNA_P Parameter: Tissue Value: Aerial
  misc_feature: MA Experiment ID: 20000117 Result: Up-regulated in Transcription
  misc_feature: MA Experiment 20000117 PARAMETER Experiment Name: At_100uM_ABA_Mutants_cDNA_P Parameter: Plant Line Value: Columbia
  misc_feature: MA Experiment 20000117 PARAMETER Experiment Name: At_100uM_ABA_Mutants_cDNA_P Parameter: Timepoint (hr) Value: 6
  misc_feature: MA Experiment 20000117 PARAMETER Experiment Name: At_100uM_ABA_Mutants_cDNA_P Parameter: Tissue Value: Aerial
  misc_feature: MA Experiment 20000117 PARAMETER Experiment Name: At_100uM_ABA_Mutants_cDNA_P Parameter: Treatment Value: 100uM ABA vs. No Treatment
  misc_feature: MA Experiment ID: 20000173 Result: Down-regulated in Transcription
  misc_feature: MA Experiment 20000173 PARAMETER Experiment Name: At_42deg_Heat_P Parameter: Age (day) Value: 14
  misc_feature: MA Experiment 20000173 PARAMETER Experiment Name: At_42deg_Heat_P Parameter: Organism Value: A. thaliana
  misc_feature: MA Experiment 20000173 PARAMETER Experiment Name: At_42deg_Heat_P Parameter: Plant Line Value: WS
  misc_feature: MA Experiment 20000173 PARAMETER Experiment Name: At_42deg_Heat_P Parameter: Temperature (deg C) Value: 42 vs. 22
  misc_feature: MA Experiment 20000173 PARAMETER Experiment Name: At_42deg_Heat_P Parameter: Timepoint (hr) Value: 6
  misc_feature: MA Experiment 20000173 PARAMETER Experiment Name: At_42deg_Heat_P Parameter: Tissue Value: Aerial
  misc_feature: MA Experiment ID: 20000213 Result: Up-regulated in Transcription
  misc_feature: MA Experiment 20000213 PARAMETER Experiment Name: At_4deg_Cold_P Parameter: Timepoint (hr) Value: 2
  misc_feature: MA Experiment ID: 20000224 Result: Down-regulated in Transcription
  misc_feature: MA Experiment ID: 20000453 Result: Down-regulated in Transcription
  misc_feature: MA Experiment 20000453 PARAMETER Experiment Name: At_100uM_ABA_P Parameter: Age (day) Value: 15
  misc_feature: MA Experiment 20000453 PARAMETER Experiment Name: At_100uM_ABA_P Parameter: Organism Value: A. thaliana
  misc_feature: MA Experiment 20000453 PARAMETER Experiment Name: At_100uM_ABA_P Parameter: Plant Line Value: WS
  misc_feature: MA Experiment 20000453 PARAMETER Experiment Name: At_100uM_ABA_P Parameter: Timepoint (hr) Value: 24
  misc_feature: MA Experiment 20000453 PARAMETER Experiment Name: At_100uM_ABA_P Parameter: Tissue Value: Aerial
  misc_feature: MA Experiment 20000453 PARAMETER Experiment Name: At_100uM_ABA_P Parameter: Treatment Value: 100uM ABA vs. No Treatment
  misc_feature: MA Experiment ID: 20001247 Result: Down-regulated in Transcription
  misc_feature: MA Experiment 20001247 PARAMETER Experiment Name: At_Far-red-induction_P Parameter: Age (day) Value: 7
  misc_feature: MA Experiment 20001247 PARAMETER Experiment Name: At_Far-red-induction_P Parameter: Light Value: Far-red vs. White
  misc_feature: MA Experiment 20001247 PARAMETER Experiment Name: At_Far-red-induction_P Parameter: Organism Value: A. thaliana
  misc_feature: MA Experiment 20001247 PARAMETER Experiment Name: At_Far-red-induction_P Parameter: Plant Line Value: Columbia
  misc_feature: MA Experiment 20001247 PARAMETER Experiment Name: At_Far-red-induction_P Parameter: Timepoint (hr) Value: 1
  misc_feature: MA Experiment 20001247 PARAMETER Experiment Name: At_Far-red-induction_P Parameter: Tissue Value: Whole Plant
  misc_feature: MA Experiment ID: 20001248 Result: Up-regulated in Transcription
  misc_feature: MA Experiment 20001248 PARAMETER Experiment Name: At_Far-red-induction_P Parameter: Age (day) Value: 7
  misc_feature: MA Experiment 20001248 PARAMETER Experiment Name: At_Far-red-induction_P Parameter: Light Value: Far-red vs. White
  misc_feature: MA Experiment 20001248 PARAMETER Experiment Name: At_Far-red-induction_P Parameter: Organism Value: A. thaliana
  misc_feature: MA Experiment 20001248 PARAMETER Experiment Name: At_Far-red-induction_P Parameter: Plant Line Value: Columbia
  misc_feature: MA Experiment 20001248 PARAMETER Experiment Name: At_Far-red-induction_P Parameter: Timepoint (hr) Value: 4
  misc_feature: MA Experiment 20001248 PARAMETER Experiment Name: At_Far-red-induction_P Parameter: Tissue Value: Whole Plant
  misc_feature: MA Experiment ID: 20001557 Result: Up-regulated in Transcription
  misc_feature: MA Experiment 20001557 PARAMETER Experiment Name: At_Drought_Soil_Dry_P Parameter: Age (day) Value: 27
  misc_feature: MA Experiment 20001557 PARAMETER Experiment Name: At_Drought_Soil_Dry_P Parameter: Organism Value: A. thaliana
  misc_feature: MA Experiment 20001557 PARAMETER Experiment Name: At_Drought_Soil_Dry_P Parameter: Plant Line Value: WS
  misc_feature: MA Experiment 20001557 PARAMETER Experiment Name: At_Drought_Soil_Dry_P Parameter: Post Timepoint (hr) Value: 3
  misc_feature: MA Experiment 20001557 PARAMETER Experiment Name: At_Drought_Soil_Dry_P Parameter: Post-Treatment Value: Re-Water vs. No Drought
  misc_feature: MA Experiment 20001557 PARAMETER Experiment Name: At_Drought_Soil_Dry_P Parameter: Timepoint (day) Value: 13
  misc_feature: MA Experiment 20001557 PARAMETER Experiment Name: At_Drought_Soil_Dry_P Parameter: Treatment Value: Drought vs. No Drought
acataagtctctctcttacattttgaaaccctaatttctcaaaaaaaatgtctgaagttgagtaccggtgctttgtcggcggccttgcctgggccaccaatgatgaagatcttcaaaggacgttctcacagttcggcgacgttatcgattctaagatcattaacgaccgcgagagtggaagatcaaggggattcggattcgtcaccttcaaggacgagaaagccatgagggatgcgattgaagagatgaacgataaagagctcgatggacgtgtcatcaccgtgaacgaggctcagtcgagaggtagcggcggtggcggaggaggccgtggtggaagcggtggtggttaccgcagcggaggttacggatctggtggaggcggtggtggccgaggatacggtggtggtggacgccgtgagggaggtggctacggaggcggtgatggtggaagttacggcggcggtggtggcggctggtaatcaaagatagagttgtttgcgtgctgctgctctgtttttggtttagatttggatttgtgtcaccacttctggtttggttatcgttcgtttggtttacttttttgatgaaacagtttcgtttaagtcttctttgtctggatcgaaatgttaattcgcgtgttgtttactaaatttataacgtttcctttt

SEQ ID NO: 40532 - protein, 143 aa, Arabidopsis thaliana
  peptide (1)..(143): Ceres Seq. ID no. 12338626
  misc_feature (8)..(79): Pfam Name: RNA recognition motif. (a.k.a. RRM, RBD, or RNP domain) Pfam Description: RNA recognition motif. (a.k.a. RRM, RBD, or RNP
  misc_feature (3)..(142): Homolog of NCBI NO: 21553354 NR Description: glycine-rich RNA binding protein 7 [Arabidopsis
  misc_feature (1)..(142): Homolog of NCBI NO: 544426 NR Description: Glycine-rich RNA-binding protein
  misc_feature (3)..(143): Homolog of NCBI NO: 1346181 NR Description: Glycine-rich RNA-binding protein GRP2A
  misc_feature (3)..(143): Homolog of NCBI NO: 30681492 NR Description: glycine-rich RNA-binding protein (AtGRP7)
  misc_feature (3)..(143): Homolog of NCBI NO: 1346180 NR Description: Glycine-rich RNA-binding protein GRP1A
  misc_feature (3)..(143): Homolog of NCBI NO: 15226605 NR Description: glycine-rich RNA binding protein AtGRP7
  misc_feature (1)..(143): Homolog of NCBI NO: 2119042 NR Description: glycine-rich RNA-binding protein RGP-1a - wood
  misc_feature (1)..(143): Homolog of NCBI NO: 544416 NR Description: Glycine-rich RNA-binding protein 10
  misc_feature (1)..(128): Homolog of NCBI NO: 30692254 NR Description: glycine-rich RNA-binding protein 8 (GRP8) (CCR1)
  misc_feature (1)..(143): Homolog of NCBI NO: 15235002 NR Description: glycine-rich RNA-binding protein 8 (GRP8)
MSEVEYRCFVGGLAWATNDEDLQRTFSQFGDVIDSKIINDRESGRSRGFGFVTFKDEKAMRDAIEEMNDKELDGRVITVNEAQSRGSGGGGGGRGGSGGGYRSGGYGSGGGGGGRGYGGGGRREGGGYGGGDGGSYGGGGGGW

SEQ ID NO: 40533 - protein, 84 aa, Arabidopsis thaliana
  peptide (1)..(84): Ceres Seq. ID no. 12338627
  misc_feature (30)..(83): Pfam Name: Herpesvirus large structural phosphoprotein UL32 Pfam Description: Herpesvirus large structural phosphoprotein UL32
  misc_feature (1)..(83): Homolog of NCBI NO: 21553354 NR Description: glycine-rich RNA binding protein 7 [Arabidopsis
  misc_feature (1)..(83): Homolog of NCBI NO: 544426 NR Description: Glycine-rich RNA-binding protein
  misc_feature (1)..(84): Homolog of NCBI NO: 1346181 NR Description: Glycine-rich RNA-binding protein GRP2A
  misc_feature (1)..(84): Homolog of NCBI NO: 30681492 NR Description: glycine-rich RNA-binding protein (AtGRP7)
  misc_feature (1)..(84): Homolog of NCBI NO: 1346180 NR Description: Glycine-rich RNA-binding protein GRP1A
  misc_feature (1)..(84): Homolog of NCBI NO: 15226605 NR Description: glycine-rich RNA binding protein AtGRP7
  misc_feature (1)..(84): Homolog of NCBI NO: 2119042 NR Description: glycine-rich RNA-binding protein RGP-1a - wood
  misc_feature (1)..(84): Homolog of NCBI NO: 544416 NR Description: Glycine-rich RNA-binding protein 10
  misc_feature (1)..(69): Homolog of NCBI NO: 30692254 NR Description: glycine-rich RNA-binding protein 8 (GRP8) (CCR1)
  misc_feature (1)..(84): Homolog of NCBI NO: 15235002 NR Description: glycine-rich RNA-binding protein 8 (GRP8)
MRDAIEEMNDKELDGRVITVNEAQSRGSGGGGGGRGGSGGGYRSGGYGSGGGGGGRGYGGGGRREGGGYGGGDGGSYGGGGGGW

SEQ ID NO: 40534 - protein, 77 aa, Arabidopsis thaliana
  peptide (1)..(77): Ceres Seq. ID no. 12338628
  misc_feature (23)..(76): Pfam Name: Herpesvirus large structural phosphoprotein UL32 Pfam Description: Herpesvirus large structural phosphoprotein UL32
  misc_feature (1)..(76): Homolog of NCBI NO: 21553354 NR Description: glycine-rich RNA binding protein 7 [Arabidopsis
  misc_feature (1)..(76): Homolog of NCBI NO: 544426 NR Description: Glycine-rich RNA-binding protein
  misc_feature (1)..(77): Homolog of NCBI NO: 1346181 NR Description: Glycine-rich RNA-binding protein GRP2A
  misc_feature (1)..(77): Homolog of NCBI NO: 30681492 NR Description: glycine-rich RNA-binding protein (AtGRP7)
  misc_feature (1)..(77): Homolog of NCBI NO: 1346180 NR Description: Glycine-rich RNA-binding protein GRP1A
  misc_feature (1)..(77): Homolog of NCBI NO: 15226605 NR Description: glycine-rich RNA binding protein AtGRP7
  misc_feature (1)..(77): Homolog of NCBI NO: 2119042 NR Description: glycine-rich RNA-binding protein RGP-1a - wood
  misc_feature (1)..(77): Homolog of NCBI NO: 544416 NR Description: Glycine-rich RNA-binding protein 10
  misc_feature (1)..(62): Homolog of NCBI NO: 30692254 NR Description: glycine-rich RNA-binding protein 8 (GRP8) (CCR1)
  misc_feature (1)..(77): Homolog of NCBI NO: 15235002 NR Description: glycine-rich RNA-binding protein 8 (GRP8)
MNDKELDGRVITVNEAQSRGSGGGGGGRGGSGGGYRSGGYGSGGGGGGRGYGGGGRREGGGYGGGDGGSYGGGGGGW

SEQ ID NO: 40535 - DNA, 1195 bp, Arabidopsis thaliana
  misc_feature (1)..(1195): Ceres Seq. ID no. 12328712
  misc_feature: MA Experiment ID: 108434 Result: Down-regulated in Transcription
  misc_feature: MA Experiment 108434 PARAMETER Experiment Name: At_Root_Tips_cDNA_P Parameter: Tissue Value: Root Tips
  misc_feature: MA Experiment ID: 108461 Result: Up-regulated in Transcription
  misc_feature: MA Experiment 108461 PARAMETER Experiment Name: At_Germinating_Seeds_cDNA_P Parameter: Age (day) Value: 1 vs. 0
  misc_feature: MA Experiment 108461 PARAMETER Experiment Name: At_Germinating_Seeds_cDNA_P Parameter: Tissue Value: Germinating Seeds
  misc_feature: MA Experiment ID: 108462 Result: Up-regulated in Transcription
  misc_feature: MA Experiment 108462 PARAMETER Experiment Name: At_Germinating_Seeds_cDNA_P Parameter: Age (day) Value: 2 vs. 0
  misc_feature: MA Experiment 108462 PARAMETER Experiment Name: At_Germinating_Seeds_cDNA_P Parameter: Tissue Value: Germinating Seeds
  misc_feature: MA Experiment ID: 108463 Result: Up-regulated in Transcription
  misc_feature: MA Experiment 108463 PARAMETER Experiment Name: At_Germinating_Seeds_cDNA_P Parameter: Age (day) Value: 3 vs. 0
  misc_feature: MA Experiment 108463 PARAMETER Experiment Name: At_Germinating_Seeds_cDNA_P Parameter: Tissue Value: Germinating Seeds
  misc_feature: MA Experiment ID: 108464 Result: Up-regulated in Transcription
  misc_feature: MA Experiment 108464 PARAMETER Experiment Name: At_Germinating_Seeds_cDNA_P Parameter: Age (day) Value: 4 vs. 0
  misc_feature: MA Experiment 108464 PARAMETER Experiment Name: At_Germinating_Seeds_cDNA_P Parameter: Tissue Value: Germinating Seeds
  misc_feature: MA Experiment ID: 108594 Result: Down-regulated in Transcription
  misc_feature: MA Experiment 108594 PARAMETER Experiment Name: At_Ler-rhl_Root_cDNA_P Parameter: Plant Line Value: null
  misc_feature: MA Experiment ID: 108668 Result: Up-regulated in Transcription
  misc_feature: MA Experiment 108668 PARAMETER Experiment Name: At_2mM_SA_cDNA_P Parameter: Plant Line Value: WS
  misc_feature: MA Experiment 108668 PARAMETER Experiment Name: At_2mM_SA_cDNA_P Parameter: Timepoint (hr) Value: 6
  misc_feature: MA Experiment 108668 PARAMETER Experiment Name: At_2mM_SA_cDNA_P Parameter: Treatment Value: 2mM SA vs. No Treatment
  misc_feature: MA Experiment ID: 20000090 Result: Up-regulated in Transcription
  misc_feature: MA Experiment ID: 20000093 Result: Down-regulated in Transcription
  misc_feature: MA Experiment 20000093 PARAMETER Experiment Name: At_42deg_Heat_cDNA_P Parameter: Temperature (deg C) Value: 42 vs. 22
  misc_feature: MA Experiment 20000093 PARAMETER Experiment Name: At_42deg_Heat_cDNA_P Parameter: Timepoint (hr) Value: 0.5
  misc_feature: MA Experiment 20000093 PARAMETER Experiment Name: At_42deg_Heat_cDNA_P Parameter: Tissue Value: Aerial
  misc_feature: MA Experiment ID: 20000111 Result: Down-regulated in Transcription
  misc_feature: MA Experiment 20000111 PARAMETER Experiment Name: At_42deg_Heat_cDNA_P Parameter: Temperature (deg C) Value: 42 vs. 22
  misc_feature: MA Experiment 20000111 PARAMETER Experiment Name: At_42deg_Heat_cDNA_P Parameter: Timepoint (hr) Value: 6
  misc_feature: MA Experiment 20000111 PARAMETER Experiment Name: At_42deg_Heat_cDNA_P Parameter: Tissue Value: Aerial
  misc_feature: MA Experiment ID: 20000113 Result: Down-regulated in Transcription
  misc_feature: MA Experiment 20000113 PARAMETER Experiment Name: At_42deg_Heat_cDNA_P Parameter: Temperature (deg C) Value: 42 vs. 22
  misc_feature: MA Experiment 20000113 PARAMETER Experiment Name: At_42deg_Heat_cDNA_P Parameter: Timepoint (hr) Value: 8
  misc_feature: MA Experiment 20000113 PARAMETER Experiment Name: At_42deg_Heat_cDNA_P Parameter: Tissue Value: Aerial
  misc_feature: MA Experiment ID: 20000144 Result: Down-regulated in Transcription
  misc_feature: MA Experiment 20000144 PARAMETER Experiment Name: At_42deg_Heat_cDNA_P Parameter: Temperature (deg C) Value: 42 vs. 22
  misc_feature: MA Experiment 20000144 PARAMETER Experiment Name: At_42deg_Heat_cDNA_P Parameter: Timepoint (hr) Value: 1
  misc_feature: MA Experiment 20000144 PARAMETER Experiment Name: At_42deg_Heat_cDNA_P Parameter: Tissue Value: Aerial
  misc_feature: MA Experiment ID: 20000173 Result: Down-regulated in Transcription
  misc_feature: MA Experiment 20000173 PARAMETER Experiment Name: At_42deg_Heat_P Parameter: Age (day) Value: 14
  misc_feature: MA Experiment 20000173 PARAMETER Experiment Name: At_42deg_Heat_P Parameter: Organism Value: A. thaliana
  misc_feature: MA Experiment 20000173 PARAMETER Experiment Name: At_42deg_Heat_P Parameter: Plant Line Value: WS
  misc_feature: MA Experiment 20000173 PARAMETER Experiment Name: At_42deg_Heat_P Parameter: Temperature (deg C) Value: 42 vs. 22
  misc_feature: MA Experiment 20000173 PARAMETER Experiment Name: At_42deg_Heat_P Parameter: Timepoint (hr) Value: 6
  misc_feature: MA Experiment 20000173 PARAMETER Experiment Name: At_42deg_Heat_P Parameter: Tissue Value: Aerial
  misc_feature: MA Experiment ID: 20000182 Result: Up-regulated in Transcription
  misc_feature: MA Experiment 20000182 PARAMETER Experiment Name: At_2mM_SA_P Parameter: Age (day) Value: 14
  misc_feature: MA Experiment 20000182 PARAMETER Experiment Name: At_2mM_SA_P Parameter: Organism Value: A. thaliana
  misc_feature: MA Experiment 20000182 PARAMETER Experiment Name: At_2mM_SA_P Parameter: Plant Line Value: WS
  misc_feature: MA Experiment 20000182 PARAMETER Experiment Name: At_2mM_SA_P Parameter: Timepoint (hr) Value: 6
  misc_feature: MA Experiment 20000182 PARAMETER Experiment Name: At_2mM_SA_P Parameter: Tissue Value: Aerial
  misc_feature: MA Experiment 20000182 PARAMETER Experiment Name: At_2mM_SA_P Parameter: Treatment Value: 2mM SA vs. No Treatment
  misc_feature: MA Experiment ID: 20000184 Result: Down-regulated in Transcription
  misc_feature: MA Experiment 20000184 PARAMETER Experiment Name: At_Shoots__P Parameter: Age (day) Value: 7
  misc_feature: MA Experiment 20000184 PARAMETER Experiment Name: At_Shoots__P Parameter: Tissue Value: Shoots vs. Whole Plant
  misc_feature: MA Experiment ID: 20000264 Result: Down-regulated in Transcription
  misc_feature: MA Experiment 20000264 PARAMETER Experiment Name: At_Open_Flower_P Parameter: Age (day) Value: 21
  misc_feature: MA Experiment 20000264 PARAMETER Experiment Name: At_Open_Flower_P Parameter: Plant Line Value: WS
  misc_feature: MA Experiment 20000264 PARAMETER Experiment Name: At_Open_Flower_P Parameter: Tissue Value: Open Flower vs. Whole Plant
  misc_feature: MA Experiment ID: 20000265 Result: Down-regulated in Transcription
  misc_feature: MA Experiment 20000265 PARAMETER Experiment Name: At_Open_Flower_P Parameter: Age (day) Value: 21
  misc_feature: MA Experiment 20000265 PARAMETER Experiment Name: At_Open_Flower_P Parameter: Plant Line Value: WS
  misc_feature: MA Experiment 20000265 PARAMETER Experiment Name: At_Open_Flower_P Parameter: Tissue Value: Closed Flower vs. Whole Plant
  misc_feature: MA Experiment ID: 20000438 Result: Down-regulated in Transcription
  misc_feature: MA Experiment 20000438 PARAMETER Experiment Name: At_Shoots__P Parameter: Age (day) Value: 14
  misc_feature: MA Experiment 20000438 PARAMETER Experiment Name: At_Shoots__P Parameter: Tissue Value: Shoots vs. Whole Plant
  misc_feature: MA Experiment ID: 20000794 Result: Down-regulated in Transcription
  misc_feature: MA Experiment 20000794 PARAMETER Experiment Name: At_Petals_P Parameter: Age (day) Value: 23-25 days
  misc_feature: MA Experiment 20000794 PARAMETER Experiment Name: At_Petals_P Parameter: Plant Line Value: WS
  misc_feature: MA Experiment 20000794 PARAMETER Experiment Name: At_Petals_P Parameter: Tissue Value: Petals vs. Whole plant
  misc_feature: MA Experiment ID: 20001554 Result: Down-regulated in Transcription
  misc_feature: MA Experiment 20001554 PARAMETER Experiment Name: At_Drought_Soil_Dry_P Parameter: Age (day) Value: 21
  misc_feature: MA Experiment 20001554 PARAMETER Experiment Name: At_Drought_Soil_Dry_P Parameter: Organism Value: A. thaliana
  misc_feature: MA Experiment 20001554 PARAMETER Experiment Name: At_Drought_Soil_Dry_P Parameter: Plant Line Value: WS
  misc_feature: MA Experiment 20001554 PARAMETER Experiment Name: At_Drought_Soil_Dry_P Parameter: Post Timepoint (hr) Value: None
  misc_feature: MA Experiment 20001554 PARAMETER Experiment Name: At_Drought_Soil_Dry_P Parameter: Post-Treatment Value: None
  misc_feature: MA Experiment 20001554 PARAMETER Experiment Name: At_Drought_Soil_Dry_P Parameter: Timepoint (day) Value: 7
  misc_feature: MA Experiment 20001554 PARAMETER Experiment Name: At_Drought_Soil_Dry_P Parameter: Treatment Value: Drought vs. No Drought
gaagaaaaaacacttccaaacaaaataatgagttcttcgtcttcctcatcctcttcttcttcttcttctcgcagtaaatgtatggattcaggatttataatcgggcgaaaagaactaacaagaattttgatactgtttcttggtttaaccgcttcatgtctggttttatacaaaacagcttatcctctgcaacgacttaatgtcagcaatctaacctctctccaagcttctccatctccactattaccaaacctcaactcatcagagatttctccagaaacgacaaaaccaaagttgagtttcaaggagattttggagaacgcatcaacgaagaacaatacagtgattataacgacattgaatcaagcttgggcagaaccaaactctttgtttgatctcttcttagagagttttcgtattggacgaggaacacaacaacttctgaaacatgtagtagtggtttgcttggatatcaaggcgtttcaacgatgctcacaacttcatactaattgctaccatattgaaacatcagaaactgatttctctggcgagaaagtttacaacactcctgattatcttaagatgatgtgggccagaatcgagcttcttacacaagttcttcagatgggttttaacttcatcttcacggacgcagatataatgtggcttagagatccatttcctcggttatatccagatggagacttccaaatggcgtgtgacagattctttggaaatccttatgattcagacaattgggtcaatggtggtttcacatacgtgagatcaaacaatcgaagcattgagttttacaaattttggcacaaatctcgtctagattatcctgacttgcatgatcaagatgtgttcaacagaatcaagcatgagccttttatctcagagattggaatccaaatgagattctttgatacagtttactttggtgggttttgtcaaacgagcagagacataaacttggtttgcacaatgcatgctaattgttgtattggtttggacaagaagcttcatgatctgaatcttgtccttgatgattggagaaagtacctgtctttgtcagaaccagtgctgaacacgacgtggagtgttcctatgaagtgtttggaagattgagatttccttctttctttgttttgttgagatttggatgaaaagtatatttaaaaatgaagagttt

SEQ ID NO: 40536 - protein, 376 aa, Arabidopsis thaliana
  peptide (1)..(376): Ceres Seq. ID no. 12328713
  misc_feature (102)..(373): Homolog of NCBI NO: 23306127 NR Description: Putataive InsB from Escherichia coli
  misc_feature (82)..(375): Homolog of NCBI NO: 18414558 NR Description: hypothetical protein common family; protein id:
  misc_feature (73)..(376): Homolog of NCBI NO: 15223826 NR Description: hypothetical protein common family; protein id:
  misc_feature (221)..(376): Homolog of NCBI NO: 15241586 NR Description: putative protein; protein id: At5g44810.1
  misc_feature (82)..(373): Homolog of NCBI NO: 38344278 NR Description: OSJNBa0013K16.10 [Oryza sativa (japonica
  misc_feature (12)..(376): Homolog of NCBI NO: 18395292 NR Description: unknown protein; protein id: At2g02060.1
  misc_feature (27)..(375): Homolog of NCBI NO: 15235236 NR Description: hypothetical protein common family; protein id:
  misc_feature (10)..(216): Homolog of NCBI NO: 15241588 NR Description: putative protein; protein id: At5g44820.1
  misc_feature (8)..(373): Homolog of NCBI NO: 15235236 NR Description: hypothetical protein common family; protein id:
  misc_feature (10)..(376): Homolog of NCBI NO: 21536907 NR Description: regulatory protein [Arabidopsis thaliana]
EEKTLPNKIMSSSSSSSSSSSSSRSKCMDSGFIIGRKELTRILILFLGLTASCLVLYKTAYPLQRLNVSNLTSLQASPSPLLPNLNSSEISPETTKPKLSFKEILENASTKNNTVIITTLNQAWAEPNSLFDLFLESFRIGRGTQQLLKHVVVVCLDIKAFQRCSQLHTNCYHIETSETDFSGEKVYNTPDYLKMMWARIELLTQVLQMGFNFIFTDADIMWLRDPFPRLYPDGDFQMACDRFFGNPYDSDNWVNGGFTYVRSNNRSIEFYKFWHKSRLDYPDLHDQDVFNRIKHEPFISEIGIQMRFFDTVYFGGFCQTSRDINLVCTMHANCCIGLDKKLHDLNLVLDDWRKYLSLSEPVLNTTWSVPMKCLED

SEQ ID NO: 40537 - protein, 367 aa, Arabidopsis thaliana
  peptide (1)..(367): Ceres Seq. ID no. 12328714
  misc_feature (93)..(364): Homolog of NCBI NO: 23306127 NR Description: Putataive InsB from Escherichia coli
  misc_feature (73)..(366): Homolog of NCBI NO: 18414558 NR Description: hypothetical protein common family; protein id:
  misc_feature (64)..(367): Homolog of NCBI NO: 15223826 NR Description: hypothetical protein common family; protein id:
  misc_feature (212)..(367): Homolog of NCBI NO: 15241586 NR Description: putative protein; protein id: At5g44810.1
  misc_feature (73)..(364): Homolog of NCBI NO: 38344278 NR Description: OSJNBa0013K16.10 [Oryza sativa (japonica
  misc_feature (3)..(367): Homolog of NCBI NO: 18395292 NR Description: unknown protein; protein id: At2g02060.1
  misc_feature (18)..(366): Homolog of NCBI NO: 15235236 NR Description: hypothetical protein common family; protein id:
  misc_feature (1)..(207): Homolog of NCBI NO: 15241588 NR Description: putative protein; protein id: At5g44820.1
  misc_feature (1)..(364): Homolog of NCBI NO: 15235236 NR Description: hypothetical protein common family; protein id:
  misc_feature (1)..(367): Homolog of NCBI NO: 21536907 NR Description: regulatory protein [Arabidopsis thaliana]
MSSSSSSSSSSSSSRSKCMDSGFIIGRKELTRILILFLGLTASCLVLYKTAYPLQRLNVSNLTSLQASPSPLLPNLNSSEISPETTKPKLSFKEILENASTKNNTVIITTLNQAWAEPNSLFDLFLESFRIGRGTQQLLKHVVVVCLDIKAFQRCSQLHTNCYHIETSETDFSGEKVYNTPDYLKMMWARIELLTQVLQMGFNFIFTDADIMWLRDPFPRLYPDGDFQMACDRFFGNPYDSDNWVNGGFTYVRSNNRSIEFYKFWHKSRLDYPDLHDQDVFNRIKHEPFISEIGIQMRFFDTVYFGGFCQTSRDINLVCTMHANCCIGLDKKLHDLNLVLDDWRKYLSLSEPVLNTTWSVPMKCLED

SEQ ID NO: 40538 - protein, 349 aa, Arabidopsis thaliana
  peptide (1)..(349): Ceres Seq. ID no. 12328715
  misc_feature (75)..(346): Homolog of NCBI NO: 23306127 NR Description: Putataive InsB from Escherichia coli
  misc_feature (55)..(348): Homolog of NCBI NO: 18414558 NR Description: hypothetical protein common family; protein id:
  misc_feature (46)..(349): Homolog of NCBI NO: 15223826 NR Description: hypothetical protein common family; protein id:
  misc_feature (194)..(349): Homolog of NCBI NO: 15241586 NR Description: putative protein; protein id: At5g44810.1
  misc_feature (55)..(346): Homolog of NCBI NO: 38344278 NR Description: OSJNBa0013K16.10 [Oryza sativa (japonica
  misc_feature (1)..(349): Homolog of NCBI NO: 18395292 NR Description: unknown protein; protein id: At2g02060.1
  misc_feature (1)..(348): Homolog of NCBI NO: 15235236 NR Description: hypothetical protein common family; protein id:
  misc_feature (1)..(189): Homolog of NCBI NO: 15241588 NR Description: putative protein; protein id: At5g44820.1
  misc_feature (1)..(346): Homolog of NCBI NO: 15235236 NR Description: hypothetical protein common family; protein id:
  misc_feature (1)..(349): Homolog of NCBI NO: 21536907 NR Description: regulatory protein [Arabidopsis thaliana]
MDSGFIIGRKELTRILILFLGLTASCLVLYKTAYPLQRLNVSNLTSLQASPSPLLPNLNSSEISPETTKPKLSFKEILENASTKNNTVIITTLNQAWAEPNSLFDLFLESFRIGRGTQQLLKHVVVVCLDIKAFQRCSQLHTNCYHIETSETDFSGEKVYNTPDYLKMMWARIELLTQVLQMGFNFIFTDADIMWLRDPFPRLYPDGDFQMACDRFFGNPYDSDNWVNGGFTYVRSNNRSIEFYKFWHKSRLDYPDLHDQDVFNRIKHEPFISEIGIQMRFFDTVYFGGFCQTSRDINLVCTMHANCCIGLDKKLHDLNLVLDDWRKYLSLSEPVLNTTWSVPMKCLED

SEQ ID NO: 40539 - DNA, 1358 bp, Arabidopsis thaliana
  misc_feature (1)..(1358): Ceres Seq. ID no. 12337026
  misc_feature: MA Experiment ID: 108474 Result: Down-regulated in Transcription
  misc_feature: MA Experiment 108474 PARAMETER Experiment Name: At_Drought_Flowers_cDNA_P Parameter: Timepoint (hr) Value: null
  misc_feature: MA Experiment 108474 PARAMETER Experiment Name: At_Drought_Flowers_cDNA_P Parameter: Treatment Value: Drought vs. No Drought
  misc_feature: MA Experiment ID: 20000171 Result: Up-regulated in Transcription
  misc_feature: MA Experiment 20000171 PARAMETER Experiment Name: At_42deg_Heat_P Parameter: Age (day) Value: 14
  misc_feature: MA Experiment 20000171 PARAMETER Experiment Name: At_42deg_Heat_P Parameter: Organism Value: A. thaliana
  misc_feature: MA Experiment 20000171 PARAMETER Experiment Name: At_42deg_Heat_P Parameter: Plant Line Value: WS
  misc_feature: MA Experiment 20000171 PARAMETER Experiment Name: At_42deg_Heat_P Parameter: Temperature (deg C) Value: 42 vs. 22
  misc_feature: MA Experiment 20000171 PARAMETER Experiment Name: At_42deg_Heat_P Parameter: Timepoint (hr) Value: 1
  misc_feature: MA Experiment 20000171 PARAMETER Experiment Name: At_42deg_Heat_P Parameter: Tissue Value: Aerial
  misc_feature: MA Experiment ID: 20000173 Result: Up-regulated in Transcription
  misc_feature: MA Experiment 20000173 PARAMETER Experiment Name: At_42deg_Heat_P Parameter: Age (day) Value: 14
  misc_feature: MA Experiment 20000173 PARAMETER Experiment Name: At_42deg_Heat_P Parameter: Organism Value: A. thaliana
  misc_feature: MA Experiment 20000173 PARAMETER Experiment Name: At_42deg_Heat_P Parameter: Plant Line Value: WS
  misc_feature: MA Experiment 20000173 PARAMETER Experiment Name: At_42deg_Heat_P Parameter: Temperature (deg C) Value: 42 vs. 22
  misc_feature: MA Experiment 20000173 PARAMETER Experiment Name: At_42deg_Heat_P Parameter: Timepoint (hr) Value: 6
  misc_feature: MA Experiment 20000173 PARAMETER Experiment Name: At_42deg_Heat_P Parameter: Tissue Value: Aerial
  misc_feature: MA Experiment ID: 20000180 Result: Up-regulated in Transcription
  misc_feature: MA Experiment 20000180 PARAMETER Experiment Name: At_Germinating_Seeds_P Parameter: Age (hr) Value: 24 vs. 0
  misc_feature: MA Experiment 20000180 PARAMETER Experiment Name: At_Germinating_Seeds_P Parameter: Tissue Value: Germinating Seeds
  misc_feature: MA Experiment ID: 20000185 Result: Up-regulated in Transcription
  misc_feature: MA Experiment 20000185 PARAMETER Experiment Name: At_Roots__P Parameter: Age (day) Value: 7 vs. 21
  misc_feature: MA Experiment 20000185 PARAMETER Experiment Name: At_Roots__P Parameter: Organism Value: A. thaliana
  misc_feature: MA Experiment 20000185 PARAMETER Experiment Name: At_Roots__P Parameter: Tissue Value: Roots vs. Whole Plant
  misc_feature: MA Experiment ID: 20000227 Result: Down-regulated in Transcription
  misc_feature: MA Experiment 20000227 PARAMETER Experiment Name: At_Root-Tips-vs-Tops_P Parameter: Tissue Value: Root Tips vs. Root Tops
  misc_feature: MA Experiment ID: 20000265 Result: Up-regulated in Transcription
  misc_feature: MA Experiment 20000265 PARAMETER Experiment Name: At_Open_Flower_P Parameter: Age (day) Value: 21
  misc_feature: MA Experiment 20000265 PARAMETER Experiment Name: At_Open_Flower_P Parameter: Plant Line Value: WS
  misc_feature: MA Experiment 20000265 PARAMETER Experiment Name: At_Open_Flower_P Parameter: Tissue Value: Closed Flower vs. Whole Plant
  misc_feature: MA Experiment ID: 20000286 Result: Up-regulated in Transcription
  misc_feature: MA Experiment 20000286 PARAMETER Experiment Name: At_Open_Flower_P Parameter: Age (day) Value: 21
  misc_feature: MA Experiment 20000286 PARAMETER Experiment Name: At_Open_Flower_P Parameter: Plant Line Value: WS
  misc_feature: MA Experiment 20000286 PARAMETER Experiment Name: At_Open_Flower_P Parameter: Tissue Value: Half Open vs. Whole Plant
  misc_feature: MA Experiment ID: 20000439 Result: Up-regulated in Transcription
  misc_feature: MA Experiment 20000439 PARAMETER Experiment Name: At_Roots__P Parameter: Age (day) Value: 14 vs. 21
  misc_feature: MA Experiment 20000439 PARAMETER Experiment Name: At_Roots__P Parameter: Organism Value: A. thaliana
  misc_feature: MA Experiment 20000439 PARAMETER Experiment Name: At_Roots__P Parameter: Tissue Value: Roots vs. Whole Plant
  misc_feature: MA Experiment ID: 20000451 Result: Up-regulated in Transcription
  misc_feature: MA Experiment 20000451 PARAMETER Experiment Name: At_CS6879_Shoots-Roots_P Parameter: Age (day) Value: 14
  misc_feature: MA Experiment 20000451 PARAMETER Experiment Name: At_CS6879_Shoots-Roots_P Parameter: Organism Value: A. thaliana
  misc_feature: MA Experiment 20000451 PARAMETER Experiment Name: At_CS6879_Shoots-Roots_P Parameter: Plant Line Value: CS6879 vs. WS
  misc_feature: MA Experiment 20000451 PARAMETER Experiment Name: At_CS6879_Shoots-Roots_P Parameter: Tissue Value: Roots
  misc_feature: MA Experiment ID: 20001556 Result: Up-regulated in Transcription
  misc_feature: MA Experiment 20001556 PARAMETER Experiment Name: At_Drought_Soil_Dry_P Parameter: Age (day) Value: 26
  misc_feature: MA Experiment 20001556 PARAMETER Experiment Name: At_Drought_Soil_Dry_P Parameter: Organism Value: A. thaliana
  misc_feature: MA Experiment 20001556 PARAMETER Experiment Name: At_Drought_Soil_Dry_P Parameter: Plant Line Value: WS
  misc_feature: MA Experiment 20001556 PARAMETER Experiment Name: At_Drought_Soil_Dry_P Parameter: Post Timepoint (hr) Value: None
  misc_feature: MA Experiment 20001556 PARAMETER Experiment Name: At_Drought_Soil_Dry_P Parameter: Post-Treatment Value: None
  misc_feature: MA Experiment 20001556 PARAMETER Experiment Name: At_Drought_Soil_Dry_P Parameter: Timepoint (day) Value: 12
  misc_feature: MA Experiment 20001556 PARAMETER Experiment Name: At_Drought_Soil_Dry_P Parameter: Treatment Value: Drought vs. No Drought
  misc_feature: MA Experiment ID: 20001904 Result: Up-regulated in Transcription
  misc_feature: MA Experiment 20001904 PARAMETER Experiment Name: At_Drought_Reproduction_P Parameter: Age (day) Value: 37
  misc_feature: MA Experiment 20001904 PARAMETER Experiment Name: At_Drought_Reproduction_P Parameter: Organism Value: A. thaliana
  misc_feature: MA Experiment 20001904 PARAMETER Experiment Name: At_Drought_Reproduction_P Parameter: Plant Line Value: WS
  misc_feature: MA Experiment 20001904 PARAMETER Experiment Name: At_Drought_Reproduction_P Parameter: Timepoint (day) Value: 7
  misc_feature: MA Experiment 20001904 PARAMETER Experiment Name: At_Drought_Reproduction_P Parameter: Tissue Value: Rosettes
  misc_feature: MA Experiment 20001904 PARAMETER Experiment Name: At_Drought_Reproduction_P Parameter: Treatment Value: Drought vs. No Drought
  misc_feature: MA Experiment ID: 20001905 Result: Up-regulated in Transcription
  misc_feature: MA Experiment 20001905 PARAMETER Experiment Name: At_Drought_Reproduction_P Parameter: Age (day) Value: 40
  misc_feature: MA Experiment 20001905 PARAMETER Experiment Name: At_Drought_Reproduction_P Parameter: Organism Value: A. thaliana
  misc_feature: MA Experiment 20001905 PARAMETER Experiment Name: At_Drought_Reproduction_P Parameter: Plant Line Value: WS
  misc_feature: MA Experiment 20001905 PARAMETER Experiment Name: At_Drought_Reproduction_P Parameter: Timepoint (day) Value: 10
  misc_feature: MA Experiment 20001905 PARAMETER Experiment Name: At_Drought_Reproduction_P Parameter: Tissue Value: Rosettes
  misc_feature: MA Experiment 20001905 PARAMETER Experiment Name: At_Drought_Reproduction_P Parameter: Treatment Value: Drought vs. No Drought
  misc_feature: MA Experiment ID: 20001906 Result: Up-regulated in Transcription
  misc_feature: MA Experiment 20001906 PARAMETER Experiment Name: At_Drought_Reproduction_P Parameter: Age (day) Value: 35
  misc_feature: MA Experiment 20001906 PARAMETER Experiment Name: At_Drought_Reproduction_P Parameter: Organism Value: A. thaliana
  misc_feature: MA Experiment 20001906 PARAMETER Experiment Name: At_Drought_Reproduction_P Parameter: Plant Line Value: WS
  misc_feature: MA Experiment 20001906 PARAMETER Experiment Name: At_Drought_Reproduction_P Parameter: Timepoint (day) Value: 5
  misc_feature: MA Experiment 20001906 PARAMETER Experiment Name: At_Drought_Reproduction_P Parameter: Tissue Value: Siliques
  misc_feature: MA Experiment 20001906 PARAMETER Experiment Name: At_Drought_Reproduction_P Parameter: Treatment Value: Drought vs. No Drought
ctaacttctctgttcatctttttctctctttatttataaatttatctgcatagtactctctgaatctatatcttcaaaaaaaaaaaacgtccaagatcaaatcaagaaacccattaaaaaaaaaaatcaggttttggtttcagttttaagggtttaaggtttcttggggaagaaacgatggagactttttgtgggtttcaaaaggaggaagagcagatggatttacctcctgggttcaggtttcatccaacagatgaagaactcataactcactatctccataagaaggttcttgacaccagcttctcagctaaagctatcggtgaagttgatttaaacaaatcagagccatgggagttaccatggatggcaaaaatgggtgagaaagaatggtattttttctgtgtgagagacagaaagtatcccaccggtttaagaactaaccgagcaactgaagccggttattggaaggcgaccgggaaggataaagagatataccgaggcaaatcacttgttgggatgaagaagacacttgttttctatagaggaagagctcctaaaggtcagaaaaccaactgggtgatgcatgagtacaggcttgaaaaaaattctctgcccataacttgccgaaaaccgcaaagaatgaatgggtgatatgcagggtgttccaaaagagtgctggagggaagaagatcccgatttcgagtctaatccgaatcggttcactcggaaccgactttaacccttcgcttttgccctctttaaccgattcttcgccttacaacgataaaaccaaaacagaaccggtctacgtgccctgcttctccaaccaaacggatcaaaaccaaggaaccacactcaattgcttcagcagccctgttcttaactcgatccaagccgacatttttcacaggattccactctatcaaactcagtccctccaggtttctatgaatctacagagcccggttctcacgcaagaacactcagttctacatgctatgatcgagaacaacagaagacaaagtctcaaaacgatgagtgtctcacaagaaaccggagtttcaactgacatgaacactgatatctcatcggattttgaatttggtaagaggcggtttgattctcaagaagatccgtcttcctctactggaccggttgatcttgaacctttctggaattactgaagatgattcaagattctcatgtccattaatttactgtggtgtgttaaagtttgtataggctattgtcatatactctcatatcaacttccactatatattataacaatttaaagaaacttaaaaatatgatttgatatatgactaaagtattataatacaattttgtacccc

SEQ ID NO: 40540 - protein, 158 aa, Arabidopsis thaliana
  peptide (1)..(158): Ceres Seq. ID no. 12337027
  misc_feature (16)..(142): Pfam Name: No apical meristem (NAM) protein Pfam Description: No apical meristem (NAM) protein
  misc_feature (14)..(151): Homolog of NCBI NO: 30682054 NR Description: NAM (no apical meristem)-related protein
  misc_feature (1)..(151): Homolog of NCBI NO: 30682048 NR Description: NAM (no apical meristem)-related protein
  misc_feature (14)..(151): Homolog of NCBI NO: 21537315 NR Description: NAM, no apical meristem,-like protein
  misc_feature (1)..(151): Homolog of NCBI NO: 15240252 NR Description: NAM, no apical meristem, - like protein
METFCGFQKEEEQMDLPPGFRFHPTDEELITHYLHKKVLDTSFSAKAIGEVDLNKSEPWELPWMAKMGEKEWYFFCVRDRKYPTGLRTNRATEAGYWKATGKDKEIYRGKSLVGMKKTLVFYRGRAPKGQKTNWVMHEYRLEKNSLPITCRKPQRMNG

SEQ ID NO: 40541 - protein, 145 aa, Arabidopsis thaliana
  peptide (1)..(145): Ceres Seq. ID no. 12337028
  misc_feature (3)..(129): Pfam Name: No apical meristem (NAM) protein Pfam Description: No apical meristem (NAM) protein
  misc_feature (1)..(138): Homolog of NCBI NO: 30682054 NR Description: NAM (no apical meristem)-related protein
  misc_feature (1)..(138): Homolog of NCBI NO: 30682048 NR Description: NAM (no apical meristem)-related protein
  misc_feature (1)..(138): Homolog of NCBI NO: 21537315 NR Description: NAM, no apical meristem,-like protein
  misc_feature (1)..(138): Homolog of NCBI NO: 15240252 NR Description: NAM, no apical meristem, - like protein
MDLPPGFRFHPTDEELITHYLHKKVLDTSFSAKAIGEVDLNKSEPWELPWMAKMGEKEWYFFCVRDRKYPTGLRTNRATEAGYWKATGKDKEIYRGKSLVGMKKTLVFYRGRAPKGQKTNWVMHEYRLEKNSLPITCRKPQRMNG

SEQ ID NO: 40542 - protein, 95 aa, Arabidopsis thaliana
  peptide (1)..(95): Ceres Seq. ID no. 12337029
  misc_feature (1)..(79): Pfam Name: No apical meristem (NAM) protein Pfam Description: No apical meristem (NAM) protein
  misc_feature (1)..(88): Homolog of NCBI NO: 30682054 NR Description: NAM (no apical meristem)-related protein
  misc_feature (1)..(88): Homolog of NCBI NO: 30682048 NR Description: NAM (no apical meristem)-related protein
  misc_feature (1)..(88): Homolog of NCBI NO: 21537315 NR Description: NAM, no apical meristem,-like protein
  misc_feature (1)..(88): Homolog of NCBI NO: 15240252 NR Description: NAM, no apical meristem, - like protein
MAKMGEKEWYFFCVRDRKYPTGLRTNRATEAGYWKATGKDKEIYRGKSLVGMKKTLVFYRGRAPKGQKTNWVMHEYRLEKNSLPITCRKPQRMNG

SEQ ID NO: 40543 - DNA, 1202 bp, Arabidopsis thaliana
  misc_feature (1)..(1202): Ceres Seq. ID no. 12384778
  misc_feature: MA Experiment ID: 108461 Result: Up-regulated in Transcription
  misc_feature: MA Experiment 108461 PARAMETER Experiment Name: At_Germinating_Seeds_cDNA_P Parameter: Age (day) Value: 1 vs. 0
  misc_feature: MA Experiment 108461 PARAMETER Experiment Name: At_Germinating_Seeds_cDNA_P Parameter: Tissue Value: Germinating Seeds
  misc_feature: MA Experiment ID: 20000180 Result: Up-regulated in Transcription
  misc_feature: MA Experiment 20000180 PARAMETER Experiment Name: At_Germinating_Seeds_P Parameter: Age (hr) Value: 24 vs. 0
  misc_feature: MA Experiment 20000180 PARAMETER Experiment Name: At_Germinating_Seeds_P Parameter: Tissue Value: Germinating Seeds
  misc_feature: MA Experiment ID: 20000184 Result: Up-regulated in Transcription
  misc_feature: MA Experiment 20000184 PARAMETER Experiment Name: At_Shoots__P Parameter: Age (day) Value: 7
  misc_feature: MA Experiment 20000184 PARAMETER Experiment Name: At_Shoots__P Parameter: Tissue Value: Shoots vs. Whole Plant
  misc_feature: MA Experiment ID: 20000185 Result: Up-regulated in Transcription
  misc_feature: MA Experiment 20000185 PARAMETER Experiment Name: At_Roots__P Parameter: Age (day) Value: 7 vs. 21
  misc_feature: MA Experiment 20000185 PARAMETER Experiment Name: At_Roots__P Parameter: Organism Value: A. thaliana
  misc_feature: MA Experiment 20000185 PARAMETER Experiment Name: At_Roots__P Parameter: Tissue Value: Roots vs. Whole Plant
  misc_feature: MA Experiment ID: 20000227 Result: Up-regulated in Transcription
  misc_feature: MA Experiment 20000227 PARAMETER Experiment Name: At_Root-Tips-vs-Tops_P Parameter: Tissue Value: Root Tips vs. Root Tops
  misc_feature: MA Experiment ID: 20000234 Result: Up-regulated in Transcription
  misc_feature: MA Experiment 20000234 PARAMETER Experiment Name: At_Siliques_P Parameter: Age (day) Value: 21
  misc_feature: MA Experiment 20000234 PARAMETER Experiment Name: At_Siliques_P Parameter: Organism Value: A. thaliana
  misc_feature: MA Experiment 20000234 PARAMETER Experiment Name: At_Siliques_P Parameter: Plant Line Value: WS
  misc_feature: MA Experiment 20000234 PARAMETER Experiment Name: At_Siliques_P Parameter: Tissue Value: Less Than 5mm Siliques vs. Whole Plant
  misc_feature: MA Experiment ID: 20000235 Result: Up-regulated in Transcription
  misc_feature: MA Experiment 20000235 PARAMETER Experiment Name: At_Siliques_P Parameter: Age (day) Value: 21
  misc_feature: MA Experiment 20000235 PARAMETER Experiment Name: At_Siliques_P Parameter: Organism Value: A. thaliana
  misc_feature: MA Experiment 20000235 PARAMETER Experiment Name: At_Siliques_P Parameter: Plant Line Value: WS
  misc_feature: MA Experiment 20000235 PARAMETER Experiment Name: At_Siliques_P Parameter: Tissue Value: 5-10mm Siliques vs. Whole Plant
  misc_feature: MA Experiment ID: 20000439 Result: Up-regulated in Transcription
  misc_feature: MA Experiment 20000439 PARAMETER Experiment Name: At_Roots__P Parameter: Age (day) Value: 14 vs. 21
  misc_feature: MA Experiment 20000439 PARAMETER Experiment Name: At_Roots__P Parameter: Organism Value: A. thaliana
  misc_feature: MA Experiment 20000439 PARAMETER Experiment Name: At_Roots__P Parameter: Tissue Value: Roots vs. Whole Plant
  misc_feature: MA Experiment ID: 20000527 Result: Down-regulated in Transcription
  misc_feature: MA Experiment 20000527 PARAMETER Experiment Name: At_10percent_PEG_P Parameter: Age (day) Value: 20
  misc_feature: MA Experiment 20000527 PARAMETER Experiment Name: At_10percent_PEG_P Parameter: Organism Value: A. thaliana
  misc_feature: MA Experiment 20000527 PARAMETER Experiment Name: At_10percent_PEG_P Parameter: Plant Line Value: WS
  misc_feature: MA Experiment 20000527 PARAMETER Experiment Name: At_10percent_PEG_P Parameter: Timepoint (day) Value: 20
  misc_feature: MA Experiment 20000527 PARAMETER Experiment Name: At_10percent_PEG_P Parameter: Tissue Value: Whole Plant
  misc_feature: MA Experiment 20000527 PARAMETER Experiment Name: At_10percent_PEG_P Parameter: Treatment Value: 10percent PEG vs. No Treatment
acacaacataatcctcccaaacagagagagtctcaaaaattaaaccaacaaatttaaagatgaattgcttgatagctatagctctttcagtctctttctttcttgtgggaattgttggaccgatccaagctcaattgcagatgaatttctatgccaattcttgtcctaatgctgaaaagattgttcaagattttgtttcaaaccacgtttctaatgctccttctcttgctgctgctctcattagaatgcatttccatgactgttttgtccgaggttgtgatggatcagtgcttataaactcaacgtcaggaaacgcagagagagacgcgactcctaacctaacggttcgagggtttggcttcatcgacgcaattaaatctgtgcttgaagctcaatgccctggaattgtctcttgcgctgatattatcgctctagcttctcgcgacgctgtcgttttcaccggaggaccgaattggagtgtaccgaccggaagaagagacgggaggatatcaaacgcagcggaggcattagccaacattcctcctccaaccagtaatatcaccaatcttcagacactctttgcaaaccaaggacttgatcttaaggacctcgttttactatccggggctcacactattggtgtatctcactgctcgtctttcacaaaccgtctctacaattttacgggtcgtggaggccaagatccggctttggacagcgagtacgcagccaatctcaagtctagaaaatgtcctagcctcaacgataacaagaccatcgtagagatggatccagggagccgcaaaacatttgatctaagttattaccagctcgtactcaagcgtagaggtctgtttcaatcagactctgctctcaccactaaccccacaacactttcaaacataaaccggatcttgacgggttcggtggggagtttcttctctgagtttgccaagtcaatggagaaaatgggtcggatcaatgtcaagactggttcagctggagtggttaggaggcaatgttccgttgcaaatagttaaggggtggaaatgtaaaagatttgggagcttgtgggggtagttgtgataataattaataaggatgattgtgaatttatgatgtggccttttgggatttgtgtgtatggattttgttacagacttcgtcaataaagaaataaaaagattttactgctttttttt

SEQ ID NO: 40544 - protein, 326 aa, Arabidopsis thaliana
  peptide (1)..(326): Ceres Seq. ID no. 12384779
  misc_feature (42)..(288): Pfam Name: Peroxidase Pfam Description: Peroxidase
  misc_feature (7)..(325): Homolog of NCBI NO: 15237128 NR Description: peroxidase, putative; protein id: At4g11290.1
  misc_feature (1)..(326): Homolog of NCBI NO: 21537041 NR Description: putative peroxidase [Arabidopsis thaliana]
  misc_feature (1)..(326): Homolog of NCBI NO: 1546704 NR Description: peroxidase ATP7a [Arabidopsis thaliana]
  misc_feature (1)..(326): Homolog of NCBI NO: 1402920 NR Description: peroxidase [Arabidopsis thaliana]
  misc_feature (1)..(326): Homolog of NCBI NO: 15233153 NR Description: peroxidase, putative
  misc_feature (1)..(326): Homolog of NCBI NO: 21536908 NR Description: putative peroxidase [Arabidopsis thaliana]
  misc_feature (1)..(326): Homolog of NCBI NO: 15220463 NR Description: peroxidase, putative
MNCLIAIALSVSFFLVGIVGPIQAQLQMNFYANSCPNAEKIVQDFVSNHVSNAPSLAAALIRMHFHDCFVRGCDGSVLINSTSGNAERDATPNLTVRGFGFIDAIKSVLEAQCPGIVSCADIIALASRDAVVFTGGPNWSVPTGRRDGRISNAAEALANIPPPTSNITNLQTLFANQGLDLKDLVLLSGAHTIGVSHCSSFTNRLYNFTGRGGQDPALDSEYAANLKSRKCPSLNDNKTIVEMDPGSRKTFDLSYYQLVLKRRGLFQSDSALTTNPTTLSNINRILTGSVGSFFSEFAKSMEKMGRINVKTGSAGVVRRQCSVANS

SEQ ID NO: 40545 - protein, 299 aa, Arabidopsis thaliana
  peptide (1)..(299): Ceres Seq. ID no. 12384780
  misc_feature (15)..(261): Pfam Name: Peroxidase Pfam Description: Peroxidase
  misc_feature (1)..(298): Homolog of NCBI NO: 15237128 NR Description: peroxidase, putative; protein id: At4g11290.1
  misc_feature (1)..(299): Homolog of NCBI NO: 21537041 NR Description: putative peroxidase [Arabidopsis thaliana]
  misc_feature (1)..(299): Homolog of NCBI NO: 1546704 NR Description: peroxidase ATP7a [Arabidopsis thaliana]
  misc_feature (1)..(299): Homolog of NCBI NO: 1402920 NR Description: peroxidase [Arabidopsis thaliana]
  misc_feature (1)..(299): Homolog of NCBI NO: 15233153 NR Description: peroxidase, putative
  misc_feature (1)..(299): Homolog of NCBI NO: 21536908 NR Description: putative peroxidase [Arabidopsis thaliana]
  misc_feature (1)..(299): Homolog of NCBI NO: 15220463 NR Description: peroxidase, putative
MNFYANSCPNAEKIVQDFVSNHVSNAPSLAAALIRMHFHDCFVRGCDGSVLINSTSGNAERDATPNLTVRGFGFIDAIKSVLEAQCPGIVSCADIIALASRDAVVFTGGPNWSVPTGRRDGRISNAAEALANIPPPTSNITNLQTLFANQGLDLKDLVLLSGAHTIGVSHCSSFTNRLYNFTGRGGQDPALDSEYAANLKSRKCPSLNDNKTIVEMDPGSRKTFDLSYYQLVLKRRGLFQSDSALTTNPTTLSNINRILTGSVGSFFSEFAKSMEKMGRINVKTGSAGVVRRQCSVANS

SEQ ID NO: 40546 - protein, 264 aa, Arabidopsis thaliana
  peptide (1)..(264): Ceres Seq. ID no. 12384781
  misc_feature (1)..(226): Pfam Name: Peroxidase Pfam Description: Peroxidase
  misc_feature (1)..(263): Homolog of NCBI NO: 15237128 NR Description: peroxidase, putative; protein id: At4g11290.1
  misc_feature (1)..(264): Homolog of NCBI NO: 21537041 NR Description: putative peroxidase [Arabidopsis thaliana]
  misc_feature (1)..(264): Homolog of NCBI NO: 1546704 NR Description: peroxidase ATP7a [Arabidopsis thaliana]
  misc_feature (1)..(264): Homolog of NCBI NO: 1402920 NR Description: peroxidase [Arabidopsis thaliana]
  misc_feature (1)..(264): Homolog of NCBI NO: 15233153 NR Description: peroxidase, putative
  misc_feature (1)..(264): Homolog of NCBI NO: 21536908 NR Description: putative peroxidase [Arabidopsis thaliana]
  misc_feature (1)..(264): Homolog of NCBI NO: 15220463 NR Description: peroxidase, putative
MHFHDCFVRGCDGSVLINSTSGNAERDATPNLTVRGFGFIDAIKSVLEAQCPGIVSCADIIALASRDAVVFTGGPNWSVPTGRRDGRISNAAEALANIPPPTSNITNLQTLFANQGLDLKDLVLLSGAHTIGVSHCSSFTNRLYNFTGRGGQDPALDSEYAANLKSRKCPSLNDNKTIVEMDPGSRKTFDLSYYQLVLKRRGLFQSDSALTTNPTTLSNINRILTGSVGSFFSEFAKSMEKMGRINVKTGSAGVVRRQCSVANS

SEQ ID NO: 40547 - DNA, 1700 bp, Arabidopsis thaliana
  misc_feature (1)..(1700): Ceres Seq. ID no. 12395249
  misc_feature: MA Experiment ID: 20000264 Result: Up-regulated in Transcription
  misc_feature: MA Experiment 20000264 PARAMETER Experiment Name: At_Open_Flower_P Parameter: Age (day) Value: 21
  misc_feature: MA Experiment 20000264 PARAMETER Experiment Name: At_Open_Flower_P Parameter: Plant Line Value: WS
  misc_feature: MA Experiment 20000264 PARAMETER Experiment Name: At_Open_Flower_P Parameter: Tissue Value: Open Flower vs. Whole Plant
  misc_feature: MA Experiment ID: 20000286 Result: Up-regulated in Transcription
  misc_feature: MA Experiment 20000286 PARAMETER Experiment Name: At_Open_Flower_P Parameter: Age (day) Value: 21
  misc_feature: MA Experiment 20000286 PARAMETER Experiment Name: At_Open_Flower_P Parameter: Plant Line Value: WS
  misc_feature: MA Experiment 20000286 PARAMETER Experiment Name: At_Open_Flower_P Parameter: Tissue Value: Half Open vs. Whole Plant
  misc_feature: MA Experiment ID: 20000794 Result: Up-regulated in Transcription
  misc_feature: MA Experiment 20000794 PARAMETER Experiment Name: At_Petals_P Parameter: Age (day) Value: 23-25 days
  misc_feature: MA Experiment 20000794 PARAMETER Experiment Name: At_Petals_P Parameter: Plant Line Value: WS
  misc_feature: MA Experiment 20000794 PARAMETER Experiment Name: At_Petals_P Parameter: Tissue Value: Petals vs. Whole plant
aagacacgaaaaagaattttaccgactggaagaagaaaaaacatcaaccagacaaaagaaaagaaaacaaaaacacatcttcgagatcaaacaaaccctaattatcatccatcgtcgccttctcaatatatattgccggaagagcagcgatgctcgttaacgtcgggacggttataatgaccgttttgaccctggctagtttggtcggaggcttcggtgtgaattggggcaatatcgcatcacatccgttgaatcccaacattgttgttcagatgcttaaggacaataagatcaataaagtgaagctttttgacgctgattcatggacgatgaatgctttggctggtacgggcatggaggttatggttggaatccctaataaccttcttgagtctctcgcagatgattacgataatgctaaagattgggttaaagaaaacgtgacccagtatattcgtaagggtggcgtcgacatcaagtacgtagccgtggggaacgagccgtttttgtctgcatacaacggatcgttcttgaagacaacatttccagcgttaaagaacattcacaaggcgttaaaagaagctggacacaccaatataatgaaagccacgatcccacaaaacgcagaagtttaccaatcagccaacgacaagccatcagaaggtgatttccgcaaggatgtcaaacaaacgatgcttgatatcgtcaatttcttccacgaaaacgacttacctttcaccgtcaacatttaccctttccttagtctttacctaaacgagcattttcccgttgagttcgcttttcttgacggtgatggtcagacaatgactgacaaaggaaagaattatgataacgtgtttgacgccaattacgacacacttgtttacgcgttgaagaaggctgggattcacgatatgaagattatcgttggagaggttggatggccaacggatggtcacaaatatgcatcgccgaagctagcggagaaattctatgcagggcttatgaaaagacttgctaaggacggtgggactccaacgaggcctgaaagattagaggtctatctcttcggtttcctcgacgaagacatgaagagtattcttccagggccttttgagagacattggggaatctttagatacgatgggacaccaaagtttatgctagatttcacgggacaaggacgccaaatggtgcccgttgcagctaaaggtgtgcagtacttggaaaaacaatggtgcgtagtgaacaaagacacggtcaatctagacgaagttggtcctgatctagactatgcgtgttaccacggggactgcaccgcgatggaagccgggtcaacttgtagtaagctaaccaaagtccaaaacatatcatacgcatttaacatgtatttccagatacaagaccaagacgttagggcttgcgatttcaaaggagctgcaatgatcaccaaggtcaatgcatccgtgggaagttgcttgttccctgttcagatcgttagtggaagtgatgatttcaggatcaactttgtgttcggaagattcgtcgtctttggacttgttcttcttggattgctcacggttatataatttgtttttctgttgttgtttggttttctttttgcaatttggagggatttattcgacacgattaattgttatttgttattcgttttaaaaatgtttactttgagttagttc

SEQ ID NO: 40548 - protein, 479 aa, Arabidopsis thaliana
  peptide (1)..(479): Ceres Seq. ID no. 12395250
  misc_feature (22)..(341): Pfam Name: Glycosyl hydrolases family 17 Pfam Description: Glycosyl hydrolases family 17
  misc_feature (29)..(479): Homolog of NCBI NO: 22330833 NR Description: glycosyl hydrolase family 17; protein id:
  misc_feature (2)..(478): Homolog of NCBI NO: 18483232 NR Description: 3-glucanase [Sorghum bicolor]
  misc_feature (5)..(453): Homolog of NCBI NO: 15224778 NR Description: glycosyl hydrolase family 17; protein id:
  misc_feature (9)..(476): Homolog of NCBI NO: 15238768 NR Description: glycosyl hydrolase family 17; protein id:
  misc_feature (23)..(457): Homolog of NCBI NO: 28269434 NR Description: putative beta-1,3 glucanase
  misc_feature (19)..(453): Homolog of NCBI NO: 37223500 NR Description: beta-1,3-glucanase, acidic [Coffea arabica]
  misc_feature (5)..(453): Homolog of NCBI NO: 15217739 NR Description: glycosyl hydrolase family 17; protein id:
  misc_feature (8)..(479): Homolog of NCBI NO: 6223646 NR Description: putative beta-1,3-glucanase [Arabidopsis thaliana]
  misc_feature (1)..(476): Homolog of NCBI NO: 34395009 NR Description: putative 3-glucanase [Oryza sativa (japonica
  misc_feature (1)..(479): Homolog of NCBI NO: 15238256 NR Description: glycosyl hydrolase family 17; protein id:
MLVNVGTVIMTVLTLASLVGGFGVNWGNIASHPLNPNIVVQMLKDNKINKVKLFDADSWTMNALAGTGMEVMVGIPNNLLESLADDYDNAKDWVKENVTQYIRKGGVDIKYVAVGNEPFLSAYNGSFLKTTFPALKNIHKALKEAGHTNIMKATIPQNAEVYQSANDKPSEGDFRKDVKQTMLDIVNFFHENDLPFTVNIYPFLSLYLNEHFPVEFAFLDGDGQTMTDKGKNYDNVFDANYDTLVYALKKAGIHDMKIIVGEVGWPTDGHKYASPKLAEKFYAGLMKRLAKDGGTPTRPERLEVYLFGFLDEDMKSILPGPFERHWGIFRYDGTPKFMLDFTGQGRQMVPVAAKGVQYLEKQWCVVNKDTVNLDEVGPDLDYACYHGDCTAMEAGSTCSKLTKVQNISYAFNMYFQIQDQDVRACDFKGAAMITKVNASVGSCLFPVQIVSGSDDFRINFVFGRFVVFGLVLLGLLTVI

SEQ ID NO: 40549 - protein, 470 aa, Arabidopsis thaliana
  peptide (1)..(470): Ceres Seq. ID no. 12395251
  misc_feature (13)..(332): Pfam Name: Glycosyl hydrolases family 17 Pfam Description: Glycosyl hydrolases family 17
  misc_feature (20)..(470): Homolog of NCBI NO: 22330833 NR Description: glycosyl hydrolase family 17; protein id:
  misc_feature (1)..(469): Homolog of NCBI NO: 18483232 NR Description: 3-glucanase [Sorghum bicolor]
  misc_feature (1)..(444): Homolog of NCBI NO: 15224778 NR Description: glycosyl hydrolase family 17; protein id:
  misc_feature (1)..(467): Homolog of NCBI NO: 15238768 NR Description: glycosyl hydrolase family 17; protein id:
  misc_feature (14)..(448): Homolog of NCBI NO: 28269434 NR Description: putative beta-1,3 glucanase
  misc_feature (10)..(444): Homolog of NCBI NO: 37223500 NR Description: beta-1,3-glucanase, acidic [Coffea arabica]
  misc_feature (1)..(444): Homolog of NCBI NO: 15217739 NR Description: glycosyl hydrolase family 17; protein id:
  misc_feature (1)..(470): Homolog of NCBI NO: 6223646 NR Description: putative beta-1,3-glucanase [Arabidopsis thaliana]
  misc_feature (1)..(467): Homolog of NCBI NO: 34395009 NR Description: putative 3-glucanase [Oryza sativa (japonica
  misc_feature (1)..(470): Homolog of NCBI NO: 15238256 NR Description: glycosyl hydrolase family 17; protein id:
MTVLTLASLVGGFGVNWGNIASHPLNPNIVVQMLKDNKINKVKLFDADSWTMNALAGTGMEVMVGIPNNLLESLADDYDNAKDWVKENVTQYIRKGGVDIKYVAVGNEPFLSAYNGSFLKTTFPALKNIHKALKEAGHTNIMKATIPQNAEVYQSANDKPSEGDFRKDVKQTMLDIVNFFHENDLPFTVNIYPFLSLYLNEHFPVEFAFLDGDGQTMTDKGKNYDNVFDANYDTLVYALKKAGIHDMKIIVGEVGWPTDGHKYASPKLAEKFYAGLMKRLAKDGGTPTRPERLEVYLFGFLDEDMKSILPGPFERHWGIFRYDGTPKFMLDFTGQGRQMVPVAAKGVQYLEKQWCVVNKDTVNLDEVGPDLDYACYHGDCTAMEAGSTCSKLTKVQNISYAFNMYFQIQDQDVRACDFKGAAMITKVNASVGSCLFPVQIVSGSDDFRINFVFGRFVVFGLVLLGLLTVI

SEQ ID NO: 40550 - protein, 438 aa, Arabidopsis thaliana
  peptide (1)..(438): Ceres Seq. ID no. 12395252
  misc_feature (1)..(300): Pfam Name: Glycosyl hydrolases family 17 Pfam Description: Glycosyl hydrolases family 17
  misc_feature (1)..(438): Homolog of NCBI NO: 22330833 NR Description: glycosyl hydrolase family 17; protein id:
  misc_feature (1)..(437): Homolog of NCBI NO: 18483232 NR Description: 3-glucanase [Sorghum bicolor]
  misc_feature (1)..(412): Homolog of NCBI NO: 15224778 NR Description: glycosyl hydrolase family 17; protein id:
  misc_feature (1)..(435): Homolog of NCBI NO: 15238768 NR Description: glycosyl hydrolase family 17; protein id:
  misc_feature (1)..(416): Homolog of NCBI NO: 28269434 NR Description: putative beta-1,3 glucanase
  misc_feature (1)..(412): Homolog of NCBI NO: 37223500 NR Description: beta-1,3-glucanase, acidic [Coffea arabica]
  misc_feature (1)..(412): Homolog of NCBI NO: 15217739 NR Description: glycosyl hydrolase family 17; protein id:
  misc_feature (1)..(438): Homolog of NCBI NO: 6223646 NR Description: putative beta-1,3-glucanase [Arabidopsis thaliana]
  misc_feature (1)..(435): Homolog of NCBI NO: 34395009 NR Description: putative 3-glucanase [Oryza sativa (japonica
  misc_feature (1)..(438): Homolog of NCBI NO: 15238256 NR Description: glycosyl hydrolase family 17; protein id:
MLKDNKINKVKLFDADSWTMNALAGTGMEVMVGIPNNLLESLADDYDNAKDWVKENVTQYIRKGGVDIKYVAVGNEPFLSAYNGSFLKTTFPALKNIHKALKEAGHTNIMKATIPQNAEVYQSANDKPSEGDFRKDVKQTMLDIVNFFHENDLPFTVNIYPFLSLYLNEHFPVEFAFLDGDGQTMTDKGKNYDNVFDANYDTLVYALKKAGIHDMKIIVGEVGWPTDGHKYASPKLAEKFYAGLMKRLAKDGGTPTRPERLEVYLFGFLDEDMKSILPGPFERHWGIFRYDGTPKFMLDFTGQGRQMVPVAAKGVQYLEKQWCVVNKDTVNLDEVGPDLDYACYHGDCTAMEAGSTCSKLTKVQNISYAFNMYFQIQDQDVRACDFKGAAMITKVNASVGSCLFPVQIVSGSDDFRINFVFGRFVVFGLVLLGLLTVI

SEQ ID NO: 40551 - DNA, 1068 bp, Arabidopsis thaliana
  misc_feature (1)..(1068): Ceres Seq. ID no. 12328716
  misc_feature: MA Experiment ID: 108434 Result: Up-regulated in Transcription
  misc_feature: MA Experiment 108434 PARAMETER Experiment Name: At_Root_Tips_cDNA_P Parameter: Tissue Value: Root Tips
  misc_feature: MA Experiment ID: 108461 Result: Down-regulated in Transcription
  misc_feature: MA Experiment 108461 PARAMETER Experiment Name: At_Germinating_Seeds_cDNA_P Parameter: Age (day) Value: 1 vs. 0
  misc_feature: MA Experiment 108461 PARAMETER Experiment Name: At_Germinating_Seeds_cDNA_P Parameter: Tissue Value: Germinating Seeds
  misc_feature: MA Experiment ID: 108462 Result: Down-regulated in Transcription
  misc_feature: MA Experiment 108462 PARAMETER Experiment Name: At_Germinating_Seeds_cDNA_P Parameter: Age (day) Value: 2 vs. 0
  misc_feature: MA Experiment 108462 PARAMETER Experiment Name: At_Germinating_Seeds_cDNA_P Parameter: Tissue Value: Germinating Seeds
  misc_feature: MA Experiment ID: 108463 Result: Down-regulated in Transcription
  misc_feature: MA Experiment 108463 PARAMETER Experiment Name: At_Germinating_Seeds_cDNA_P Parameter: Age (day) Value: 3 vs. 0
  misc_feature: MA Experiment 108463 PARAMETER Experiment Name: At_Germinating_Seeds_cDNA_P Parameter: Tissue Value: Germinating Seeds
  misc_feature: MA Experiment ID: 108464 Result: Down-regulated in Transcription
  misc_feature: MA Experiment 108464 PARAMETER Experiment Name: At_Germinating_Seeds_cDNA_P Parameter: Age (day) Value: 4 vs. 0
  misc_feature: MA Experiment 108464 PARAMETER Experiment Name: At_Germinating_Seeds_cDNA_P Parameter: Tissue Value: Germinating Seeds
  misc_feature: MA Experiment ID: 108573 Result: Down-regulated in Transcription
  misc_feature: MA Experiment 108573 PARAMETER Experiment Name: At_Drought_cDNA_P Parameter: Timepoint (hr) Value: 6
  misc_feature: MA Experiment 108573 PARAMETER Experiment Name: At_Drought_cDNA_P Parameter: Tissue Value: Aerial
  misc_feature: MA Experiment 108573 PARAMETER Experiment Name: At_Drought_cDNA_P Parameter: Treatment Value: Drought vs. No Drought
  misc_feature: MA Experiment ID: 20000180 Result: Down-regulated in Transcription
  misc_feature: MA Experiment 20000180 PARAMETER Experiment Name: At_Germinating_Seeds_P Parameter: Age (hr) Value: 24 vs. 0
  misc_feature: MA Experiment 20000180 PARAMETER Experiment Name: At_Germinating_Seeds_P Parameter: Tissue Value: Germinating Seeds
  misc_feature: MA Experiment ID: 20000184 Result: Down-regulated in Transcription
  misc_feature: MA Experiment 20000184 PARAMETER Experiment Name: At_Shoots__P Parameter: Age (day) Value: 7
  misc_feature: MA Experiment 20000184 PARAMETER Experiment Name: At_Shoots__P Parameter: Tissue Value: Shoots vs. Whole Plant
  misc_feature: MA Experiment ID: 20000227 Result: Up-regulated in Transcription
  misc_feature: MA Experiment 20000227 PARAMETER Experiment Name: At_Root-Tips-vs-Tops_P Parameter: Tissue Value: Root Tips vs. Root Tops
  misc_feature: MA Experiment ID: 20000438 Result: Down-regulated in Transcription
  misc_feature: MA Experiment 20000438 PARAMETER Experiment Name: At_Shoots__P Parameter: Age (day) Value: 14
  misc_feature: MA Experiment 20000438 PARAMETER Experiment Name: At_Shoots__P Parameter: Tissue Value: Shoots vs. Whole Plant
  misc_feature: MA Experiment ID: 20001458 Result: Up-regulated in Transcription
  misc_feature: MA Experiment 20001458 PARAMETER Experiment Name: At_50mM_NH4NO3_L-to-H_P Parameter: Age (day) Value: Undefined
  misc_feature: MA Experiment 20001458 PARAMETER Experiment Name: At_50mM_NH4NO3_L-to-H_P Parameter: Organism Value: Undefined
  misc_feature: MA Experiment 20001458 PARAMETER Experiment Name: At_50mM_NH4NO3_L-to-H_P Parameter: Plant Line Value: Undefined
  misc_feature: MA Experiment 20001458 PARAMETER Experiment Name: At_50mM_NH4NO3_L-to-H_P Parameter: Timepoint (hr) Value: 2
  misc_feature: MA Experiment 20001458 PARAMETER Experiment Name: At_50mM_NH4NO3_L-to-H_P Parameter: Tissue Value: Siliques
  misc_feature: MA Experiment 20001458 PARAMETER Experiment Name: At_50mM_NH4NO3_L-to-H_P Parameter: Treatment Value: 50mM NH4NO3 vs. 100mM Manitol
  misc_feature: MA Experiment ID: 20001557 Result: Up-regulated in Transcription
  misc_feature: MA Experiment 20001557 PARAMETER Experiment Name: At_Drought_Soil_Dry_P Parameter: Age (day) Value: 27
  misc_feature: MA Experiment 20001557 PARAMETER Experiment Name: At_Drought_Soil_Dry_P Parameter: Organism Value: A. thaliana
  misc_feature: MA Experiment 20001557 PARAMETER Experiment Name: At_Drought_Soil_Dry_P Parameter: Plant Line Value: WS
  misc_feature: MA Experiment 20001557 PARAMETER Experiment Name: At_Drought_Soil_Dry_P Parameter: Post Timepoint (hr) Value: 3
  misc_feature: MA Experiment 20001557 PARAMETER Experiment Name: At_Drought_Soil_Dry_P Parameter: Post-Treatment Value: Re-Water vs. No Drought
  misc_feature: MA Experiment 20001557 PARAMETER Experiment Name: At_Drought_Soil_Dry_P Parameter: Timepoint (day) Value: 13
  misc_feature: MA Experiment 20001557 PARAMETER Experiment Name: At_Drought_Soil_Dry_P Parameter: Treatment Value: Drought vs. No Drought
  misc_feature: MA Experiment ID: 20001558 Result: Up-regulated in Transcription
  misc_feature: MA Experiment 20001558 PARAMETER Experiment Name: At_Drought_Soil_Dry_P Parameter: Age (day) Value: 27
  misc_feature: MA Experiment 20001558 PARAMETER Experiment Name: At_Drought_Soil_Dry_P Parameter: Organism Value: A. thaliana
  misc_feature: MA Experiment 20001558 PARAMETER Experiment Name: At_Drought_Soil_Dry_P Parameter: Plant Line Value: WS
  misc_feature: MA Experiment 20001558 PARAMETER Experiment Name: At_Drought_Soil_Dry_P Parameter: Post Timepoint (hr) Value: 6
  misc_feature: MA Experiment 20001558 PARAMETER Experiment Name: At_Drought_Soil_Dry_P Parameter: Post-Treatment Value: Re-Water vs. No Drought
  misc_feature: MA Experiment 20001558 PARAMETER Experiment Name: At_Drought_Soil_Dry_P Parameter: Timepoint (day) Value: 13
  misc_feature: MA Experiment 20001558 PARAMETER Experiment Name: At_Drought_Soil_Dry_P Parameter: Treatment Value: Drought vs. No Drought
  misc_feature: MA Experiment ID: 20001560 Result: Up-regulated in Transcription
  misc_feature: MA Experiment 20001560 PARAMETER Experiment Name: At_Drought_Soil_Dry_P Parameter: Age (day) Value: 28
  misc_feature: MA Experiment 20001560 PARAMETER Experiment Name: At_Drought_Soil_Dry_P Parameter: Organism Value: A. thaliana
  misc_feature: MA Experiment 20001560 PARAMETER Experiment Name: At_Drought_Soil_Dry_P Parameter: Plant Line Value: WS
  misc_feature: MA Experiment 20001560 PARAMETER Experiment Name: At_Drought_Soil_Dry_P Parameter: Post Timepoint (hr) Value: None
  misc_feature: MA Experiment 20001560 PARAMETER Experiment Name: At_Drought_Soil_Dry_P Parameter: Post-Treatment Value: None
  misc_feature: MA Experiment 20001560 PARAMETER Experiment Name: At_Drought_Soil_Dry_P Parameter: Timepoint (day) Value: 14
  misc_feature: MA Experiment 20001560 PARAMETER Experiment Name: At_Drought_Soil_Dry_P Parameter: Treatment Value: Drought vs. No Drought
ggaaggcttttaaaaccctagctggtaccaatcttaaacccctctccgattttgatttctgcttgaaattgttttccccgagatctcaatttcgataatcggaaaacgaaaaagatggtttggtttcaatgcgaagactgtggagagagtctgaagaagccaaaggtcccgtctcacttcaagatgtgcatagccaacaagttatcgtgcatcgattgtggagaaatgtttgggagagatactgtgcaaggacataaccaatgcattactgaagctgagaagtatggtccaaaagggcagtcaaagtcagctaatggaacacctgcaaagccaaaggacatctctaagcaagagcctgactttgatattaatgtcggcttatcaaaccgatatccatggttttgcagtttatgtaacacaaaggctactagccagcagactttgcttgcccatgcggatgggaagaagcaccgaggaaaagctaaagccttccatgctaggcaacaacaagaacaatccacgactttggataacaaggatggaagtgaaaatgcgtctaatgttgattcagaacagaagaaagtagatttacctgcctcctcaggtgttgcgaatggagaatcgcatcctgagaaaaagagaaagctagagactttggatgaaacgagtgaaggcgaagaagcaaaaggaagtgatctaaagaaagcaaagaagcaggaccatgagaagaaaatcaattggaagaagttgatcacatcggctttgaagtctaacgaagataaaactttgaagatgaagaaactgaagaagctcgttctggaatctattgtggattcaggccgagacaaatctgagcttaaggcagagctagaactaaaggtgaatttgagctccagattcacagttgatgggaagtatgtgaaacttgtggctaaagattgaatctaattcttgagtccagcaacagtatcatgtctccgactgtcacagttttggcatatgattcattactattaatgtctgtaccaaatttggaattttggaatctcatcaaacattattcgtagc

SEQ ID NO: 40552 - protein, 275 aa, Arabidopsis thaliana
  peptide (1)..(275): Ceres Seq. ID no. 12328717
  misc_feature (1)..(72): Homolog of NCBI NO: 17552224 NR Description: Cell growth regulating nucleolar protein like
  misc_feature (155)..(272): Homolog of NCBI NO: 17552224 NR Description: Cell growth regulating nucleolar protein like
  misc_feature (1)..(208): Homolog of NCBI NO: 7486241 NR Description: probable RNA-binding protein At2g19380 -
  misc_feature (1)..(208): Homolog of NCBI NO: 18399023 NR Description: RRM-containing RNA-binding protein; protein id:
  misc_feature (53)..(235): Homolog of NCBI NO: 7486241 NR Description: probable RNA-binding protein At2g19380 -
  misc_feature (53)..(235): Homolog of NCBI NO: 18399023 NR Description: RRM-containing RNA-binding protein; protein id:
  misc_feature (1)..(275): Homolog of NCBI NO: 21902026 NR Description: B1097D05.27 [Oryza sativa (japonica
  misc_feature (1)..(275): Homolog of NCBI NO: 7486241 NR Description: probable RNA-binding protein At2g19380 -
  misc_feature (1)..(275): Homolog of NCBI NO: 18399026 NR Description: Expressed protein
  misc_feature (1)..(275): Homolog of NCBI NO: 21536909 NR Description: unknown [Arabidopsis thaliana]
MVWFQCEDCGESLKKPKVPSHFKMCIANKLSCIDCGEMFGRDTVQGHNQCITEAEKYGPKGQSKSANGTPAKPKDISKQEPDFDINVGLSNRYPWFCSLCNTKATSQQTLLAHADGKKHRGKAKAFHARQQQEQSTTLDNKDGSENASNVDSEQKKVDLPASSGVANGESHPEKKRKLETLDETSEGEEAKGSDLKKAKKQDHEKKINWKKLITSALKSNEDKTLKMKKLKKLVLESIVDSGRDKSELKAELELKVNLSSRFTVDGKYVKLVAKD

SEQ ID NO: 40553 - protein, 252 aa, Arabidopsis thaliana
  peptide (1)..(252): Ceres Seq. ID no. 12328718
  misc_feature (1)..(49): Homolog of NCBI NO: 17552224 NR Description: Cell growth regulating nucleolar protein like
  misc_feature (132)..(249): Homolog of NCBI NO: 17552224 NR Description: Cell growth regulating nucleolar protein like
  misc_feature (1)..(185): Homolog of NCBI NO: 7486241 NR Description: probable RNA-binding protein At2g19380 -
  misc_feature (1)..(185): Homolog of NCBI NO: 18399023 NR Description: RRM-containing RNA-binding protein; protein id:
  misc_feature (30)..(212): Homolog of NCBI NO: 7486241 NR Description: probable RNA-binding protein At2g19380 -
  misc_feature (30)..(212): Homolog of NCBI NO: 18399023 NR Description: RRM-containing RNA-binding protein; protein id:
  misc_feature (1)..(252): Homolog of NCBI NO: 21902026 NR Description: B1097D05.27 [Oryza sativa (japonica
  misc_feature (1)..(252): Homolog of NCBI NO: 7486241 NR Description: probable RNA-binding protein At2g19380 -
  misc_feature (1)..(252): Homolog of NCBI NO: 18399026 NR Description: Expressed protein
  misc_feature (1)..(252): Homolog of NCBI NO: 21536909 NR Description: unknown [Arabidopsis thaliana]
MCIANKLSCIDCGEMFGRDTVQGHNQCITEAEKYGPKGQSKSANGTPAKPKDISKQEPDFDINVGLSNRYPWFCSLCNTKATSQQTLLAHADGKKHRGKAKAFHARQQQEQSTTLDNKDGSENASNVDSEQKKVDLPASSGVANGESHPEKKRKLETLDETSEGEEAKGSDLKKAKKQDHEKKINWKKLITSALKSNEDKTLKMKKLKKLVLESIVDSGRDKSELKAELELKVNLSSRFTVDGKYVKLVAKD

SEQ ID NO: 40554 - protein, 238 aa, Arabidopsis thaliana
  peptide (1)..(238): Ceres Seq. ID no. 12328719
  misc_feature (1)..(35): Homolog of NCBI NO: 17552224 NR Description: Cell growth regulating nucleolar protein like
  misc_feature (118)..(235): Homolog of NCBI NO: 17552224 NR Description: Cell growth regulating nucleolar protein like
  misc_feature (1)..(171): Homolog of NCBI NO: 7486241 NR Description: probable RNA-binding protein At2g19380 -
  misc_feature (1)..(171): Homolog of NCBI NO: 18399023 NR Description: RRM-containing RNA-binding protein; protein id:
  misc_feature (16)..(198): Homolog of NCBI NO: 7486241 NR Description: probable RNA-binding protein At2g19380 -
  misc_feature (16)..(198): Homolog of NCBI NO: 18399023 NR Description: RRM-containing RNA-binding protein; protein id:
  misc_feature (1)..(238): Homolog of NCBI NO: 21902026 NR Description: B1097D05.27 [Oryza sativa (japonica
  misc_feature (1)..(238): Homolog of NCBI NO: 7486241 NR Description: probable RNA-binding protein At2g19380 -
  misc_feature (1)..(238): Homolog of NCBI NO: 18399026 NR Description: Expressed protein
  misc_feature (1)..(238): Homolog of NCBI NO: 21536909 NR Description: unknown [Arabidopsis thaliana]
MFGRDTVQGHNQCITEAEKYGPKGQSKSANGTPAKPKDISKQEPDFDINVGLSNRYPWFCSLCNTKATSQQTLLAHADGKKHRGKAKAFHARQQQEQSTTLDNKDGSENASNVDSEQKKVDLPASSGVANGESHPEKKRKLETLDETSEGEEAKGSDLKKAKKQDHEKKINWKKLITSALKSNEDKTLKMKKLKKLVLESIVDSGRDKSELKAELELKVNLSSRFTVDGKYVKLVAKD

SEQ ID NO: 40555 - DNA, 1210 bp, Arabidopsis thaliana
  misc_feature (1)..(1210): Ceres Seq. ID no. 12328172
  misc_feature: MA Experiment ID: 108434 Result: Down-regulated in Transcription
  misc_feature: MA Experiment 108434 PARAMETER Experiment Name: At_Root_Tips_cDNA_P Parameter: Tissue Value: Root Tips
  misc_feature: MA Experiment ID: 108462 Result: Up-regulated in Transcription
  misc_feature: MA Experiment 108462 PARAMETER Experiment Name: At_Germinating_Seeds_cDNA_P Parameter: Age (day) Value: 2 vs. 0
  misc_feature: MA Experiment 108462 PARAMETER Experiment Name: At_Germinating_Seeds_cDNA_P Parameter: Tissue Value: Germinating Seeds
  misc_feature: MA Experiment ID: 108573 Result: Down-regulated in Transcription
  misc_feature: MA Experiment 108573 PARAMETER Experiment Name: At_Drought_cDNA_P Parameter: Timepoint (hr) Value: 6
  misc_feature: MA Experiment 108573 PARAMETER Experiment Name: At_Drought_cDNA_P Parameter: Tissue Value: Aerial
  misc_feature: MA Experiment 108573 PARAMETER Experiment Name: At_Drought_cDNA_P Parameter: Treatment Value: Drought vs. No Drought
  misc_feature: MA Experiment ID: 108595 Result: Down-regulated in Transcription
  misc_feature: MA Experiment 108595 PARAMETER Experiment Name: At_Ler-pi_Ovule_cDNA_P Parameter: Plant Line Value: null
  misc_feature: MA Experiment ID: 20000087 Result: Down-regulated in Transcription
  misc_feature: MA Experiment 20000087 PARAMETER Experiment Name: At_100uM_ABA_Mutants_cDNA_P Parameter: Plant Line Value: WS
  misc_feature: MA Experiment 20000087 PARAMETER Experiment Name: At_100uM_ABA_Mutants_cDNA_P Parameter: Timepoint (hr) Value: 6
  misc_feature: MA Experiment 20000087 PARAMETER Experiment Name: At_100uM_ABA_Mutants_cDNA_P Parameter: Tissue Value: Aerial
  misc_feature: MA Experiment 20000087 PARAMETER Experiment Name: At_100uM_ABA_Mutants_cDNA_P Parameter: Treatment Value: 100uM ABA vs. No Treatment
  misc_feature: MA Experiment ID: 20000111 Result: Down-regulated in Transcription
  misc_feature: MA Experiment 20000111 PARAMETER Experiment Name: At_42deg_Heat_cDNA_P Parameter: Temperature (deg C) Value: 42 vs. 22
  misc_feature: MA Experiment 20000111 PARAMETER Experiment Name: At_42deg_Heat_cDNA_P Parameter: Timepoint (hr) Value: 6
  misc_feature: MA Experiment 20000111 PARAMETER Experiment Name: At_42deg_Heat_cDNA_P Parameter: Tissue Value: Aerial
  misc_feature: MA Experiment ID: 20000113 Result: Down-regulated in Transcription
  misc_feature: MA Experiment 20000113 PARAMETER Experiment Name: At_42deg_Heat_cDNA_P Parameter: Temperature (deg C) Value: 42 vs. 22
  misc_feature: MA Experiment 20000113 PARAMETER Experiment Name: At_42deg_Heat_cDNA_P Parameter: Timepoint (hr) Value: 8
  misc_feature: MA Experiment 20000113 PARAMETER Experiment Name: At_42deg_Heat_cDNA_P Parameter: Tissue Value: Aerial
  misc_feature: MA Experiment ID: 20000173 Result: Down-regulated in Transcription
  misc_feature: MA Experiment 20000173 PARAMETER Experiment Name: At_42deg_Heat_P Parameter: Age (day) Value: 14
  misc_feature: MA Experiment 20000173 PARAMETER Experiment Name: At_42deg_Heat_P Parameter: Organism Value: A. thaliana
  misc_feature: MA Experiment 20000173 PARAMETER Experiment Name: At_42deg_Heat_P Parameter: Plant Line Value: WS
  misc_feature: MA Experiment 20000173 PARAMETER Experiment Name: At_42deg_Heat_P Parameter: Temperature (deg C) Value: 42 vs. 22
  misc_feature: MA Experiment 20000173 PARAMETER Experiment Name: At_42deg_Heat_P Parameter: Timepoint (hr) Value: 6
  misc_feature: MA Experiment 20000173 PARAMETER Experiment Name: At_42deg_Heat_P Parameter: Tissue Value: Aerial
  misc_feature: MA Experiment ID: 20000179 Result: Up-regulated in Transcription
  misc_feature: MA Experiment 20000179 PARAMETER Experiment Name: At_Germinating_Seeds_P Parameter: Age (hr) Value: 6 vs. 0
  misc_feature: MA Experiment 20000179 PARAMETER Experiment Name: At_Germinating_Seeds_P Parameter: Tissue Value: Germinating Seeds
  misc_feature: MA Experiment ID: 20000180 Result: Up-regulated in Transcription
  misc_feature: MA Experiment 20000180 PARAMETER Experiment Name: At_Germinating_Seeds_P Parameter: Age (hr) Value: 24 vs. 0
  misc_feature: MA Experiment 20000180 PARAMETER Experiment Name: At_Germinating_Seeds_P Parameter: Tissue Value: Germinating Seeds
  misc_feature: MA Experiment ID: 20000184 Result: Down-regulated in Transcription
  misc_feature: MA Experiment 20000184 PARAMETER Experiment Name: At_Shoots__P Parameter: Age (day) Value: 7
  misc_feature: MA Experiment 20000184 PARAMETER Experiment Name: At_Shoots__P Parameter: Tissue Value: Shoots vs. Whole Plant
  misc_feature: MA Experiment ID: 20000224 Result: Up-regulated in Transcription
  misc_feature: MA Experiment ID: 20000437 Result: Down-regulated in Transcription
  misc_feature: MA Experiment 20000437 PARAMETER Experiment Name: At_Drought_P Parameter: Age (day) Value: 8
  misc_feature: MA Experiment 20000437 PARAMETER Experiment Name: At_Drought_P Parameter: Organism Value: A. thaliana
  misc_feature: MA Experiment 20000437 PARAMETER Experiment Name: At_Drought_P Parameter: Plant Line Value: WS
  misc_feature: MA Experiment 20000437 PARAMETER Experiment Name: At_Drought_P Parameter: Timepoint (hr) Value: 24
  misc_feature: MA Experiment 20000437 PARAMETER Experiment Name: At_Drought_P Parameter: Tissue Value: Whole Plant
  misc_feature: MA Experiment 20000437 PARAMETER Experiment Name: At_Drought_P Parameter: Treatment Value: Drought vs. No Drought
  misc_feature: MA Experiment ID: 20000794 Result: Down-regulated in Transcription
  misc_feature: MA Experiment 20000794 PARAMETER Experiment Name: At_Petals_P Parameter: Age (day) Value: 23-25 days
  misc_feature: MA Experiment 20000794 PARAMETER Experiment Name: At_Petals_P Parameter: Plant Line Value: WS
  misc_feature: MA Experiment 20000794 PARAMETER Experiment Name: At_Petals_P Parameter: Tissue Value: Petals vs. Whole plant
  misc_feature: MA Experiment ID: 20001247 Result: Down-regulated in Transcription
  misc_feature: MA Experiment 20001247 PARAMETER Experiment Name: At_Far-red-induction_P Parameter: Age (day) Value: 7
  misc_feature: MA Experiment 20001247 PARAMETER Experiment Name: At_Far-red-induction_P Parameter: Light Value: Far-red vs. White
  misc_feature: MA Experiment 20001247 PARAMETER Experiment Name: At_Far-red-induction_P Parameter: Organism Value: A. thaliana
  misc_feature: MA Experiment 20001247 PARAMETER Experiment Name: At_Far-red-induction_P Parameter: Plant Line Value: Columbia
  misc_feature: MA Experiment 20001247 PARAMETER Experiment Name: At_Far-red-induction_P Parameter: Timepoint (hr) Value: 1
  misc_feature: MA Experiment 20001247 PARAMETER Experiment Name: At_Far-red-induction_P Parameter: Tissue Value: Whole Plant
  misc_feature: MA Experiment ID: 20001248 Result: Down-regulated in Transcription
  misc_feature: MA Experiment 20001248 PARAMETER Experiment Name: At_Far-red-induction_P Parameter: Age (day) Value: 7
  misc_feature: MA Experiment 20001248 PARAMETER Experiment Name: At_Far-red-induction_P Parameter: Light Value: Far-red vs. White
  misc_feature: MA Experiment 20001248 PARAMETER Experiment Name: At_Far-red-induction_P Parameter: Organism Value: A. thaliana
  misc_feature: MA Experiment 20001248 PARAMETER Experiment Name: At_Far-red-induction_P Parameter: Plant Line Value: Columbia
  misc_feature: MA Experiment 20001248 PARAMETER Experiment Name: At_Far-red-induction_P Parameter: Timepoint (hr) Value: 4
  misc_feature: MA Experiment 20001248 PARAMETER Experiment Name: At_Far-red-induction_P Parameter: Tissue Value: Whole Plant
  misc_feature: MA Experiment ID: 20001450 Result: Down-regulated in Transcription
  misc_feature: MA Experiment 20001450 PARAMETER Experiment Name: At_Far-red-induction_P Parameter: Age (day) Value: 7
  misc_feature: MA Experiment 20001450 PARAMETER Experiment Name: At_Far-red-induction_P Parameter: Light Value: Far-red vs. White
  misc_feature: MA Experiment 20001450 PARAMETER Experiment Name: At_Far-red-induction_P Parameter: Organism Value: A. thaliana
  misc_feature: MA Experiment 20001450 PARAMETER Experiment Name: At_Far-red-induction_P Parameter: Plant Line Value: Columbia
  misc_feature: MA Experiment 20001450 PARAMETER Experiment Name: At_Far-red-induction_P Parameter: Timepoint (hr) Value: 8
  misc_feature: MA Experiment 20001450 PARAMETER Experiment Name: At_Far-red-induction_P Parameter: Tissue Value: Whole Plant
  misc_feature: MA Experiment ID: 20001451 Result: Down-regulated in Transcription
  misc_feature: MA Experiment 20001451 PARAMETER Experiment Name: At_Far-red-induction_P Parameter: Age (day) Value: 7
  misc_feature: MA Experiment 20001451 PARAMETER Experiment Name: At_Far-red-induction_P Parameter: Light Value: Far-red vs. White
  misc_feature: MA Experiment 20001451 PARAMETER Experiment Name: At_Far-red-induction_P Parameter: Organism Value: A. thaliana
  misc_feature: MA Experiment 20001451 PARAMETER Experiment Name: At_Far-red-induction_P Parameter: Plant Line Value: Columbia
  misc_feature: MA Experiment 20001451 PARAMETER Experiment Name: At_Far-red-induction_P Parameter: Timepoint (hr) Value: 24
  misc_feature: MA Experiment 20001451 PARAMETER Experiment Name: At_Far-red-induction_P Parameter: Tissue Value: Whole Plant
  misc_feature: MA Experiment ID: 20001905 Result: Down-regulated in Transcription
  misc_feature: MA Experiment 20001905 PARAMETER Experiment Name: At_Drought_Reproduction_P Parameter: Age (day) Value: 40
  misc_feature: MA Experiment 20001905 PARAMETER Experiment Name: At_Drought_Reproduction_P Parameter: Organism Value: A. thaliana
  misc_feature: MA Experiment 20001905 PARAMETER Experiment Name: At_Drought_Reproduction_P Parameter: Plant Line Value: WS
  misc_feature: MA Experiment 20001905 PARAMETER Experiment Name: At_Drought_Reproduction_P Parameter: Timepoint (day) Value: 10
  misc_feature: MA Experiment 20001905 PARAMETER Experiment Name: At_Drought_Reproduction_P Parameter: Tissue Value: Rosettes
  misc_feature: MA Experiment 20001905 PARAMETER Experiment Name: At_Drought_Reproduction_P Parameter: Treatment Value: Drought vs. No Drought
  misc_feature: MA Experiment ID: 20001911 Result: Down-regulated in Transcription
  misc_feature: MA Experiment 20001911 PARAMETER Experiment Name: At_Drought_Reproduction_P Parameter: Age (day) Value: 40
  misc_feature: MA Experiment 20001911 PARAMETER Experiment Name: At_Drought_Reproduction_P Parameter: Organism Value: A. thaliana
  misc_feature: MA Experiment 20001911 PARAMETER Experiment Name: At_Drought_Reproduction_P Parameter: Plant Line Value: WS
  misc_feature: MA Experiment 20001911 PARAMETER Experiment Name: At_Drought_Reproduction_P Parameter: Timepoint (day) Value: 10
  misc_feature: MA Experiment 20001911 PARAMETER Experiment Name: At_Drought_Reproduction_P Parameter: Tissue Value: Flowers
  misc_feature: MA Experiment 20001911 PARAMETER Experiment Name: At_Drought_Reproduction_P Parameter: Treatment Value: Drought vs. No Drought
aatcacagatttggacttttcttggttatattaaagttttttttgtccctatattcaatgaccaatctagaactcatctgtttttgaactaacccggccaacactcagaaatagatccaaaggcctctctcctctctctcttttttctcatatggttcttgataataatttgaaagaaagatgtcaatgatgagcagaactcgaagcagcatcgccatgggaacaccatctttccttgagttgaagaaacaagcttcatttttcttcaaagagaagcttaaaacggcgcgtttagctctcaccgatgttactcctcttcaactaatgactgaggaagctacggatggtgagtcatgtggaccaaatacacaaaccttagggtccatttcaaaggctgcttttgagtttgaagattacttggcgattgttgaagtcttgcacaaaagattggcaaagttcgataagagaaactggaggatggcttataactcactaatagttgttgagcatttactcactcatggaccagagagtgtttccgatgagtttcaaggtgatatagatgttatctcccaaatgcaaaccttccaacagattgacgagaaagggtttaattggggattagctgttagaaagaaagcagagaaggttttaaagctacttgagaaaggggaattacttaaggaagaaaggaagcgagctcgtgagctgtctcgagggattcaaggtttcggtagctttaaccacaagtcttcatctcattctttgtcagagcatgaagtcttacaagaatctacagtctataggaaatgtaattccaattttaccaagaattacgatgaggatgaccaagagaacactatggtttctcctaatgacgccaacctttttcctcagccgctggtagctgacccgagcgaggaatctaggacgggtatgaaagaaaatatggatcctgaagatgatgagaacacagaggtaaacccacttttgggttttagtaaaaaggagggtcaagaactagccggagaagacgagaaccatccatttacggatggcgagagtaagcatacagtagtcttgcttgatgagaacacagattaaattttaattacgtgatatcgcaatctgtataagagaaaaaacacgagaagaagataatgtgtgtataccaatatgtatacatatctacaataataacacttctgtt

SEQ ID NO: 40556 - protein, 307 aa, Arabidopsis thaliana
  peptide (1)..(307): Ceres Seq. ID no. 12328173
  misc_feature (43)..(167): Pfam Name: ENTH domain Pfam Description: ENTH domain
  misc_feature (30)..(176): Homolog of NCBI NO: 7661968 NR Description: enthoprotin; epsin 4 [Homo sapiens]
  misc_feature (30)..(266): Homolog of NCBI NO: 6322585 NR Description: epsin N-terminal homology-containing protein;
  misc_feature (13)..(49): Homolog of NCBI NO: 7485982 NR Description: hypothetical protein F22O13.16 - Arabidopsis
  misc_feature (80)..(207): Homolog of NCBI NO: 7485982 NR Description: hypothetical protein F22O13.16 - Arabidopsis
  misc_feature (13)..(235): Homolog of NCBI NO: 11994320 NR Description: gene_id:MLM24.8~unknown protein [Arabidopsis
  misc_feature (13)..(207): Homolog of NCBI NO: 22329424 NR Description: hypothetical protein
  misc_feature (144)..(229): Homolog of NCBI NO: 34908158 NR Description: P0408C03.22 [Oryza sativa (japonica
  misc_feature (17)..(143): Homolog of NCBI NO: 34908158 NR Description: P0408C03.22 [Oryza sativa (japonica
  misc_feature (1)..(307): Homolog of NCBI NO: 21536910 NR Description: unknown [Arabidopsis thaliana]
  misc_feature (1)..(307): Homolog of NCBI NO: 15231451 NR Description: putative protein
MSMMSRTRSSIAMGTPSFLELKKQASFFFKEKLKTARLALTDVTPLQLMTEEATDGESCGPNTQTLGSISKAAFEFEDYLAIVEVLHKRLAKFDKRNWRMAYNSLIVVEHLLTHGPESVSDEFQGDIDVISQMQTFQQIDEKGFNWGLAVRKKAEKVLKLLEKGELLKEERKRARELSRGIQGFGSFNHKSSSHSLSEHEVLQESTVYRKCNSNFTKNYDEDDQENTMVSPNDANLFPQPLVADPSEESRTGMKENMDPEDDENTEVNPLLGFSKKEGQELAGEDENHPFTDGESKHTVVLLDENTD

SEQ ID NO: 40557 - protein, 305 aa, Arabidopsis thaliana
  peptide (1)..(305): Ceres Seq. ID no. 12328174
  misc_feature (41)..(165): Pfam Name: ENTH domain Pfam Description: ENTH domain
  misc_feature (28)..(174): Homolog of NCBI NO: 7661968 NR Description: enthoprotin; epsin 4 [Homo sapiens]
  misc_feature (28)..(264): Homolog of NCBI NO: 6322585 NR Description: epsin N-terminal homology-containing protein;
  misc_feature (11)..(47): Homolog of NCBI NO: 7485982 NR Description: hypothetical protein F22O13.16 - Arabidopsis
  misc_feature (78)..(205): Homolog of NCBI NO: 7485982 NR Description: hypothetical protein F22O13.16 - Arabidopsis
  misc_feature (11)..(233): Homolog of NCBI NO: 11994320 NR Description: gene_id:MLM24.8~unknown protein [Arabidopsis
  misc_feature (11)..(205): Homolog of NCBI NO: 22329424 NR Description: hypothetical protein
  misc_feature (142)..(227): Homolog of NCBI NO: 34908158 NR Description: P0408C03.22 [Oryza sativa (japonica
  misc_feature (15)..(141): Homolog of NCBI NO: 34908158 NR Description: P0408C03.22 [Oryza sativa (japonica
  misc_feature (1)..(305): Homolog of NCBI NO: 21536910 NR Description: unknown [Arabidopsis thaliana]
  misc_feature (1)..(305): Homolog of NCBI NO: 15231451 NR Description: putative protein
MMSRTRSSIAMGTPSFLELKKQASFFFKEKLKTARLALTDVTPLQLMTEEATDGESCGPNTQTLGSISKAAFEFEDYLAIVEVLHKRLAKFDKRNWRMAYNSLIVVEHLLTHGPESVSDEFQGDIDVISQMQTFQQIDEKGFNWGLAVRKKAEKVLKLLEKGELLKEERKRARELSRGIQGFGSFNHKSSSHSLSEHEVLQESTVYRKCNSNFTKNYDEDDQENTMVSPNDANLFPQPLVADPSEESRTGMKENMDPEDDENTEVNPLLGFSKKEGQELAGEDENHPFTDGESKHTVVLLDENTD

SEQ ID NO: 40558 - protein, 304 aa, Arabidopsis thaliana
  peptide (1)..(304): Ceres Seq. ID no. 12328175
  misc_feature (40)..(164): Pfam Name: ENTH domain Pfam Description: ENTH domain
  misc_feature (27)..(173): Homolog of NCBI NO: 7661968 NR Description: enthoprotin; epsin 4 [Homo sapiens]
  misc_feature (27)..(263): Homolog of NCBI NO: 6322585 NR Description: epsin N-terminal homology-containing protein;
  misc_feature (10)..(46): Homolog of NCBI NO: 7485982 NR Description: hypothetical protein F22O13.16 - Arabidopsis
  misc_feature (77)..(204): Homolog of NCBI NO: 7485982 NR Description: hypothetical protein F22O13.16 - Arabidopsis
  misc_feature (10)..(232): Homolog of NCBI NO: 11994320 NR Description: gene_id:MLM24.8~unknown protein [Arabidopsis
  misc_feature (10)..(204): Homolog of NCBI NO: 22329424 NR Description: hypothetical protein
  misc_feature (141)..(226): Homolog of NCBI NO: 34908158 NR Description: P0408C03.22 [Oryza sativa (japonica
  misc_feature (14)..(140): Homolog of NCBI NO: 34908158 NR Description: P0408C03.22 [Oryza sativa (japonica
  misc_feature (1)..(304): Homolog of NCBI NO: 21536910 NR Description: unknown [Arabidopsis thaliana]
  misc_feature (1)..(304): Homolog of NCBI NO: 15231451 NR Description: putative protein
MSRTRSSIAMGTPSFLELKKQASFFFKEKLKTARLALTDVTPLQLMTEEATDGESCGPNTQTLGSISKAAFEFEDYLAIVEVLHKRLAKFDKRNWRMAYNSLIVVEHLLTHGPESVSDEFQGDIDVISQMQTFQQIDEKGFNWGLAVRKKAEKVLKLLEKGELLKEERKRARELSRGIQGFGSFNHKSSSHSLSEHEVLQESTVYRKCNSNFTKNYDEDDQENTMVSPNDANLFPQPLVADPSEESRTGMKENMDPEDDENTEVNPLLGFSKKEGQELAGEDENHPFTDGESKHTVVLLDENTD

SEQ ID NO: 40559 - DNA, 1515 bp, Arabidopsis thaliana
  misc_feature (1)..(1515): Ceres Seq. ID no. 4908834
  misc_feature: MA Experiment ID: 108461 Result: Up-regulated in Transcription
  misc_feature: MA Experiment 108461 PARAMETER Experiment Name: At_Germinating_Seeds_cDNA_P Parameter: Age (day) Value: 1 vs. 0
  misc_feature: MA Experiment 108461 PARAMETER Experiment Name: At_Germinating_Seeds_cDNA_P Parameter: Tissue Value: Germinating Seeds
  misc_feature: MA Experiment ID: 108463 Result: Down-regulated in Transcription
  misc_feature: MA Experiment 108463 PARAMETER Experiment Name: At_Germinating_Seeds_cDNA_P Parameter: Age (day) Value: 3 vs. 0
  misc_feature: MA Experiment 108463 PARAMETER Experiment Name: At_Germinating_Seeds_cDNA_P Parameter: Tissue Value: Germinating Seeds
  misc_feature: MA Experiment ID: 108464 Result: Down-regulated in Transcription
  misc_feature: MA Experiment 108464 PARAMETER Experiment Name: At_Germinating_Seeds_cDNA_P Parameter: Age (day) Value: 4 vs. 0
  misc_feature: MA Experiment 108464 PARAMETER Experiment Name: At_Germinating_Seeds_cDNA_P Parameter: Tissue Value: Germinating Seeds
atgtcagcaaaaacgacatcgtttaagctcgacctgttcgtctcgatgtttacgctttgattagttactatttttctgcaattctgtttcttctctgtacatcaccaacaacatttaaattccaatggcgcattttaaatgtcaataataaatcgagatccgtaatttcgaagctacaagcaaaccttcttgtgcttctctaatcattgcgttttccttttaaagagtttctcaaagttttcccttttttttgggcataaaattgtttccttttcctcctatcagtgtgtctgaaaaaaattcaatgtctttatgttctgttcttttctgatctctctgaatctctctctatcgcgacagccatggccgaagacccttctttcctccccaaggatggttttgtcttgaagcttcctaaaaagtcatcacttgtattgagaatggtcgttctcctctttgtaatggtctgtgctgtgtacatttgctccatttgtcttaagcaaataggagttagtccaaactatggtttcttgaacgttgaagtgtttgagaggccttgtcctgagcctaacatcgaaccgtgggacattccttttgtgcattaccctaaaccaaagacatataacagggatgaatgttcttgccacccggttaggtactttgcgattctatcgatgcagagatctggtagtggctggtttgagactttgttaaacaatcatactaacataagctccaacggggagatattttctgtgaaagataggagggctaatgtttccaccattttcgagactcttgacaaagtctataatctagactggttgagtagtgcctctaagaacgagtgcacttccgctgttggcttcaagtggatgcttaatcagggtctaatgaaacatcatgaagaaatagtagaatacttcaaaacccgaggcgtctctgcgattttcctattcagaaaaaacctattgcgccgcatgatatcagtactcgcaaactcttatgacagagatgctaagctactaaacgggactcacaagtctcacacccattcggccaaagaagctgagatattagcaggttacaaaccaatgatcaacacaacacttttaataaatgagctgagacagattcaagaaatgactttgaaagctttgacttacttcaataccactcgacatatccttgtctactacgaagatgttgtcaagaacctcacgagactagacgatgtacaggagtttctaaaggtaccaaaacgtaagttaaagagtaggcaagtgaagattcatggaggttcattgtcaaaacatgtacagaattgggaagaggtcatgaccacacttaaaggaaccaatttcgaaaatttcttacaccaagaattttaatttttttttgtatatatcagaccaaacaaacccttgtaggaaagttttgtttcacttgccttttttcttttttgctgtttgctgtagggtttggcattaattctcttaaatatgaagaagattt

SEQ ID NO: 40560 - protein, 342 aa, Arabidopsis thaliana
  peptide (1)..(342): Ceres Seq. ID no. 4908835
  misc_feature (1)..(116): Homolog of NCBI NO: 30679514 NR Description: expressed protein [Arabidopsis thaliana]
  misc_feature (91)..(310): Homolog of NCBI NO: 15229813 NR Description: hypothetical protein; protein id: At3g50620.1
  misc_feature (251)..(342): Homolog of NCBI NO: 14029013 NR Description: Unknown protein [Oryza sativa]
  misc_feature (10)..(235): Homolog of NCBI NO: 14029013 NR Description: Unknown protein [Oryza sativa]
  misc_feature (176)..(338): Homolog of NCBI NO: 34904786 NR Description: contains ESTs
  misc_feature (13)..(178): Homolog of NCBI NO: 34904786 NR Description: contains ESTs
  misc_feature (13)..(338): Homolog of NCBI NO: 33146729 NR Description: unknown protein [Oryza sativa (japonica
  misc_feature (10)..(342): Homolog of NCBI NO: 29824462 NR Description: unknown protein [Oryza sativa (japonica
  misc_feature (1)..(342): Homolog of NCBI NO: 40823013 NR Description: At2g15730 [Arabidopsis thaliana]
  misc_feature (1)..(342): Homolog of NCBI NO: 22329158 NR Description: hypothetical protein; protein id: At4g34420.1
MAEDPSFLPKDGFVLKLPKKSSLVLRMVVLLFVMVCAVYICSICLKQIGVSPNYGFLNVEVFERPCPEPNIEPWDIPFVHYPKPKTYNRDECSCHPVRYFAILSMQRSGSGWFETLLNNHTNISSNGEIFSVKDRRANVSTIFETLDKVYNLDWLSSASKNECTSAVGFKWMLNQGLMKHHEEIVEYFKTRGVSAIFLFRKNLLRRMISVLANSYDRDAKLLNGTHKSHTHSAKEAEILAGYKPMINTTLLINELRQIQEMTLKALTYFNTTRHILVYYEDVVKNLTRLDDVQEFLKVPKRKLKSRQVKIHGGSLSKHVQNWEEVMTTLKGTNFENFLHQEF

SEQ ID NO: 40561 - protein, 316 aa, Arabidopsis thaliana
  peptide (1)..(316): Ceres Seq. ID no. 4908836
  misc_feature (1)..(90): Homolog of NCBI NO: 30679514 NR Description: expressed protein [Arabidopsis thaliana]
  misc_feature (65)..(284): Homolog of NCBI NO: 15229813 NR Description: hypothetical protein; protein id: At3g50620.1
  misc_feature (225)..(316): Homolog of NCBI NO: 14029013 NR Description: Unknown protein [Oryza sativa]
  misc_feature (1)..(209): Homolog of NCBI NO: 14029013 NR Description: Unknown protein [Oryza sativa]
  misc_feature (150)..(312): Homolog of NCBI NO: 34904786 NR Description: contains ESTs
  misc_feature (1)..(152): Homolog of NCBI NO: 34904786 NR Description: contains ESTs
  misc_feature (1)..(312): Homolog of NCBI NO: 33146729 NR Description: unknown protein [Oryza sativa (japonica
  misc_feature (1)..(316): Homolog of NCBI NO: 29824462 NR Description: unknown protein [Oryza sativa (japonica
  misc_feature (1)..(316): Homolog of NCBI NO: 40823013 NR Description: At2g15730 [Arabidopsis thaliana]
  misc_feature (1)..(316): Homolog of NCBI NO: 22329158 NR Description: hypothetical protein; protein id: At4g34420.1
MVVLLFVMVCAVYICSICLKQIGVSPNYGFLNVEVFERPCPEPNIEPWDIPFVHYPKPKTYNRDECSCHPVRYFAILSMQRSGSGWFETLLNNHTNISSNGEIFSVKDRRANVSTIFETLDKVYNLDWLSSASKNECTSAVGFKWMLNQGLMKHHEEIVEYFKTRGVSAIFLFRKNLLRRMISVLANSYDRDAKLLNGTHKSHTHSAKEAEILAGYKPMINTTLLINELRQIQEMTLKALTYFNTTRHILVYYEDVVKNLTRLDDVQEFLKVPKRKLKSRQVKIHGGSLSKHVQNWEEVMTTLKGTNFENFLHQEF

SEQ ID NO: 40562 - protein, 309 aa, Arabidopsis thaliana
  peptide (1)..(309): Ceres Seq. ID no. 4908837
  misc_feature (1)..(83): Homolog of NCBI NO: 30679514 NR Description: expressed protein [Arabidopsis thaliana]
  misc_feature (58)..(277): Homolog of NCBI NO: 15229813 NR Description: hypothetical protein; protein id: At3g50620.1
  misc_feature (218)..(309): Homolog of NCBI NO: 14029013 NR Description: Unknown protein [Oryza sativa]
  misc_feature (1)..(202): Homolog of NCBI NO: 14029013 NR Description: Unknown protein [Oryza sativa]
  misc_feature (143)..(305): Homolog of NCBI NO: 34904786 NR Description: contains ESTs
  misc_feature (1)..(145): Homolog of NCBI NO: 34904786 NR Description: contains ESTs
  misc_feature (1)..(305): Homolog of NCBI NO: 33146729 NR Description: unknown protein [Oryza sativa (japonica
  misc_feature (1)..(309): Homolog of NCBI NO: 29824462 NR Description: unknown protein [Oryza sativa (japonica
  misc_feature (1)..(309): Homolog of NCBI NO: 40823013 NR Description: At2g15730 [Arabidopsis thaliana]
  misc_feature (1)..(309): Homolog of NCBI NO: 22329158 NR Description: hypothetical protein; protein id: At4g34420.1
MVCAVYICSICLKQIGVSPNYGFLNVEVFERPCPEPNIEPWDIPFVHYPKPKTYNRDECSCHPVRYFAILSMQRSGSGWFETLLNNHTNISSNGEIFSVKDRRANVSTIFETLDKVYNLDWLSSASKNECTSAVGFKWMLNQGLMKHHEEIVEYFKTRGVSAIFLFRKNLLRRMISVLANSYDRDAKLLNGTHKSHTHSAKEAEILAGYKPMINTTLLINELRQIQEMTLKALTYFNTTRHILVYYEDVVKNLTRLDDVQEFLKVPKRKLKSRQVKIHGGSLSKHVQNWEEVMTTLKGTNFENFLHQEF

SEQ ID NO: 40563 - DNA, 1076 bp, Arabidopsis thaliana
  misc_feature (1)..(1076): Ceres Seq. ID no. 12327653
  misc_feature: MA Experiment ID: 108668 Result: Up-regulated in Transcription
  misc_feature: MA Experiment 108668 PARAMETER Experiment Name: At_2mM_SA_cDNA_P Parameter: Plant Line Value: WS
  misc_feature: MA Experiment 108668 PARAMETER Experiment Name: At_2mM_SA_cDNA_P Parameter: Timepoint (hr) Value: 6
  misc_feature: MA Experiment 108668 PARAMETER Experiment Name: At_2mM_SA_cDNA_P Parameter: Treatment Value: 2mM SA vs. No Treatment
  misc_feature: MA Experiment ID: 20000182 Result: Up-regulated in Transcription
  misc_feature: MA Experiment 20000182 PARAMETER Experiment Name: At_2mM_SA_P Parameter: Age (day) Value: 14
  misc_feature: MA Experiment 20000182 PARAMETER Experiment Name: At_2mM_SA_P Parameter: Organism Value: A. thaliana
  misc_feature: MA Experiment 20000182 PARAMETER Experiment Name: At_2mM_SA_P Parameter: Plant Line Value: WS
  misc_feature: MA Experiment 20000182 PARAMETER Experiment Name: At_2mM_SA_P Parameter: Timepoint (hr) Value: 6
  misc_feature: MA Experiment 20000182 PARAMETER Experiment Name: At_2mM_SA_P Parameter: Tissue Value: Aerial
  misc_feature: MA Experiment 20000182 PARAMETER Experiment Name: At_2mM_SA_P Parameter: Treatment Value: 2mM SA vs. No Treatment
  misc_feature: MA Experiment ID: 20000235 Result: Down-regulated in Transcription
  misc_feature: MA Experiment 20000235 PARAMETER Experiment Name: At_Siliques_P Parameter: Age (day) Value: 21
  misc_feature: MA Experiment 20000235 PARAMETER Experiment Name: At_Siliques_P Parameter: Organism Value: A. thaliana
  misc_feature: MA Experiment 20000235 PARAMETER Experiment Name: At_Siliques_P Parameter: Plant Line Value: WS
  misc_feature: MA Experiment 20000235 PARAMETER Experiment Name: At_Siliques_P Parameter: Tissue Value: 5-10mm Siliques vs. Whole Plant
  misc_feature: MA Experiment ID: 20000264 Result: Down-regulated in Transcription
  misc_feature: MA Experiment 20000264 PARAMETER Experiment Name: At_Open_Flower_P Parameter: Age (day) Value: 21
  misc_feature: MA Experiment 20000264 PARAMETER Experiment Name: At_Open_Flower_P Parameter: Plant Line Value: WS
  misc_feature: MA Experiment 20000264 PARAMETER Experiment Name: At_Open_Flower_P Parameter: Tissue Value: Open Flower vs. Whole Plant
  misc_feature: MA Experiment ID: 20000286 Result: Down-regulated in Transcription
  misc_feature: MA Experiment 20000286 PARAMETER Experiment Name: At_Open_Flower_P Parameter: Age (day) Value: 21
  misc_feature: MA Experiment 20000286 PARAMETER Experiment Name: At_Open_Flower_P Parameter: Plant Line Value: WS
  misc_feature: MA Experiment 20000286 PARAMETER Experiment Name: At_Open_Flower_P Parameter: Tissue Value: Half Open vs. Whole Plant
  misc_feature: MA Experiment ID: 20000438 Result: Down-regulated in Transcription
  misc_feature: MA Experiment 20000438 PARAMETER Experiment Name: At_Shoots__P Parameter: Age (day) Value: 14
  misc_feature: MA Experiment 20000438 PARAMETER Experiment Name: At_Shoots__P Parameter: Tissue Value: Shoots vs. Whole Plant
  misc_feature: MA Experiment ID: 20000439 Result: Down-regulated in Transcription
  misc_feature: MA Experiment 20000439 PARAMETER Experiment Name: At_Roots__P Parameter: Age (day) Value: 14 vs. 21
  misc_feature: MA Experiment 20000439 PARAMETER Experiment Name: At_Roots__P Parameter: Organism Value: A. thaliana
  misc_feature: MA Experiment 20000439 PARAMETER Experiment Name: At_Roots__P Parameter: Tissue Value: Roots vs. Whole Plant
  misc_feature: MA Experiment ID: 20001247 Result: Up-regulated in Transcription
  misc_feature: MA Experiment 20001247 PARAMETER Experiment Name: At_Far-red-induction_P Parameter: Age (day) Value: 7
  misc_feature: MA Experiment 20001247 PARAMETER Experiment Name: At_Far-red-induction_P Parameter: Light Value: Far-red vs. White
  misc_feature: MA Experiment 20001247 PARAMETER Experiment Name: At_Far-red-induction_P Parameter: Organism Value: A. thaliana
  misc_feature: MA Experiment 20001247 PARAMETER Experiment Name: At_Far-red-induction_P Parameter: Plant Line Value: Columbia
  misc_feature: MA Experiment 20001247 PARAMETER Experiment Name: At_Far-red-induction_P Parameter: Timepoint (hr) Value: 1
  misc_feature: MA Experiment 20001247 PARAMETER Experiment Name: At_Far-red-induction_P Parameter: Tissue Value: Whole Plant
  misc_feature: MA Experiment ID: 20001248 Result: Up-regulated in Transcription
  misc_feature: MA Experiment 20001248 PARAMETER Experiment Name: At_Far-red-induction_P Parameter: Age (day) Value: 7
  misc_feature: MA Experiment 20001248 PARAMETER Experiment Name: At_Far-red-induction_P Parameter: Light Value: Far-red vs. White
  misc_feature: MA Experiment 20001248 PARAMETER Experiment Name: At_Far-red-induction_P Parameter: Organism Value: A. thaliana
  misc_feature: MA Experiment 20001248 PARAMETER Experiment Name: At_Far-red-induction_P Parameter: Plant Line Value: Columbia
  misc_feature: MA Experiment 20001248 PARAMETER Experiment Name: At_Far-red-induction_P Parameter: Timepoint (hr) Value: 4
  misc_feature: MA Experiment 20001248 PARAMETER Experiment Name: At_Far-red-induction_P Parameter: Tissue Value: Whole Plant
gctttttcgttgctctttctcataaattcgtggagtttttgttatgtgtgttgatcttctttctgaggttgtagctggatcggcagcgtggttaggccgtggcctttcctgtgtttgtgttcagggtagagacggtgaccctcgtccttcatttgatctaacgcctgctcaggaggaatgcctgcagaggttgcaaagccgcattgatgttgcctatgacagctcaatacctcagcatcaggaagctctaaaggatctttggaaacttgcatttcctgaagaagagctacacggaattgtatctgatcagtggaaggaaatgggttggcagggaaaagatccatcgacagattttaggggtggtggttttatttctctcgaaaacttgttgtacttcgctaggaaattcccgaaatctttccacggccttctgcggaaacaggttggggatcgttctgtgtgggaatacccctttgctgttgctggcatcaatataacattcatgctcatccagatgcttgaccttgaagcagtgaaaccacgaagtattgttggggaaacatttctaagattcctttcggtgaacgagtctgcgtttgaccttctttattgcattgccttcaagctaatggatcagcaatggctatccatgcgtgcttcatacatggagtttaacactgtgatgaaatcaacaaggcggcaactggagagagagattatggttgaagacattacaagtctcgaagatttgccatcatacagtcttctcagtcaatagcaaatagcttaccaaaaactactttgtaagtagaaagatctaacacctcagaaaccctatatcaaagctaaaacaacaacagagcaagtaagcaagcaaaaaagaagacaaggtttctctctctctcgctcttcactccatcttcctcgatattagtgttggttccatgaaatttgggttgttatttctatgaaaccagggtcagattttgtttcttatggggtcagattttctaacttgtggtgcttgtaaaacgttgttggttagttggtgttttgggctaataaatcatttgggt

SEQ ID NO: 40564 - protein, 244 aa, Arabidopsis thaliana
  peptide (1)..(244): Ceres Seq. ID no. 12327654
  misc_feature (63)..(224): Pfam Name: Protein of unknown function, DUF609 Pfam Description: Protein of unknown function, DUF609
  misc_feature (6)..(242): Homolog of NCBI NO: 18396599 NR Description: expressed protein
  misc_feature (10)..(244): Homolog of NCBI NO: 15218859 NR Description: hypothetical protein; protein id: At1g03620.1
  misc_feature (11)..(243): Homolog of NCBI NO: 18408759 NR Description: hypothetical protein; protein id: At1g67400.1
  misc_feature (7)..(244): Homolog of NCBI NO: 38345956 NR Description: OSJNBb0038F03.14 [Oryza sativa (japonica
  misc_feature (7)..(244): Homolog of NCBI NO: 14140119 NR Description: putative protein [Oryza sativa]
  misc_feature (7)..(244): Homolog of NCBI NO: 7485547 NR Description: hypothetical protein At2g44770 [imported] -
  misc_feature (7)..(244): Homolog of NCBI NO: 15810014 NR Description: At2g44770/F16B22.26 [Arabidopsis thaliana]
  misc_feature (7)..(244): Homolog of NCBI NO: 18406626 NR Description: expressed protein
  misc_feature (7)..(244): Homolog of NCBI NO: 11288393 NR Description: hypothetical protein F27H5.50 - Arabidopsis
  misc_feature (7)..(244): Homolog of NCBI NO: 18411543 NR Description: putative protein
MCVDLLSEVVAGSAAWLGRGLSCVCVQGRDGDPRPSFDLTPAQEECLQRLQSRIDVAYDSSIPQHQEALKDLWKLAFPEEELHGIVSDQWKEMGWQGKDPSTDFRGGGFISLENLLYFARKFPKSFHGLLRKQVGDRSVWEYPFAVAGINITFMLIQMLDLEAVKPRSIVGETFLRFLSVNESAFDLLYCIAFKLMDQQWLSMRASYMEFNTVMKSTRRQLEREIMVEDITSLEDLPSYSLLSQ

SEQ ID NO: 40565 - protein, 152 aa, Arabidopsis thaliana
  peptide (1)..(152): Ceres Seq. ID no. 12327655
  misc_feature (1)..(132): Pfam Name: Protein of unknown function, DUF609 Pfam Description: Protein of unknown function, DUF609
  misc_feature (1)..(150): Homolog of NCBI NO: 18396599 NR Description: expressed protein
  misc_feature (1)..(152): Homolog of NCBI NO: 15218859 NR Description: hypothetical protein; protein id: At1g03620.1
  misc_feature (1)..(151): Homolog of NCBI NO: 18408759 NR Description: hypothetical protein; protein id: At1g67400.1
  misc_feature (1)..(152): Homolog of NCBI NO: 38345956 NR Description: OSJNBb0038F03.14 [Oryza sativa (japonica
  misc_feature (1)..(152): Homolog of NCBI NO: 14140119 NR Description: putative protein [Oryza sativa]
  misc_feature (1)..(152): Homolog of NCBI NO: 7485547 NR Description: hypothetical protein At2g44770 [imported] -
  misc_feature (1)..(152): Homolog of NCBI NO: 15810014 NR Description: At2g44770/F16B22.26 [Arabidopsis thaliana]
  misc_feature (1)..(152): Homolog of NCBI NO: 18406626 NR Description: expressed protein
  misc_feature (1)..(152): Homolog of NCBI NO: 11288393 NR Description: hypothetical protein F27H5.50 - Arabidopsis
  misc_feature (1)..(152): Homolog of NCBI NO: 18411543 NR Description: putative protein
MGWQGKDPSTDFRGGGFISLENLLYFARKFPKSFHGLLRKQVGDRSVWEYPFAVAGINITFMLIQMLDLEAVKPRSIVGETFLRFLSVNESAFDLLYCIAFKLMDQQWLSMRASYMEFNTVMKSTRRQLEREIMVEDITSLEDLPSYSLLSQ

SEQ ID NO: 40566 - DNA, 1767 bp, Arabidopsis thaliana
  misc_feature (1)..(1767): Ceres Seq. ID no. 12370985
  misc_feature: MA Experiment ID: 108434 Result: Down-regulated in Transcription
  misc_feature: MA Experiment 108434 PARAMETER Experiment Name: At_Root_Tips_cDNA_P Parameter: Tissue Value: Root Tips
  misc_feature: MA Experiment ID: 108435 Result: Up-regulated in Transcription
  misc_feature: MA Experiment 108435 PARAMETER Experiment Name: At_stm_Mutants_cDNA_P Parameter: Plant Line Value: wt Landsburg vs stm
  misc_feature: MA Experiment 108435 PARAMETER Experiment Name: At_stm_Mutants_cDNA_P Parameter: Tissue Value: Shoot Apical Meristem Region
  misc_feature: MA Experiment ID: 108463 Result: Up-regulated in Transcription
  misc_feature: MA Experiment 108463 PARAMETER Experiment Name: At_Germinating_Seeds_cDNA_P Parameter: Age (day) Value: 3 vs. 0
  misc_feature: MA Experiment 108463 PARAMETER Experiment Name: At_Germinating_Seeds_cDNA_P Parameter: Tissue Value: Germinating Seeds
  misc_feature: MA Experiment ID: 108464 Result: Up-regulated in Transcription
  misc_feature: MA Experiment 108464 PARAMETER Experiment Name: At_Germinating_Seeds_cDNA_P Parameter: Age (day) Value: 4 vs. 0
  misc_feature: MA Experiment 108464 PARAMETER Experiment Name: At_Germinating_Seeds_cDNA_P Parameter: Tissue Value: Germinating Seeds
  misc_feature: MA Experiment ID: 108473 Result: Up-regulated in Transcription
  misc_feature: MA Experiment 108473 PARAMETER Experiment Name: At_Drought_Flowers_cDNA_P Parameter: Timepoint (hr) Value: 7 d
  misc_feature: MA Experiment 108473 PARAMETER Experiment Name: At_Drought_Flowers_cDNA_P Parameter: Tissue Value: Flower
  misc_feature: MA Experiment 108473 PARAMETER Experiment Name: At_Drought_Flowers_cDNA_P Parameter: Treatment Value: Drought vs. No Drought
  misc_feature: MA Experiment ID: 108489 Result: Down-regulated in Transcription
  misc_feature: MA Experiment ID: 108595 Result: Up-regulated in Transcription
  misc_feature: MA Experiment 108595 PARAMETER Experiment Name: At_Ler-pi_Ovule_cDNA_P Parameter: Plant Line Value: null
  misc_feature: MA Experiment ID: 20001908 Result: Up-regulated in Transcription
  misc_feature: MA Experiment 20001908 PARAMETER Experiment Name: At_Drought_Reproduction_P Parameter: Age (day) Value: 40
  misc_feature: MA Experiment 20001908 PARAMETER Experiment Name: At_Drought_Reproduction_P Parameter: Organism Value: A. thaliana
  misc_feature: MA Experiment 20001908 PARAMETER Experiment Name: At_Drought_Reproduction_P Parameter: Plant Line Value: WS
  misc_feature: MA Experiment 20001908 PARAMETER Experiment Name: At_Drought_Reproduction_P Parameter: Timepoint (day) Value: 10
  misc_feature: MA Experiment 20001908 PARAMETER Experiment Name: At_Drought_Reproduction_P Parameter: Tissue Value: Siliques
  misc_feature: MA Experiment 20001908 PARAMETER Experiment Name: At_Drought_Reproduction_P Parameter: Treatment Value: Drought vs. No Drought
ataagctcaaagactaaccaaacccatcatcttcattccaacttcttttctctttttattcacaaccttagctttgagaatcagtctttgttcagtgttaacgtaggcatatctctctatgtgtgttttgtctttgctttttataagattcggtttctgagtttggtttttatttcgtaaggtggctatctttcttgttcttcttcttaaaacgtagtaacagctttataaaaatctttcaaagcatgtaaatttaagtcctagctccattttcgttttcttcttctcaaaaaaaaaaaacaaaaaaaaaagtttttgatcgattgatgagttttctcatttattgatctctctagttttaacttgtgtttggtgaaaccggtactggcgaagtttaaaacacaagtgtaaaatcaaatttataaaaacttcaaatcatgtaaatttcatctctatcaatttatttcccctcaccaaaaaaaaaacaaaaaaaaattagaatttagtacttttattttaaacaaaaaccaaaaaaaaaaccaaaaaaaaaaacgttggaaatggctccaccggaggctgaggtgggtgcggtaatggtgatggctcctccaacgccggggacaccgggaacaccgggaggaccgttgatcacggggatgagagtggattcaatgtcgtttgatcatcggaaaccaacgcctcgatgcaaatgcttgccggtgatgggatcaacttggggtcaacatgacacatgcttcaccgattttccctctcctgatgtctccctcactcgcaagcttggagccgagttcgtgggaacattcatcttgatattcaccgcgacagccggtccaatcgtgaaccagaaatacgatggagcagaaaccctaatcggtaacgctgcatgcgcaggactcgcagtgatgatcataatactctcaacaggtcatatctcaggggctcacctaaacccatcactgaccatagcattcgctgctctaaggcacttcccttgggcacacgtccctgcttacatagcggctcaagtctcagcttccatttgcgcttcattcgcacttaaaggagtgttccatccttttatgtccggtggtgtcactattccatctgttagccttggacaagcctttgctcttgagttcatcatcactttcattctcctctttgttgtaactgccgtcgctaccgacactcgtgccgttggagaattggcaggtatagccgttggagccacggtcatgctcaatattctagtcgcagggccatcgactggtggatcaatgaatcctgtgagaactctaggaccagccgttgcatcaggaaactataggtcactatgggtgtatctggtggctcctacacttggtgccatatctggtgcagcggtctacacaggtgttaagcttaacgatagcgtgactgacccgcctcgtccggttaggagctttcgtcgttaattgagtgagagacttgtttacaagtcttttgctttgtataattttactgtatgattatgtaatgatatgaaaaagctttggaagcttgtgtgaagaataaaaggcgatgtgactataagtccacgcatggcatcggtctatataaacctgatgcgaacttgtctcgtcattgtcaaattgtgtctgtgtaataatacacttttatgtgtggtttgggtttctttgttggtttgctgttgtatgttacctcggagacgaggctgtttttattaataaaatctatggcatgtgc

SEQ ID NO: 40567 - protein, 304 aa, Arabidopsis thaliana; identical to SEQ ID NO: 23583
  peptide (1)..(304): Ceres Seq. ID no. 12370986
  misc_feature (70)..(283): Pfam Name: Major intrinsic protein Pfam Description: Major intrinsic protein
  misc_feature (78)..(287): Homolog of NCBI NO: 15777893 NR Description: early embryogenesis aquaglyceroporin [Pinus taeda]
  misc_feature (54)..(287): Homolog of NCBI NO: 17025880 NR Description: multifunctional aquaporin [Medicago truncatula]
  misc_feature (63)..(290): Homolog of NCBI NO: 541944 NR Description: nodulin-26 - soybean
  misc_feature (70)..(294): Homolog of NCBI NO: 9971217 NR Description: MIP [Adiantum capillus-veneris]
  misc_feature (70)..(288): Homolog of NCBI NO: 28971941 NR Description: putative nodulin [Oryza sativa (japonica
  misc_feature (68)..(288): Homolog of NCBI NO: 37573042 NR Description: putative nodulin [Oryza sativa (japonica
  misc_feature (80)..(304): Homolog of NCBI NO: 37536006 NR Description: putative nodulin-26 [Oryza sativa (japonica
  misc_feature (16)..(304): Homolog of NCBI NO: 15220826 NR Description: nodulin-like protein; protein id: At1g80760.1
  misc_feature (16)..(304): Homolog of NCBI NO: 13447791 NR Description: NOD26-like membrane integral protein ZmNIP3-1
  misc_feature (1)..(304): Homolog of NCBI NO: 15235034 NR Description: major intrinsic protein (MIP) - like

SEQ ID NO: 40568 - protein, 293 aa, Arabidopsis thaliana; identical to SEQ ID NO: 23584
  peptide (1)..(293): Ceres Seq. ID no. 12370987
  misc_feature (59)..(272): Pfam Name: Major intrinsic protein Pfam Description: Major intrinsic protein
  misc_feature (67)..(276): Homolog of NCBI NO: 15777893 NR Description: early embryogenesis aquaglyceroporin [Pinus taeda]
  misc_feature (43)..(276): Homolog of NCBI NO: 17025880 NR Description: multifunctional aquaporin [Medicago truncatula]
  misc_feature (52)..(279): Homolog of NCBI NO: 541944 NR Description: nodulin-26 - soybean
  misc_feature (59)..(283): Homolog of NCBI NO: 9971217 NR Description: MIP [Adiantum capillus-veneris]
  misc_feature (59)..(277): Homolog of NCBI NO: 28971941 NR Description: putative nodulin [Oryza sativa (japonica
  misc_feature (57)..(277): Homolog of NCBI NO: 37573042 NR Description: putative nodulin [Oryza sativa (japonica
  misc_feature (69)..(293): Homolog of NCBI NO: 37536006 NR Description: putative nodulin-26 [Oryza sativa (japonica
  misc_feature (5)..(293): Homolog of NCBI NO: 15220826 NR Description: nodulin-like protein; protein id: At1g80760.1
  misc_feature (5)..(293): Homolog of NCBI NO: 13447791 NR Description: NOD26-like membrane integral protein ZmNIP3-1
  misc_feature (1)..(293): Homolog of NCBI NO: 15235034 NR Description: major intrinsic protein (MIP) - like

SEQ ID NO: 40569 - protein, 291 aa, Arabidopsis thaliana; identical to SEQ ID NO: 23585
  peptide (1)..(291): Ceres Seq. ID no. 12370988
  misc_feature (57)..(270): Pfam Name: Major intrinsic protein Pfam Description: Major intrinsic protein
  misc_feature (65)..(274): Homolog of NCBI NO: 15777893 NR Description: early embryogenesis aquaglyceroporin [Pinus taeda]
  misc_feature (41)..(274): Homolog of NCBI NO: 17025880 NR Description: multifunctional aquaporin [Medicago truncatula]
  misc_feature (50)..(277): Homolog of NCBI NO: 541944 NR Description: nodulin-26 - soybean
  misc_feature (57)..(281): Homolog of NCBI NO: 9971217 NR Description: MIP [Adiantum capillus-veneris]
  misc_feature (57)..(275): Homolog of NCBI NO: 28971941 NR Description: putative nodulin [Oryza sativa (japonica
  misc_feature (55)..(275): Homolog of NCBI NO: 37573042 NR Description: putative nodulin [Oryza sativa (japonica
  misc_feature (67)..(291): Homolog of NCBI NO: 37536006 NR Description: putative nodulin-26 [Oryza sativa (japonica
  misc_feature (3)..(291): Homolog of NCBI NO: 15220826 NR Description: nodulin-like protein; protein id: At1g80760.1
  misc_feature (3)..(291): Homolog of NCBI NO: 13447791 NR Description: NOD26-like membrane integral protein ZmNIP3-1
  misc_feature (1)..(291): Homolog of NCBI NO: 15235034 NR Description: major intrinsic protein (MIP) - like

SEQ ID NO: 40570 - DNA, 1741 bp, Arabidopsis thaliana
  misc_feature (1)..(1741): Ceres Seq. ID no. 12327913
  misc_feature: MA Experiment ID: 108435 Result: Down-regulated in Transcription
  misc_feature: MA Experiment 108435 PARAMETER Experiment Name: At_stm_Mutants_cDNA_P Parameter: Plant Line Value: wt Landsburg vs stm
  misc_feature: MA Experiment 108435 PARAMETER Experiment Name: At_stm_Mutants_cDNA_P Parameter: Tissue Value: Shoot Apical Meristem Region
  misc_feature: MA Experiment ID: 108461 Result: Down-regulated in Transcription
  misc_feature: MA Experiment 108461 PARAMETER Experiment Name: At_Germinating_Seeds_cDNA_P Parameter: Age (day) Value: 1 vs. 0
  misc_feature: MA Experiment 108461 PARAMETER Experiment Name: At_Germinating_Seeds_cDNA_P Parameter: Tissue Value: Germinating Seeds
  misc_feature: MA Experiment ID: 108569 Result: Up-regulated in Transcription
  misc_feature: MA Experiment 108569 PARAMETER Experiment Name: At_0.001%_MeJA__cDNA_P Parameter: Timepoint (hr) Value: 6
  misc_feature: MA Experiment 108569 PARAMETER Experiment Name: At_0.001%_MeJA__cDNA_P Parameter: Tissue Value: Aerial
  misc_feature: MA Experiment 108569 PARAMETER Experiment Name: At_0.001%_MeJA__cDNA_P Parameter: Treatment Value: 0.001% MeJA vs. No Treatment
  misc_feature: MA Experiment ID: 108573 Result: Up-regulated in Transcription
  misc_feature: MA Experiment 108573 PARAMETER Experiment Name: At_Drought_cDNA_P Parameter: Timepoint (hr) Value: 6
  misc_feature: MA Experiment 108573 PARAMETER Experiment Name: At_Drought_cDNA_P Parameter: Tissue Value: Aerial
  misc_feature: MA Experiment 108573 PARAMETER Experiment Name: At_Drought_cDNA_P Parameter: Treatment Value: Drought vs. No Drought
  misc_feature: MA Experiment ID: 108585 Result: Up-regulated in Transcription
  misc_feature: MA Experiment 108585 PARAMETER Experiment Name: At_5mM_NaNP_cDNA_P Parameter: Timepoint (hr) Value: 6
  misc_feature: MA Experiment 108585 PARAMETER Experiment Name: At_5mM_NaNP_cDNA_P Parameter: Tissue Value: Aerial
  misc_feature: MA Experiment 108585 PARAMETER Experiment Name: At_5mM_NaNP_cDNA_P Parameter: Treatment Value: null
  misc_feature: MA Experiment ID: 108595 Result: Down-regulated in Transcription
  misc_feature: MA Experiment 108595 PARAMETER Experiment Name: At_Ler-pi_Ovule_cDNA_P Parameter: Plant Line Value: null
  misc_feature: MA Experiment ID: 108668 Result: Up-regulated in Transcription
  misc_feature: MA Experiment 108668 PARAMETER Experiment Name: At_2mM_SA_cDNA_P Parameter: Plant Line Value: WS
  misc_feature: MA Experiment 108668 PARAMETER Experiment Name: At_2mM_SA_cDNA_P Parameter: Timepoint (hr) Value: 6
  misc_feature: MA Experiment 108668 PARAMETER Experiment Name: At_2mM_SA_cDNA_P Parameter: Treatment Value: 2mM SA vs. No Treatment
  misc_feature: MA Experiment ID: 20000069 Result: Down-regulated in Transcription
  misc_feature: MA Experiment 20000069 PARAMETER Experiment Name: At_100uM_ABA_Mutants_cDNA_P Parameter: Plant Line Value: CS23
  misc_feature: MA Experiment 20000069 PARAMETER Experiment Name: At_100uM_ABA_Mutants_cDNA_P Parameter: Timepoint (hr) Value: 6
  misc_feature: MA Experiment 20000069 PARAMETER Experiment Name: At_100uM_ABA_Mutants_cDNA_P Parameter: Tissue Value: Aerial
  misc_feature: MA Experiment 20000069 PARAMETER Experiment Name: At_100uM_ABA_Mutants_cDNA_P Parameter: Treatment Value: 100uM ABA vs. No Treatment
  misc_feature: MA Experiment ID: 20000070 Result: Down-regulated in Transcription
  misc_feature: MA Experiment 20000070 PARAMETER Experiment Name: At_100uM_ABA_Mutants_cDNA_P Parameter: Plant Line Value: CS24
  misc_feature: MA Experiment 20000070 PARAMETER Experiment Name: At_100uM_ABA_Mutants_cDNA_P Parameter: Timepoint (hr) Value: 6
  misc_feature: MA Experiment 20000070 PARAMETER Experiment Name: At_100uM_ABA_Mutants_cDNA_P Parameter: Tissue Value: Aerial
  misc_feature: MA Experiment 20000070 PARAMETER Experiment Name: At_100uM_ABA_Mutants_cDNA_P Parameter: Treatment Value: 100uM ABA vs. No Treatment
  misc_feature: MA Experiment ID: 20000086 Result: Down-regulated in Transcription
  misc_feature: MA Experiment 20000086 PARAMETER Experiment Name: At_100uM_ABA_Mutants_cDNA_P Parameter: Plant Line Value: CS22
  misc_feature: MA Experiment 20000086 PARAMETER Experiment Name: At_100uM_ABA_Mutants_cDNA_P Parameter: Timepoint (hr) Value: 6
  misc_feature: MA Experiment 20000086 PARAMETER Experiment Name: At_100uM_ABA_Mutants_cDNA_P Parameter: Tissue Value: Aerial
  misc_feature: MA Experiment 20000086 PARAMETER Experiment Name: At_100uM_ABA_Mutants_cDNA_P Parameter: Treatment Value: 100uM ABA vs. No Treatment
  misc_feature: MA Experiment ID: 20000087 Result: Down-regulated in Transcription
  misc_feature: MA Experiment 20000087 PARAMETER Experiment Name: At_100uM_ABA_Mutants_cDNA_P Parameter: Plant Line Value: WS
  misc_feature: MA Experiment 20000087 PARAMETER Experiment Name: At_100uM_ABA_Mutants_cDNA_P Parameter: Timepoint (hr) Value: 6
  misc_feature: MA Experiment 20000087 PARAMETER Experiment Name: At_100uM_ABA_Mutants_cDNA_P Parameter: Tissue Value: Aerial
  misc_feature: MA Experiment 20000087 PARAMETER Experiment Name: At_100uM_ABA_Mutants_cDNA_P Parameter: Treatment Value: 100uM ABA vs. No Treatment
  misc_feature: MA Experiment ID: 20000089 Result: Down-regulated in Transcription
  misc_feature: MA Experiment ID: 20000090 Result: Down-regulated in Transcription
  misc_feature: MA Experiment ID: 20000111 Result: Down-regulated in Transcription
  misc_feature: MA Experiment 20000111 PARAMETER Experiment Name: At_42deg_Heat_cDNA_P Parameter: Temperature (deg C) Value: 42 vs. 22
  misc_feature: MA Experiment 20000111 PARAMETER Experiment Name: At_42deg_Heat_cDNA_P Parameter: Timepoint (hr) Value: 6
  misc_feature: MA Experiment 20000111 PARAMETER Experiment Name: At_42deg_Heat_cDNA_P Parameter: Tissue Value: Aerial
  misc_feature: MA Experiment ID: 20000117 Result: Down-regulated in Transcription
  misc_feature: MA Experiment 20000117 PARAMETER Experiment Name: At_100uM_ABA_Mutants_cDNA_P Parameter: Plant Line Value: Columbia
  misc_feature: MA Experiment 20000117 PARAMETER Experiment Name: At_100uM_ABA_Mutants_cDNA_P Parameter: Timepoint (hr) Value: 6
  misc_feature: MA Experiment 20000117 PARAMETER Experiment Name: At_100uM_ABA_Mutants_cDNA_P Parameter: Tissue Value: Aerial
  misc_feature: MA Experiment 20000117 PARAMETER Experiment Name: At_100uM_ABA_Mutants_cDNA_P Parameter: Treatment Value: 100uM ABA vs. No Treatment
  misc_feature: MA Experiment ID: 20000180 Result: Down-regulated in Transcription
  misc_feature: MA Experiment 20000180 PARAMETER Experiment Name: At_Germinating_Seeds_P Parameter: Age (hr) Value: 24 vs. 0
  misc_feature: MA Experiment 20000180 PARAMETER Experiment Name: At_Germinating_Seeds_P Parameter: Tissue Value: Germinating Seeds
  misc_feature: MA Experiment ID: 20000184 Result: Up-regulated in Transcription
  misc_feature: MA Experiment 20000184 PARAMETER Experiment Name: At_Shoots__P Parameter: Age (day) Value: 7
  misc_feature: MA Experiment 20000184 PARAMETER Experiment Name: At_Shoots__P Parameter: Tissue Value: Shoots vs. Whole Plant
  misc_feature: MA Experiment ID: 20000794 Result: Up-regulated in Transcription
  misc_feature: MA Experiment 20000794 PARAMETER Experiment Name: At_Petals_P Parameter: Age (day) Value: 23-25 days
  misc_feature: MA Experiment 20000794 PARAMETER Experiment Name: At_Petals_P Parameter: Plant Line Value: WS
  misc_feature: MA Experiment 20000794 PARAMETER Experiment Name: At_Petals_P Parameter: Tissue Value: Petals vs. Whole plant
  misc_feature: MA Experiment ID: 20001911 Result: Up-regulated in Transcription
  misc_feature: MA Experiment 20001911 PARAMETER Experiment Name: At_Drought_Reproduction_P Parameter: Age (day) Value: 40
  misc_feature: MA Experiment 20001911 PARAMETER Experiment Name: At_Drought_Reproduction_P Parameter: Organism Value: A. thaliana
  misc_feature: MA Experiment 20001911 PARAMETER Experiment Name: At_Drought_Reproduction_P Parameter: Plant Line Value: WS
  misc_feature: MA Experiment 20001911 PARAMETER Experiment Name: At_Drought_Reproduction_P Parameter: Timepoint (day) Value: 10
  misc_feature: MA Experiment 20001911 PARAMETER Experiment Name: At_Drought_Reproduction_P Parameter: Tissue Value: Flowers
  misc_feature: MA Experiment 20001911 PARAMETER Experiment Name: At_Drought_Reproduction_P Parameter: Treatment Value: Drought vs. No Drought
ccccgagtgggctcaacgttgtcattagctatattctaatttaatggttatcatcagaaaatctgaaatcaaatttttggattgtaatccatggctgctcttggtaaaggacataaaacagctttcatctcttgaatggcttcgtctcttttgcaatttttgagttagccaagtgctcaagggagatacataatacctgaagatgtccaaggcaagtgatgccgtcagagaaccattggtggacaagaatatggctggatcaaaaccagaccagccgtggatggtttatctcagcacattcgttgcggtctgtggttcttttgcgttcggttcttgtgcgggatactcttcacctgctcaggctgcaattaggaatgacctttcattgactatagctgagttttcactctttggttctttactaacttttggcgcaatgatcggtgctataacaagcgggcctatagctgatttagttggaagaaagggggcgatgagagtttcctctgcattttgtgtagtcgggtggctagcaatcatctttgccaagggagtagtggctctggaccttggaagactggcaacgggatatggaatgggagcattttcctatgtggtgccaatctttatagcagaaattgcacctaaaactttcagaggggctctaaccacactgaaccagattctgatctgcactggagtgtcggtttccttcatcataggcacactagtgacgtggagagtcttggcattaataggaatcatcccatgcgctgcctccttccttggcctcttttttatccctgagtctccaagatggctggcaaaagtggggcgtgatacggagtttgaagctgcactgaggaagctccgtgggaagaaggctgatatttcggaggaggcagcagagatccaggattatatcgaaactctggaaaggctaccgaaagccaagatgctggatttgtttcagaggagatacatacgctctgttcttatagctttcgggttgatggtgtttcagcagtttggaggaatcaacggaatatgtttctacacaagctcgatatttgagcaagcaggttttcccacaagacttgggatgataatatatgctgttcttcaggtggtaatcactgcgcttaatgcaccgatagttgacagagccggaagaaaaccattgctactggtttctgcaacagggttagtgataggctgtttgatagcagcggtttctttctatctcaaggttcacgacatggcgcacgaagcagtcccagtcctggctgttgttggtataatggtgtacataggatcgttttcagcaggaatgggagcaatgccgtgggtggtcatgtctgagatatttcccataaacataaaaggagtagcaggaggcatggcgacgctggtgaactggtttggagcgtgggctgtttcttacactttcaacttcctcatgtcctggagctcttacggaactttcctcatttacgctgccatcaacgcgctggccattgtcttcgtcattgccatcgtgcctgagacaaaagggaagacattggagcagatccaagctatagtcaatccatagctcaaacacttcctagatgttcgtttctattagccagctgggacataaattgcaatcttggatctctttgcttttatgattctttactgagttcaattgttatcactctctctatttctaatctcttcttaatgaactttggacttc

SEQ ID NO: 40571 - protein, 463 aa, Arabidopsis thaliana
  peptide (1)..(463): Ceres Seq. ID no. 12327914
  misc_feature (30)..(461): Pfam Name: Sugar (and other) transporter Pfam Description: Sugar (and other) transporter
  misc_feature (117)..(160): Homolog of NCBI NO: 25409087 NR Description: probable sugar transporter [imported] -
  misc_feature (1)..(98): Homolog of NCBI NO: 25409087 NR Description: probable sugar transporter [imported] -
  misc_feature (327)..(463): Homolog of NCBI NO: 25409087 NR Description: probable sugar transporter [imported] -
  misc_feature (27)..(461): Homolog of NCBI NO: 21592787 NR Description: sugar transporter-like protein [Arabidopsis
  misc_feature (1)..(461): Homolog of NCBI NO: 30679397 NR Description: sugar transporter family [Arabidopsis thaliana]
  misc_feature (1)..(461): Homolog of NCBI NO: 6729025 NR Description: putative sugar transporter [Arabidopsis thaliana]
  misc_feature (27)..(461): Homolog of NCBI NO: 18419741 NR Description: sugar transporter - like protein
  misc_feature (14)..(462): Homolog of NCBI NO: 23504385 NR Description: putative sugar transporter [Lycopersicon
  misc_feature (1)..(463): Homolog of NCBI NO: 21536914 NR Description: putative sugar transporter [Arabidopsis thaliana]
  misc_feature (1)..(463): Homolog of NCBI NO: 18407508 NR Description: putative sugar transporter
MSKASDAVREPLVDKNMAGSKPDQPWMVYLSTFVAVCGSFAFGSCAGYSSPAQAAIRNDLSLTIAEFSLFGSLLTFGAMIGAITSGPIADLVGRKGAMRVSSAFCVVGWLAIIFAKGVVALDLGRLATGYGMGAFSYVVPIFIAEIAPKTFRGALTTLNQILICTGVSVSFIIGTLVTWRVLALIGIIPCAASFLGLFFIPESPRWLAKVGRDTEFEAALRKLRGKKADISEEAAEIQDYIETLERLPKAKMLDLFQRRYIRSVLIAFGLMVFQQFGGINGICFYTSSIFEQAGFPTRLGMIIYAVLQVVITALNAPIVDRAGRKPLLLVSATGLVIGCLIAAVSFYLKVHDMAHEAVPVLAVVGIMVYIGSFSAGMGAMPWVVMSEIFPINIKGVAGGMATLVNWFGAWAVSYTFNFLMSWSSYGTFLIYAAINALAIVFVIAIVPETKGKTLEQIQAIVNP

SEQ ID NO: 40572 - protein, 447 aa, Arabidopsis thaliana
  peptide (1)..(447): Ceres Seq. ID no. 12327915
  misc_feature (14)..(445): Pfam Name: Sugar (and other) transporter Pfam Description: Sugar (and other) transporter
  misc_feature (101)..(144): Homolog of NCBI NO: 25409087 NR Description: probable sugar transporter [imported] -
  misc_feature (1)..(82): Homolog of NCBI NO: 25409087 NR Description: probable sugar transporter [imported] -
  misc_feature (311)..(447): Homolog of NCBI NO: 25409087 NR Description: probable sugar transporter [imported] -
  misc_feature (11)..(445): Homolog of NCBI NO: 21592787 NR Description: sugar transporter-like protein [Arabidopsis
  misc_feature (1)..(445): Homolog of NCBI NO: 30679397 NR Description: sugar transporter family [Arabidopsis thaliana]
  misc_feature (1)..(445): Homolog of NCBI NO: 6729025 NR Description: putative sugar transporter [Arabidopsis thaliana]
  misc_feature (11)..(445): Homolog of NCBI NO: 18419741 NR Description: sugar transporter - like protein
  misc_feature (1)..(446): Homolog of NCBI NO: 23504385 NR Description: putative sugar transporter [Lycopersicon
  misc_feature (1)..(447): Homolog of NCBI NO: 21536914 NR Description: putative sugar transporter [Arabidopsis thaliana]
  misc_feature (1)..(447): Homolog of NCBI NO: 18407508 NR Description: putative sugar transporter
MAGSKPDQPWMVYLSTFVAVCGSFAFGSCAGYSSPAQAAIRNDLSLTIAEFSLFGSLLTFGAMIGAITSGPIADLVGRKGAMRVSSAFCVVGWLAIIFAKGVVALDLGRLATGYGMGAFSYVVPIFIAEIAPKTFRGALTTLNQILICTGVSVSFIIGTLVTWRVLALIGIIPCAASFLGLFFIPESPRWLAKVGRDTEFEAALRKLRGKKADISEEAAEIQDYIETLERLPKAKMLDLFQRRYIRSVLIAFGLMVFQQFGGINGICFYTSSIFEQAGFPTRLGMIIYAVLQVVITALNAPIVDRAGRKPLLLVSATGLVIGCLIAAVSFYLKVHDMAHEAVPVLAVVGIMVYIGSFSAGMGAMPWVVMSEIFPINIKGVAGGMATLVNWFGAWAVSYTFNFLMSWSSYGTFLIYAAINALAIVFVIAIVPETKGKTLEQIQAIVNP

SEQ ID NO: 40573 - protein, 437 aa, Arabidopsis thaliana
  peptide (1)..(437): Ceres Seq. ID no. 12327916
  misc_feature (4)..(435): Pfam Name: Sugar (and other) transporter Pfam Description: Sugar (and other) transporter
  misc_feature (91)..(134): Homolog of NCBI NO: 25409087 NR Description: probable sugar transporter [imported] -
  misc_feature (1)..(72): Homolog of NCBI NO: 25409087 NR Description: probable sugar transporter [imported] -
  misc_feature (301)..(437): Homolog of NCBI NO: 25409087 NR Description: probable sugar transporter [imported] -
  misc_feature (1)..(435): Homolog of NCBI NO: 21592787 NR Description: sugar transporter-like protein [Arabidopsis
  misc_feature (1)..(435): Homolog of NCBI NO: 30679397 NR Description: sugar transporter family [Arabidopsis thaliana]
  misc_feature (1)..(435): Homolog of NCBI NO: 6729025 NR Description: putative sugar transporter [Arabidopsis thaliana]
  misc_feature (1)..(435): Homolog of NCBI NO: 18419741 NR Description: sugar transporter - like protein
  misc_feature (1)..(436): Homolog of NCBI NO: 23504385 NR Description: putative sugar transporter [Lycopersicon
  misc_feature (1)..(437): Homolog of NCBI NO: 21536914 NR Description: putative sugar transporter [Arabidopsis thaliana]
  misc_feature (1)..(437): Homolog of NCBI NO: 18407508 NR Description: putative sugar transporter
MVYLSTFVAVCGSFAFGSCAGYSSPAQAAIRNDLSLTIAEFSLFGSLLTFGAMIGAITSGPIADLVGRKGAMRVSSAFCVVGWLAIIFAKGVVALDLGRLATGYGMGAFSYVVPIFIAEIAPKTFRGALTTLNQILICTGVSVSFIIGTLVTWRVLALIGIIPCAASFLGLFFIPESPRWLAKVGRDTEFEAALRKLRGKKADISEEAAEIQDYIETLERLPKAKMLDLFQRRYIRSVLIAFGLMVFQQFGGINGICFYTSSIFEQAGFPTRLGMIIYAVLQVVITALNAPIVDRAGRKPLLLVSATGLVIGCLIAAVSFYLKVHDMAHEAVPVLAVVGIMVYIGSFSAGMGAMPWVVMSEIFPINIKGVAGGMATLVNWFGAWAVSYTFNFLMSWSSYGTFLIYAAINALAIVFVIAIVPETKGKTLEQIQAIVNP

SEQ ID NO: 40574 - DNA, 859 bp, Arabidopsis thaliana
  misc_feature (1)..(859): Ceres Seq. ID no. 12337622
  misc_feature: MA Experiment ID: 108579 Result: Down-regulated in Transcription
  misc_feature: MA Experiment 108579 PARAMETER Experiment Name: At_4deg_Cold_cDNA_P Parameter: Temperature (deg C) Value: 4 vs. 22
  misc_feature: MA Experiment 108579 PARAMETER Experiment Name: At_4deg_Cold_cDNA_P Parameter: Timepoint (hr) Value: 6
  misc_feature: MA Experiment 108579 PARAMETER Experiment Name: At_4deg_Cold_cDNA_P Parameter: Tissue Value: Aerial
  misc_feature: MA Experiment ID: 20000113 Result: Up-regulated in Transcription
  misc_feature: MA Experiment 20000113 PARAMETER Experiment Name: At_42deg_Heat_cDNA_P Parameter: Temperature (deg C) Value: 42 vs. 22
  misc_feature: MA Experiment 20000113 PARAMETER Experiment Name: At_42deg_Heat_cDNA_P Parameter: Timepoint (hr) Value: 8
  misc_feature: MA Experiment 20000113 PARAMETER Experiment Name: At_42deg_Heat_cDNA_P Parameter: Tissue Value: Aerial
  misc_feature: MA Experiment ID: 20000224 Result: Down-regulated in Transcription
ccgatggaccgccatagtcaccgactaaaaaaaccagcgaccacgtaaatctttgacgacgaggaggaggaggaggagaagaataaacggaagaaactaagagatgaatagtccaccggagaacgatctttgttcgatatgtcattcccacttcaccgctccttgtcaagccaattgttcccattggttctgcgggaactgcattatgctggtgtggaggcatggatctacattacagccatgtaaatgccctttgtgtcgtcgtcatattagtttgttggttccttcagaggacacaatcagagaccgtaatgacgctacagttaaggaggttcttggtaatcttgaaacttacaaccgactctttggcgggcgttcaagtagtttagttcagaggatgcaagacctgcccttcttactacggaggttgttgcgggaaatgatggatccacaaagaacgcttccacttgtcattagggctcgggtttatatcgcaatgattctcagtgctgtttacataatcagtccaatagatatcattccagaaggagttctgggggtagtcggtttgcttgatgatctactcatagcactgatttgtttcctccatgttgctgctctgtaccgctcggttctctatttccgtcatgccggttcgtgaatcaatgagtgtctttgacattatacgttgcagttcaagaactagagatgtgtgcttaccttttcttctgtctttgatcctttccctttacaaatacacaattgttctgtttagctaaggaaaactgaaatgtgtgatgataaagatcacagcacaaaaagcttggaagtacatatcaatcatcttcctaccactttc

SEQ ID NO: 40575 - protein, 185 aa, Arabidopsis thaliana
  peptide (1)..(185): Ceres Seq. ID no. 12337623
  misc_feature (10)..(52): Pfam Name: Zinc finger, C3HC4 type (RING finger) Pfam Description: Zinc finger, C3HC4 type (RING finger)
  misc_feature (10)..(184): Homolog of NCBI NO: 33604158 NR Description: Unknown (protein for MGC:65779) [Danio rerio]
  misc_feature (1)..(175): Homolog of NCBI NO: 21553438 NR Description: unknown [Arabidopsis thaliana]
  misc_feature (1)..(175): Homolog of NCBI NO: 26453304 NR Description: unknown protein [Arabidopsis thaliana]
  misc_feature (1)..(175): Homolog of NCBI NO: 18418331 NR Description: Expressed protein
  misc_feature (62)..(184): Homolog of NCBI NO: 25406151 NR Description: unknown protein T9N14.2 [imported] - Arabidopsis
  misc_feature (58)..(185): Homolog of NCBI NO: 25518502 NR Description: hypothetical protein F12K8.14 - Arabidopsis
  misc_feature (4)..(184): Homolog of NCBI NO: 28376707 NR Description: unknown protein [Oryza sativa (japonica
  misc_feature (1)..(185): Homolog of NCBI NO: 21554064 NR Description: unknown [Arabidopsis thaliana]
  misc_feature (1)..(185): Homolog of NCBI NO: 18395127 NR Description: expressed protein
  misc_feature (1)..(185): Homolog of NCBI NO: 18410010 NR Description: Expressed protein
MNSPPENDLCSICHSHFTAPCQANCSHWFCGNCIMLVWRHGSTLQPCKCPLCRRHISLLVPSEDTIRDRNDATVKEVLGNLETYNRLFGGRSSSLVQRMQDLPFLLRRLLREMMDPQRTLPLVIRARVYIAMILSAVYIISPIDIIPEGVLGVVGLLDDLLIALICFLHVAALYRSVLYFRHAGS

SEQ ID NO: 40576 - protein, 151 aa, Arabidopsis thaliana
  peptide (1)..(151): Ceres Seq. ID no. 12337624
  misc_feature (1)..(150): Homolog of NCBI NO: 33604158 NR Description: Unknown (protein for MGC:65779) [Danio rerio]
  misc_feature (1)..(141): Homolog of NCBI NO: 21553438 NR Description: unknown [Arabidopsis thaliana]
  misc_feature (1)..(141): Homolog of NCBI NO: 26453304 NR Description: unknown protein [Arabidopsis thaliana]
  misc_feature (1)..(141): Homolog of NCBI NO: 18418331 NR Description: Expressed protein
  misc_feature (28)..(150): Homolog of NCBI NO: 25406151 NR Description: unknown protein T9N14.2 [imported] - Arabidopsis
  misc_feature (24)..(151): Homolog of NCBI NO: 25518502 NR Description: hypothetical protein F12K8.14 - Arabidopsis
  misc_feature (1)..(150): Homolog of NCBI NO: 28376707 NR Description: unknown protein [Oryza sativa (japonica
  misc_feature (1)..(151): Homolog of NCBI NO: 21554064 NR Description: unknown [Arabidopsis thaliana]
  misc_feature (1)..(151): Homolog of NCBI NO: 18395127 NR Description: expressed protein
  misc_feature (1)..(151): Homolog of NCBI NO: 18410010 NR Description: Expressed protein
MLVWRHGSTLQPCKCPLCRRHISLLVPSEDTIRDRNDATVKEVLGNLETYNRLFGGRSSSLVQRMQDLPFLLRRLLREMMDPQRTLPLVIRARVYIAMILSAVYIISPIDIIPEGVLGVVGLLDDLLIALICFLHVAALYRSVLYFRHAGS

SEQ ID NO: 40577 - DNA, 1371 bp, Arabidopsis thaliana
  misc_feature (1)..(1371): Ceres Seq. ID no. 12366986
  misc_feature: MA Experiment ID: 108434 Result: Down-regulated in Transcription
  misc_feature: MA Experiment 108434 PARAMETER Experiment Name: At_Root_Tips_cDNA_P Parameter: Tissue Value: Root Tips
  misc_feature: MA Experiment ID: 108464 Result: Up-regulated in Transcription
  misc_feature: MA Experiment 108464 PARAMETER Experiment Name: At_Germinating_Seeds_cDNA_P Parameter: Age (day) Value: 4 vs. 0
  misc_feature: MA Experiment 108464 PARAMETER Experiment Name: At_Germinating_Seeds_cDNA_P Parameter: Tissue Value: Germinating Seeds
  misc_feature: MA Experiment ID: 108488 Result: Down-regulated in Transcription
  misc_feature: MA Experiment ID: 108585 Result: Up-regulated in Transcription
  misc_feature: MA Experiment 108585 PARAMETER Experiment Name: At_5mM_NaNP_cDNA_P Parameter: Timepoint (hr) Value: 6
  misc_feature: MA Experiment 108585 PARAMETER Experiment Name: At_5mM_NaNP_cDNA_P Parameter: Tissue Value: Aerial
  misc_feature: MA Experiment 108585 PARAMETER Experiment Name: At_5mM_NaNP_cDNA_P Parameter: Treatment Value: null
  misc_feature: MA Experiment ID: 20000069 Result: Up-regulated in Transcription
  misc_feature: MA Experiment 20000069 PARAMETER Experiment Name: At_100uM_ABA_Mutants_cDNA_P Parameter: Plant Line Value: CS23
  misc_feature: MA Experiment 20000069 PARAMETER Experiment Name: At_100uM_ABA_Mutants_cDNA_P Parameter: Timepoint (hr) Value: 6
  misc_feature: MA Experiment 20000069 PARAMETER Experiment Name: At_100uM_ABA_Mutants_cDNA_P Parameter: Tissue Value: Aerial
  misc_feature: MA Experiment 20000069 PARAMETER Experiment Name: At_100uM_ABA_Mutants_cDNA_P Parameter: Treatment Value: 100uM ABA vs. No Treatment
  misc_feature: MA Experiment ID: 20000070 Result: Up-regulated in Transcription
  misc_feature: MA Experiment 20000070 PARAMETER Experiment Name: At_100uM_ABA_Mutants_cDNA_P Parameter: Plant Line Value: CS24
  misc_feature: MA Experiment 20000070 PARAMETER Experiment Name: At_100uM_ABA_Mutants_cDNA_P Parameter: Timepoint (hr) Value: 6
  misc_feature: MA Experiment 20000070 PARAMETER Experiment Name: At_100uM_ABA_Mutants_cDNA_P Parameter: Tissue Value: Aerial
  misc_feature: MA Experiment 20000070 PARAMETER Experiment Name: At_100uM_ABA_Mutants_cDNA_P Parameter: Treatment Value: 100uM ABA vs. No Treatment
  misc_feature: MA Experiment ID: 20000071 Result: Up-regulated in Transcription
  misc_feature: MA Experiment 20000071 PARAMETER Experiment Name: At_100uM_ABA_Mutants_cDNA_P Parameter: Plant Line Value: CS8104
  misc_feature: MA Experiment 20000071 PARAMETER Experiment Name: At_100uM_ABA_Mutants_cDNA_P Parameter: Timepoint (hr) Value: 6
  misc_feature: MA Experiment 20000071 PARAMETER Experiment Name: At_100uM_ABA_Mutants_cDNA_P Parameter: Tissue Value: Aerial
  misc_feature: MA Experiment 20000071 PARAMETER Experiment Name: At_100uM_ABA_Mutants_cDNA_P Parameter: Treatment Value: 100uM ABA vs. No Treatment
  misc_feature: MA Experiment ID: 20000173 Result: Down-regulated in Transcription
  misc_feature: MA Experiment 20000173 PARAMETER Experiment Name: At_42deg_Heat_P Parameter: Age (day) Value: 14
  misc_feature: MA Experiment 20000173 PARAMETER Experiment Name: At_42deg_Heat_P Parameter: Organism Value: A. thaliana
  misc_feature: MA Experiment 20000173 PARAMETER Experiment Name: At_42deg_Heat_P Parameter: Plant Line Value: WS
  misc_feature: MA Experiment 20000173 PARAMETER Experiment Name: At_42deg_Heat_P Parameter: Temperature (deg C) Value: 42 vs. 22
  misc_feature: MA Experiment 20000173 PARAMETER Experiment Name: At_42deg_Heat_P Parameter: Timepoint (hr) Value: 6
  misc_feature: MA Experiment 20000173 PARAMETER Experiment Name: At_42deg_Heat_P Parameter: Tissue Value: Aerial
  misc_feature: MA Experiment ID: 20000224 Result: Down-regulated in Transcription
  misc_feature: MA Experiment ID: 20000227 Result: Down-regulated in Transcription
  misc_feature: MA Experiment 20000227 PARAMETER Experiment Name: At_Root-Tips-vs-Tops_P Parameter: Tissue Value: Root Tips vs. Root Tops
  misc_feature: MA Experiment ID: 20000234 Result: Down-regulated in Transcription
  misc_feature: MA Experiment 20000234 PARAMETER Experiment Name: At_Siliques_P Parameter: Age (day) Value: 21
  misc_feature: MA Experiment 20000234 PARAMETER Experiment Name: At_Siliques_P Parameter: Organism Value: A. thaliana
  misc_feature: MA Experiment 20000234 PARAMETER Experiment Name: At_Siliques_P Parameter: Plant Line Value: WS
  misc_feature: MA Experiment 20000234 PARAMETER Experiment Name: At_Siliques_P Parameter: Tissue Value: Less Than 5mm Siliques vs. Whole Plant
  misc_feature: MA Experiment ID: 20000264 Result: Down-regulated in Transcription
  misc_feature: MA Experiment 20000264 PARAMETER Experiment Name: At_Open_Flower_P Parameter: Age (day) Value: 21
  misc_feature: MA Experiment 20000264 PARAMETER Experiment Name: At_Open_Flower_P Parameter: Plant Line Value: WS
  misc_feature: MA Experiment 20000264 PARAMETER Experiment Name: At_Open_Flower_P Parameter: Tissue Value: Open Flower vs. Whole Plant
  misc_feature: MA Experiment ID: 20000265 Result: Down-regulated in Transcription
  misc_feature: MA Experiment 20000265 PARAMETER Experiment Name: At_Open_Flower_P Parameter: Age (day) Value: 21
  misc_feature: MA Experiment 20000265 PARAMETER Experiment Name: At_Open_Flower_P Parameter: Plant Line Value: WS
  misc_feature: MA Experiment 20000265 PARAMETER Experiment Name: At_Open_Flower_P Parameter: Tissue Value: Closed Flower vs. Whole Plant
  misc_feature: MA Experiment ID: 20000286 Result: Down-regulated in Transcription
  misc_feature: MA Experiment 20000286 PARAMETER Experiment Name: At_Open_Flower_P Parameter: Age (day) Value: 21
  misc_feature: MA Experiment 20000286 PARAMETER Experiment Name: At_Open_Flower_P Parameter: Plant Line Value: WS
  misc_feature: MA Experiment 20000286 PARAMETER Experiment Name: At_Open_Flower_P Parameter: Tissue Value: Half Open vs. Whole Plant
  misc_feature: MA Experiment ID: 20000438 Result: Down-regulated in Transcription
  misc_feature: MA Experiment 20000438 PARAMETER Experiment Name: At_Shoots__P Parameter: Age (day) Value: 14
  misc_feature: MA Experiment 20000438 PARAMETER Experiment Name: At_Shoots__P Parameter: Tissue Value: Shoots vs. Whole Plant
  misc_feature: MA Experiment ID: 20000495 Result: Down-regulated in Transcription
  misc_feature: MA Experiment 20000495 PARAMETER Experiment Name: At_Guard_Cells_P Parameter: Harvest Date Value: 8/2/2002
  misc_feature: MA Experiment 20000495 PARAMETER Experiment Name: At_Guard_Cells_P Parameter: Organism Value: A. thaliana
  misc_feature: MA Experiment 20000495 PARAMETER Experiment Name: At_Guard_Cells_P Parameter: Tissue Value: Guard Cells vs. Leaves
  misc_feature: MA Experiment ID: 20000527 Result: Down-regulated in Transcription
  misc_feature: MA Experiment 20000527 PARAMETER Experiment Name: At_10percent_PEG_P Parameter: Age (day) Value: 20
  misc_feature: MA Experiment 20000527 PARAMETER Experiment Name: At_10percent_PEG_P Parameter: Organism Value: A. thaliana
  misc_feature: MA Experiment 20000527 PARAMETER Experiment Name: At_10percent_PEG_P Parameter: Plant Line Value: WS
  misc_feature: MA Experiment 20000527 PARAMETER Experiment Name: At_10percent_PEG_P Parameter: Timepoint (day) Value: 20
  misc_feature: MA Experiment 20000527 PARAMETER Experiment Name: At_10percent_PEG_P Parameter: Tissue Value: Whole Plant
  misc_feature: MA Experiment 20000527 PARAMETER Experiment Name: At_10percent_PEG_P Parameter: Treatment Value: 10percent PEG vs. No Treatment
  misc_feature: MA Experiment ID: 20000709 Result: Down-regulated in Transcription
  misc_feature: MA Experiment 20000709 PARAMETER Experiment Name: At_15mM_NH4NO3_L-to-H_P Parameter: Age (hr) Value: 14
  misc_feature: MA Experiment 20000709 PARAMETER Experiment Name: At_15mM_NH4NO3_L-to-H_P Parameter: Organism Value: A. thaliana
  misc_feature: MA Experiment 20000709 PARAMETER Experiment Name: At_15mM_NH4NO3_L-to-H_P Parameter: Plant Line Value: WS
  misc_feature: MA Experiment 20000709 PARAMETER Experiment Name: At_15mM_NH4NO3_L-to-H_P Parameter: Timepoint (hr) Value: 4
  misc_feature: MA Experiment 20000709 PARAMETER Experiment Name: At_15mM_NH4NO3_L-to-H_P Parameter: Tissue Value: Aerial
  misc_feature: MA Experiment 20000709 PARAMETER Experiment Name: At_15mM_NH4NO3_L-to-H_P Parameter: Treatment Value: 15mM NH4NO3 vs. 30mM Mannitol
  misc_feature: MA Experiment ID: 20000794 Result: Down-regulated in Transcription
  misc_feature: MA Experiment 20000794 PARAMETER Experiment Name: At_Petals_P Parameter: Age (day) Value: 23-25 days
  misc_feature: MA Experiment 20000794 PARAMETER Experiment Name: At_Petals_P Parameter: Plant Line Value: WS
  misc_feature: MA Experiment 20000794 PARAMETER Experiment Name: At_Petals_P Parameter: Tissue Value: Petals vs. Whole plant
  misc_feature: MA Experiment ID: 20001558 Result: Down-regulated in Transcription
  misc_feature: MA Experiment 20001558 PARAMETER Experiment Name: At_Drought_Soil_Dry_P Parameter: Age (day) Value: 27
  misc_feature: MA Experiment 20001558 PARAMETER Experiment Name: At_Drought_Soil_Dry_P Parameter: Organism Value: A. thaliana
  misc_feature: MA Experiment 20001558 PARAMETER Experiment Name: At_Drought_Soil_Dry_P Parameter: Plant Line Value: WS
  misc_feature: MA Experiment 20001558 PARAMETER Experiment Name: At_Drought_Soil_Dry_P Parameter: Post Timepoint (hr) Value: 6
  misc_feature: MA Experiment 20001558 PARAMETER Experiment Name: At_Drought_Soil_Dry_P Parameter: Post-Treatment Value: Re-Water vs. No Drought
  misc_feature: MA Experiment 20001558 PARAMETER Experiment Name: At_Drought_Soil_Dry_P Parameter: Timepoint (day) Value: 13
  misc_feature: MA Experiment 20001558 PARAMETER Experiment Name: At_Drought_Soil_Dry_P Parameter: Treatment Value: Drought vs. No Drought
  misc_feature: MA Experiment ID: 20001559 Result: Down-regulated in Transcription
  misc_feature: MA Experiment 20001559 PARAMETER Experiment Name: At_Drought_Soil_Dry_P Parameter: Age (day) Value: 28
  misc_feature: MA Experiment 20001559 PARAMETER Experiment Name: At_Drought_Soil_Dry_P Parameter: Organism Value: A. thaliana
  misc_feature: MA Experiment 20001559 PARAMETER Experiment Name: At_Drought_Soil_Dry_P Parameter: Plant Line Value: WS
  misc_feature: MA Experiment 20001559 PARAMETER Experiment Name: At_Drought_Soil_Dry_P Parameter: Post Timepoint (hr) Value: 29
  misc_feature: MA Experiment 20001559 PARAMETER Experiment Name: At_Drought_Soil_Dry_P Parameter: Post-Treatment Value: Re-Water vs. No Drought
  misc_feature: MA Experiment 20001559 PARAMETER Experiment Name: At_Drought_Soil_Dry_P Parameter: Timepoint (day) Value: 14
  misc_feature: MA Experiment 20001559 PARAMETER Experiment Name: At_Drought_Soil_Dry_P Parameter: Treatment Value: Drought vs. No Drought
ctccttaaatcacttcgatcaaaacttatctctctctatcgtcttttgttttgatttaaatgcctcaagtcgttgcttcagcatgtaccggtgggtctgaccggaaaatctcatgtgaaactctggccgacgataacgaagactcacctcataactcgaagatccgacccgtatccatctccgccgtcgattttccaccggaatcttactctttatcaaaagaagctcagctcgaatggctaaacgacaacgccttcttcgaacgcaaagaatcacaaaaaggaaactcttctgctccaatttcgaatcccaatacaaaccctaattcgagctctcatcgaatctcactcaaatcaaaagcgtcgatcatcagattaccgaaaccgcagaagacgtgtttcaacgaagcgaagaaacggagaaattgcagaatcgcgaggactttgatgattccgaaacggatcgggtcgagattgaaatcggatcctacgttatcggagccatgttctcccaaggtttcttgtatcggaagggttagatctaaacgtgatcgtagccgacgaatgcagagacaaaaatccggtcgaaccaattcgtttaaggataaaccggttccggttaagaagcctggttttttcgctagcttcagagctattttcagaaccggtggcggttgcaaagacttatctgcgagtggagctcacgcgcctcggagggatgtcgtagtctctccgccgagagtttcggtgagaagatcgacggatattagaggacggcttccgccgggagacgtcgggaaatcctcgccgcagaggaatagtaccggttcgaggagatcaattgacggcggtgaaccggttctgcctggtttaggtgggatgactcggtttacttcagggagaagaccggatttgttggttgaagtttgacgtggcgtgacgtacggcgttttactgtgagtggtggggtccagtcccgagaaaaaacaaggatcgtgattggttagttggctatatggggcccagaagcgtgtgtatatttgaaaagtcgttgtgatgacatggcgagtggtttaacggagttaggaacacggcacagatagaaaaacgcggacgcttttggattgatttcttacgtctcaaccactttcaccgttttattatatagcttttggtgcgttttttcttctttttaagacttttgatatttgaattagtttcgctttttgtcctttttattattttccttgttttgggttgtacataggtattgttatttctttgtgtacatgtgtttttttttttgcttagaaaggaatagtagaatgtaaaagatacttgtgatgatcagtcaataatgtgttagacaccc

SEQ ID NO: 40578 - protein, 289 aa, Arabidopsis thaliana
  peptide (1)..(289): Ceres Seq. ID no. 12366987
  misc_feature (1)..(264): Homolog of NCBI NO: 18404079 NR Description: expressed protein
  misc_feature (1)..(264): Homolog of NCBI NO: 21537164 NR Description: unknown [Arabidopsis thaliana]
  misc_feature (1)..(289): Homolog of NCBI NO: 15231297 NR Description: hypothetical protein
MPQVVASACTGGSDRKISCETLADDNEDSPHNSKIRPVSISAVDFPPESYSLSKEAQLEWLNDNAFFERKESQKGNSSAPISNPNTNPNSSSHRISLKSKASIIRLPKPQKTCFNEAKKRRNCRIARTLMIPKRIGSRLKSDPTLSEPCSPKVSCIGRVRSKRDRSRRMQRQKSGRTNSFKDKPVPVKKPGFFASFRAIFRTGGGCKDLSASGAHAPRRDVVVSPPRVSVRRSTDIRGRLPPGDVGKSSPQRNSTGSRRSIDGGEPVLPGLGGMTRFTSGRRPDLLVEV

SEQ ID NO: 40579 - protein, 160 aa, Arabidopsis thaliana
  peptide (1)..(160): Ceres Seq. ID no. 12366988
  misc_feature (1)..(135): Homolog of NCBI NO: 18404079 NR Description: expressed protein
  misc_feature (1)..(135): Homolog of NCBI NO: 21537164 NR Description: unknown [Arabidopsis thaliana]
  misc_feature (1)..(160): Homolog of NCBI NO: 15231297 NR Description: hypothetical protein
MIPKRIGSRLKSDPTLSEPCSPKVSCIGRVRSKRDRSRRMQRQKSGRTNSFKDKPVPVKKPGFFASFRAIFRTGGGCKDLSASGAHAPRRDVVVSPPRVSVRRSTDIRGRLPPGDVGKSSPQRNSTGSRRSIDGGEPVLPGLGGMTRFTSGRRPDLLVEV

SEQ ID NO: 40580 - DNA, 1831 bp, Arabidopsis thaliana
  misc_feature (1)..(1831): Ceres Seq. ID no. 12397190
  misc_feature: MA Experiment ID: 108461 Result: Up-regulated in Transcription
  misc_feature: MA Experiment 108461 PARAMETER Experiment Name: At_Germinating_Seeds_cDNA_P Parameter: Age (day) Value: 1 vs. 0
  misc_feature: MA Experiment 108461 PARAMETER Experiment Name: At_Germinating_Seeds_cDNA_P Parameter: Tissue Value: Germinating Seeds
  misc_feature: MA Experiment ID: 108569 Result: Up-regulated in Transcription
  misc_feature: MA Experiment 108569 PARAMETER Experiment Name: At_0.001%_MeJA__cDNA_P Parameter: Timepoint (hr) Value: 6
  misc_feature: MA Experiment 108569 PARAMETER Experiment Name: At_0.001%_MeJA__cDNA_P Parameter: Tissue Value: Aerial
  misc_feature: MA Experiment 108569 PARAMETER Experiment Name: At_0.001%_MeJA__cDNA_P Parameter: Treatment Value: 0.001% MeJA vs. No Treatment
  misc_feature: MA Experiment ID: 108572 Result: Down-regulated in Transcription
  misc_feature: MA Experiment 108572 PARAMETER Experiment Name: At_Drought_cDNA_P Parameter: Timepoint (hr) Value: 1
  misc_feature: MA Experiment 108572 PARAMETER Experiment Name: At_Drought_cDNA_P Parameter: Tissue Value: Aerial
  misc_feature: MA Experiment 108572 PARAMETER Experiment Name: At_Drought_cDNA_P Parameter: Treatment Value: Drought vs. No Drought
  misc_feature: MA Experiment ID: 108573 Result: Up-regulated in Transcription
  misc_feature: MA Experiment 108573 PARAMETER Experiment Name: At_Drought_cDNA_P Parameter: Timepoint (hr) Value: 6
  misc_feature: MA Experiment 108573 PARAMETER Experiment Name: At_Drought_cDNA_P Parameter: Tissue Value: Aerial
  misc_feature: MA Experiment 108573 PARAMETER Experiment Name: At_Drought_cDNA_P Parameter: Treatment Value: Drought vs. No Drought
  misc_feature: MA Experiment ID: 108579 Result: Up-regulated in Transcription
  misc_feature: MA Experiment 108579 PARAMETER Experiment Name: At_4deg_Cold_cDNA_P Parameter: Temperature (deg C) Value: 4 vs. 22
  misc_feature: MA Experiment 108579 PARAMETER Experiment Name: At_4deg_Cold_cDNA_P Parameter: Timepoint (hr) Value: 6
  misc_feature: MA Experiment 108579 PARAMETER Experiment Name: At_4deg_Cold_cDNA_P Parameter: Tissue Value: Aerial
  misc_feature: MA Experiment ID: 20000030 Result: Down-regulated in Transcription
  misc_feature: MA Experiment 20000030 PARAMETER Experiment Name: At_CS6630_Roots_cDNA_P Parameter: Plant Line Value: CS6630 vs. WS
  misc_feature: MA Experiment 20000030 PARAMETER Experiment Name: At_CS6630_Roots_cDNA_P Parameter: Tissue Value: Roots
  misc_feature: MA Experiment ID: 20000068 Result: Down-regulated in Transcription
  misc_feature: MA Experiment ID: 20000307 Result: Up-regulated in Transcription
  misc_feature: MA Experiment 20000307 PARAMETER Experiment Name: At_Germinating_Seeds_Sub_P Parameter: Age (hr) Value: 24 vs. 0
  misc_feature: MA Experiment 20000307 PARAMETER Experiment Name: At_Germinating_Seeds_Sub_P Parameter: Organism Value: A. thaliana
  misc_feature: MA Experiment 20000307 PARAMETER Experiment Name: At_Germinating_Seeds_Sub_P Parameter: Plant Line Value: WS
  misc_feature: MA Experiment 20000307 PARAMETER Experiment Name: At_Germinating_Seeds_Sub_P Parameter: Tissue Value: Germinating Seeds
  misc_feature: MA Experiment ID: 20000332 Result: Up-regulated in Transcription
  misc_feature: MA Experiment 20000332 PARAMETER Experiment Name: At_4deg_Cold_Sub_P Parameter: Age (day) Value: 14
  misc_feature: MA Experiment 20000332 PARAMETER Experiment Name: At_4deg_Cold_Sub_P Parameter: Organism Value: A. thaliana
  misc_feature: MA Experiment 20000332 PARAMETER Experiment Name: At_4deg_Cold_Sub_P Parameter: Plant Line Value: WS
  misc_feature: MA Experiment 20000332 PARAMETER Experiment Name: At_4deg_Cold_Sub_P Parameter: Temperature (deg C) Value: 4 vs. 22
  misc_feature: MA Experiment 20000332 PARAMETER Experiment Name: At_4deg_Cold_Sub_P Parameter: Timepoint (hr) Value: 2
  misc_feature: MA Experiment 20000332 PARAMETER Experiment Name: At_4deg_Cold_Sub_P Parameter: Tissue Value: Aerial
  misc_feature: MA Experiment ID: 20000355 Result: Down-regulated in Transcription
  misc_feature: MA Experiment 20000355 PARAMETER Experiment Name: At_Siliques_Sub_P Parameter: Age (day) Value: 21
  misc_feature: MA Experiment 20000355 PARAMETER Experiment Name: At_Siliques_Sub_P Parameter: Organism Value: A. thaliana
  misc_feature: MA Experiment 20000355 PARAMETER Experiment Name: At_Siliques_Sub_P Parameter: Plant Line Value: WS
  misc_feature: MA Experiment 20000355 PARAMETER Experiment Name: At_Siliques_Sub_P Parameter: Tissue Value: Less Than 5mm Siliques vs. Whole Plant
ttttcctccgacaatatatttttaagtaatgacaatgtttccgcattattgggtttaattccatttttaaattagggttcttcagatcgacaaatctttctctttctctttccccgatcggaatcatgctaaagatctgaactttttctcagatccgtgaataagtaagtacggagagacagaaacatactcagactgatctgaggaaaacaaagttgatggtcgcaaacctgtaagtgaaatctatagagagagacgttgaagaagaaaatgggtcaagatggttcgccggcgcataaaagaccatccggaagcggcggaggacttccgacgacgacgttaaccaacggtggaggaagaggtggtcgtggtggtttgttacctcgaggtagacagatgcagaagacgtttaacaacatcaagatcacaattctctgtggtttcgtcacaattctcgtcttacgtggcactatcggtgttggtaacctaggaagctcaagcgccgatgcagttaaccagaacatcattgaggagactaaccggattctagctgagatccgatctgattcggatccaaccgacttggatgagcctcaggaaggtgatatgaatcccaatgcgacgtatgttctaggtcctaagatcacggattgggatagtcaacgtaaggtatggttgaatcagaatcctgagtttcctagtactgtcaatggcaaagctcgaatcttgcttttaacaggatctcctcctaagccttgtgataaccccattggtgatcattatcttttgaaatctgtgaagaacaagattgattattgtaggcttcatggaattgagattgtgtataacatggctcatttggataaggaactcgctggctattgggcaaaattaccaatgattaggaggttgatgttgtctcatccagaagttgagtggatctggtggatggatagtgatgctttgttcactgatatactgtttcagatccctttggctaggtatcagaagcataatctagtgattcatggttatccggacttgttgttcgatcagaagtcgtggattgctttgaacacaggtagttttctgctgaggaattgtcagtggtcgttggatttgttagatgcttgggcgcctatgggacctaaagggccaattcgtgatgaggccgggaaggtattgacggcttatctgaaaggtagaccagcttttgaggcagatgatcagtcagcattgatctatctcctgctttctcagaaagatacatggatggagaaagtgtttgtggagaatcaatactatttgcacgggttttgggaaggtttggttgataggtatgaggagatgatagagaagtatcacccgggattgggtgatgagagatggccatttgtgacccatttcgttgggtgtaaaccgtgtggtagctatgctgattatgcagtcgagaggtgcttgaagagtatggagagggcctttaattttgcagacaatcaagtgctcaagctgtatggttttagccataggggattgttgagccccaagattaagaggatcagaaatgagacagtctctcctttggagtttgtagacaagtttgatattcgcagaacgccagtggaaaccaaaccacagaactagaggaacacaaggagaggataggctcagctctcatgagattgtggacacgtataggtaaattatatgacactcacaaatgcaaagcaaatttgtttgcctgtacttgctactttactgtttcttctgcttctcttttttttgtttgttgttgttgcaagaatattttagatgcaaattctttttccat

SEQ ID NO: 40581 - protein, 457 aa, Arabidopsis thaliana
  peptide (1)..(457): Ceres Seq. ID no. 12397191
  misc_feature (148)..(392): Pfam Name: galactosyl transferase GMA12/MNN10 family Pfam Description: galactosyl transferase GMA12/MNN10 family
  misc_feature (39)..(133): Homolog of NCBI NO: 15228843 NR Description: alpha galactosyltransferase-like protein
  misc_feature (106)..(450): Homolog of NCBI NO: 15228843 NR Description: alpha galactosyltransferase-like protein
  misc_feature (93)..(127): Homolog of NCBI NO: 25349326 NR Description: hypothetical protein F6A14.20 - Arabidopsis
  misc_feature (93)..(127): Homolog of NCBI NO: 15221850 NR Description: alpha galactosyltransferase, putative; protein
  misc_feature (1)..(457): Homolog of NCBI NO: 15240848 NR Description: alpha galactosyltransferase protein; protein id:
  misc_feature (6)..(127): Homolog of NCBI NO: 15221850 NR Description: alpha galactosyltransferase, putative; protein
  misc_feature (93)..(455): Homolog of NCBI NO: 15221850 NR Description: alpha galactosyltransferase, putative; protein
  misc_feature (1)..(127): Homolog of NCBI NO: 25349326 NR Description: hypothetical protein F6A14.20 - Arabidopsis
  misc_feature (93)..(455): Homolog of NCBI NO: 25349326 NR Description: hypothetical protein F6A14.20 - Arabidopsis
  misc_feature (1)..(457): Homolog of NCBI NO: 15221224 NR Description: putative alpha galactosyltransferase
MGQDGSPAHKRPSGSGGGLPTTTLTNGGGRGGRGGLLPRGRQMQKTFNNIKITILCGFVTILVLRGTIGVGNLGSSSADAVNQNIIEETNRILAEIRSDSDPTDLDEPQEGDMNPNATYVLGPKITDWDSQRKVWLNQNPEFPSTVNGKARILLLTGSPPKPCDNPIGDHYLLKSVKNKIDYCRLHGIEIVYNMAHLDKELAGYWAKLPMIRRLMLSHPEVEWIWWMDSDALFTDILFQIPLARYQKHNLVIHGYPDLLFDQKSWIALNTGSFLLRNCQWSLDLLDAWAPMGPKGPIRDEAGKVLTAYLKGRPAFEADDQSALIYLLLSQKDTWMEKVFVENQYYLHGFWEGLVDRYEEMIEKYHPGLGDERWPFVTHFVGCKPCGSYADYAVERCLKSMERAFNFADNQVLKLYGFSHRGLLSPKIKRIRNETVSPLEFVDKFDIRRTPVETKPQN

SEQ ID NO: 40582 - protein, 415 aa, Arabidopsis thaliana
  peptide (1)..(415): Ceres Seq. ID no. 12397192
  misc_feature (106)..(350): Pfam Name: galactosyl transferase GMA12/MNN10 family Pfam Description: galactosyl transferase GMA12/MNN10 family
  misc_feature (1)..(91): Homolog of NCBI NO: 15228843 NR Description: alpha galactosyltransferase-like protein
  misc_feature (64)..(408): Homolog of NCBI NO: 15228843 NR Description: alpha galactosyltransferase-like protein
  misc_feature (51)..(85): Homolog of NCBI NO: 25349326 NR Description: hypothetical protein F6A14.20 - Arabidopsis
  misc_feature (51)..(85): Homolog of NCBI NO: 15221850 NR Description: alpha galactosyltransferase, putative; protein
  misc_feature (1)..(415): Homolog of NCBI NO: 15240848 NR Description: alpha galactosyltransferase protein; protein id:
  misc_feature (1)..(85): Homolog of NCBI NO: 15221850 NR Description: alpha galactosyltransferase, putative; protein
  misc_feature (51)..(413): Homolog of NCBI NO: 15221850 NR Description: alpha galactosyltransferase, putative; protein
  misc_feature (1)..(85): Homolog of NCBI NO: 25349326 NR Description: hypothetical protein F6A14.20 - Arabidopsis
  misc_feature (51)..(413): Homolog of NCBI NO: 25349326 NR Description: hypothetical protein F6A14.20 - Arabidopsis
  misc_feature (1)..(415): Homolog of NCBI NO: 15221224 NR Description: putative alpha galactosyltransferase
MQKTFNNIKITILCGFVTILVLRGTIGVGNLGSSSADAVNQNIIEETNRILAEIRSDSDPTDLDEPQEGDMNPNATYVLGPKITDWDSQRKVWLNQNPEFPSTVNGKARILLLTGSPPKPCDNPIGDHYLLKSVKNKIDYCRLHGIEIVYNMAHLDKELAGYWAKLPMIRRLMLSHPEVEWIWWMDSDALFTDILFQIPLARYQKHNLVIHGYPDLLFDQKSWIALNTGSFLLRNCQWSLDLLDAWAPMGPKGPIRDEAGKVLTAYLKGRPAFEADDQSALIYLLLSQKDTWMEKVFVENQYYLHGFWEGLVDRYEEMIEKYHPGLGDERWPFVTHFVGCKPCGSYADYAVERCLKSMERAFNFADNQVLKLYGFSHRGLLSPKIKRIRNETVSPLEFVDKFDIRRTPVETKPQN

SEQ ID NO: 40583 - protein, 345 aa, Arabidopsis thaliana
  peptide (1)..(345): Ceres Seq. ID no. 12397193
  misc_feature (36)..(280): Pfam Name: galactosyl transferase GMA12/MNN10 family Pfam Description: galactosyl transferase GMA12/MNN10 family
  misc_feature (1)..(21): Homolog of NCBI NO: 15228843 NR Description: alpha galactosyltransferase-like protein
  misc_feature (1)..(338): Homolog of NCBI NO: 15228843 NR Description: alpha galactosyltransferase-like protein
  misc_feature (1)..(15): Homolog of NCBI NO: 25349326 NR Description: hypothetical protein F6A14.20 - Arabidopsis
  misc_feature (1)..(15): Homolog of NCBI NO: 15221850 NR Description: alpha galactosyltransferase, putative; protein
  misc_feature (1)..(345): Homolog of NCBI NO: 15240848 NR Description: alpha galactosyltransferase protein; protein id:
  misc_feature (1)..(15): Homolog of NCBI NO: 15221850 NR Description: alpha galactosyltransferase, putative; protein
  misc_feature (1)..(343): Homolog of NCBI NO: 15221850 NR Description: alpha galactosyltransferase, putative; protein
  misc_feature (1)..(15): Homolog of NCBI NO: 25349326 NR Description: hypothetical protein F6A14.20 - Arabidopsis
  misc_feature (1)..(343): Homolog of NCBI NO: 25349326 NR Description: hypothetical protein F6A14.20 - Arabidopsis
  misc_feature (1)..(345): Homolog of NCBI NO: 15221224 NR Description: putative alpha galactosyltransferase
MNPNATYVLGPKITDWDSQRKVWLNQNPEFPSTVNGKARILLLTGSPPKPCDNPIGDHYLLKSVKNKIDYCRLHGIEIVYNMAHLDKELAGYWAKLPMIRRLMLSHPEVEWIWWMDSDALFTDILFQIPLARYQKHNLVIHGYPDLLFDQKSWIALNTGSFLLRNCQWSLDLLDAWAPMGPKGPIRDEAGKVLTAYLKGRPAFEADDQSALIYLLLSQKDTWMEKVFVENQYYLHGFWEGLVDRYEEMIEKYHPGLGDERWPFVTHFVGCKPCGSYADYAVERCLKSMERAFNFADNQVLKLYGFSHRGLLSPKIKRIRNETVSPLEFVDKFDIRRTPVETKPQN

SEQ ID NO: 40584 - DNA, 1603 bp, Arabidopsis thaliana
  misc_feature (1)..(1603): Ceres Seq. ID no. 12327728
  misc_feature: MA Experiment ID: 108434 Result: Up-regulated in Transcription
  misc_feature: MA Experiment 108434 PARAMETER Experiment Name: At_Root_Tips_cDNA_P Parameter: Tissue Value: Root Tips
  misc_feature: MA Experiment ID: 108462 Result: Up-regulated in Transcription
  misc_feature: MA Experiment 108462 PARAMETER Experiment Name: At_Germinating_Seeds_cDNA_P Parameter: Age (day) Value: 2 vs. 0
  misc_feature: MA Experiment 108462 PARAMETER Experiment Name: At_Germinating_Seeds_cDNA_P Parameter: Tissue Value: Germinating Seeds
  misc_feature: MA Experiment ID: 108463 Result: Up-regulated in Transcription
  misc_feature: MA Experiment 108463 PARAMETER Experiment Name: At_Germinating_Seeds_cDNA_P Parameter: Age (day) Value: 3 vs. 0
  misc_feature: MA Experiment 108463 PARAMETER Experiment Name: At_Germinating_Seeds_cDNA_P Parameter: Tissue Value: Germinating Seeds
  misc_feature: MA Experiment ID: 108464 Result: Up-regulated in Transcription
  misc_feature: MA Experiment 108464 PARAMETER Experiment Name: At_Germinating_Seeds_cDNA_P Parameter: Age (day) Value: 4 vs. 0
  misc_feature: MA Experiment 108464 PARAMETER Experiment Name: At_Germinating_Seeds_cDNA_P Parameter: Tissue Value: Germinating Seeds
  misc_feature: MA Experiment ID: 108585 Result: Up-regulated in Transcription
  misc_feature: MA Experiment 108585 PARAMETER Experiment Name: At_5mM_NaNP_cDNA_P Parameter: Timepoint (hr) Value: 6
  misc_feature: MA Experiment 108585 PARAMETER Experiment Name: At_5mM_NaNP_cDNA_P Parameter: Tissue Value: Aerial
  misc_feature: MA Experiment 108585 PARAMETER Experiment Name: At_5mM_NaNP_cDNA_P Parameter: Treatment Value: null
  misc_feature: MA Experiment ID: 108595 Result: Down-regulated in Transcription
  misc_feature: MA Experiment 108595 PARAMETER Experiment Name: At_Ler-pi_Ovule_cDNA_P Parameter: Plant Line Value: null
  misc_feature: MA Experiment ID: 20000087 Result: Down-regulated in Transcription
  misc_feature: MA Experiment 20000087 PARAMETER Experiment Name: At_100uM_ABA_Mutants_cDNA_P Parameter: Plant Line Value: WS
  misc_feature: MA Experiment 20000087 PARAMETER Experiment Name: At_100uM_ABA_Mutants_cDNA_P Parameter: Timepoint (hr) Value: 6
  misc_feature: MA Experiment 20000087 PARAMETER Experiment Name: At_100uM_ABA_Mutants_cDNA_P Parameter: Tissue Value: Aerial
  misc_feature: MA Experiment 20000087 PARAMETER Experiment Name: At_100uM_ABA_Mutants_cDNA_P Parameter: Treatment Value: 100uM ABA vs. No Treatment
  misc_feature: MA Experiment ID: 20000306 Result: Up-regulated in Transcription
  misc_feature: MA Experiment 20000306 PARAMETER Experiment Name: At_Germinating_Seeds_Sub_P Parameter: Age (hr) Value: 6 vs. 0
  misc_feature: MA Experiment 20000306 PARAMETER Experiment Name: At_Germinating_Seeds_Sub_P Parameter: Organism Value: A. thaliana
  misc_feature: MA Experiment 20000306 PARAMETER Experiment Name: At_Germinating_Seeds_Sub_P Parameter: Plant Line Value: WS
  misc_feature: MA Experiment 20000306 PARAMETER Experiment Name: At_Germinating_Seeds_Sub_P Parameter: Tissue Value: Germinating Seeds
  misc_feature: MA Experiment ID: 20000307 Result: Up-regulated in Transcription
  misc_feature: MA Experiment 20000307 PARAMETER Experiment Name: At_Germinating_Seeds_Sub_P Parameter: Age (hr) Value: 24 vs. 0
  misc_feature: MA Experiment 20000307 PARAMETER Experiment Name: At_Germinating_Seeds_Sub_P Parameter: Organism Value: A. thaliana
  misc_feature: MA Experiment 20000307 PARAMETER Experiment Name: At_Germinating_Seeds_Sub_P Parameter: Plant Line Value: WS
  misc_feature: MA Experiment 20000307 PARAMETER Experiment Name: At_Germinating_Seeds_Sub_P Parameter: Tissue Value: Germinating Seeds
  misc_feature: MA Experiment ID: 20000314 Result: Up-regulated in Transcription
  misc_feature: MA Experiment 20000314 PARAMETER Experiment Name: At_14day_Shoots-Roots_Sub_P Parameter: Age (day) Value: 14
  misc_feature: MA Experiment 20000314 PARAMETER Experiment Name: At_14day_Shoots-Roots_Sub_P Parameter: Organism Value: A. thaliana
  misc_feature: MA Experiment 20000314 PARAMETER Experiment Name: At_14day_Shoots-Roots_Sub_P Parameter: Plant Line Value: WS
  misc_feature: MA Experiment 20000314 PARAMETER Experiment Name: At_14day_Shoots-Roots_Sub_P Parameter: Tissue Value: Roots vs. Whole Plant
  misc_feature: MA Experiment ID: 20000315 Result: Up-regulated in Transcription
  misc_feature: MA Experiment 20000315 PARAMETER Experiment Name: At_14day_Shoots-Roots_Sub_P Parameter: Age (day) Value: 14
  misc_feature: MA Experiment 20000315 PARAMETER Experiment Name: At_14day_Shoots-Roots_Sub_P Parameter: Organism Value: A. thaliana
  misc_feature: MA Experiment 20000315 PARAMETER Experiment Name: At_14day_Shoots-Roots_Sub_P Parameter: Plant Line Value: WS
  misc_feature: MA Experiment 20000315 PARAMETER Experiment Name: At_14day_Shoots-Roots_Sub_P Parameter: Tissue Value: Shoots vs. Whole Plant
  misc_feature: MA Experiment ID: 20000440 Result: Up-regulated in Transcription
  misc_feature: MA Experiment 20000440 PARAMETER Experiment Name: At_Closed-Flower__Sub_P Parameter: Tissue Value: Closed Flower vs. Whole Plant
atatatccgataaatacttccgtcataacagagtaagagtttgtatgtaacaaatttcaacaaaaagaagagaaaaacaatgggagagaaagcgaaagcaaatgtgttagtcttctcatttccgatacaaggtcacataaaccctctcctccaattctcaaaacgcctactctctaaaaacgtcaacgtcacattcctcaccacttcctccacccacaactccatcctccgccgtgccatcaccggcggagccactgctcttcctctctcttttgtccccattgacgatggattcgaggaagatcacccatctacggacacatctcccgactacttcgcaaagttccaagaaaacgtatctcgaagcctctcagagcttatctcctcgatggacccaaaaccaaacgccgtcgtttacgactcgtgcctgccttatgtcctcgacgtttgccggaaacatcctggcgttgctgcggcgtcgtttttcactcagtcctccaccgtgaacgcgacctatattcatttcttgcgtggagagtttaaggagtttcaaaatgatgtcgttttgcctgcaatgcctccgctgaagggtaatgacttaccggtgtttctttacgataacaatctctgccggccgttgtttgagctcattagtagccagttcgtgaatgttgacgacattgacttcttcttggttaactctttcgacgaactcgaagtcgaggtgctacaatggatgaaaaaccaatggccggtcaagaacataggaccgatgattccatcaatgtacttagacaaacgattagcaggtgacaaagactacggaatcaacctcttcaatgcccaagtcaacgaatgccttgattggcttgactcaaaaccgcccggttcagtgatctacgtgtcttttggaagcttggccgtcttaaaagacgatcaaatgatagaagtcgcggctggtctaaaacaaactggccataacttcttatgggttgttagagaaactgaaacaaagaagcttccaagcaattacatagaggacatttgtgacaagggattgatagtgaattggagtcctcaattacaagttcttgcacataaatcaatcggttgtttcatgactcattgcgggtggaattcgactttagaggcattgagcttaggagttgctttgataggaatgccggcttatagcgaccagccgactaatgctaagtttattgaagatgtgtggaaggttggggttagggttaaggcagatcaaaatgggtttgttccgaaggaagagattgtgagatgtgttggagaagttatggaagatatgtcggagaaagggaaggagattagaaaaaatgctcggaggttgatggagtttgcaagggaagctttgtctgatggaggaaattctgataagaatattgatgagtttgttgctaaaattgtgaggtaaagtgactgtatgattaatctttgatgcttaattaataatgtgtttttaagagttttcaaaggacgaaatgtttagaatgtaacttgttggtttctttcaaagttatttatgatgtgaacaatgtgatctaaaatggtgttgaacttgggaaag

SEQ ID NO: 40585 - protein, 456 aa, Arabidopsis thaliana
  peptide (1)..(456): Ceres Seq. ID no. 12327729
  misc_feature (9)..(456): Pfam Name: UDP-glucoronosyl and UDP-glucosyl transferase Pfam Description: UDP-glucoronosyl and UDP-glucosyl transferase
  misc_feature (4)..(454): Homolog of NCBI NO: 15221668 NR Description: UDP-glycosyltransferase family
  misc_feature (1)..(454): Homolog of NCBI NO: 15824451 NR Description: thiohydroximate S-glucosyltransferase [Brassica
  misc_feature (3)..(454): Homolog of NCBI NO: 15224368 NR Description: putative glucosyltransferase
  misc_feature (3)..(454): Homolog of NCBI NO: 15224372 NR Description: putative glucosyltransferase; protein id:
  misc_feature (1)..(452): Homolog of NCBI NO: 15225138 NR Description: UDP-glycosyltransferase family
  misc_feature (6)..(455): Homolog of NCBI NO: 7385017 NR Description: UDP-glucose:salicylic acid glucosyltransferase
  misc_feature (7)..(413): Homolog of NCBI NO: 15221232 NR Description: putative indole-3-acetate beta-glucosyltransferase
  misc_feature (7)..(452): Homolog of NCBI NO: 15221233 NR Description: putative indole-3-acetate beta-glucosyltransferase
  misc_feature (1)..(456): Homolog of NCBI NO: 21536917 NR Description: putative glucosyltransferase [Arabidopsis
  misc_feature (1)..(456): Homolog of NCBI NO: 15225134 NR Description: putative glucosyltransferase
MGEKAKANVLVFSFPIQGHINPLLQFSKRLLSKNVNVTFLTTSSTHNSILRRAITGGATALPLSFVPIDDGFEEDHPSTDTSPDYFAKFQENVSRSLSELISSMDPKPNAVVYDSCLPYVLDVCRKHPGVAAASFFTQSSTVNATYIHFLRGEFKEFQNDVVLPAMPPLKGNDLPVFLYDNNLCRPLFELISSQFVNVDDIDFFLVNSFDELEVEVLQWMKNQWPVKNIGPMIPSMYLDKRLAGDKDYGINLFNAQVNECLDWLDSKPPGSVIYVSFGSLAVLKDDQMIEVAAGLKQTGHNFLWVVRETETKKLPSNYIEDICDKGLIVNWSPQLQVLAHKSIGCFMTHCGWNSTLEALSLGVALIGMPAYSDQPTNAKFIEDVWKVGVRVKADQNGFVPKEEIVRCVGEVMEDMSEKGKEIRKNARRLMEFAREALSDGGNSDKNIDEFVAKIVR

SEQ ID NO: 40586 - protein, 353 aa, Arabidopsis thaliana
  peptide (1)..(353): Ceres Seq. ID no. 12327730
  misc_feature (1)..(353): Pfam Name: UDP-glucoronosyl and UDP-glucosyl transferase Pfam Description: UDP-glucoronosyl and UDP-glucosyl transferase
  misc_feature (1)..(351): Homolog of NCBI NO: 15221668 NR Description: UDP-glycosyltransferase family
  misc_feature (1)..(351): Homolog of NCBI NO: 15824451 NR Description: thiohydroximate S-glucosyltransferase [Brassica
  misc_feature (1)..(351): Homolog of NCBI NO: 15224368 NR Description: putative glucosyltransferase
  misc_feature (1)..(351): Homolog of NCBI NO: 15224372 NR Description: putative glucosyltransferase; protein id:
  misc_feature (1)..(349): Homolog of NCBI NO: 15225138 NR Description: UDP-glycosyltransferase family
  misc_feature (1)..(352): Homolog of NCBI NO: 7385017 NR Description: UDP-glucose:salicylic acid glucosyltransferase
  misc_feature (1)..(310): Homolog of NCBI NO: 15221232 NR Description: putative indole-3-acetate beta-glucosyltransferase
  misc_feature (1)..(349): Homolog of NCBI NO: 15221233 NR Description: putative indole-3-acetate beta-glucosyltransferase
  misc_feature (1)..(353): Homolog of NCBI NO: 21536917 NR Description: putative glucosyltransferase [Arabidopsis
  misc_feature (1)..(353): Homolog of NCBI NO: 15225134 NR Description: putative glucosyltransferase
MDPKPNAVVYDSCLPYVLDVCRKHPGVAAASFFTQSSTVNATYIHFLRGEFKEFQNDVVLPAMPPLKGNDLPVFLYDNNLCRPLFELISSQFVNVDDIDFFLVNSFDELEVEVLQWMKNQWPVKNIGPMIPSMYLDKRLAGDKDYGINLFNAQVNECLDWLDSKPPGSVIYVSFGSLAVLKDDQMIEVAAGLKQTGHNFLWVVRETETKKLPSNYIEDICDKGLIVNWSPQLQVLAHKSIGCFMTHCGWNSTLEALSLGVALIGMPAYSDQPTNAKFIEDVWKVGVRVKADQNGFVPKEEIVRCVGEVMEDMSEKGKEIRKNARRLMEFAREALSDGGNSDKNIDEFVAKIVR

SEQ ID NO: 40587 - protein, 291 aa, Arabidopsis thaliana
  peptide (1)..(291): Ceres Seq. ID no. 12327731
  misc_feature (1)..(291): Pfam Name: UDP-glucoronosyl and UDP-glucosyl transferase Pfam Description: UDP-glucoronosyl and UDP-glucosyl transferase
  misc_feature (1)..(289): Homolog of NCBI NO: 15221668 NR Description: UDP-glycosyltransferase family
  misc_feature (1)..(289): Homolog of NCBI NO: 15824451 NR Description: thiohydroximate S-glucosyltransferase [Brassica
  misc_feature (1)..(289): Homolog of NCBI NO: 15224368 NR Description: putative glucosyltransferase
  misc_feature (1)..(289): Homolog of NCBI NO: 15224372 NR Description: putative glucosyltransferase; protein id:
  misc_feature (1)..(287): Homolog of NCBI NO: 15225138 NR Description: UDP-glycosyltransferase family
  misc_feature (1)..(290): Homolog of NCBI NO: 7385017 NR Description: UDP-glucose:salicylic acid glucosyltransferase
  misc_feature (1)..(248): Homolog of NCBI NO: 15221232 NR Description: putative indole-3-acetate beta-glucosyltransferase
  misc_feature (1)..(287): Homolog of NCBI NO: 15221233 NR Description: putative indole-3-acetate beta-glucosyltransferase
  misc_feature (1)..(291): Homolog of NCBI NO: 21536917 NR Description: putative glucosyltransferase [Arabidopsis
  misc_feature (1)..(291): Homolog of NCBI NO: 15225134 NR Description: putative glucosyltransferase
MPPLKGNDLPVFLYDNNLCRPLFELISSQFVNVDDIDFFLVNSFDELEVEVLQWMKNQWPVKNIGPMIPSMYLDKRLAGDKDYGINLFNAQVNECLDWLDSKPPGSVIYVSFGSLAVLKDDQMIEVAAGLKQTGHNFLWVVRETETKKLPSNYIEDICDKGLIVNWSPQLQVLAHKSIGCFMTHCGWNSTLEALSLGVALIGMPAYSDQPTNAKFIEDVWKVGVRVKADQNGFVPKEEIVRCVGEVMEDMSEKGKEIRKNARRLMEFAREALSDGGNSDKNIDEFVAKIVR

SEQ ID NO: 40588 - DNA, 1199 bp, Arabidopsis thaliana
  misc_feature (1)..(1199): Ceres Seq. ID no. 12738353
  misc_feature: MA Experiment ID: 108433 Result: Down-regulated in Transcription
  misc_feature: MA Experiment 108433 PARAMETER Experiment Name: At_rhl_Mutant2_cDNA_P Parameter: Age (day) Value: 7
  misc_feature: MA Experiment 108433 PARAMETER Experiment Name: At_rhl_Mutant2_cDNA_P Parameter: Organism Value: A. thaliana
  misc_feature: MA Experiment 108433 PARAMETER Experiment Name: At_rhl_Mutant2_cDNA_P Parameter: Plant Line Value: rhl Mutant vs. wt landsburg
  misc_feature: MA Experiment 108433 PARAMETER Experiment Name: At_rhl_Mutant2_cDNA_P Parameter: Tissue Value: Roots
  misc_feature: MA Experiment ID: 108434 Result: Up-regulated in Transcription
  misc_feature: MA Experiment 108434 PARAMETER Experiment Name: At_Root_Tips_cDNA_P Parameter: Tissue Value: Root Tips
  misc_feature: MA Experiment ID: 108435 Result: Up-regulated in Transcription
  misc_feature: MA Experiment 108435 PARAMETER Experiment Name: At_stm_Mutants_cDNA_P Parameter: Plant Line Value: wt Landsburg vs stm
  misc_feature: MA Experiment 108435 PARAMETER Experiment Name: At_stm_Mutants_cDNA_P Parameter: Tissue Value: Shoot Apical Meristem Region
  misc_feature: MA Experiment ID: 108461 Result: Up-regulated in Transcription
  misc_feature: MA Experiment 108461 PARAMETER Experiment Name: At_Germinating_Seeds_cDNA_P Parameter: Age (day) Value: 1 vs. 0
  misc_feature: MA Experiment 108461 PARAMETER Experiment Name: At_Germinating_Seeds_cDNA_P Parameter: Tissue Value: Germinating Seeds
  misc_feature: MA Experiment ID: 108462 Result: Up-regulated in Transcription
  misc_feature: MA Experiment 108462 PARAMETER Experiment Name: At_Germinating_Seeds_cDNA_P Parameter: Age (day) Value: 2 vs. 0
  misc_feature: MA Experiment 108462 PARAMETER Experiment Name: At_Germinating_Seeds_cDNA_P Parameter: Tissue Value: Germinating Seeds
  misc_feature: MA Experiment ID: 20000070 Result: Down-regulated in Transcription
  misc_feature: MA Experiment 20000070 PARAMETER Experiment Name: At_100uM_ABA_Mutants_cDNA_P Parameter: Plant Line Value: CS24
  misc_feature: MA Experiment 20000070 PARAMETER Experiment Name: At_100uM_ABA_Mutants_cDNA_P Parameter: Timepoint (hr) Value: 6
  misc_feature: MA Experiment 20000070 PARAMETER Experiment Name: At_100uM_ABA_Mutants_cDNA_P Parameter: Tissue Value: Aerial
  misc_feature: MA Experiment 20000070 PARAMETER Experiment Name: At_100uM_ABA_Mutants_cDNA_P Parameter: Treatment Value: 100uM ABA vs. No Treatment
  misc_feature: MA Experiment ID: 20000071 Result: Down-regulated in Transcription
  misc_feature: MA Experiment 20000071 PARAMETER Experiment Name: At_100uM_ABA_Mutants_cDNA_P Parameter: Plant Line Value: CS8104
  misc_feature: MA Experiment 20000071 PARAMETER Experiment Name: At_100uM_ABA_Mutants_cDNA_P Parameter: Timepoint (hr) Value: 6
  misc_feature: MA Experiment 20000071 PARAMETER Experiment Name: At_100uM_ABA_Mutants_cDNA_P Parameter: Tissue Value: Aerial
  misc_feature: MA Experiment 20000071 PARAMETER Experiment Name: At_100uM_ABA_Mutants_cDNA_P Parameter: Treatment Value: 100uM ABA vs. No Treatment
  misc_feature: MA Experiment ID: 20000117 Result: Down-regulated in Transcription
  misc_feature: MA Experiment 20000117 PARAMETER Experiment Name: At_100uM_ABA_Mutants_cDNA_P Parameter: Plant Line Value: Columbia
  misc_feature: MA Experiment 20000117 PARAMETER Experiment Name: At_100uM_ABA_Mutants_cDNA_P Parameter: Timepoint (hr) Value: 6
  misc_feature: MA Experiment 20000117 PARAMETER Experiment Name: At_100uM_ABA_Mutants_cDNA_P Parameter: Tissue Value: Aerial
  misc_feature: MA Experiment 20000117 PARAMETER Experiment Name: At_100uM_ABA_Mutants_cDNA_P Parameter: Treatment Value: 100uM ABA vs. No Treatment
  misc_feature: MA Experiment ID: 20000169 Result: Down-regulated in Transcription
  misc_feature: MA Experiment 20000169 PARAMETER Experiment Name: At_100uM_ABA_P Parameter: Age (day) Value: 14
  misc_feature: MA Experiment 20000169 PARAMETER Experiment Name: At_100uM_ABA_P Parameter: Organism Value: A. thaliana
  misc_feature: MA Experiment 20000169 PARAMETER Experiment Name: At_100uM_ABA_P Parameter: Plant Line Value: WS
  misc_feature: MA Experiment 20000169 PARAMETER Experiment Name: At_100uM_ABA_P Parameter: Timepoint (hr) Value: 6
  misc_feature: MA Experiment 20000169 PARAMETER Experiment Name: At_100uM_ABA_P Parameter: Tissue Value: Aerial
  misc_feature: MA Experiment 20000169 PARAMETER Experiment Name: At_100uM_ABA_P Parameter: Treatment Value: 100uM ABA vs. No Treatment
  misc_feature: MA Experiment ID: 20000180 Result: Up-regulated in Transcription
  misc_feature: MA Experiment 20000180 PARAMETER Experiment Name: At_Germinating_Seeds_P Parameter: Age (hr) Value: 24 vs. 0
  misc_feature: MA Experiment 20000180 PARAMETER Experiment Name: At_Germinating_Seeds_P Parameter: Tissue Value: Germinating Seeds
  misc_feature: MA Experiment ID: 20000184 Result: Up-regulated in Transcription
  misc_feature: MA Experiment 20000184 PARAMETER Experiment Name: At_Shoots__P Parameter: Age (day) Value: 7
  misc_feature: MA Experiment 20000184 PARAMETER Experiment Name: At_Shoots__P Parameter: Tissue Value: Shoots vs. Whole Plant
  misc_feature: MA Experiment ID: 20000227 Result: Up-regulated in Transcription
  misc_feature: MA Experiment 20000227 PARAMETER Experiment Name: At_Root-Tips-vs-Tops_P Parameter: Tissue Value: Root Tips vs. Root Tops
  misc_feature: MA Experiment ID: 20000234 Result: Up-regulated in Transcription
  misc_feature: MA Experiment 20000234 PARAMETER Experiment Name: At_Siliques_P Parameter: Age (day) Value: 21
  misc_feature: MA Experiment 20000234 PARAMETER Experiment Name: At_Siliques_P Parameter: Organism Value: A. thaliana
  misc_feature: MA Experiment 20000234 PARAMETER Experiment Name: At_Siliques_P Parameter: Plant Line Value: WS
  misc_feature: MA Experiment 20000234 PARAMETER Experiment Name: At_Siliques_P Parameter: Tissue Value: Less Than 5mm Siliques vs. Whole Plant
  misc_feature: MA Experiment ID: 20000235 Result: Up-regulated in Transcription
  misc_feature: MA Experiment 20000235 PARAMETER Experiment Name: At_Siliques_P Parameter: Age (day) Value: 21
  misc_feature: MA Experiment 20000235 PARAMETER Experiment Name: At_Siliques_P Parameter: Organism Value: A. thaliana
  misc_feature: MA Experiment 20000235 PARAMETER Experiment Name: At_Siliques_P Parameter: Plant Line Value: WS
  misc_feature: MA Experiment 20000235 PARAMETER Experiment Name: At_Siliques_P Parameter: Tissue Value: 5-10mm Siliques vs. Whole Plant
  misc_feature: MA Experiment ID: 20000264 Result: Up-regulated in Transcription
  misc_feature: MA Experiment 20000264 PARAMETER Experiment Name: At_Open_Flower_P Parameter: Age (day) Value: 21
  misc_feature: MA Experiment 20000264 PARAMETER Experiment Name: At_Open_Flower_P Parameter: Plant Line Value: WS
  misc_feature: MA Experiment 20000264 PARAMETER Experiment Name: At_Open_Flower_P Parameter: Tissue Value: Open Flower vs. Whole Plant
  misc_feature: MA Experiment ID: 20000265 Result: Up-regulated in Transcription
  misc_feature: MA Experiment 20000265 PARAMETER Experiment Name: At_Open_Flower_P Parameter: Age (day) Value: 21
  misc_feature: MA Experiment 20000265 PARAMETER Experiment Name: At_Open_Flower_P Parameter: Plant Line Value: WS
  misc_feature: MA Experiment 20000265 PARAMETER Experiment Name: At_Open_Flower_P Parameter: Tissue Value: Closed Flower vs. Whole Plant
  misc_feature: MA Experiment ID: 20000286 Result: Up-regulated in Transcription
  misc_feature: MA Experiment 20000286 PARAMETER Experiment Name: At_Open_Flower_P Parameter: Age (day) Value: 21
  misc_feature: MA Experiment 20000286 PARAMETER Experiment Name: At_Open_Flower_P Parameter: Plant Line Value: WS
  misc_feature: MA Experiment 20000286 PARAMETER Experiment Name: At_Open_Flower_P Parameter: Tissue Value: Half Open vs. Whole Plant
  misc_feature: MA Experiment ID: 20000436 Result: Down-regulated in Transcription
  misc_feature: MA Experiment 20000436 PARAMETER Experiment Name: At_Drought_P Parameter: Age (day) Value: 7
  misc_feature: MA Experiment 20000436 PARAMETER Experiment Name: At_Drought_P Parameter: Organism Value: A. thaliana
  misc_feature: MA Experiment 20000436 PARAMETER Experiment Name: At_Drought_P Parameter: Plant Line Value: WS
  misc_feature: MA Experiment 20000436 PARAMETER Experiment Name: At_Drought_P Parameter: Timepoint (hr) Value: 12
  misc_feature: MA Experiment 20000436 PARAMETER Experiment Name: At_Drought_P Parameter: Tissue Value: Whole Plant
  misc_feature: MA Experiment 20000436 PARAMETER Experiment Name: At_Drought_P Parameter: Treatment Value: Drought vs. No Drought
  misc_feature: MA Experiment ID: 20000437 Result: Down-regulated in Transcription
  misc_feature: MA Experiment 20000437 PARAMETER Experiment Name: At_Drought_P Parameter: Age (day) Value: 8
  misc_feature: MA Experiment 20000437 PARAMETER Experiment Name: At_Drought_P Parameter: Organism Value: A. thaliana
  misc_feature: MA Experiment 20000437 PARAMETER Experiment Name: At_Drought_P Parameter: Plant Line Value: WS
  misc_feature: MA Experiment 20000437 PARAMETER Experiment Name: At_Drought_P Parameter: Timepoint (hr) Value: 24
  misc_feature: MA Experiment 20000437 PARAMETER Experiment Name: At_Drought_P Parameter: Tissue Value: Whole Plant
  misc_feature: MA Experiment 20000437 PARAMETER Experiment Name: At_Drought_P Parameter: Treatment Value: Drought vs. No Drought
  misc_feature: MA Experiment ID: 20000445 Result: Down-regulated in Transcription
  misc_feature: MA Experiment 20000445 PARAMETER Experiment Name: At_100uM_NAA__P Parameter: Age (day) Value: 14
  misc_feature: MA Experiment 20000445 PARAMETER Experiment Name: At_100uM_NAA__P Parameter: Organism Value: A. thaliana
  misc_feature: MA Experiment 20000445 PARAMETER Experiment Name: At_100uM_NAA__P Parameter: Plant Line Value: WS
  misc_feature: MA Experiment 20000445 PARAMETER Experiment Name: At_100uM_NAA__P Parameter: Timepoint (hr) Value: 6
  misc_feature: MA Experiment 20000445 PARAMETER Experiment Name: At_100uM_NAA__P Parameter: Tissue Value: Aerial
  misc_feature: MA Experiment 20000445 PARAMETER Experiment Name: At_100uM_NAA__P Parameter: Treatment Value: 100uM NAA vs. No Treatment
  misc_feature: MA Experiment ID: 20000453 Result: Down-regulated in Transcription
  misc_feature: MA Experiment 20000453 PARAMETER Experiment Name: At_100uM_ABA_P Parameter: Age (day) Value: 15
  misc_feature: MA Experiment 20000453 PARAMETER Experiment Name: At_100uM_ABA_P Parameter: Organism Value: A. thaliana
  misc_feature: MA Experiment 20000453 PARAMETER Experiment Name: At_100uM_ABA_P Parameter: Plant Line Value: WS
  misc_feature: MA Experiment 20000453 PARAMETER Experiment Name: At_100uM_ABA_P Parameter: Timepoint (hr) Value: 24
  misc_feature: MA Experiment 20000453 PARAMETER Experiment Name: At_100uM_ABA_P Parameter: Tissue Value: Aerial
  misc_feature: MA Experiment 20000453 PARAMETER Experiment Name: At_100uM_ABA_P Parameter: Treatment Value: 100uM ABA vs. No Treatment
  misc_feature: MA Experiment ID: 20000495 Result: Up-regulated in Transcription
  misc_feature: MA Experiment 20000495 PARAMETER Experiment Name: At_Guard_Cells_P Parameter: Harvest Date Value: 8/2/2002
  misc_feature: MA Experiment 20000495 PARAMETER Experiment Name: At_Guard_Cells_P Parameter: Organism Value: A. thaliana
  misc_feature: MA Experiment 20000495 PARAMETER Experiment Name: At_Guard_Cells_P Parameter: Tissue Value: Guard Cells vs. Leaves
  misc_feature: MA Experiment ID: 20001555 Result: Down-regulated in Transcription
  misc_feature: MA Experiment 20001555 PARAMETER Experiment Name: At_Drought_Soil_Dry_P Parameter: Age (day) Value: 24
  misc_feature: MA Experiment 20001555 PARAMETER Experiment Name: At_Drought_Soil_Dry_P Parameter: Organism Value: A. thaliana
  misc_feature: MA Experiment 20001555 PARAMETER Experiment Name: At_Drought_Soil_Dry_P Parameter: Plant Line Value: WS
  misc_feature: MA Experiment 20001555 PARAMETER Experiment Name: At_Drought_Soil_Dry_P Parameter: Post Timepoint (hr) Value: None
  misc_feature: MA Experiment 20001555 PARAMETER Experiment Name: At_Drought_Soil_Dry_P Parameter: Post-Treatment Value: None
  misc_feature: MA Experiment 20001555 PARAMETER Experiment Name: At_Drought_Soil_Dry_P Parameter: Timepoint (day) Value: 10
  misc_feature: MA Experiment 20001555 PARAMETER Experiment Name: At_Drought_Soil_Dry_P Parameter: Treatment Value: Drought vs. No Drought
  misc_feature: MA Experiment ID: 20001556 Result: Down-regulated in Transcription
  misc_feature: MA Experiment 20001556 PARAMETER Experiment Name: At_Drought_Soil_Dry_P Parameter: Age (day) Value: 26
  misc_feature: MA Experiment 20001556 PARAMETER Experiment Name: At_Drought_Soil_Dry_P Parameter: Organism Value: A. thaliana
  misc_feature: MA Experiment 20001556 PARAMETER Experiment Name: At_Drought_Soil_Dry_P Parameter: Plant Line Value: WS
  misc_feature: MA Experiment 20001556 PARAMETER Experiment Name: At_Drought_Soil_Dry_P Parameter: Post Timepoint (hr) Value: None
  misc_feature: MA Experiment 20001556 PARAMETER Experiment Name: At_Drought_Soil_Dry_P Parameter: Post-Treatment Value: None
  misc_feature: MA Experiment 20001556 PARAMETER Experiment Name: At_Drought_Soil_Dry_P Parameter: Timepoint (day) Value: 12
  misc_feature: MA Experiment 20001556 PARAMETER Experiment Name: At_Drought_Soil_Dry_P Parameter: Treatment Value: Drought vs. No Drought
cttcttccttgcacgaccctctccttgatggtcttcctacttctcctcgtcttttcaaagatattcaggaagaatcgtgccgagaggatggcatcaatgtgtccaattttggtgccacggaacagcaagatgttggtggaaacggccaatttggtgtagtgttggtccatggatttggcggaggagtgttttcttggagacatgtgatgagttctcttgcccatcaacttggctgtgttgtcactgcatttgataggcctggttggggattaaccgccagacctcataaaaaggatttggaagaaagagagatgccaaacccttacactctggataatcaggtagacatgcttcttgccttttgccacgaaatgggatttgcttctgtagtcttggttggccatgatgatggaggtttgcttgctctcaaggctgcacaaagattgctagaaacaaaagatcccatcaaagtcaaaggagtggttttgcttaatgtaagcttgacgagggaaatagtgccagcttttgcaagaatacttctgcacacatcactaggaaagaaacaccttgttcgtccgcttttacgcactgaaatagctcaggtggtgaatcgcagagcttggtatgatcctgccaagatgacaaccgatgtcttaaggctatacaaggcaccacttcatgtggaaggctgggatgaggcacttcacgagataggcatactctcatccgagatggtgcttccaactcaaaatgcattgtcacttctcaaggcagtggaaaacttaccagtattagtcgttgctggagccgaagacgcacttgttcccctcaagtcctcccaagtcatggcttcaaaactcgaaaactctaggctagtagcaatctcaggatgcggacatctgccacatgaggagtgtcccaaggcacttcttgcagccatgtgcccattcataagcagacttgtatttagtgaggactgagtgactgagtgatcactgtacttagtgaggagtgagtgactgagtgatcacttctagttgtcttcttagctcacaatcgattagtgtttgcgagttttttttgtctgccccaaaaggaaagaagttggggtgattgaggtcttagtaagtctgtattcattataagcagagttattgtaacattctctgtttttctcatcagagtttttaatggtttgg

SEQ ID NO: 40589 - protein, 325 aa, Arabidopsis thaliana
  peptide (1)..(325): Ceres Seq. ID no. 12738354
  misc_feature (78)..(315): Pfam Name: alpha/beta hydrolase fold Pfam Description: alpha/beta hydrolase fold
  misc_feature (18)..(321): Homolog of NCBI NO: 21673775 NR Description: hydrolase, alpha/beta hydrolase fold family
  misc_feature (49)..(144): Homolog of NCBI NO: 30681503 NR Description: hydrolase, alpha/beta fold family [Arabidopsis
  misc_feature (157)..(317): Homolog of NCBI NO: 30681503 NR Description: hydrolase, alpha/beta fold family [Arabidopsis
  misc_feature (49)..(144): Homolog of NCBI NO: 6630546 NR Description: putative alpha/beta hydrolase [Arabidopsis
  misc_feature (157)..(317): Homolog of NCBI NO: 6630546 NR Description: putative alpha/beta hydrolase [Arabidopsis
  misc_feature (1)..(321): Homolog of NCBI NO: 25405595 NR Description: unknown protein, 18223-15857 [imported] -
  misc_feature (1)..(321): Homolog of NCBI NO: 22330208 NR Description: unknown protein
  misc_feature (1)..(325): Homolog of NCBI NO: 34911750 NR Description: P0038D11.18 [Oryza sativa (japonica
  misc_feature (1)..(325): Homolog of NCBI NO: 15218212 NR Description: unknown protein
  misc_feature (1)..(325): Homolog of NCBI NO: 15220097 NR Description: unknown protein
SSLHDPLLDGLPTSPRLFKDIQEESCREDGINVSNFGATEQQDVGGNGQFGVVLVHGFGGGVFSWRHVMSSLAHQLGCVVTAFDRPGWGLTARPHKKDLEEREMPNPYTLDNQVDMLLAFCHEMGFASVVLVGHDDGGLLALKAAQRLLETKDPIKVKGVVLLNVSLTREIVPAFARILLHTSLGKKHLVRPLLRTEIAQVVNRRAWYDPAKMTTDVLRLYKAPLHVEGWDEALHEIGILSSEMVLPTQNALSLLKAVENLPVLVVAGAEDALVPLKSSQVMASKLENSRLVAISGCGHLPHEECPKALLAAMCPFISRLVFSED

SEQ ID NO: 40590 - protein, 257 aa, Arabidopsis thaliana
  peptide (1)..(257): Ceres Seq. ID no. 12738355
  misc_feature (10)..(247): Pfam Name: alpha/beta hydrolase fold Pfam Description: alpha/beta hydrolase fold
  misc_feature (1)..(253): Homolog of NCBI NO: 21673775 NR Description: hydrolase, alpha/beta hydrolase fold family
  misc_feature (1)..(76): Homolog of NCBI NO: 30681503 NR Description: hydrolase, alpha/beta fold family [Arabidopsis
  misc_feature (89)..(249): Homolog of NCBI NO: 30681503 NR Description: hydrolase, alpha/beta fold family [Arabidopsis
  misc_feature (1)..(76): Homolog of NCBI NO: 6630546 NR Description: putative alpha/beta hydrolase [Arabidopsis
  misc_feature (89)..(249): Homolog of NCBI NO: 6630546 NR Description: putative alpha/beta hydrolase [Arabidopsis
  misc_feature (1)..(253): Homolog of NCBI NO: 25405595 NR Description: unknown protein, 18223-15857 [imported] -
  misc_feature (1)..(253): Homolog of NCBI NO: 22330208 NR Description: unknown protein
  misc_feature (1)..(257): Homolog of NCBI NO: 34911750 NR Description: P0038D11.18 [Oryza sativa (japonica
  misc_feature (1)..(257): Homolog of NCBI NO: 15218212 NR Description: unknown protein
  misc_feature (1)..(257): Homolog of NCBI NO: 15220097 NR Description: unknown protein
MSSLAHQLGCVVTAFDRPGWGLTARPHKKDLEEREMPNPYTLDNQVDMLLAFCHEMGFASVVLVGHDDGGLLALKAAQRLLETKDPIKVKGVVLLNVSLTREIVPAFARILLHTSLGKKHLVRPLLRTEIAQVVNRRAWYDPAKMTTDVLRLYKAPLHVEGWDEALHEIGILSSEMVLPTQNALSLLKAVENLPVLVVAGAEDALVPLKSSQVMASKLENSRLVAISGCGHLPHEECPKALLAAMCPFISRLVFSED

SEQ ID NO: 40591 - protein, 222 aa, Arabidopsis thaliana
  peptide (1)..(222): Ceres Seq. ID no. 12738356
  misc_feature (1)..(212): Pfam Name: alpha/beta hydrolase fold Pfam Description: alpha/beta hydrolase fold
  misc_feature (1)..(218): Homolog of NCBI NO: 21673775 NR Description: hydrolase, alpha/beta hydrolase fold family
  misc_feature (1)..(41): Homolog of NCBI NO: 30681503 NR Description: hydrolase, alpha/beta fold family [Arabidopsis
  misc_feature (54)..(214): Homolog of NCBI NO: 30681503 NR Description: hydrolase, alpha/beta fold family [Arabidopsis
  misc_feature (1)..(41): Homolog of NCBI NO: 6630546 NR Description: putative alpha/beta hydrolase [Arabidopsis
  misc_feature (54)..(214): Homolog of NCBI NO: 6630546 NR Description: putative alpha/beta hydrolase [Arabidopsis
  misc_feature (1)..(218): Homolog of NCBI NO: 25405595 NR Description: unknown protein, 18223-15857 [imported] -
  misc_feature (1)..(218): Homolog of NCBI NO: 22330208 NR Description: unknown protein
  misc_feature (1)..(222): Homolog of NCBI NO: 34911750 NR Description: P0038D11.18 [Oryza sativa (japonica
  misc_feature (1)..(222): Homolog of NCBI NO: 15218212 NR Description: unknown protein
  misc_feature (1)..(222): Homolog of NCBI NO: 15220097 NR Description: unknown protein
MPNPYTLDNQVDMLLAFCHEMGFASVVLVGHDDGGLLALKAAQRLLETKDPIKVKGVVLLNVSLTREIVPAFARILLHTSLGKKHLVRPLLRTEIAQVVNRRAWYDPAKMTTDVLRLYKAPLHVEGWDEALHEIGILSSEMVLPTQNALSLLKAVENLPVLVVAGAEDALVPLKSSQVMASKLENSRLVAISGCGHLPHEECPKALLAAMCPFISRLVFSED

SEQ ID NO: 40592 - DNA, 1172 bp, Arabidopsis thaliana
  misc_feature (1)..(1172): Ceres Seq. ID no. 12395194
  misc_feature: MA Experiment ID: 108572 Result: Down-regulated in Transcription
  misc_feature: MA Experiment 108572 PARAMETER Experiment Name: At_Drought_cDNA_P Parameter: Timepoint (hr) Value: 1
  misc_feature: MA Experiment 108572 PARAMETER Experiment Name: At_Drought_cDNA_P Parameter: Tissue Value: Aerial
  misc_feature: MA Experiment 108572 PARAMETER Experiment Name: At_Drought_cDNA_P Parameter: Treatment Value: Drought vs. No Drought
  misc_feature: MA Experiment ID: 108574 Result: Down-regulated in Transcription
  misc_feature: MA Experiment 108574 PARAMETER Experiment Name: At_Wounding__cDNA_P Parameter: Timepoint (hr) Value: 1
  misc_feature: MA Experiment 108574 PARAMETER Experiment Name: At_Wounding__cDNA_P Parameter: Tissue Value: Aerial
  misc_feature: MA Experiment 108574 PARAMETER Experiment Name: At_Wounding__cDNA_P Parameter: Treatment Value: Wounding vs. No Wounding
  misc_feature: MA Experiment ID: 108577 Result: Down-regulated in Transcription
  misc_feature: MA Experiment 108577 PARAMETER Experiment Name: At_42deg_Heat_cDNA_P Parameter: Temperature (deg C) Value: 42 vs. 22
  misc_feature: MA Experiment 108577 PARAMETER Experiment Name: At_42deg_Heat_cDNA_P Parameter: Timepoint (hr) Value: 6
  misc_feature: MA Experiment 108577 PARAMETER Experiment Name: At_42deg_Heat_cDNA_P Parameter: Tissue Value: Aerial
  misc_feature: MA Experiment ID: 108594 Result: Up-regulated in Transcription
  misc_feature: MA Experiment 108594 PARAMETER Experiment Name: At_Ler-rhl_Root_cDNA_P Parameter: Plant Line Value: null
  misc_feature: MA Experiment ID: 108609 Result: Up-regulated in Transcription
  misc_feature: MA Experiment 108609 PARAMETER Experiment Name: At_100uM_ABA_cDNA_P Parameter: Timepoint (hr) Value: 24
  misc_feature: MA Experiment 108609 PARAMETER Experiment Name: At_100uM_ABA_cDNA_P Parameter: Tissue Value: Aerial
  misc_feature: MA Experiment 108609 PARAMETER Experiment Name: At_100uM_ABA_cDNA_P Parameter: Treatment Value: 100uM ABA vs. No Treatment
  misc_feature: MA Experiment ID: 108668 Result: Down-regulated in Transcription
  misc_feature: MA Experiment 108668 PARAMETER Experiment Name: At_2mM_SA_cDNA_P Parameter: Plant Line Value: WS
  misc_feature: MA Experiment 108668 PARAMETER Experiment Name: At_2mM_SA_cDNA_P Parameter: Timepoint (hr) Value: 6
  misc_feature: MA Experiment 108668 PARAMETER Experiment Name: At_2mM_SA_cDNA_P Parameter: Treatment Value: 2mM SA vs. No Treatment
  misc_feature: MA Experiment ID: 20000173 Result: Down-regulated in Transcription
  misc_feature: MA Experiment 20000173 PARAMETER Experiment Name: At_42deg_Heat_P Parameter: Age (day) Value: 14
  misc_feature: MA Experiment 20000173 PARAMETER Experiment Name: At_42deg_Heat_P Parameter: Organism Value: A. thaliana
  misc_feature: MA Experiment 20000173 PARAMETER Experiment Name: At_42deg_Heat_P Parameter: Plant Line Value: WS
  misc_feature: MA Experiment 20000173 PARAMETER Experiment Name: At_42deg_Heat_P Parameter: Temperature (deg C) Value: 42 vs. 22
  misc_feature: MA Experiment 20000173 PARAMETER Experiment Name: At_42deg_Heat_P Parameter: Timepoint (hr) Value: 6
  misc_feature: MA Experiment 20000173 PARAMETER Experiment Name: At_42deg_Heat_P Parameter: Tissue Value: Aerial
  misc_feature: MA Experiment ID: 20000185 Result: Down-regulated in Transcription
  misc_feature: MA Experiment 20000185 PARAMETER Experiment Name: At_Roots__P Parameter: Age (day) Value: 7 vs. 21
  misc_feature: MA Experiment 20000185 PARAMETER Experiment Name: At_Roots__P Parameter: Organism Value: A. thaliana
  misc_feature: MA Experiment 20000185 PARAMETER Experiment Name: At_Roots__P Parameter: Tissue Value: Roots vs. Whole Plant
  misc_feature: MA Experiment ID: 20000267 Result: Down-regulated in Transcription
  misc_feature: MA Experiment 20000267 PARAMETER Experiment Name: At_Drought_P Parameter: Age (day) Value: 7
  misc_feature: MA Experiment 20000267 PARAMETER Experiment Name: At_Drought_P Parameter: Organism Value: A. thaliana
  misc_feature: MA Experiment 20000267 PARAMETER Experiment Name: At_Drought_P Parameter: Plant Line Value: WS
  misc_feature: MA Experiment 20000267 PARAMETER Experiment Name: At_Drought_P Parameter: Timepoint (hr) Value: 6
  misc_feature: MA Experiment 20000267 PARAMETER Experiment Name: At_Drought_P Parameter: Tissue Value: Whole Plant
  misc_feature: MA Experiment 20000267 PARAMETER Experiment Name: At_Drought_P Parameter: Treatment Value: Drought vs. No Drought
  misc_feature: MA Experiment ID: 20000308 Result: Up-regulated in Transcription
  misc_feature: MA Experiment 20000308 PARAMETER Experiment Name: At_100mM_NaCl__P Parameter: Age (day) Value: 17
  misc_feature: MA Experiment 20000308 PARAMETER Experiment Name: At_100mM_NaCl__P Parameter: Organism Value: A. thaliana
  misc_feature: MA Experiment 20000308 PARAMETER Experiment Name: At_100mM_NaCl__P Parameter: Plant Line Value: WS
  misc_feature: MA Experiment 20000308 PARAMETER Experiment Name: At_100mM_NaCl__P Parameter: Timepoint (hr) Value: 72
  misc_feature: MA Experiment 20000308 PARAMETER Experiment Name: At_100mM_NaCl__P Parameter: Tissue Value: Whole Plant
  misc_feature: MA Experiment 20000308 PARAMETER Experiment Name: At_100mM_NaCl__P Parameter: Treatment Value: 100mM NaCl vs. No Treatment
  misc_feature: MA Experiment ID: 20000436 Result: Down-regulated in Transcription
  misc_feature: MA Experiment 20000436 PARAMETER Experiment Name: At_Drought_P Parameter: Age (day) Value: 7
  misc_feature: MA Experiment 20000436 PARAMETER Experiment Name: At_Drought_P Parameter: Organism Value: A. thaliana
  misc_feature: MA Experiment 20000436 PARAMETER Experiment Name: At_Drought_P Parameter: Plant Line Value: WS
  misc_feature: MA Experiment 20000436 PARAMETER Experiment Name: At_Drought_P Parameter: Timepoint (hr) Value: 12
  misc_feature: MA Experiment 20000436 PARAMETER Experiment Name: At_Drought_P Parameter: Tissue Value: Whole Plant
  misc_feature: MA Experiment 20000436 PARAMETER Experiment Name: At_Drought_P Parameter: Treatment Value: Drought vs. No Drought
  misc_feature: MA Experiment ID: 20000439 Result: Down-regulated in Transcription
  misc_feature: MA Experiment 20000439 PARAMETER Experiment Name: At_Roots__P Parameter: Age (day) Value: 14 vs. 21
  misc_feature: MA Experiment 20000439 PARAMETER Experiment Name: At_Roots__P Parameter: Organism Value: A. thaliana
  misc_feature: MA Experiment 20000439 PARAMETER Experiment Name: At_Roots__P Parameter: Tissue Value: Roots vs. Whole Plant
  misc_feature: MA Experiment ID: 20000443 Result: Up-regulated in Transcription
  misc_feature: MA Experiment 20000443 PARAMETER Experiment Name: At_1uM_BR-BRZ__P Parameter: Tissue Value: Shoot Apices
  misc_feature: MA Experiment 20000443 PARAMETER Experiment Name: At_1uM_BR-BRZ__P Parameter: Treatment Value: 1uM BRZ vs. No Treatment
  misc_feature: MA Experiment ID: 20000453 Result: Up-regulated in Transcription
  misc_feature: MA Experiment 20000453 PARAMETER Experiment Name: At_100uM_ABA_P Parameter: Age (day) Value: 15
  misc_feature: MA Experiment 20000453 PARAMETER Experiment Name: At_100uM_ABA_P Parameter: Organism Value: A. thaliana
  misc_feature: MA Experiment 20000453 PARAMETER Experiment Name: At_100uM_ABA_P Parameter: Plant Line Value: WS
  misc_feature: MA Experiment 20000453 PARAMETER Experiment Name: At_100uM_ABA_P Parameter: Timepoint (hr) Value: 24
  misc_feature: MA Experiment 20000453 PARAMETER Experiment Name: At_100uM_ABA_P Parameter: Tissue Value: Aerial
  misc_feature: MA Experiment 20000453 PARAMETER Experiment Name: At_100uM_ABA_P Parameter: Treatment Value: 100uM ABA vs. No Treatment
  misc_feature: MA Experiment ID: 20000495 Result: Up-regulated in Transcription
  misc_feature: MA Experiment 20000495 PARAMETER Experiment Name: At_Guard_Cells_P Parameter: Harvest Date Value: 8/2/2002
  misc_feature: MA Experiment 20000495 PARAMETER Experiment Name: At_Guard_Cells_P Parameter: Organism Value: A. thaliana
  misc_feature: MA Experiment 20000495 PARAMETER Experiment Name: At_Guard_Cells_P Parameter: Tissue Value: Guard Cells vs. Leaves
  misc_feature: MA Experiment ID: 20000573 Result: Up-regulated in Transcription
  misc_feature: MA Experiment 20000573 PARAMETER Experiment Name: At_100uM_ABA_Mutants__P Parameter: Organism Value: A. thaliana
  misc_feature: MA Experiment 20000573 PARAMETER Experiment Name: At_100uM_ABA_Mutants__P Parameter: Plant Line Value: CS22 vs. Ler wt
  misc_feature: MA Experiment 20000573 PARAMETER Experiment Name: At_100uM_ABA_Mutants__P Parameter: Timepoint (hr) Value: N/A
  misc_feature: MA Experiment 20000573 PARAMETER Experiment Name: At_100uM_ABA_Mutants__P Parameter: Tissue Value: Whole Plant
  misc_feature: MA Experiment 20000573 PARAMETER Experiment Name: At_100uM_ABA_Mutants__P Parameter: Treatment Value: None
  misc_feature: MA Experiment ID: 20000574 Result: Up-regulated in Transcription
  misc_feature: MA Experiment 20000574 PARAMETER Experiment Name: At_100uM_ABA_Mutants__P Parameter: Organism Value: A. thaliana
  misc_feature: MA Experiment 20000574 PARAMETER Experiment Name: At_100uM_ABA_Mutants__P Parameter: Plant Line Value: CS23 vs. Ler wt
  misc_feature: MA Experiment 20000574 PARAMETER Experiment Name: At_100uM_ABA_Mutants__P Parameter: Timepoint (hr) Value: N/A
  misc_feature: MA Experiment 20000574 PARAMETER Experiment Name: At_100uM_ABA_Mutants__P Parameter: Tissue Value: Whole Plant
  misc_feature: MA Experiment 20000574 PARAMETER Experiment Name: At_100uM_ABA_Mutants__P Parameter: Treatment Value: None
  misc_feature: MA Experiment ID: 20000794 Result: Down-regulated in Transcription
  misc_feature: MA Experiment 20000794 PARAMETER Experiment Name: At_Petals_P Parameter: Age (day) Value: 23-25 days
  misc_feature: MA Experiment 20000794 PARAMETER Experiment Name: At_Petals_P Parameter: Plant Line Value: WS
  misc_feature: MA Experiment 20000794 PARAMETER Experiment Name: At_Petals_P Parameter: Tissue Value: Petals vs. Whole plant
  misc_feature: MA Experiment ID: 20001248 Result: Up-regulated in Transcription
  misc_feature: MA Experiment 20001248 PARAMETER Experiment Name: At_Far-red-induction_P Parameter: Age (day) Value: 7
  misc_feature: MA Experiment 20001248 PARAMETER Experiment Name: At_Far-red-induction_P Parameter: Light Value: Far-red vs. White
  misc_feature: MA Experiment 20001248 PARAMETER Experiment Name: At_Far-red-induction_P Parameter: Organism Value: A. thaliana
  misc_feature: MA Experiment 20001248 PARAMETER Experiment Name: At_Far-red-induction_P Parameter: Plant Line Value: Columbia
  misc_feature: MA Experiment 20001248 PARAMETER Experiment Name: At_Far-red-induction_P Parameter: Timepoint (hr) Value: 4
  misc_feature: MA Experiment 20001248 PARAMETER Experiment Name: At_Far-red-induction_P Parameter: Tissue Value: Whole Plant
  misc_feature: MA Experiment ID: 20001450 Result: Up-regulated in Transcription
  misc_feature: MA Experiment 20001450 PARAMETER Experiment Name: At_Far-red-induction_P Parameter: Age (day) Value: 7
  misc_feature: MA Experiment 20001450 PARAMETER Experiment Name: At_Far-red-induction_P Parameter: Light Value: Far-red vs. White
  misc_feature: MA Experiment 20001450 PARAMETER Experiment Name: At_Far-red-induction_P Parameter: Organism Value: A. thaliana
  misc_feature: MA Experiment 20001450 PARAMETER Experiment Name: At_Far-red-induction_P Parameter: Plant Line Value: Columbia
  misc_feature: MA Experiment 20001450 PARAMETER Experiment Name: At_Far-red-induction_P Parameter: Timepoint (hr) Value: 8
  misc_feature: MA Experiment 20001450 PARAMETER Experiment Name: At_Far-red-induction_P Parameter: Tissue Value: Whole Plant
  misc_feature: MA Experiment ID: 20001557 Result: Up-regulated in Transcription
  misc_feature: MA Experiment 20001557 PARAMETER Experiment Name: At_Drought_Soil_Dry_P Parameter: Age (day) Value: 27
  misc_feature: MA Experiment 20001557 PARAMETER Experiment Name: At_Drought_Soil_Dry_P Parameter: Organism Value: A. thaliana
  misc_feature: MA Experiment 20001557 PARAMETER Experiment Name: At_Drought_Soil_Dry_P Parameter: Plant Line Value: WS
  misc_feature: MA Experiment 20001557 PARAMETER Experiment Name: At_Drought_Soil_Dry_P Parameter: Post Timepoint (hr) Value: 3
  misc_feature: MA Experiment 20001557 PARAMETER Experiment Name: At_Drought_Soil_Dry_P Parameter: Post-Treatment Value: Re-Water vs. No Drought
  misc_feature: MA Experiment 20001557 PARAMETER Experiment Name: At_Drought_Soil_Dry_P Parameter: Timepoint (day) Value: 13
  misc_feature: MA Experiment 20001557 PARAMETER Experiment Name: At_Drought_Soil_Dry_P Parameter: Treatment Value: Drought vs. No Drought
  misc_feature: MA Experiment ID: 20001560 Result: Up-regulated in Transcription
  misc_feature: MA Experiment 20001560 PARAMETER Experiment Name: At_Drought_Soil_Dry_P Parameter: Age (day) Value: 28
  misc_feature: MA Experiment 20001560 PARAMETER Experiment Name: At_Drought_Soil_Dry_P Parameter: Organism Value: A. thaliana
  misc_feature: MA Experiment 20001560 PARAMETER Experiment Name: At_Drought_Soil_Dry_P Parameter: Plant Line Value: WS
  misc_feature: MA Experiment 20001560 PARAMETER Experiment Name: At_Drought_Soil_Dry_P Parameter: Post Timepoint (hr) Value: None
  misc_feature: MA Experiment 20001560 PARAMETER Experiment Name: At_Drought_Soil_Dry_P Parameter: Post-Treatment Value: None
  misc_feature: MA Experiment 20001560 PARAMETER Experiment Name: At_Drought_Soil_Dry_P Parameter: Timepoint (day) Value: 14
  misc_feature: MA Experiment 20001560 PARAMETER Experiment Name: At_Drought_Soil_Dry_P Parameter: Treatment Value: Drought vs. No Drought
  misc_feature: MA Experiment ID: 20001757 Result: Up-regulated in Transcription
  misc_feature: MA Experiment 20001757 PARAMETER Experiment Name: At_50mM_NH4NO3_L-to-H_P Parameter: Timepoint (hr) Value: 6
  misc_feature: MA Experiment 20001757 PARAMETER Experiment Name: At_50mM_NH4NO3_L-to-H_P Parameter: Tissue Value: Leaf
  misc_feature: MA Experiment 20001757 PARAMETER Experiment Name: At_50mM_NH4NO3_L-to-H_P Parameter: Treatment Value: 50mM NH4NO3 vs 100mM Mannitol
  misc_feature: MA Experiment ID: 20001904 Result: Down-regulated in Transcription
  misc_feature: MA Experiment 20001904 PARAMETER Experiment Name: At_Drought_Reproduction_P Parameter: Age (day) Value: 37
  misc_feature: MA Experiment 20001904 PARAMETER Experiment Name: At_Drought_Reproduction_P Parameter: Organism Value: A. thaliana
  misc_feature: MA Experiment 20001904 PARAMETER Experiment Name: At_Drought_Reproduction_P Parameter: Plant Line Value: WS
  misc_feature: MA Experiment 20001904 PARAMETER Experiment Name: At_Drought_Reproduction_P Parameter: Timepoint (day) Value: 7
  misc_feature: MA Experiment 20001904 PARAMETER Experiment Name: At_Drought_Reproduction_P Parameter: Tissue Value: Rosettes
  misc_feature: MA Experiment 20001904 PARAMETER Experiment Name: At_Drought_Reproduction_P Parameter: Treatment Value: Drought vs. No Drought
  misc_feature: MA Experiment ID: 20001905 Result: Down-regulated in Transcription
  misc_feature: MA Experiment 20001905 PARAMETER Experiment Name: At_Drought_Reproduction_P Parameter: Age (day) Value: 40
  misc_feature: MA Experiment 20001905 PARAMETER Experiment Name: At_Drought_Reproduction_P Parameter: Organism Value: A. thaliana
  misc_feature: MA Experiment 20001905 PARAMETER Experiment Name: At_Drought_Reproduction_P Parameter: Plant Line Value: WS
  misc_feature: MA Experiment 20001905 PARAMETER Experiment Name: At_Drought_Reproduction_P Parameter: Timepoint (day) Value: 10
  misc_feature: MA Experiment 20001905 PARAMETER Experiment Name: At_Drought_Reproduction_P Parameter: Tissue Value: Rosettes
  misc_feature: MA Experiment 20001905 PARAMETER Experiment Name: At_Drought_Reproduction_P Parameter: Treatment Value: Drought vs. No Drought
aacgcatttaaattaatatttatggataatatggttaataaataaggaacttctatttatatcacaaaaggtcactggtcttcttcgtgtgacttcaccactttctcatctcccacaaaaatggctctctcacttctttcagtctttatctttttccatgtctttaccaatgttgtttttgctgcttcaaatgaggaatccaacgccttagtttctttaccaacgccaacacttccatcgccatctccggctaccaaaccgccgtcgccagctctcaaaccgccgacgccgtcgtacaagccacccacgctgccaactactcctattaaaccacccaccacaaaacctccggtcaaacctccaactattccggttacaccagtaaaacctccggtttcaactcctccgatcaaactaccgccggtacaaccacctacgtacaaacccccaacgccaacagttaaaccaccgtccgtccaaccacctacgtacaaacccccaactccaacggttaaaccacccactacatcaccggttaaaccacccactacgccaccagttcaatcaccgccggtccaaccacctacgtacaaacccccaacgtcaccggttaaaccacccaccacaactccaccggttaaaccccccaccacgacgccaccggtccaaccacctacgtacaatcccccaactacaccggttaaaccacctacagcgccgcctgtcaaacctccaacaccacctcccgtaagaactcggatagattgcgtgcctttatgtgggacgaggtgtgggcaacactcgaggaagaacgtatgtatgagagcgtgcgtcacgtgctgctaccgctgcaagtgtgttcccccaggcacctacggtaataaggagaagtgtggatcttgttacgccaacatgaagacacgtggtggaaaatccaaatgtccttgaacctttatatgacgatggttgttaaacgaaataatttaaatcaatggagtttttataagtttgcaatgcgtttgtttttgttattagaatattgagttggatctttgtttacgggacgtacaatactaaataatgaaaaaaaccttctcgatgaattaagggttgtatgacattcgttttgtattgaataatactacgggatggataacagttttattacttct

SEQ ID NO: 40593 - protein, 275 aa, Arabidopsis thaliana
  peptide (1)..(275): Ceres Seq. ID no. 12395195
  misc_feature (210)..(275): Pfam Name: Gibberellin regulated protein Pfam Description: Gibberellin regulated protein
  misc_feature (34)..(211): Homolog of NCBI NO: 15225875 NR Description: hypothetical protein; protein id: At2g27380.1
  misc_feature (34)..(212): Homolog of NCBI NO: 7446482 NR Description: probable cell wall-plasma membrane linker protein
  misc_feature (36)..(211): Homolog of NCBI NO: 15225875 NR Description: hypothetical protein; protein id: At2g27380.1
  misc_feature (36)..(211): Homolog of NCBI NO: 15225875 NR Description: hypothetical protein; protein id: At2g27380.1
  misc_feature (36)..(211): Homolog of NCBI NO: 15225875 NR Description: hypothetical protein; protein id: At2g27380.1
  misc_feature (34)..(210): Homolog of NCBI NO: 15217879 NR Description: prolin-rich protein, putative; protein id:
  misc_feature (36)..(211): Homolog of NCBI NO: 15225875 NR Description: hypothetical protein; protein id: At2g27380.1
  misc_feature (36)..(211): Homolog of NCBI NO: 15225875 NR Description: hypothetical protein; protein id: At2g27380.1
  misc_feature (1)..(275): Homolog of NCBI NO: 21592790 NR Description: unknown [Arabidopsis thaliana]
  misc_feature (1)..(275): Homolog of NCBI NO: 15242165 NR Description: putative protein
MALSLLSVFIFFHVFTNVVFAASNEESNALVSLPTPTLPSPSPATKPPSPALKPPTPSYKPPTLPTTPIKPPTTKPPVKPPTIPVTPVKPPVSTPPIKLPPVQPPTYKPPTPTVKPPSVQPPTYKPPTPTVKPPTTSPVKPPTTPPVQSPPVQPPTYKPPTSPVKPPTTTPPVKPPTTTPPVQPPTYNPPTTPVKPPTAPPVKPPTPPPVRTRIDCVPLCGTRCGQHSRKNVCMRACVTCCYRCKCVPPGTYGNKEKCGSCYANMKTRGGKSKCP

SEQ ID NO: 40594 - DNA, 1094 bp, Arabidopsis thaliana
  misc_feature (1)..(1094): Ceres Seq. ID no. 12558445
  misc_feature: MA Experiment ID: 20000182 Result: Up-regulated in Transcription
  misc_feature: MA Experiment 20000182 PARAMETER Experiment Name: At_2mM_SA_P Parameter: Age (day) Value: 14
  misc_feature: MA Experiment 20000182 PARAMETER Experiment Name: At_2mM_SA_P Parameter: Organism Value: A. thaliana
  misc_feature: MA Experiment 20000182 PARAMETER Experiment Name: At_2mM_SA_P Parameter: Plant Line Value: WS
  misc_feature: MA Experiment 20000182 PARAMETER Experiment Name: At_2mM_SA_P Parameter: Timepoint (hr) Value: 6
  misc_feature: MA Experiment 20000182 PARAMETER Experiment Name: At_2mM_SA_P Parameter: Tissue Value: Aerial
  misc_feature: MA Experiment 20000182 PARAMETER Experiment Name: At_2mM_SA_P Parameter: Treatment Value: 2mM SA vs. No Treatment
cttagaattttccgacgaggaaagttcttcaaattcgctgttgaattttgtttctcggagaaattatcaaaaccctagacgatcacattatcgcttctgagatcaaagacgatgcagcaattactgttcgctgttgttctcttcgaggttgttgtgataatggcgctttccttcaagacgccgattaggaagctgttgattatgagcttggatcgttccaagcgtggtcgtggaccggtggtgattcagacggtttctgcgacggttattgtgcttctggtgacgagcgtgtacaatatgatggggatccagaagcgttggatcgaagatggtgtagtgaatcctacagatgaggttatcatggctaagcatctccttgaatcgactcttatgggtggttttctattccttgggctaatgatagacaggctgcatcattacatgagggagctacgcataagaaggaagaacatggaagttataaagaaggaaggagcattattggaaggtgttaaggccagaggtttagatgaagttaaaaacttgatggaagaaattacgtcccttcggaaaaggcaagagcagctggactctgagcttgaggcaaggtctaaagaaatccgtaccgagaaaactagtgcggttgctctacagaagcaatctgaagggttccttattgagtttaaccggttgcttgaggaaaaccaggtgctgcgagaccaattgcacactgtggattcgaaactttcgcgttcaagcagcaaaaagaatacttgagagaccttattccaacacttgaaacttctttgcgattctgccgtctgaatatatatgtttcgagtttgatatcaggagcttgtggtttggtgttatcgcatcttgttaacatggaagatgattgggaaagatcagagaatacaaaacaagtataggtttgcttcttgtttaagtgtttagctaaggtagaaattaatcaattcttctgctataggaaactgtaactcgttgtaacttgttcatttcgcaacaaaaacttctcgaattggttcttatttccttccatatacgtatacagtcgctgcaagtgggttgtc

SEQ ID NO: 40595 - protein, 221 aa, Arabidopsis thaliana
  peptide (1)..(221): Ceres Seq. ID no. 12558446
  misc_feature (4)..(192): Pfam Name: B-cell receptor-associated protein 31-like Pfam Description: B-cell receptor-associated protein 31-like
  misc_feature (1)..(128): Homolog of NCBI NO: 18402620 NR Description: expressed protein
  misc_feature (1)..(205): Homolog of NCBI NO: 15231412 NR Description: unknown protein; protein id: At3g07190.1
  misc_feature (1)..(205): Homolog of NCBI NO: 15239667 NR Description: putative protein; protein id: At5g48660.1
  misc_feature (1)..(206): Homolog of NCBI NO: 34897474 NR Description: unknown protein [Oryza sativa (japonica
  misc_feature (1)..(208): Homolog of NCBI NO: 21553655 NR Description: unknown [Arabidopsis thaliana]
  misc_feature (1)..(208): Homolog of NCBI NO: 18422225 NR Description: expressed protein
  misc_feature (1)..(208): Homolog of NCBI NO: 9759015 NR Description: gene_id:K16E1.4~unknown protein [Arabidopsis
  misc_feature (1)..(199): Homolog of NCBI NO: 30682503 NR Description: expressed protein [Arabidopsis thaliana]
  misc_feature (1)..(221): Homolog of NCBI NO: 22655198 NR Description: unknown protein [Arabidopsis thaliana]
MQQLLFAVVLFEVVVIMALSFKTPIRKLLIMSLDRSKRGRGPVVIQTVSATVIVLLVTSVYNMMGIQKRWIEDGVVNPTDEVIMAKHLLESTLMGGFLFLGLMIDRLHHYMRELRIRRKNMEVIKKEGALLEGVKARGLDEVKNLMEEITSLRKRQEQLDSELEARSKEIRTEKTSAVALQKQSEGFLIEFNRLLEENQVLRDQLHTVDSKLSRSSSKKNT

SEQ ID NO: 40596 - protein, 205 aa, Arabidopsis thaliana
  peptide (1)..(205): Ceres Seq. ID no. 12558447
  misc_feature (1)..(176): Pfam Name: B-cell receptor-associated protein 31-like Pfam Description: B-cell receptor-associated protein 31-like
  misc_feature (1)..(112): Homolog of NCBI NO: 18402620 NR Description: expressed protein
  misc_feature (1)..(189): Homolog of NCBI NO: 15231412 NR Description: unknown protein; protein id: At3g07190.1
  misc_feature (1)..(189): Homolog of NCBI NO: 15239667 NR Description: putative protein; protein id: At5g48660.1
  misc_feature (1)..(190): Homolog of NCBI NO: 34897474 NR Description: unknown protein [Oryza sativa (japonica
  misc_feature (1)..(192): Homolog of NCBI NO: 21553655 NR Description: unknown [Arabidopsis thaliana]
  misc_feature (1)..(192): Homolog of NCBI NO: 18422225 NR Description: expressed protein
  misc_feature (1)..(192): Homolog of NCBI NO: 9759015 NR Description: gene_id:K16E1.4~unknown protein [Arabidopsis
  misc_feature (1)..(183): Homolog of NCBI NO: 30682503 NR Description: expressed protein [Arabidopsis thaliana]
  misc_feature (1)..(205): Homolog of NCBI NO: 22655198 NR Description: unknown protein [Arabidopsis thaliana]
MALSFKTPIRKLLIMSLDRSKRGRGPVVIQTVSATVIVLLVTSVYNMMGIQKRWIEDGVVNPTDEVIMAKHLLESTLMGGFLFLGLMIDRLHHYMRELRIRRKNMEVIKKEGALLEGVKARGLDEVKNLMEEITSLRKRQEQLDSELEARSKEIRTEKTSAVALQKQSEGFLIEFNRLLEENQVLRDQLHTVDSKLSRSSSKKNT

SEQ ID NO: 40597 - protein, 191 aa, Arabidopsis thaliana
  peptide (1)..(191): Ceres Seq. ID no. 12558448
  misc_feature (1)..(162): Pfam Name: B-cell receptor-associated protein 31-like Pfam Description: B-cell receptor-associated protein 31-like
  misc_feature (1)..(98): Homolog of NCBI NO: 18402620 NR Description: expressed protein
  misc_feature (1)..(175): Homolog of NCBI NO: 15231412 NR Description: unknown protein; protein id: At3g07190.1
  misc_feature (1)..(175): Homolog of NCBI NO: 15239667 NR Description: putative protein; protein id: At5g48660.1
  misc_feature (1)..(176): Homolog of NCBI NO: 34897474 NR Description: unknown protein [Oryza sativa (japonica
  misc_feature (1)..(178): Homolog of NCBI NO: 21553655 NR Description: unknown [Arabidopsis thaliana]
  misc_feature (1)..(178): Homolog of NCBI NO: 18422225 NR Description: expressed protein
  misc_feature (1)..(178): Homolog of NCBI NO: 9759015 NR Description: gene_id:K16E1.4~unknown protein [Arabidopsis
  misc_feature (1)..(169): Homolog of NCBI NO: 30682503 NR Description: expressed protein [Arabidopsis thaliana]
  misc_feature (1)..(191): Homolog of NCBI NO: 22655198 NR Description: unknown protein [Arabidopsis thaliana]
MSLDRSKRGRGPVVIQTVSATVIVLLVTSVYNMMGIQKRWIEDGVVNPTDEVIMAKHLLESTLMGGFLFLGLMIDRLHHYMRELRIRRKNMEVIKKEGALLEGVKARGLDEVKNLMEEITSLRKRQEQLDSELEARSKEIRTEKTSAVALQKQSEGFLIEFNRLLEENQVLRDQLHTVDSKLSRSSSKKNT

SEQ ID NO: 40598 - DNA, 2289 bp, Arabidopsis thaliana
  misc_feature (1)..(2289): Ceres Seq. ID no. 13492421
  misc_feature: MA Experiment ID: 108574 Result: Down-regulated in Transcription
  misc_feature: MA Experiment 108574 PARAMETER Experiment Name: At_Wounding__cDNA_P Parameter: Timepoint (hr) Value: 1
  misc_feature: MA Experiment 108574 PARAMETER Experiment Name: At_Wounding__cDNA_P Parameter: Tissue Value: Aerial
  misc_feature: MA Experiment 108574 PARAMETER Experiment Name: At_Wounding__cDNA_P Parameter: Treatment Value: Wounding vs. No Wounding
  misc_feature: MA Experiment ID: 108579 Result: Down-regulated in Transcription
  misc_feature: MA Experiment 108579 PARAMETER Experiment Name: At_4deg_Cold_cDNA_P Parameter: Temperature (deg C) Value: 4 vs. 22
  misc_feature: MA Experiment 108579 PARAMETER Experiment Name: At_4deg_Cold_cDNA_P Parameter: Timepoint (hr) Value: 6
  misc_feature: MA Experiment 108579 PARAMETER Experiment Name: At_4deg_Cold_cDNA_P Parameter: Tissue Value: Aerial
  misc_feature: MA Experiment ID: 20000184 Result: Down-regulated in Transcription
  misc_feature: MA Experiment 20000184 PARAMETER Experiment Name: At_Shoots__P Parameter: Age (day) Value: 7
  misc_feature: MA Experiment 20000184 PARAMETER Experiment Name: At_Shoots__P Parameter: Tissue Value: Shoots vs. Whole Plant
  misc_feature: MA Experiment ID: 20000224 Result: Up-regulated in Transcription
  misc_feature: MA Experiment ID: 20001450 Result: Up-regulated in Transcription
  misc_feature: MA Experiment 20001450 PARAMETER Experiment Name: At_Far-red-induction_P Parameter: Age (day) Value: 7
  misc_feature: MA Experiment 20001450 PARAMETER Experiment Name: At_Far-red-induction_P Parameter: Light Value: Far-red vs. White
  misc_feature: MA Experiment 20001450 PARAMETER Experiment Name: At_Far-red-induction_P Parameter: Organism Value: A. thaliana
  misc_feature: MA Experiment 20001450 PARAMETER Experiment Name: At_Far-red-induction_P Parameter: Plant Line Value: Columbia
  misc_feature: MA Experiment 20001450 PARAMETER Experiment Name: At_Far-red-induction_P Parameter: Timepoint (hr) Value: 8
  misc_feature: MA Experiment 20001450 PARAMETER Experiment Name: At_Far-red-induction_P Parameter: Tissue Value: Whole Plant
  misc_feature: MA Experiment ID: 20001451 Result: Up-regulated in Transcription
  misc_feature: MA Experiment 20001451 PARAMETER Experiment Name: At_Far-red-induction_P Parameter: Age (day) Value: 7
  misc_feature: MA Experiment 20001451 PARAMETER Experiment Name: At_Far-red-induction_P Parameter: Light Value: Far-red vs. White
  misc_feature: MA Experiment 20001451 PARAMETER Experiment Name: At_Far-red-induction_P Parameter: Organism Value: A. thaliana
  misc_feature: MA Experiment 20001451 PARAMETER Experiment Name: At_Far-red-induction_P Parameter: Plant Line Value: Columbia
  misc_feature: MA Experiment 20001451 PARAMETER Experiment Name: At_Far-red-induction_P Parameter: Timepoint (hr) Value: 24
  misc_feature: MA Experiment 20001451 PARAMETER Experiment Name: At_Far-red-induction_P Parameter: Tissue Value: Whole Plant
  misc_feature: MA Experiment ID: 20001911 Result: Up-regulated in Transcription
  misc_feature: MA Experiment 20001911 PARAMETER Experiment Name: At_Drought_Reproduction_P Parameter: Age (day) Value: 40
  misc_feature: MA Experiment 20001911 PARAMETER Experiment Name: At_Drought_Reproduction_P Parameter: Organism Value: A. thaliana
  misc_feature: MA Experiment 20001911 PARAMETER Experiment Name: At_Drought_Reproduction_P Parameter: Plant Line Value: WS
  misc_feature: MA Experiment 20001911 PARAMETER Experiment Name: At_Drought_Reproduction_P Parameter: Timepoint (day) Value: 10
  misc_feature: MA Experiment 20001911 PARAMETER Experiment Name: At_Drought_Reproduction_P Parameter: Tissue Value: Flowers
  misc_feature: MA Experiment 20001911 PARAMETER Experiment Name: At_Drought_Reproduction_P Parameter: Treatment Value: Drought vs. No Drought
tcccccgacgggacactagagaagggagggcagagagcgattttgttctctctctacttctcggtcgtcttcttcgtctccactctagggttttactctatcttcttcttcatcatcatcttctacaccaatctctagcgttaatctgtttctgctggagaagatttacgcttgttcctcggttctcttacttctgctccggttcgatcgcttgctaagtgtttcgagttggttcgcacttcggtgggcgatatcatgactgtgaggaacggtggtttcccaggagattataatcgtaacagttttgactctcccggcggctgtgatgatagccccaatgcttccaaggatgatgaaacttttggtgtcccgagaatagttttacccttgtctgacttgtcatcatcagaaaggagaaagtggattcatacgcttcgtcaggagctggaacaactacggtcctttcagaagagtgttggggaccttcttcctatatctaagattgttactagtacacctgcaagtaatgtgtctcgccccaagagttttggaatgtcacgatgctctactggccctggaaaaagggtgctccccttcacagcaaccaaaccagagccagtcaccacttccactatgcttcggatgaagcaatgtgagagcctccttaaacgattgatgtcgcagcagcattgttggctctttaatacccctgtggacgtcgtcaagctcaacattcctgattatttcaccattatcaaacatcctatggatttaggaactgttaaaagcaagttaacttccggcacgtattcaagcccttcagagttttctgctgatgtccgtcttactttccgcaatgctatgacttataacccgtcagataataatgtgtatcgcttcgctgatactctcagcaagttttttgaagtgagatggaaaactatcgagaagaagtcatccggaaccaaatctgaaccaagtaacttggctactcttgctcacaaagatattgcgatacctgagcctgtggctaagaagagaaagatgaatgctgtgaaacgtaacagcctcttagagcctgctaagcgggttatgacagatgaggatagagtaaagcttggcagagatttggggtccttgacagaattccctgtacagataataaatttcctgagagatcacagctccaaggaagagagatctggagatgatgagatagagattgacatcaatgatctcagtcatgatgccttgttccagttgcgggatctctttgatgagtttctgcgagaaaatcaaaagaaagattcaaacggtgaaccctgtgtgttagagcttttacatgggtcagggccaggaaattcattgacgcaacactgtgatgggagtgaattggaggacgaggatgttgacattggtaattatgagcaccctatatctcacatctcaactgtcagaacagaaaaagattccgtcggtggattgaatcagatggaagatgcatccagagggaagctaagtcttattgagggggcagatggtcatcaagatggaaatagtgctccaaaagagaaggaactacctccagaaaagcgttacagggctgctctattgaaaaatcgatttgcggatataatcttgaaggctcaagagataactcttaatcagaatgagaaacgagacccagagacactgcaacgtgagaaggaagaactggaattgcaaaagaagaaagaaaaagcacggttacaagcagaagccaaggaagctgaagaagctcgtagaaaagctgaggcacaagaggctaagaggaaactggaacttgaaagagaagcagcccggcaggcattgcttgagatggagaagtcggttgaaataaatgagaacacaaggtttctcaaggacctagaactgctcaaaacggttaacacggaccagttacgaaatctaagagatgttggctctgagtctgatgggttggctgtatttgggtttggaggaagtaatcctctagagcagctggggctatttatgaaacatgaggaggatgaagatgaatccgacatgcttgcgtttccagatcccggcaatgaagtagaagagggtgaaatcgactgagattcatgagtgttgtgtcttggataacagcagtcaagtgtacatgagttgttgtaaaaaatgatagttagattgatatttaaccaatgcgatggcattttatccgagtaaacaatcaataacactttgtgtagtgagtaaaattttggttaattcaataaaccaatgacc

SEQ ID NO: 40599 - protein, 620 aa, Arabidopsis thaliana
  peptide (1)..(620): Ceres Seq. ID no. 13492422
  misc_feature (129)..(218): Pfam Name: Bromodomain Pfam Description: Bromodomain
  misc_feature (30)..(92): Homolog of NCBI NO: 9294219 NR Description: gb|AAF01563.1~gene_id:K17E12.8~similar to unknown
  misc_feature (114)..(537): Homolog of NCBI NO: 9294219 NR Description: gb|AAF01563.1~gene_id:K17E12.8~similar to unknown
  misc_feature (573)..(620): Homolog of NCBI NO: 15232127 NR Description: DNA-binding protein family [Arabidopsis thaliana]
  misc_feature (30)..(92): Homolog of NCBI NO: 15232127 NR Description: DNA-binding protein family [Arabidopsis thaliana]
  misc_feature (114)..(537): Homolog of NCBI NO: 15232127 NR Description: DNA-binding protein family [Arabidopsis thaliana]
  misc_feature (1)..(409): Homolog of NCBI NO: 18417335 NR Description: DNA-binding protein family [Arabidopsis thaliana]
  misc_feature (402)..(620): Homolog of NCBI NO: 11358472 NR Description: kinase-like protein - Arabidopsis thaliana
  misc_feature (1)..(443): Homolog of NCBI NO: 11358472 NR Description: kinase-like protein - Arabidopsis thaliana
  misc_feature (378)..(620): Homolog of NCBI NO: 6016737 NR Description: hypothetical protein [Arabidopsis thaliana]
  misc_feature (1)..(356): Homolog of NCBI NO: 6016737 NR Description: hypothetical protein [Arabidopsis thaliana]
MTVRNGGFPGDYNRNSFDSPGGCDDSPNASKDDETFGVPRIVLPLSDLSSSERRKWIHTLRQELEQLRSFQKSVGDLLPISKIVTSTPASNVSRPKSFGMSRCSTGPGKRVLPFTATKPEPVTTSTMLRMKQCESLLKRLMSQQHCWLFNTPVDVVKLNIPDYFTIIKHPMDLGTVKSKLTSGTYSSPSEFSADVRLTFRNAMTYNPSDNNVYRFADTLSKFFEVRWKTIEKKSSGTKSEPSNLATLAHKDIAIPEPVAKKRKMNAVKRNSLLEPAKRVMTDEDRVKLGRDLGSLTEFPVQIINFLRDHSSKEERSGDDEIEIDINDLSHDALFQLRDLFDEFLRENQKKDSNGEPCVLELLHGSGPGNSLTQHCDGSELEDEDVDIGNYEHPISHISTVRTEKDSVGGLNQMEDASRGKLSLIEGADGHQDGNSAPKEKELPPEKRYRAALLKNRFADIILKAQEITLNQNEKRDPETLQREKEELELQKKKEKARLQAEAKEAEEARRKAEAQEAKRKLELEREAARQALLEMEKSVEINENTRFLKDLELLKTVNTDQLRNLRDVGSESDGLAVFGFGGSNPLEQLGLFMKHEEDEDESDMLAFPDPGNEVEEGEID

SEQ ID NO: 40600 - protein, 521 aa, Arabidopsis thaliana
  peptide (1)..(521): Ceres Seq. ID no. 13492423
  misc_feature (30)..(119): Pfam Name: Bromodomain Pfam Description: Bromodomain
  misc_feature (15)..(317): Homolog of NCBI NO: 17064912 NR Description: Unknown protein [Arabidopsis thaliana]
  misc_feature (474)..(521): Homolog of NCBI NO: 9294219 NR Description: gb|AAF01563.1~gene_id:K17E12.8~similar to unknown
  misc_feature (15)..(438): Homolog of NCBI NO: 9294219 NR Description: gb|AAF01563.1~gene_id:K17E12.8~similar to unknown
  misc_feature (474)..(521): Homolog of NCBI NO: 15232127 NR Description: DNA-binding protein family [Arabidopsis thaliana]
  misc_feature (15)..(438): Homolog of NCBI NO: 15232127 NR Description: DNA-binding protein family [Arabidopsis thaliana]
  misc_feature (1)..(310): Homolog of NCBI NO: 18417335 NR Description: DNA-binding protein family [Arabidopsis thaliana]
  misc_feature (303)..(521): Homolog of NCBI NO: 11358472 NR Description: kinase-like protein - Arabidopsis thaliana
  misc_feature (1)..(344): Homolog of NCBI NO: 11358472 NR Description: kinase-like protein - Arabidopsis thaliana
  misc_feature (279)..(521): Homolog of NCBI NO: 6016737 NR Description: hypothetical protein [Arabidopsis thaliana]
  misc_feature (1)..(257): Homolog of NCBI NO: 6016737 NR Description: hypothetical protein [Arabidopsis thaliana]
MSRCSTGPGKRVLPFTATKPEPVTTSTMLRMKQCESLLKRLMSQQHCWLFNTPVDVVKLNIPDYFTIIKHPMDLGTVKSKLTSGTYSSPSEFSADVRLTFRNAMTYNPSDNNVYRFADTLSKFFEVRWKTIEKKSSGTKSEPSNLATLAHKDIAIPEPVAKKRKMNAVKRNSLLEPAKRVMTDEDRVKLGRDLGSLTEFPVQIINFLRDHSSKEERSGDDEIEIDINDLSHDALFQLRDLFDEFLRENQKKDSNGEPCVLELLHGSGPGNSLTQHCDGSELEDEDVDIGNYEHPISHISTVRTEKDSVGGLNQMEDASRGKLSLIEGADGHQDGNSAPKEKELPPEKRYRAALLKNRFADIILKAQEITLNQNEKRDPETLQREKEELELQKKKEKARLQAEAKEAEEARRKAEAQEAKRKLELEREAARQALLEMEKSVEINENTRFLKDLELLKTVNTDQLRNLRDVGSESDGLAVFGFGGSNPLEQLGLFMKHEEDEDESDMLAFPDPGNEVEEGEID

SEQ ID NO: 40601 - protein, 494 aa, Arabidopsis thaliana
  peptide (1)..(494): Ceres Seq. ID no. 13492424
  misc_feature (3)..(92): Pfam Name: Bromodomain Pfam Description: Bromodomain
  misc_feature (1)..(290): Homolog of NCBI NO: 17064912 NR Description: Unknown protein [Arabidopsis thaliana]
  misc_feature (447)..(494): Homolog of NCBI NO: 9294219 NR Description: gb|AAF01563.1~gene_id:K17E12.8~similar to unknown
  misc_feature (1)..(411): Homolog of NCBI NO: 9294219 NR Description: gb|AAF01563.1~gene_id:K17E12.8~similar to unknown
  misc_feature (447)..(494): Homolog of NCBI NO: 15232127 NR Description: DNA-binding protein family [Arabidopsis thaliana]
  misc_feature (1)..(411): Homolog of NCBI NO: 15232127 NR Description: DNA-binding protein family [Arabidopsis thaliana]
  misc_feature (1)..(283): Homolog of NCBI NO: 18417335 NR Description: DNA-binding protein family [Arabidopsis thaliana]
  misc_feature (276)..(494): Homolog of NCBI NO: 11358472 NR Description: kinase-like protein - Arabidopsis thaliana
  misc_feature (1)..(317): Homolog of NCBI NO: 11358472 NR Description: kinase-like protein - Arabidopsis thaliana
  misc_feature (252)..(494): Homolog of NCBI NO: 6016737 NR Description: hypothetical protein [Arabidopsis thaliana]
  misc_feature (1)..(230): Homolog of NCBI NO: 6016737 NR Description: hypothetical protein [Arabidopsis thaliana]
MLRMKQCESLLKRLMSQQHCWLFNTPVDVVKLNIPDYFTIIKHPMDLGTVKSKLTSGTYSSPSEFSADVRLTFRNAMTYNPSDNNVYRFADTLSKFFEVRWKTIEKKSSGTKSEPSNLATLAHKDIAIPEPVAKKRKMNAVKRNSLLEPAKRVMTDEDRVKLGRDLGSLTEFPVQIINFLRDHSSKEERSGDDEIEIDINDLSHDALFQLRDLFDEFLRENQKKDSNGEPCVLELLHGSGPGNSLTQHCDGSELEDEDVDIGNYEHPISHISTVRTEKDSVGGLNQMEDASRGKLSLIEGADGHQDGNSAPKEKELPPEKRYRAALLKNRFADIILKAQEITLNQNEKRDPETLQREKEELELQKKKEKARLQAEAKEAEEARRKAEAQEAKRKLELEREAARQALLEMEKSVEINENTRFLKDLELLKTVNTDQLRNLRDVGSESDGLAVFGFGGSNPLEQLGLFMKHEEDEDESDMLAFPDPGNEVEEGEID

SEQ ID NO: 40602 - DNA, 2086 bp, Arabidopsis thaliana
  misc_feature (1)..(2086): Ceres Seq. ID no. 13488656
  misc_feature: MA Experiment ID: 108464 Result: Up-regulated in Transcription
  misc_feature: MA Experiment 108464 PARAMETER Experiment Name: At_Germinating_Seeds_cDNA_P Parameter: Age (day) Value: 4 vs. 0
  misc_feature: MA Experiment 108464 PARAMETER Experiment Name: At_Germinating_Seeds_cDNA_P Parameter: Tissue Value: Germinating Seeds
  misc_feature: MA Experiment ID: 108501 Result: Up-regulated in Transcription
  misc_feature: MA Experiment 108501 PARAMETER Experiment Name: At_ap2_floral_buds_cDNA_P Parameter: Plant Line Value: ap2 (Ler.)
  misc_feature: MA Experiment 108501 PARAMETER Experiment Name: At_ap2_floral_buds_cDNA_P Parameter: Tissue Value: Closed Flower
  misc_feature: MA Experiment ID: 108607 Result: Down-regulated in Transcription
  misc_feature: MA Experiment 108607 PARAMETER Experiment Name: At_100uM_ABA_cDNA_P Parameter: Timepoint (hr) Value: 4
  misc_feature: MA Experiment 108607 PARAMETER Experiment Name: At_100uM_ABA_cDNA_P Parameter: Tissue Value: Aerial
  misc_feature: MA Experiment 108607 PARAMETER Experiment Name: At_100uM_ABA_cDNA_P Parameter: Treatment Value: 100uM ABA vs. No Treatment
  misc_feature: MA Experiment ID: 108668 Result: Down-regulated in Transcription
  misc_feature: MA Experiment 108668 PARAMETER Experiment Name: At_2mM_SA_cDNA_P Parameter: Plant Line Value: WS
  misc_feature: MA Experiment 108668 PARAMETER Experiment Name: At_2mM_SA_cDNA_P Parameter: Timepoint (hr) Value: 6
  misc_feature: MA Experiment 108668 PARAMETER Experiment Name: At_2mM_SA_cDNA_P Parameter: Treatment Value: 2mM SA vs. No Treatment
  misc_feature: MA Experiment ID: 20000093 Result: Up-regulated in Transcription
  misc_feature: MA Experiment 20000093 PARAMETER Experiment Name: At_42deg_Heat_cDNA_P Parameter: Temperature (deg C) Value: 42 vs. 22
  misc_feature: MA Experiment 20000093 PARAMETER Experiment Name: At_42deg_Heat_cDNA_P Parameter: Timepoint (hr) Value: 0.5
  misc_feature: MA Experiment 20000093 PARAMETER Experiment Name: At_42deg_Heat_cDNA_P Parameter: Tissue Value: Aerial
  misc_feature: MA Experiment ID: 20000112 Result: Up-regulated in Transcription
  misc_feature: MA Experiment 20000112 PARAMETER Experiment Name: At_42deg_Heat_cDNA_P Parameter: Temperature (deg C) Value: 42 vs. 22
  misc_feature: MA Experiment 20000112 PARAMETER Experiment Name: At_42deg_Heat_cDNA_P Parameter: Timepoint (hr) Value: 2
  misc_feature: MA Experiment 20000112 PARAMETER Experiment Name: At_42deg_Heat_cDNA_P Parameter: Tissue Value: Aerial
  misc_feature: MA Experiment ID: 20000117 Result: Down-regulated in Transcription
  misc_feature: MA Experiment 20000117 PARAMETER Experiment Name: At_100uM_ABA_Mutants_cDNA_P Parameter: Plant Line Value: Columbia
  misc_feature: MA Experiment 20000117 PARAMETER Experiment Name: At_100uM_ABA_Mutants_cDNA_P Parameter: Timepoint (hr) Value: 6
  misc_feature: MA Experiment 20000117 PARAMETER Experiment Name: At_100uM_ABA_Mutants_cDNA_P Parameter: Tissue Value: Aerial
  misc_feature: MA Experiment 20000117 PARAMETER Experiment Name: At_100uM_ABA_Mutants_cDNA_P Parameter: Treatment Value: 100uM ABA vs. No Treatment
  misc_feature: MA Experiment ID: 20000144 Result: Up-regulated in Transcription
  misc_feature: MA Experiment 20000144 PARAMETER Experiment Name: At_42deg_Heat_cDNA_P Parameter: Temperature (deg C) Value: 42 vs. 22
  misc_feature: MA Experiment 20000144 PARAMETER Experiment Name: At_42deg_Heat_cDNA_P Parameter: Timepoint (hr) Value: 1
  misc_feature: MA Experiment 20000144 PARAMETER Experiment Name: At_42deg_Heat_cDNA_P Parameter: Tissue Value: Aerial
  misc_feature: MA Experiment ID: 20000171 Result: Up-regulated in Transcription
  misc_feature: MA Experiment 20000171 PARAMETER Experiment Name: At_42deg_Heat_P Parameter: Age (day) Value: 14
  misc_feature: MA Experiment 20000171 PARAMETER Experiment Name: At_42deg_Heat_P Parameter: Organism Value: A. thaliana
  misc_feature: MA Experiment 20000171 PARAMETER Experiment Name: At_42deg_Heat_P Parameter: Plant Line Value: WS
  misc_feature: MA Experiment 20000171 PARAMETER Experiment Name: At_42deg_Heat_P Parameter: Temperature (deg C) Value: 42 vs. 22
  misc_feature: MA Experiment 20000171 PARAMETER Experiment Name: At_42deg_Heat_P Parameter: Timepoint (hr) Value: 1
  misc_feature: MA Experiment 20000171 PARAMETER Experiment Name: At_42deg_Heat_P Parameter: Tissue Value: Aerial
  misc_feature: MA Experiment ID: 20000182 Result: Down-regulated in Transcription
  misc_feature: MA Experiment 20000182 PARAMETER Experiment Name: At_2mM_SA_P Parameter: Age (day) Value: 14
  misc_feature: MA Experiment 20000182 PARAMETER Experiment Name: At_2mM_SA_P Parameter: Organism Value: A. thaliana
  misc_feature: MA Experiment 20000182 PARAMETER Experiment Name: At_2mM_SA_P Parameter: Plant Line Value: WS
  misc_feature: MA Experiment 20000182 PARAMETER Experiment Name: At_2mM_SA_P Parameter: Timepoint (hr) Value: 6
  misc_feature: MA Experiment 20000182 PARAMETER Experiment Name: At_2mM_SA_P Parameter: Tissue Value: Aerial
  misc_feature: MA Experiment 20000182 PARAMETER Experiment Name: At_2mM_SA_P Parameter: Treatment Value: 2mM SA vs. No Treatment
  misc_feature: MA Experiment ID: 20000436 Result: Down-regulated in Transcription
  misc_feature: MA Experiment 20000436 PARAMETER Experiment Name: At_Drought_P Parameter: Age (day) Value: 7
  misc_feature: MA Experiment 20000436 PARAMETER Experiment Name: At_Drought_P Parameter: Organism Value: A. thaliana
  misc_feature: MA Experiment 20000436 PARAMETER Experiment Name: At_Drought_P Parameter: Plant Line Value: WS
  misc_feature: MA Experiment 20000436 PARAMETER Experiment Name: At_Drought_P Parameter: Timepoint (hr) Value: 12
  misc_feature: MA Experiment 20000436 PARAMETER Experiment Name: At_Drought_P Parameter: Tissue Value: Whole Plant
  misc_feature: MA Experiment 20000436 PARAMETER Experiment Name: At_Drought_P Parameter: Treatment Value: Drought vs. No Drought
  misc_feature: MA Experiment ID: 20000437 Result: Down-regulated in Transcription
  misc_feature: MA Experiment 20000437 PARAMETER Experiment Name: At_Drought_P Parameter: Age (day) Value: 8
  misc_feature: MA Experiment 20000437 PARAMETER Experiment Name: At_Drought_P Parameter: Organism Value: A. thaliana
  misc_feature: MA Experiment 20000437 PARAMETER Experiment Name: At_Drought_P Parameter: Plant Line Value: WS
  misc_feature: MA Experiment 20000437 PARAMETER Experiment Name: At_Drought_P Parameter: Timepoint (hr) Value: 24
  misc_feature: MA Experiment 20000437 PARAMETER Experiment Name: At_Drought_P Parameter: Tissue Value: Whole Plant
  misc_feature: MA Experiment 20000437 PARAMETER Experiment Name: At_Drought_P Parameter: Treatment Value: Drought vs. No Drought
  misc_feature: MA Experiment ID: 20000495 Result: Down-regulated in Transcription
  misc_feature: MA Experiment 20000495 PARAMETER Experiment Name: At_Guard_Cells_P Parameter: Harvest Date Value: 8/2/2002
  misc_feature: MA Experiment 20000495 PARAMETER Experiment Name: At_Guard_Cells_P Parameter: Organism Value: A. thaliana
  misc_feature: MA Experiment 20000495 PARAMETER Experiment Name: At_Guard_Cells_P Parameter: Tissue Value: Guard Cells vs. Leaves
  misc_feature: MA Experiment ID: 20000496 Result: Down-regulated in Transcription
  misc_feature: MA Experiment 20000496 PARAMETER Experiment Name: At_Guard_Cells_P Parameter: Harvest Date Value: 7/19/2002
  misc_feature: MA Experiment 20000496 PARAMETER Experiment Name: At_Guard_Cells_P Parameter: Organism Value: Canola
  misc_feature: MA Experiment 20000496 PARAMETER Experiment Name: At_Guard_Cells_P Parameter: Tissue Value: Guard Cells vs. Leaves
  misc_feature: MA Experiment ID: 20000573 Result: Down-regulated in Transcription
  misc_feature: MA Experiment 20000573 PARAMETER Experiment Name: At_100uM_ABA_Mutants__P Parameter: Organism Value: A. thaliana
  misc_feature: MA Experiment 20000573 PARAMETER Experiment Name: At_100uM_ABA_Mutants__P Parameter: Plant Line Value: CS22 vs. Ler wt
  misc_feature: MA Experiment 20000573 PARAMETER Experiment Name: At_100uM_ABA_Mutants__P Parameter: Timepoint (hr) Value: N/A
  misc_feature: MA Experiment 20000573 PARAMETER Experiment Name: At_100uM_ABA_Mutants__P Parameter: Tissue Value: Whole Plant
  misc_feature: MA Experiment 20000573 PARAMETER Experiment Name: At_100uM_ABA_Mutants__P Parameter: Treatment Value: None
  misc_feature: MA Experiment ID: 20001451 Result: Down-regulated in Transcription
  misc_feature: MA Experiment 20001451 PARAMETER Experiment Name: At_Far-red-induction_P Parameter: Age (day) Value: 7
  misc_feature: MA Experiment 20001451 PARAMETER Experiment Name: At_Far-red-induction_P Parameter: Light Value: Far-red vs. White
  misc_feature: MA Experiment 20001451 PARAMETER Experiment Name: At_Far-red-induction_P Parameter: Organism Value: A. thaliana
  misc_feature: MA Experiment 20001451 PARAMETER Experiment Name: At_Far-red-induction_P Parameter: Plant Line Value: Columbia
  misc_feature: MA Experiment 20001451 PARAMETER Experiment Name: At_Far-red-induction_P Parameter: Timepoint (hr) Value: 24
  misc_feature: MA Experiment 20001451 PARAMETER Experiment Name: At_Far-red-induction_P Parameter: Tissue Value: Whole Plant
  misc_feature: MA Experiment ID: 20001558 Result: Up-regulated in Transcription
  misc_feature: MA Experiment 20001558 PARAMETER Experiment Name: At_Drought_Soil_Dry_P Parameter: Age (day) Value: 27
  misc_feature: MA Experiment 20001558 PARAMETER Experiment Name: At_Drought_Soil_Dry_P Parameter: Organism Value: A. thaliana
  misc_feature: MA Experiment 20001558 PARAMETER Experiment Name: At_Drought_Soil_Dry_P Parameter: Plant Line Value: WS
  misc_feature: MA Experiment 20001558 PARAMETER Experiment Name: At_Drought_Soil_Dry_P Parameter: Post Timepoint (hr) Value: 6
  misc_feature: MA Experiment 20001558 PARAMETER Experiment Name: At_Drought_Soil_Dry_P Parameter: Post-Treatment Value: Re-Water vs. No Drought
  misc_feature: MA Experiment 20001558 PARAMETER Experiment Name: At_Drought_Soil_Dry_P Parameter: Timepoint (day) Value: 13
  misc_feature: MA Experiment 20001558 PARAMETER Experiment Name: At_Drought_Soil_Dry_P Parameter: Treatment Value: Drought vs. No Drought
ggattttctatctctctctctctctctctctctcttcttcacacacacagagacatcatcctcttcacacccttttcttttgcacaatcgcattcactatctcttctctctcttttgtgtcacatccttctcttctcttctaagttctaatcttgtactatcttgttctaccatggcttcttctgaaacaagaatgaacaaggcaagagaaaaagaagaagccatagcaaatggagtgaagttgagagcacttcaagcgagtcttatgcagatgaagtcaagcccatcttccaattacagtctcagaaacccttcttcctcttctgctgcttcacctgcttctcgtcctctccctaacctctctgctcatgattaccctgttttcactcctagctatgaagatgagcctgtgtctgcatttcatcacaagaatctcactttatctgagacttgggatgaagatggtgttggtttagtagatggagatacttatctctctgattcttacaaaacctcaacttcaagaaagactgtgatgatgcctcatcaagattctcatcatcatgtttacactatgtcggacgctctcagatctccaccgttacatttttatacaaccggtagaagcaactgtggctcggtcgactttagatcggtctcttcttgcaatgactacaataaacaaaaaggtttcgacacgaagagcttgaagagctctaatcttgttgtgcccttgacggattcgcactctgctgttgtttcttctcagccaagaaaccgtggaggtagagtaatgtcttggttattccctaagttaaagaagaaacaaaagagtaattcgatctttaattcacctagtataactgagaagtcagaggaagtttctgaggtgttgaaggattctggttctggtgttgagaagttgaagagagaattgatggaagcaaacagaagtagggatgctgcgttaacacaagtctcagagatgaaatcttcattgggagagttaagtgagaagcttcagtacttggaaagttactgtgacaatttaaagaaagctttgagagaagcaacagaagtagtgtcacaggagaatagtggtggaagaagctcagggaaaaagaactcagagatgccagtgagtgaagaagtgatggttgaagggttcttgcagattgtatcagaagcaagattatcgataaagcagttcttgaaaacattagtttcagagattgatgaagaagactcgactctaattggtaacatcaacactctccttcaacctcacaacttatcattcacttctaagtactccaagatcattcagtaccacttagaagcaatcataagccaatcagtataccaagactttgagaactgcgtattccagaagaacggtaagccgaaactgcttgatccggaacaagatcgacaagcgaacttctcgtcctttgcttccttgagaaacttgagctggaacgaggtattgaaaaagggtacaaaatactacagtgatgagttcagtagattctgcgatgagaagatgagtttgatcattacaacattgaattggacaagaccttggtcagaacaaatgcttcaagcattctttgtggctgcaaaatgtgtatggttgcttcatttgcttgccttctcgttcaatccagcgttagggatattgagagttgaggagaacagagagtttgaatcaagttttatggaagatatgggtgcagataggcagagatcagcattgtcccgtggaccggcacgggttaaggttatggtaatgcctgggttttatgttttagatagggttttgagatgtaaggttctttgcaggtacaagtcattgggctgaactgaagagagtcacactcactctagtctaatcaaaattgattggttcttaattaacttttcttattgttaatctcttgtgtttcttctacctaggcttttttttactggtctttttacactttgttaagaattattataggtttttaaatattgtcaaatactacttgtcaaggagattttgtatttttacatttttgtattgatggaaaagtattgaatatgt

SEQ ID NO: 40603 - protein, 619 aa, Arabidopsis thaliana
  peptide (1)..(619): Ceres Seq. ID no. 13488657
  misc_feature (329)..(611): Homolog of NCBI NO: 15232398 NR Description: expressed protein [Arabidopsis thaliana]
  misc_feature (327)..(611): Homolog of NCBI NO: 15225441 NR Description: expressed protein [Arabidopsis thaliana]
  misc_feature (126)..(619): Homolog of NCBI NO: 22329507 NR Description: expressed protein [Arabidopsis thaliana]
  misc_feature (58)..(619): Homolog of NCBI NO: 15239939 NR Description: expressed protein [Arabidopsis thaliana]
DFLSLSLSLSLFFTHTETSSSSHPFLLHNRIHYLFSLFCVTSFSSLLSSNLVLSCSTMASSETRMNKAREKEEAIANGVKLRALQASLMQMKSSPSSNYSLRNPSSSSAASPASRPLPNLSAHDYPVFTPSYEDEPVSAFHHKNLTLSETWDEDGVGLVDGDTYLSDSYKTSTSRKTVMMPHQDSHHHVYTMSDALRSPPLHFYTTGRSNCGSVDFRSVSSCNDYNKQKGFDTKSLKSSNLVVPLTDSHSAVVSSQPRNRGGRVMSWLFPKLKKKQKSNSIFNSPSITEKSEEVSEVLKDSGSGVEKLKRELMEANRSRDAALTQVSEMKSSLGELSEKLQYLESYCDNLKKALREATEVVSQENSGGRSSGKKNSEMPVSEEVMVEGFLQIVSEARLSIKQFLKTLVSEIDEEDSTLIGNINTLLQPHNLSFTSKYSKIIQYHLEAIISQSVYQDFENCVFQKNGKPKLLDPEQDRQANFSSFASLRNLSWNEVLKKGTKYYSDEFSRFCDEKMSLIITTLNWTRPWSEQMLQAFFVAAKCVWLLHLLAFSFNPALGILRVEENREFESSFMEDMGADRQRSALSRGPARVKVMVMPGFYVLDRVLRCKVLCRYKSLG

SEQ ID NO: 40604 - protein, 562 aa, Arabidopsis thaliana
  peptide (1)..(562): Ceres Seq. ID no. 13488658
  misc_feature (272)..(554): Homolog of NCBI NO: 15232398 NR Description: expressed protein [Arabidopsis thaliana]
  misc_feature (270)..(554): Homolog of NCBI NO: 15225441 NR Description: expressed protein [Arabidopsis thaliana]
  misc_feature (69)..(562): Homolog of NCBI NO: 22329507 NR Description: expressed protein [Arabidopsis thaliana]
  misc_feature (1)..(562): Homolog of NCBI NO: 15239939 NR Description: expressed protein [Arabidopsis thaliana]
MASSETRMNKAREKEEAIANGVKLRALQASLMQMKSSPSSNYSLRNPSSSSAASPASRPLPNLSAHDYPVFTPSYEDEPVSAFHHKNLTLSETWDEDGVGLVDGDTYLSDSYKTSTSRKTVMMPHQDSHHHVYTMSDALRSPPLHFYTTGRSNCGSVDFRSVSSCNDYNKQKGFDTKSLKSSNLVVPLTDSHSAVVSSQPRNRGGRVMSWLFPKLKKKQKSNSIFNSPSITEKSEEVSEVLKDSGSGVEKLKRELMEANRSRDAALTQVSEMKSSLGELSEKLQYLESYCDNLKKALREATEVVSQENSGGRSSGKKNSEMPVSEEVMVEGFLQIVSEARLSIKQFLKTLVSEIDEEDSTLIGNINTLLQPHNLSFTSKYSKIIQYHLEAIISQSVYQDFENCVFQKNGKPKLLDPEQDRQANFSSFASLRNLSWNEVLKKGTKYYSDEFSRFCDEKMSLIITTLNWTRPWSEQMLQAFFVAAKCVWLLHLLAFSFNPALGILRVEENREFESSFMEDMGADRQRSALSRGPARVKVMVMPGFYVLDRVLRCKVLCRYKSLG

SEQ ID NO: 40605 - protein, 555 aa, Arabidopsis thaliana
  peptide (1)..(555): Ceres Seq. ID no. 13488659
  misc_feature (265)..(547): Homolog of NCBI NO: 15232398 NR Description: expressed protein [Arabidopsis thaliana]
  misc_feature (263)..(547): Homolog of NCBI NO: 15225441 NR Description: expressed protein [Arabidopsis thaliana]
  misc_feature (62)..(555): Homolog of NCBI NO: 22329507 NR Description: expressed protein [Arabidopsis thaliana]
  misc_feature (1)..(555): Homolog of NCBI NO: 15239939 NR Description: expressed protein [Arabidopsis thaliana]
MNKAREKEEAIANGVKLRALQASLMQMKSSPSSNYSLRNPSSSSAASPASRPLPNLSAHDYPVFTPSYEDEPVSAFHHKNLTLSETWDEDGVGLVDGDTYLSDSYKTSTSRKTVMMPHQDSHHHVYTMSDALRSPPLHFYTTGRSNCGSVDFRSVSSCNDYNKQKGFDTKSLKSSNLVVPLTDSHSAVVSSQPRNRGGRVMSWLFPKLKKKQKSNSIFNSPSITEKSEEVSEVLKDSGSGVEKLKRELMEANRSRDAALTQVSEMKSSLGELSEKLQYLESYCDNLKKALREATEVVSQENSGGRSSGKKNSEMPVSEEVMVEGFLQIVSEARLSIKQFLKTLVSEIDEEDSTLIGNINTLLQPHNLSFTSKYSKIIQYHLEAIISQSVYQDFENCVFQKNGKPKLLDPEQDRQANFSSFASLRNLSWNEVLKKGTKYYSDEFSRFCDEKMSLIITTLNWTRPWSEQMLQAFFVAAKCVWLLHLLAFSFNPALGILRVEENREFESSFMEDMGADRQRSALSRGPARVKVMVMPGFYVLDRVLRCKVLCRYKSLG

SEQ ID NO: 40606 - DNA, 896 bp, Arabidopsis thaliana
  misc_feature (1)..(896): Ceres Seq. ID no. 13488033
  misc_feature: MA Experiment ID: 108434 Result: Up-regulated in Transcription
  misc_feature: MA Experiment 108434 PARAMETER Experiment Name: At_Root_Tips_cDNA_P Parameter: Tissue Value: Root Tips
  misc_feature: MA Experiment ID: 20001905 Result: Down-regulated in Transcription
  misc_feature: MA Experiment 20001905 PARAMETER Experiment Name: At_Drought_Reproduction_P Parameter: Age (day) Value: 40
  misc_feature: MA Experiment 20001905 PARAMETER Experiment Name: At_Drought_Reproduction_P Parameter: Organism Value: A. thaliana
  misc_feature: MA Experiment 20001905 PARAMETER Experiment Name: At_Drought_Reproduction_P Parameter: Plant Line Value: WS
  misc_feature: MA Experiment 20001905 PARAMETER Experiment Name: At_Drought_Reproduction_P Parameter: Timepoint (day) Value: 10
  misc_feature: MA Experiment 20001905 PARAMETER Experiment Name: At_Drought_Reproduction_P Parameter: Tissue Value: Rosettes
  misc_feature: MA Experiment 20001905 PARAMETER Experiment Name: At_Drought_Reproduction_P Parameter: Treatment Value: Drought vs. No Drought
  misc_feature: MA Experiment ID: 20001911 Result: Down-regulated in Transcription
  misc_feature: MA Experiment 20001911 PARAMETER Experiment Name: At_Drought_Reproduction_P Parameter: Age (day) Value: 40
  misc_feature: MA Experiment 20001911 PARAMETER Experiment Name: At_Drought_Reproduction_P Parameter: Organism Value: A. thaliana
  misc_feature: MA Experiment 20001911 PARAMETER Experiment Name: At_Drought_Reproduction_P Parameter: Plant Line Value: WS
  misc_feature: MA Experiment 20001911 PARAMETER Experiment Name: At_Drought_Reproduction_P Parameter: Timepoint (day) Value: 10
  misc_feature: MA Experiment 20001911 PARAMETER Experiment Name: At_Drought_Reproduction_P Parameter: Tissue Value: Flowers
  misc_feature: MA Experiment 20001911 PARAMETER Experiment Name: At_Drought_Reproduction_P Parameter: Treatment Value: Drought vs. No Drought
aatcgtttagtattttttgtaaatcgcctctccaccttgcccctggagaaccatcaccaaaaaacagagccaaacaaacaaaaaaaaaatctaaaagcatcaatggcttctcggcggcgagtgcttctgaaggttataattctcggagacagtggggttgggaagacatccttgatgaatcagtttgtgaatcgaaaattcagtaatcagtataaagctaccattggagctgatttcttgaccaaagaggtccaaattgatgacagaatcttcactttgcagatttgggatactgcagggcaagagaggttccaaagtttgggtgttgctttctaccgaggagcggactgttgtgttcttgtgaatgatgtcaatgttatgaaatcctttgaaaatcttaacaactggagggaagagttcctgatccaggctagtccttcagatcctgaaaacttccccttcgttgtcttggggaacaagacagatgttgacggtggaaagagtcgagtggttactgagaagaaagcaaaatcttggtgtgcatccaagggaaacattccttacttcgagacttcggccaaagatggagtcaatgttgatgcagctttcgaatgcatagccaaaaatgctctcaagaatgaacctgaagaagaagtgtaccttccggacaccattgatgtagctggggctcggcaacaaagatcaactgggtgtgaatgctaaccaactttgttgcatggtttattagaaagaacatgtgttttaaggagagacctttttagttctttggcattattgtgatgtgtatcaattagcatacgcacctttgttttggattacagaatcaaaaacgaattttggtcacctgttcattcttaatctcttcagcttgtcgc

SEQ ID NO: 40607 - protein, 240 aa, Arabidopsis thaliana
  peptide (1)..(240): Ceres Seq. ID no. 13488034
  misc_feature (44)..(212): Pfam Name: Ras family Pfam Description: Ras family
  misc_feature (35)..(240): Homolog of NCBI NO: 15230211 NR Description: GTP-binding protein, putative [Arabidopsis
  misc_feature (35)..(240): Homolog of NCBI NO: 34484308 NR Description: putative GTP-binding protein [Cucumis sativus]
  misc_feature (35)..(238): Homolog of NCBI NO: 3914557 NR Description: RAS-RELATED PROTEIN RAB7 (POSSIBLE
  misc_feature (35)..(240): Homolog of NCBI NO: 1370186 NR Description: RAB7C [Lotus japonicus]
  misc_feature (35)..(239): Homolog of NCBI NO: 7438407 NR Description: GTP-binding protein Rab7a - common tobacco
  misc_feature (35)..(240): Homolog of NCBI NO: 1370188 NR Description: RAB7D [Lotus japonicus]
  misc_feature (35)..(240): Homolog of NCBI NO: 3914550 NR Description: RAS-RELATED PROTEIN RAB7
  misc_feature (35)..(240): Homolog of NCBI NO: 7388049 NR Description: Ras-related protein Rab7
  misc_feature (35)..(240): Homolog of NCBI NO: 15218194 NR Description: GTP-binding protein, putative [Arabidopsis
  misc_feature (35)..(240): Homolog of NCBI NO: 15233284 NR Description: Ras family GTP-binding protein [Arabidopsis
NRLVFFVNRLSTLPLENHHQKTEPNKQKKNLKASMASRRRVLLKVIILGDSGVGKTSLMNQFVNRKFSNQYKATIGADFLTKEVQIDDRIFTLQIWDTAGQERFQSLGVAFYRGADCCVLVNDVNVMKSFENLNNWREEFLIQASPSDPENFPFVVLGNKTDVDGGKSRVVTEKKAKSWCASKGNIPYFETSAKDGVNVDAAFECIAKNALKNEPEEEVYLPDTIDVAGARQQRSTGCEC

SEQ ID NO: 40608 - protein, 206 aa, Arabidopsis thaliana
  peptide (1)..(206): Ceres Seq. ID no. 13488035
  misc_feature (10)..(178): Pfam Name: Ras family Pfam Description: Ras family
  misc_feature (1)..(206): Homolog of NCBI NO: 15230211 NR Description: GTP-binding protein, putative [Arabidopsis
  misc_feature (1)..(206): Homolog of NCBI NO: 34484308 NR Description: putative GTP-binding protein [Cucumis sativus]
  misc_feature (1)..(204): Homolog of NCBI NO: 3914557 NR Description: RAS-RELATED PROTEIN RAB7 (POSSIBLE
  misc_feature (1)..(206): Homolog of NCBI NO: 1370186 NR Description: RAB7C [Lotus japonicus]
  misc_feature (1)..(205): Homolog of NCBI NO: 7438407 NR Description: GTP-binding protein Rab7a - common tobacco
  misc_feature (1)..(206): Homolog of NCBI NO: 1370188 NR Description: RAB7D [Lotus japonicus]
  misc_feature (1)..(206): Homolog of NCBI NO: 3914550 NR Description: RAS-RELATED PROTEIN RAB7
  misc_feature (1)..(206): Homolog of NCBI NO: 7388049 NR Description: Ras-related protein Rab7
  misc_feature (1)..(206): Homolog of NCBI NO: 15218194 NR Description: GTP-binding protein, putative [Arabidopsis
  misc_feature (1)..(206): Homolog of NCBI NO: 15233284 NR Description: Ras family GTP-binding protein [Arabidopsis
MASRRRVLLKVIILGDSGVGKTSLMNQFVNRKFSNQYKATIGADFLTKEVQIDDRIFTLQIWDTAGQERFQSLGVAFYRGADCCVLVNDVNVMKSFENLNNWREEFLIQASPSDPENFPFVVLGNKTDVDGGKSRVVTEKKAKSWCASKGNIPYFETSAKDGVNVDAAFECIAKNALKNEPEEEVYLPDTIDVAGARQQRSTGCEC

SEQ ID NO: 40609 - protein, 182 aa, Arabidopsis thaliana
  peptide (1)..(182): Ceres Seq. ID no. 13488036
  misc_feature (1)..(154): Pfam Name: Ras family Pfam Description: Ras family
  misc_feature (1)..(182): Homolog of NCBI NO: 15230211 NR Description: GTP-binding protein, putative [Arabidopsis
  misc_feature (1)..(182): Homolog of NCBI NO: 34484308 NR Description: putative GTP-binding protein [Cucumis sativus]
  misc_feature (1)..(180): Homolog of NCBI NO: 3914557 NR Description: RAS-RELATED PROTEIN RAB7 (POSSIBLE
  misc_feature (1)..(182): Homolog of NCBI NO: 1370186 NR Description: RAB7C [Lotus japonicus]
  misc_feature (1)..(181): Homolog of NCBI NO: 7438407 NR Description: GTP-binding protein Rab7a - common tobacco
  misc_feature (1)..(182): Homolog of NCBI NO: 1370188 NR Description: RAB7D [Lotus japonicus]
  misc_feature (1)..(182): Homolog of NCBI NO: 3914550 NR Description: RAS-RELATED PROTEIN RAB7
  misc_feature (1)..(182): Homolog of NCBI NO: 7388049 NR Description: Ras-related protein Rab7
  misc_feature (1)..(182): Homolog of NCBI NO: 15218194 NR Description: GTP-binding protein, putative [Arabidopsis
  misc_feature (1)..(182): Homolog of NCBI NO: 15233284 NR Description: Ras family GTP-binding protein [Arabidopsis
MNQFVNRKFSNQYKATIGADFLTKEVQIDDRIFTLQIWDTAGQERFQSLGVAFYRGADCCVLVNDVNVMKSFENLNNWREEFLIQASPSDPENFPFVVLGNKTDVDGGKSRVVTEKKAKSWCASKGNIPYFETSAKDGVNVDAAFECIAKNALKNEPEEEVYLPDTIDVAGARQQRSTGCEC

SEQ ID NO: 40610 - DNA, 1218 bp, Arabidopsis thaliana
  misc_feature (1)..(1218): Ceres Seq. ID no. 12328663
  misc_feature: MA Experiment ID: 108461 Result: Up-regulated in Transcription
  misc_feature: MA Experiment 108461 PARAMETER Experiment Name: At_Germinating_Seeds_cDNA_P Parameter: Age (day) Value: 1 vs. 0
  misc_feature: MA Experiment 108461 PARAMETER Experiment Name: At_Germinating_Seeds_cDNA_P Parameter: Tissue Value: Germinating Seeds
  misc_feature: MA Experiment ID: 108462 Result: Up-regulated in Transcription
  misc_feature: MA Experiment 108462 PARAMETER Experiment Name: At_Germinating_Seeds_cDNA_P Parameter: Age (day) Value: 2 vs. 0
  misc_feature: MA Experiment 108462 PARAMETER Experiment Name: At_Germinating_Seeds_cDNA_P Parameter: Tissue Value: Germinating Seeds
  misc_feature: MA Experiment ID: 108463 Result: Up-regulated in Transcription
  misc_feature: MA Experiment 108463 PARAMETER Experiment Name: At_Germinating_Seeds_cDNA_P Parameter: Age (day) Value: 3 vs. 0
  misc_feature: MA Experiment 108463 PARAMETER Experiment Name: At_Germinating_Seeds_cDNA_P Parameter: Tissue Value: Germinating Seeds
  misc_feature: MA Experiment ID: 108464 Result: Up-regulated in Transcription
  misc_feature: MA Experiment 108464 PARAMETER Experiment Name: At_Germinating_Seeds_cDNA_P Parameter: Age (day) Value: 4 vs. 0
  misc_feature: MA Experiment 108464 PARAMETER Experiment Name: At_Germinating_Seeds_cDNA_P Parameter: Tissue Value: Germinating Seeds
  misc_feature: MA Experiment ID: 108585 Result: Down-regulated in Transcription
  misc_feature: MA Experiment 108585 PARAMETER Experiment Name: At_5mM_NaNP_cDNA_P Parameter: Timepoint (hr) Value: 6
  misc_feature: MA Experiment 108585 PARAMETER Experiment Name: At_5mM_NaNP_cDNA_P Parameter: Tissue Value: Aerial
  misc_feature: MA Experiment 108585 PARAMETER Experiment Name: At_5mM_NaNP_cDNA_P Parameter: Treatment Value: null
  misc_feature: MA Experiment ID: 108595 Result: Down-regulated in Transcription
  misc_feature: MA Experiment 108595 PARAMETER Experiment Name: At_Ler-pi_Ovule_cDNA_P Parameter: Plant Line Value: null
  misc_feature: MA Experiment ID: 20000069 Result: Down-regulated in Transcription
  misc_feature: MA Experiment 20000069 PARAMETER Experiment Name: At_100uM_ABA_Mutants_cDNA_P Parameter: Plant Line Value: CS23
  misc_feature: MA Experiment 20000069 PARAMETER Experiment Name: At_100uM_ABA_Mutants_cDNA_P Parameter: Timepoint (hr) Value: 6
  misc_feature: MA Experiment 20000069 PARAMETER Experiment Name: At_100uM_ABA_Mutants_cDNA_P Parameter: Tissue Value: Aerial
  misc_feature: MA Experiment 20000069 PARAMETER Experiment Name: At_100uM_ABA_Mutants_cDNA_P Parameter: Treatment Value: 100uM ABA vs. No Treatment
  misc_feature: MA Experiment ID: 20000070 Result: Down-regulated in Transcription
  misc_feature: MA Experiment 20000070 PARAMETER Experiment Name: At_100uM_ABA_Mutants_cDNA_P Parameter: Plant Line Value: CS24
  misc_feature: MA Experiment 20000070 PARAMETER Experiment Name: At_100uM_ABA_Mutants_cDNA_P Parameter: Timepoint (hr) Value: 6
  misc_feature: MA Experiment 20000070 PARAMETER Experiment Name: At_100uM_ABA_Mutants_cDNA_P Parameter: Tissue Value: Aerial
  misc_feature: MA Experiment 20000070 PARAMETER Experiment Name: At_100uM_ABA_Mutants_cDNA_P Parameter: Treatment Value: 100uM ABA vs. No Treatment
  misc_feature: MA Experiment ID: 20000071 Result: Down-regulated in Transcription
  misc_feature: MA Experiment 20000071 PARAMETER Experiment Name: At_100uM_ABA_Mutants_cDNA_P Parameter: Plant Line Value: CS8104
  misc_feature: MA Experiment 20000071 PARAMETER Experiment Name: At_100uM_ABA_Mutants_cDNA_P Parameter: Timepoint (hr) Value: 6
  misc_feature: MA Experiment 20000071 PARAMETER Experiment Name: At_100uM_ABA_Mutants_cDNA_P Parameter: Tissue Value: Aerial
  misc_feature: MA Experiment 20000071 PARAMETER Experiment Name: At_100uM_ABA_Mutants_cDNA_P Parameter: Treatment Value: 100uM ABA vs. No Treatment
  misc_feature: MA Experiment ID: 20000072 Result: Down-regulated in Transcription
  misc_feature: MA Experiment 20000072 PARAMETER Experiment Name: At_100uM_ABA_Mutants_cDNA_P Parameter: Plant Line Value: CS8105
  misc_feature: MA Experiment 20000072 PARAMETER Experiment Name: At_100uM_ABA_Mutants_cDNA_P Parameter: Timepoint (hr) Value: 6
  misc_feature: MA Experiment 20000072 PARAMETER Experiment Name: At_100uM_ABA_Mutants_cDNA_P Parameter: Tissue Value: Aerial
  misc_feature: MA Experiment 20000072 PARAMETER Experiment Name: At_100uM_ABA_Mutants_cDNA_P Parameter: Treatment Value: 100uM ABA vs. No Treatment
  misc_feature: MA Experiment ID: 20000086 Result: Down-regulated in Transcription
  misc_feature: MA Experiment 20000086 PARAMETER Experiment Name: At_100uM_ABA_Mutants_cDNA_P Parameter: Plant Line Value: CS22
  misc_feature: MA Experiment 20000086 PARAMETER Experiment Name: At_100uM_ABA_Mutants_cDNA_P Parameter: Timepoint (hr) Value: 6
  misc_feature: MA Experiment 20000086 PARAMETER Experiment Name: At_100uM_ABA_Mutants_cDNA_P Parameter: Tissue Value: Aerial
  misc_feature: MA Experiment 20000086 PARAMETER Experiment Name: At_100uM_ABA_Mutants_cDNA_P Parameter: Treatment Value: 100uM ABA vs. No Treatment
  misc_feature: MA Experiment ID: 20000087 Result: Down-regulated in Transcription
  misc_feature: MA Experiment 20000087 PARAMETER Experiment Name: At_100uM_ABA_Mutants_cDNA_P Parameter: Plant Line Value: WS
  misc_feature: MA Experiment 20000087 PARAMETER Experiment Name: At_100uM_ABA_Mutants_cDNA_P Parameter: Timepoint (hr) Value: 6
  misc_feature: MA Experiment 20000087 PARAMETER Experiment Name: At_100uM_ABA_Mutants_cDNA_P Parameter: Tissue Value: Aerial
  misc_feature: MA Experiment 20000087 PARAMETER Experiment Name: At_100uM_ABA_Mutants_cDNA_P Parameter: Treatment Value: 100uM ABA vs. No Treatment
  misc_feature: MA Experiment ID: 20000117 Result: Down-regulated in Transcription
  misc_feature: MA Experiment 20000117 PARAMETER Experiment Name: At_100uM_ABA_Mutants_cDNA_P Parameter: Plant Line Value: Columbia
  misc_feature: MA Experiment 20000117 PARAMETER Experiment Name: At_100uM_ABA_Mutants_cDNA_P Parameter: Timepoint (hr) Value: 6
  misc_feature: MA Experiment 20000117 PARAMETER Experiment Name: At_100uM_ABA_Mutants_cDNA_P Parameter: Tissue Value: Aerial
  misc_feature: MA Experiment 20000117 PARAMETER Experiment Name: At_100uM_ABA_Mutants_cDNA_P Parameter: Treatment Value: 100uM ABA vs. No Treatment
  misc_feature: MA Experiment ID: 20000179 Result: Up-regulated in Transcription
  misc_feature: MA Experiment 20000179 PARAMETER Experiment Name: At_Germinating_Seeds_P Parameter: Age (hr) Value: 6 vs. 0
  misc_feature: MA Experiment 20000179 PARAMETER Experiment Name: At_Germinating_Seeds_P Parameter: Tissue Value: Germinating Seeds
  misc_feature: MA Experiment ID: 20000180 Result: Up-regulated in Transcription
  misc_feature: MA Experiment 20000180 PARAMETER Experiment Name: At_Germinating_Seeds_P Parameter: Age (hr) Value: 24 vs. 0
  misc_feature: MA Experiment 20000180 PARAMETER Experiment Name: At_Germinating_Seeds_P Parameter: Tissue Value: Germinating Seeds
  misc_feature: MA Experiment ID: 20000184 Result: Up-regulated in Transcription
  misc_feature: MA Experiment 20000184 PARAMETER Experiment Name: At_Shoots__P Parameter: Age (day) Value: 7
  misc_feature: MA Experiment 20000184 PARAMETER Experiment Name: At_Shoots__P Parameter: Tissue Value: Shoots vs. Whole Plant
  misc_feature: MA Experiment ID: 20000185 Result: Down-regulated in Transcription
  misc_feature: MA Experiment 20000185 PARAMETER Experiment Name: At_Roots__P Parameter: Age (day) Value: 7 vs. 21
  misc_feature: MA Experiment 20000185 PARAMETER Experiment Name: At_Roots__P Parameter: Organism Value: A. thaliana
  misc_feature: MA Experiment 20000185 PARAMETER Experiment Name: At_Roots__P Parameter: Tissue Value: Roots vs. Whole Plant
  misc_feature: MA Experiment ID: 20000227 Result: Down-regulated in Transcription
  misc_feature: MA Experiment 20000227 PARAMETER Experiment Name: At_Root-Tips-vs-Tops_P Parameter: Tissue Value: Root Tips vs. Root Tops
  misc_feature: MA Experiment ID: 20000235 Result: Up-regulated in Transcription
  misc_feature: MA Experiment 20000235 PARAMETER Experiment Name: At_Siliques_P Parameter: Age (day) Value: 21
  misc_feature: MA Experiment 20000235 PARAMETER Experiment Name: At_Siliques_P Parameter: Organism Value: A. thaliana
  misc_feature: MA Experiment 20000235 PARAMETER Experiment Name: At_Siliques_P Parameter: Plant Line Value: WS
  misc_feature: MA Experiment 20000235 PARAMETER Experiment Name: At_Siliques_P Parameter: Tissue Value: 5-10mm Siliques vs. Whole Plant
  misc_feature: MA Experiment ID: 20000439 Result: Down-regulated in Transcription
  misc_feature: MA Experiment 20000439 PARAMETER Experiment Name: At_Roots__P Parameter: Age (day) Value: 14 vs. 21
  misc_feature: MA Experiment 20000439 PARAMETER Experiment Name: At_Roots__P Parameter: Organism Value: A. thaliana
  misc_feature: MA Experiment 20000439 PARAMETER Experiment Name: At_Roots__P Parameter: Tissue Value: Roots vs. Whole Plant
  misc_feature: MA Experiment ID: 20001248 Result: Down-regulated in Transcription
  misc_feature: MA Experiment 20001248 PARAMETER Experiment Name: At_Far-red-induction_P Parameter: Age (day) Value: 7
  misc_feature: MA Experiment 20001248 PARAMETER Experiment Name: At_Far-red-induction_P Parameter: Light Value: Far-red vs. White
  misc_feature: MA Experiment 20001248 PARAMETER Experiment Name: At_Far-red-induction_P Parameter: Organism Value: A. thaliana
  misc_feature: MA Experiment 20001248 PARAMETER Experiment Name: At_Far-red-induction_P Parameter: Plant Line Value: Columbia
  misc_feature: MA Experiment 20001248 PARAMETER Experiment Name: At_Far-red-induction_P Parameter: Timepoint (hr) Value: 4
  misc_feature: MA Experiment 20001248 PARAMETER Experiment Name: At_Far-red-induction_P Parameter: Tissue Value: Whole Plant
  misc_feature: MA Experiment ID: 20001450 Result: Down-regulated in Transcription
  misc_feature: MA Experiment 20001450 PARAMETER Experiment Name: At_Far-red-induction_P Parameter: Age (day) Value: 7
  misc_feature: MA Experiment 20001450 PARAMETER Experiment Name: At_Far-red-induction_P Parameter: Light Value: Far-red vs. White
  misc_feature: MA Experiment 20001450 PARAMETER Experiment Name: At_Far-red-induction_P Parameter: Organism Value: A. thaliana
  misc_feature: MA Experiment 20001450 PARAMETER Experiment Name: At_Far-red-induction_P Parameter: Plant Line Value: Columbia
  misc_feature: MA Experiment 20001450 PARAMETER Experiment Name: At_Far-red-induction_P Parameter: Timepoint (hr) Value: 8
  misc_feature: MA Experiment 20001450 PARAMETER Experiment Name: At_Far-red-induction_P Parameter: Tissue Value: Whole Plant
  misc_feature: MA Experiment ID: 20001451 Result: Down-regulated in Transcription
  misc_feature: MA Experiment 20001451 PARAMETER Experiment Name: At_Far-red-induction_P Parameter: Age (day) Value: 7
  misc_feature: MA Experiment 20001451 PARAMETER Experiment Name: At_Far-red-induction_P Parameter: Light Value: Far-red vs. White
  misc_feature: MA Experiment 20001451 PARAMETER Experiment Name: At_Far-red-induction_P Parameter: Organism Value: A. thaliana
  misc_feature: MA Experiment 20001451 PARAMETER Experiment Name: At_Far-red-induction_P Parameter: Plant Line Value: Columbia
  misc_feature: MA Experiment 20001451 PARAMETER Experiment Name: At_Far-red-induction_P Parameter: Timepoint (hr) Value: 24
  misc_feature: MA Experiment 20001451 PARAMETER Experiment Name: At_Far-red-induction_P Parameter: Tissue Value: Whole Plant
atcagtttcagcgaaacgatggagcttctctgctcaccaacgtctctttcctcctccttcgctctctcttctgctcttttagtccctcgttcgttctccatgccagggacaaggagattcatggttctgtgtagttcccagaaggaaagtcagatgacagtgtcagtaactggagcaactggattcatagggagacgattggttcagagacttcgtgctgataaccacgctatccgggtcttaacacgctctaaatccaaagctgagcaaatatttcctgccaaggacttcccaggtattgtgattgcagaagaatcggagtggaagaactgtgtacaaggctctactgctgttgtgaacttggcaggactgcctattagtacaaggtggtctcccgagatcaagaaagagattaagggcagccggatccgtgtcacctccaaagttgttgacttaatcaataattcaccagcagaagctaggcctaccgttctagttagcgccacggctgttggttactatggtactagtgagacaggagtattcgacgaaaatagtccatcagggaaggactatcttgcagaggtttgcagagaatgggaaggaactgcattgaaagcaaataaggatgttagagtggcacttatccgcattggtgttgttcttggcaaagacggtggagctttggccatgatgataccctttttccaaatgtttgctggaggacctctgggttccggacaacaatggttctcttggattcacgtggatgacttggtgaacttaatttacgaggccctcactaatccatcttataaaggagttattaatgggactgcgccgaatccggttaggcttggggaaatgtgccagcagctaggcagtgttcttagccgaccatcgtggctaccagttcctgactttgcactcaaagctttgctcggagaaggtgccactgtagttctggagggacagaaggtattacctgtaagagccaaagagcttggttttgaattcaagtataaatacgtgaaggatgcactcagagccattatgcaataaggtgacacacataagcatctttgtaaaattggttttgatcacagaaaatcaagatatccttttcttttcgtttctatatctttctttttgagtaaaactcgagatatgtatttatggtaaaaagtgttttcggtgatatctcagaaaccagagatc

SEQ ID NO: 40611 - protein, 353 aa, Arabidopsis thaliana
  peptide (1)..(353): Ceres Seq. ID no. 12328664
  misc_feature (54)..(297): Pfam Name: NAD dependent epimerase/dehydratase family Pfam Description: NAD dependent epimerase/dehydratase family
  misc_feature (52)..(351): Homolog of NCBI NO: 33239592 NR Description: Predicted nucleoside-diphosphate sugar epimerase
  misc_feature (52)..(353): Homolog of NCBI NO: 22298008 NR Description: ORF_ID:tll0465~putative sugar nucleotide
  misc_feature (52)..(352): Homolog of NCBI NO: 7388457 NR Description: Hypothetical protein slr1223
  misc_feature (48)..(352): Homolog of NCBI NO: 16330099 NR Description: cell division inhibitor [Synechocystis sp. PCC
  misc_feature (52)..(352): Homolog of NCBI NO: 25019701 NR Description: unknown [Synechococcus sp. PCC 7942]
  misc_feature (52)..(352): Homolog of NCBI NO: 23043197 NR Description: hypothetical protein [Trichodesmium erythraeum
  misc_feature (52)..(353): Homolog of NCBI NO: 17229882 NR Description: cell division inhibitor [Nostoc sp. PCC 7120]
  misc_feature (52)..(352): Homolog of NCBI NO: 23130096 NR Description: hypothetical protein [Nostoc punctiforme]
  misc_feature (73)..(353): Homolog of NCBI NO: 25326146 NR Description: hypothetical protein At2g21280 [imported] -
  misc_feature (7)..(353): Homolog of NCBI NO: 18399648 NR Description: expressed protein
ISFSETMELLCSPTSLSSSFALSSALLVPRSFSMPGTRRFMVLCSSQKESQMTVSVTGATGFIGRRLVQRLRADNHAIRVLTRSKSKAEQIFPAKDFPGIVIAEESEWKNCVQGSTAVVNLAGLPISTRWSPEIKKEIKGSRIRVTSKVVDLINNSPAEARPTVLVSATAVGYYGTSETGVFDENSPSGKDYLAEVCREWEGTALKANKDVRVALIRIGVVLGKDGGALAMMIPFFQMFAGGPLGSGQQWFSWIHVDDLVNLIYEALTNPSYKGVINGTAPNPVRLGEMCQQLGSVLSRPSWLPVPDFALKALLGEGATVVLEGQKVLPVRAKELGFEFKYKYVKDALRAIMQ

SEQ ID NO: 40612 - protein, 347 aa, Arabidopsis thaliana
  peptide (1)..(347): Ceres Seq. ID no. 12328665
  misc_feature (48)..(291): Pfam Name: NAD dependent epimerase/dehydratase family Pfam Description: NAD dependent epimerase/dehydratase family
  misc_feature (46)..(345): Homolog of NCBI NO: 33239592 NR Description: Predicted nucleoside-diphosphate sugar epimerase
  misc_feature (46)..(347): Homolog of NCBI NO: 22298008 NR Description: ORF_ID:tll0465~putative sugar nucleotide
  misc_feature (46)..(346): Homolog of NCBI NO: 7388457 NR Description: Hypothetical protein slr1223
  misc_feature (42)..(346): Homolog of NCBI NO: 16330099 NR Description: cell division inhibitor [Synechocystis sp. PCC
  misc_feature (46)..(346): Homolog of NCBI NO: 25019701 NR Description: unknown [Synechococcus sp. PCC 7942]
  misc_feature (46)..(346): Homolog of NCBI NO: 23043197 NR Description: hypothetical protein [Trichodesmium erythraeum
  misc_feature (46)..(347): Homolog of NCBI NO: 17229882 NR Description: cell division inhibitor [Nostoc sp. PCC 7120]
  misc_feature (46)..(346): Homolog of NCBI NO: 23130096 NR Description: hypothetical protein [Nostoc punctiforme]
  misc_feature (67)..(347): Homolog of NCBI NO: 25326146 NR Description: hypothetical protein At2g21280 [imported] -
  misc_feature (1)..(347): Homolog of NCBI NO: 18399648 NR Description: expressed protein
MELLCSPTSLSSSFALSSALLVPRSFSMPGTRRFMVLCSSQKESQMTVSVTGATGFIGRRLVQRLRADNHAIRVLTRSKSKAEQIFPAKDFPGIVIAEESEWKNCVQGSTAVVNLAGLPISTRWSPEIKKEIKGSRIRVTSKVVDLINNSPAEARPTVLVSATAVGYYGTSETGVFDENSPSGKDYLAEVCREWEGTALKANKDVRVALIRIGVVLGKDGGALAMMIPFFQMFAGGPLGSGQQWFSWIHVDDLVNLIYEALTNPSYKGVINGTAPNPVRLGEMCQQLGSVLSRPSWLPVPDFALKALLGEGATVVLEGQKVLPVRAKELGFEFKYKYVKDALRAIMQ

SEQ ID NO: 40613 - protein, 320 aa, Arabidopsis thaliana
  peptide (1)..(320): Ceres Seq. ID no. 12328666
  misc_feature (21)..(264): Pfam Name: NAD dependent epimerase/dehydratase family Pfam Description: NAD dependent epimerase/dehydratase family
  misc_feature (19)..(318): Homolog of NCBI NO: 33239592 NR Description: Predicted nucleoside-diphosphate sugar epimerase
  misc_feature (19)..(320): Homolog of NCBI NO: 22298008 NR Description: ORF_ID:tll0465~putative sugar nucleotide
  misc_feature (19)..(319): Homolog of NCBI NO: 7388457 NR Description: Hypothetical protein slr1223
  misc_feature (15)..(319): Homolog of NCBI NO: 16330099 NR Description: cell division inhibitor [Synechocystis sp. PCC
  misc_feature (19)..(319): Homolog of NCBI NO: 25019701 NR Description: unknown [Synechococcus sp. PCC 7942]
  misc_feature (19)..(319): Homolog of NCBI NO: 23043197 NR Description: hypothetical protein [Trichodesmium erythraeum
  misc_feature (19)..(320): Homolog of NCBI NO: 17229882 NR Description: cell division inhibitor [Nostoc sp. PCC 7120]
  misc_feature (19)..(319): Homolog of NCBI NO: 23130096 NR Description: hypothetical protein [Nostoc punctiforme]
  misc_feature (40)..(320): Homolog of NCBI NO: 25326146 NR Description: hypothetical protein At2g21280 [imported] -
  misc_feature (1)..(320): Homolog of NCBI NO: 18399648 NR Description: expressed protein
MPGTRRFMVLCSSQKESQMTVSVTGATGFIGRRLVQRLRADNHAIRVLTRSKSKAEQIFPAKDFPGIVIAEESEWKNCVQGSTAVVNLAGLPISTRWSPEIKKEIKGSRIRVTSKVVDLINNSPAEARPTVLVSATAVGYYGTSETGVFDENSPSGKDYLAEVCREWEGTALKANKDVRVALIRIGVVLGKDGGALAMMIPFFQMFAGGPLGSGQQWFSWIHVDDLVNLIYEALTNPSYKGVINGTAPNPVRLGEMCQQLGSVLSRPSWLPVPDFALKALLGEGATVVLEGQKVLPVRAKELGFEFKYKYVKDALRAIMQ

SEQ ID NO: 40614 - DNA, 2082 bp, Arabidopsis thaliana
  misc_feature (1)..(2082): Ceres Seq. ID no. 12370850
  misc_feature: MA Experiment ID: 108461 Result: Down-regulated in Transcription
  misc_feature: MA Experiment 108461 PARAMETER Experiment Name: At_Germinating_Seeds_cDNA_P Parameter: Age (day) Value: 1 vs. 0
  misc_feature: MA Experiment 108461 PARAMETER Experiment Name: At_Germinating_Seeds_cDNA_P Parameter: Tissue Value: Germinating Seeds
  misc_feature: MA Experiment ID: 108462 Result: Down-regulated in Transcription
  misc_feature: MA Experiment 108462 PARAMETER Experiment Name: At_Germinating_Seeds_cDNA_P Parameter: Age (day) Value: 2 vs. 0
  misc_feature: MA Experiment 108462 PARAMETER Experiment Name: At_Germinating_Seeds_cDNA_P Parameter: Tissue Value: Germinating Seeds
  misc_feature: MA Experiment ID: 108463 Result: Down-regulated in Transcription
  misc_feature: MA Experiment 108463 PARAMETER Experiment Name: At_Germinating_Seeds_cDNA_P Parameter: Age (day) Value: 3 vs. 0
  misc_feature: MA Experiment 108463 PARAMETER Experiment Name: At_Germinating_Seeds_cDNA_P Parameter: Tissue Value: Germinating Seeds
  misc_feature: MA Experiment ID: 108464 Result: Down-regulated in Transcription
  misc_feature: MA Experiment 108464 PARAMETER Experiment Name: At_Germinating_Seeds_cDNA_P Parameter: Age (day) Value: 4 vs. 0
  misc_feature: MA Experiment 108464 PARAMETER Experiment Name: At_Germinating_Seeds_cDNA_P Parameter: Tissue Value: Germinating Seeds
  misc_feature: MA Experiment ID: 108573 Result: Up-regulated in Transcription
  misc_feature: MA Experiment 108573 PARAMETER Experiment Name: At_Drought_cDNA_P Parameter: Timepoint (hr) Value: 6
  misc_feature: MA Experiment 108573 PARAMETER Experiment Name: At_Drought_cDNA_P Parameter: Tissue Value: Aerial
  misc_feature: MA Experiment 108573 PARAMETER Experiment Name: At_Drought_cDNA_P Parameter: Treatment Value: Drought vs. No Drought
  misc_feature: MA Experiment ID: 20000087 Result: Down-regulated in Transcription
  misc_feature: MA Experiment 20000087 PARAMETER Experiment Name: At_100uM_ABA_Mutants_cDNA_P Parameter: Plant Line Value: WS
  misc_feature: MA Experiment 20000087 PARAMETER Experiment Name: At_100uM_ABA_Mutants_cDNA_P Parameter: Timepoint (hr) Value: 6
  misc_feature: MA Experiment 20000087 PARAMETER Experiment Name: At_100uM_ABA_Mutants_cDNA_P Parameter: Tissue Value: Aerial
  misc_feature: MA Experiment 20000087 PARAMETER Experiment Name: At_100uM_ABA_Mutants_cDNA_P Parameter: Treatment Value: 100uM ABA vs. No Treatment
  misc_feature: MA Experiment ID: 20000180 Result: Down-regulated in Transcription
  misc_feature: MA Experiment 20000180 PARAMETER Experiment Name: At_Germinating_Seeds_P Parameter: Age (hr) Value: 24 vs. 0
  misc_feature: MA Experiment 20000180 PARAMETER Experiment Name: At_Germinating_Seeds_P Parameter: Tissue Value: Germinating Seeds
  misc_feature: MA Experiment ID: 20001451 Result: Down-regulated in Transcription
  misc_feature: MA Experiment 20001451 PARAMETER Experiment Name: At_Far-red-induction_P Parameter: Age (day) Value: 7
  misc_feature: MA Experiment 20001451 PARAMETER Experiment Name: At_Far-red-induction_P Parameter: Light Value: Far-red vs. White
  misc_feature: MA Experiment 20001451 PARAMETER Experiment Name: At_Far-red-induction_P Parameter: Organism Value: A. thaliana
  misc_feature: MA Experiment 20001451 PARAMETER Experiment Name: At_Far-red-induction_P Parameter: Plant Line Value: Columbia
  misc_feature: MA Experiment 20001451 PARAMETER Experiment Name: At_Far-red-induction_P Parameter: Timepoint (hr) Value: 24
  misc_feature: MA Experiment 20001451 PARAMETER Experiment Name: At_Far-red-induction_P Parameter: Tissue Value: Whole Plant
  misc_feature: MA Experiment ID: 20001557 Result: Up-regulated in Transcription
  misc_feature: MA Experiment 20001557 PARAMETER Experiment Name: At_Drought_Soil_Dry_P Parameter: Age (day) Value: 27
  misc_feature: MA Experiment 20001557 PARAMETER Experiment Name: At_Drought_Soil_Dry_P Parameter: Organism Value: A. thaliana
  misc_feature: MA Experiment 20001557 PARAMETER Experiment Name: At_Drought_Soil_Dry_P Parameter: Plant Line Value: WS
  misc_feature: MA Experiment 20001557 PARAMETER Experiment Name: At_Drought_Soil_Dry_P Parameter: Post Timepoint (hr) Value: 3
  misc_feature: MA Experiment 20001557 PARAMETER Experiment Name: At_Drought_Soil_Dry_P Parameter: Post-Treatment Value: Re-Water vs. No Drought
  misc_feature: MA Experiment 20001557 PARAMETER Experiment Name: At_Drought_Soil_Dry_P Parameter: Timepoint (day) Value: 13
  misc_feature: MA Experiment 20001557 PARAMETER Experiment Name: At_Drought_Soil_Dry_P Parameter: Treatment Value: Drought vs. No Drought
accggaatctctctctttctccgccgaacttcttcgaatcaagtttccgtttatcactctaatattgttaaagtttccactgataccaccgctctagtcatggctgaagctgaagatcagcaaaatttcgttgcacacaatggagatcaggtaccagatcaagggtcagatgagttgcataatgggttaccgtaccaggttcatgatgagacccttgttcaccaaccatacgaggttgaagatccgattcttgaacctcagcagtacgaggtaccagatccgactcttgaaccacagcagtacgaggtaccagatcagactcttgaacctcagcagtacgaggttgatgatcagttagagtatcatcaataccagttgcaggaccaggctaatgaagatgtccaagatcattcgcaagatgacctacaatatcagccacaaaatcaggagcagtttcagttacaagacgaggctcatgatcaggctcagtatcaggcgcaaggtgatgtacaagatcacaatggtgatgaagtgcaagataaagtagaagatgaggaaggaattcctgagcatcttgagtctctacagaaatcagagcctgaagaagatgcgacagttggaggtgaggagaagaggtggccgggatggcccggagagacggtattccgtatgctggttcctgcacagaaagtgggtagcatcattggtcgcaaaggtgatgtcattaagaaaatagttgaggagacaagggctcgaataaagattctcgatggtcctccaggcacaacagaaagagctgttatggtttctggtaaagaagagcccgaatcatctctaccaccttctatggatggccttcttagagtccacatgcggatagttgatggtttggatggtgaagcttctcaagcccctccgccttcaaaggtgtcaacaagattactagtcccagcatctcaggctggaagtttgattggaaaacagggaggaacagttaaagctattcaagaagcatccgcttgtatagtcagagttcttggatcagaggatttacctgtttttgctcttcaagacgatagggttgttgaagttgtgggggaaccaacaagtgttcatagagccttggagctgattgcgtcacatctcagaaagttcttggttgatcgtagcatcatcccattctttgaaaatcagatgcaaaagccaactcgccaaatggaccatatgccaccaccacaccagtcatggggtcctcctcaaggtcatgccccaagtgttggtggaggaggctatggtcacaacccacctccatatatgcaaccacctcctagacatgatagttactatcctcctcctgagatgcgtcaacctccaatggagaaacagcctcatcaaggtatatctgcatatggtagagagcctcctatgaatgtgcacgtatcatcagccccaccaatggtcgctcagcaagttacgcagcaaatgcagattccactgtcttatgctgatgctgtaattgggacgtcgggttcaaacataagctacactagacgtcttagtggagcaacagtaactattcaggagaccaggggagtacctggtgaaatgactgttgaggttagcggaactggctcacaagtccaaactgccgtgcagcttattcagaacttcatggctgaagctggagcgccggcaccagcacagcctcaaactgtagcaccagagcagcaaggctataacccatacgcaacacacggctcagtttacgcagcggctccaacaaacccgcctggaggatacgctacggattacagctcaggctacggttactgatgaaagattttaagtttctttagaatgttttactagtagttgcaagcaagagtggaaacgctagatgcctaatcgagtatatgttgttattagcgagcactctgtgtactgacaatcaattattatatcacttgttttgagacttcttcatttgtgtactattcataacattgatctaaccggaaatcttctttatattcaaaaaaagtaaaaaaaaaaaaaaatgtatggttcattatcgtgtccttc

SEQ ID NO: 40615 - protein, 610 aa, Arabidopsis thaliana
  peptide (1)..(610): Ceres Seq. ID no. 12370851
  misc_feature (313)..(366): Pfam Name: KH domain Pfam Description: KH domain
  misc_feature (189)..(447): Homolog of NCBI NO: 18921324 NR Description: putative nucleic acid binding protein [Oryza
  misc_feature (196)..(451): Homolog of NCBI NO: 11357886 NR Description: hypothetical protein F8M21.160 - Arabidopsis
  misc_feature (196)..(451): Homolog of NCBI NO: 30685269 NR Description: KH domain protein [Arabidopsis thaliana]
  misc_feature (219)..(558): Homolog of NCBI NO: 15217969 NR Description: KH domain protein; protein id: At1g51580.1
  misc_feature (350)..(499): Homolog of NCBI NO: 37534332 NR Description: unknown protein [Oryza sativa (japonica
  misc_feature (434)..(566): Homolog of NCBI NO: 37534332 NR Description: unknown protein [Oryza sativa (japonica
  misc_feature (183)..(348): Homolog of NCBI NO: 37534332 NR Description: unknown protein [Oryza sativa (japonica
  misc_feature (183)..(581): Homolog of NCBI NO: 15236094 NR Description: KH domain protein
  misc_feature (185)..(609): Homolog of NCBI NO: 37536904 NR Description: putative nucleic acid binding protein
  misc_feature (127)..(610): Homolog of NCBI NO: 16924113 NR Description: putative RNA binding protein [Oryza sativa]
TGISLFLRRTSSNQVSVYHSNIVKVSTDTTALVMAEAEDQQNFVAHNGDQVPDQGSDELHNGLPYQVHDETLVHQPYEVEDPILEPQQYEVPDPTLEPQQYEVPDQTLEPQQYEVDDQLEYHQYQLQDQANEDVQDHSQDDLQYQPQNQEQFQLQDEAHDQAQYQAQGDVQDHNGDEVQDKVEDEEGIPEHLESLQKSEPEEDATVGGEEKRWPGWPGETVFRMLVPAQKVGSIIGRKGDVIKKIVEETRARIKILDGPPGTTERAVMVSGKEEPESSLPPSMDGLLRVHMRIVDGLDGEASQAPPPSKVSTRLLVPASQAGSLIGKQGGTVKAIQEASACIVRVLGSEDLPVFALQDDRVVEVVGEPTSVHRALELIASHLRKFLVDRSIIPFFENQMQKPTRQMDHMPPPHQSWGPPQGHAPSVGGGGYGHNPPPYMQPPPRHDSYYPPPEMRQPPMEKQPHQGISAYGREPPMNVHVSSAPPMVAQQVTQQMQIPLSYADAVIGTSGSNISYTRRLSGATVTIQETRGVPGEMTVEVSGTGSQVQTAVQLIQNFMAEAGAPAPAQPQTVAPEQQGYNPYATHGSVYAAAPTNPPGGYATDYSSGYGY

SEQ ID NO: 40616 - protein, 577 aa, Arabidopsis thaliana
  peptide (1)..(577): Ceres Seq. ID no. 12370852
  misc_feature (280)..(333): Pfam Name: KH domain Pfam Description: KH domain
  misc_feature (156)..(414): Homolog of NCBI NO: 18921324 NR Description: putative nucleic acid binding protein [Oryza
  misc_feature (163)..(418): Homolog of NCBI NO: 11357886 NR Description: hypothetical protein F8M21.160 - Arabidopsis
  misc_feature (163)..(418): Homolog of NCBI NO: 30685269 NR Description: KH domain protein [Arabidopsis thaliana]
  misc_feature (186)..(525): Homolog of NCBI NO: 15217969 NR Description: KH domain protein; protein id: At1g51580.1
  misc_feature (317)..(466): Homolog of NCBI NO: 37534332 NR Description: unknown protein [Oryza sativa (japonica
  misc_feature (401)..(533): Homolog of NCBI NO: 37534332 NR Description: unknown protein [Oryza sativa (japonica
  misc_feature (150)..(315): Homolog of NCBI NO: 37534332 NR Description: unknown protein [Oryza sativa (japonica
  misc_feature (150)..(548): Homolog of NCBI NO: 15236094 NR Description: KH domain protein
  misc_feature (152)..(576): Homolog of NCBI NO: 37536904 NR Description: putative nucleic acid binding protein
  misc_feature (94)..(577): Homolog of NCBI NO: 16924113 NR Description: putative RNA binding protein [Oryza sativa]
MAEAEDQQNFVAHNGDQVPDQGSDELHNGLPYQVHDETLVHQPYEVEDPILEPQQYEVPDPTLEPQQYEVPDQTLEPQQYEVDDQLEYHQYQLQDQANEDVQDHSQDDLQYQPQNQEQFQLQDEAHDQAQYQAQGDVQDHNGDEVQDKVEDEEGIPEHLESLQKSEPEEDATVGGEEKRWPGWPGETVFRMLVPAQKVGSIIGRKGDVIKKIVEETRARIKILDGPPGTTERAVMVSGKEEPESSLPPSMDGLLRVHMRIVDGLDGEASQAPPPSKVSTRLLVPASQAGSLIGKQGGTVKAIQEASACIVRVLGSEDLPVFALQDDRVVEVVGEPTSVHRALELIASHLRKFLVDRSIIPFFENQMQKPTRQMDHMPPPHQSWGPPQGHAPSVGGGGYGHNPPPYMQPPPRHDSYYPPPEMRQPPMEKQPHQGISAYGREPPMNVHVSSAPPMVAQQVTQQMQIPLSYADAVIGTSGSNISYTRRLSGATVTIQETRGVPGEMTVEVSGTGSQVQTAVQLIQNFMAEAGAPAPAQPQTVAPEQQGYNPYATHGSVYAAAPTNPPGGYATDYSSGYGY

SEQ ID NO: 40617 - protein, 387 aa, Arabidopsis thaliana
  peptide (1)..(387): Ceres Seq. ID no. 12370853
  misc_feature (90)..(143): Pfam Name: KH domain Pfam Description: KH domain
  misc_feature (1)..(224): Homolog of NCBI NO: 18921324 NR Description: putative nucleic acid binding protein [Oryza
  misc_feature (1)..(228): Homolog of NCBI NO: 11357886 NR Description: hypothetical protein F8M21.160 - Arabidopsis
  misc_feature (1)..(228): Homolog of NCBI NO: 30685269 NR Description: KH domain protein [Arabidopsis thaliana]
  misc_feature (1)..(335): Homolog of NCBI NO: 15217969 NR Description: KH domain protein; protein id: At1g51580.1
  misc_feature (127)..(276): Homolog of NCBI NO: 37534332 NR Description: unknown protein [Oryza sativa (japonica
  misc_feature (211)..(343): Homolog of NCBI NO: 37534332 NR Description: unknown protein [Oryza sativa (japonica
  misc_feature (1)..(125): Homolog of NCBI NO: 37534332 NR Description: unknown protein [Oryza sativa (japonica
  misc_feature (1)..(358): Homolog of NCBI NO: 15236094 NR Description: KH domain protein
  misc_feature (1)..(386): Homolog of NCBI NO: 37536904 NR Description: putative nucleic acid binding protein
  misc_feature (1)..(387): Homolog of NCBI NO: 16924113 NR Description: putative RNA binding protein [Oryza sativa]
MLVPAQKVGSIIGRKGDVIKKIVEETRARIKILDGPPGTTERAVMVSGKEEPESSLPPSMDGLLRVHMRIVDGLDGEASQAPPPSKVSTRLLVPASQAGSLIGKQGGTVKAIQEASACIVRVLGSEDLPVFALQDDRVVEVVGEPTSVHRALELIASHLRKFLVDRSIIPFFENQMQKPTRQMDHMPPPHQSWGPPQGHAPSVGGGGYGHNPPPYMQPPPRHDSYYPPPEMRQPPMEKQPHQGISAYGREPPMNVHVSSAPPMVAQQVTQQMQIPLSYADAVIGTSGSNISYTRRLSGATVTIQETRGVPGEMTVEVSGTGSQVQTAVQLIQNFMAEAGAPAPAQPQTVAPEQQGYNPYATHGSVYAAAPTNPPGGYATDYSSGYGY

SEQ ID NO: 40618 - DNA, 613 bp, Arabidopsis thaliana
  misc_feature (1)..(613): Ceres Seq. ID no. 12738839
  misc_feature: MA Experiment ID: 20000113 Result: Down-regulated in Transcription
  misc_feature: MA Experiment 20000113 PARAMETER Experiment Name: At_42deg_Heat_cDNA_P Parameter: Temperature (deg C) Value: 42 vs. 22
  misc_feature: MA Experiment 20000113 PARAMETER Experiment Name: At_42deg_Heat_cDNA_P Parameter: Timepoint (hr) Value: 8
  misc_feature: MA Experiment 20000113 PARAMETER Experiment Name: At_42deg_Heat_cDNA_P Parameter: Tissue Value: Aerial
caatgttccaaaggctgttgttctctgtcaagtggagaaatccaaggaagacatgctgaatcagctatacagctctatcagcgcaattggtaatgagaggattgaatcattgattcaagaggatcagaacgtcaaaagacgaagagaccgttaccagaaacagtcctctcttctctcaaagctcactaggcagcttagcattcacgataaccgagcagctgctgcttcaagctggtctgacaatagtggcactgaaagcagcccgagaaccaatggagggtcatcaggagaggactggatgaatgcgtttaacgcagctgctagtggacctgactcattgaagagatatggatctggcggccatagccgtcgttacagtgatccagcacagaatggtgaggattcttctggatctggtggcagctcccgtcgcaccacaccaaaccggctcccaccagctccgccacagtctggatcatcttacaggtattagaaacctgtttggtttccaggattgttattgaacgaaccataaaacacattcttttctttctttttctgccctttcggattggtccccctgtttctgggactatttttcttatgtctcact

SEQ ID NO: 40619 - protein, 163 aa, Arabidopsis thaliana
  peptide (1)..(163): Ceres Seq. ID no. 12738840
  misc_feature (1)..(61): Pfam Name: Dynamin GTPase effector domain Pfam Description: Dynamin GTPase effector domain
  misc_feature (1)..(132): Homolog of NCBI NO: 38175440 NR Description: putative dynamin homolog [Oryza sativa (japonica
  misc_feature (1)..(74): Homolog of NCBI NO: 4803836 NR Description: a dynamin-like protein ADL3 [Arabidopsis thaliana]
  misc_feature (1)..(163): Homolog of NCBI NO: 6625788 NR Description: dynamin homolog [Astragalus sinicus]
  misc_feature (1)..(163): Homolog of NCBI NO: 25402594 NR Description: protein F14N23.17 [imported] - Arabidopsis
  misc_feature (1)..(163): Homolog of NCBI NO: 15218486 NR Description: putative phragmoplastin
  misc_feature (1)..(163): Homolog of NCBI NO: 6651399 NR Description: dynamin-like protein 6 [Arabidopsis thaliana]
  misc_feature (1)..(163): Homolog of NCBI NO: 25404867 NR Description: protein T30E16.17 [imported] - Arabidopsis
  misc_feature (1)..(163): Homolog of NCBI NO: 15218837 NR Description: dynamin-like protein
  misc_feature (1)..(163): Homolog of NCBI NO: 8778745 NR Description: T30E16.17 [Arabidopsis thaliana]
  misc_feature (1)..(163): Homolog of NCBI NO: 6526977 NR Description: dynamin-like protein [Arabidopsis thaliana]
NVPKAVVLCQVEKSKEDMLNQLYSSISAIGNERIESLIQEDQNVKRRRDRYQKQSSLLSKLTRQLSIHDNRAAAASSWSDNSGTESSPRTNGGSSGEDWMNAFNAAASGPDSLKRYGSGGHSRRYSDPAQNGEDSSGSGGSSRRTTPNRLPPAPPQSGSSYRY

SEQ ID NO: 40620 - protein, 146 aa, Arabidopsis thaliana
  peptide (1)..(146): Ceres Seq. ID no. 12738841
  misc_feature (1)..(115): Homolog of NCBI NO: 38175440 NR Description: putative dynamin homolog [Oryza sativa (japonica
  misc_feature (1)..(57): Homolog of NCBI NO: 4803836 NR Description: a dynamin-like protein ADL3 [Arabidopsis thaliana]
  misc_feature (1)..(146): Homolog of NCBI NO: 6625788 NR Description: dynamin homolog [Astragalus sinicus]
  misc_feature (1)..(146): Homolog of NCBI NO: 25402594 NR Description: protein F14N23.17 [imported] - Arabidopsis
  misc_feature (1)..(146): Homolog of NCBI NO: 15218486 NR Description: putative phragmoplastin
  misc_feature (1)..(146): Homolog of NCBI NO: 6651399 NR Description: dynamin-like protein 6 [Arabidopsis thaliana]
  misc_feature (1)..(146): Homolog of NCBI NO: 8778745 NR Description: T30E16.17 [Arabidopsis thaliana]
  misc_feature (1)..(146): Homolog of NCBI NO: 15218837 NR Description: dynamin-like protein
  misc_feature (1)..(146): Homolog of NCBI NO: 25404867 NR Description: protein T30E16.17 [imported] - Arabidopsis
  misc_feature (1)..(146): Homolog of NCBI NO: 6526977 NR Description: dynamin-like protein [Arabidopsis thaliana]
MLNQLYSSISAIGNERIESLIQEDQNVKRRRDRYQKQSSLLSKLTRQLSIHDNRAAAASSWSDNSGTESSPRTNGGSSGEDWMNAFNAAASGPDSLKRYGSGGHSRRYSDPAQNGEDSSGSGGSSRRTTPNRLPPAPPQSGSSYRY

SEQ ID NO: 40621 - DNA, 1815 bp, Arabidopsis thaliana
  misc_feature (1)..(1815): Ceres Seq. ID no. 13622016
  misc_feature: MA Experiment ID: 20000180 Result: Down-regulated in Transcription
  misc_feature: MA Experiment 20000180 PARAMETER Experiment Name: At_Germinating_Seeds_P Parameter: Age (hr) Value: 24 vs. 0
  misc_feature: MA Experiment 20000180 PARAMETER Experiment Name: At_Germinating_Seeds_P Parameter: Tissue Value: Germinating Seeds
  misc_feature: MA Experiment ID: 20000227 Result: Up-regulated in Transcription
  misc_feature: MA Experiment 20000227 PARAMETER Experiment Name: At_Root-Tips-vs-Tops_P Parameter: Tissue Value: Root Tips vs. Root Tops
  misc_feature: MA Experiment ID: 20000234 Result: Up-regulated in Transcription
  misc_feature: MA Experiment 20000234 PARAMETER Experiment Name: At_Siliques_P Parameter: Age (day) Value: 21
  misc_feature: MA Experiment 20000234 PARAMETER Experiment Name: At_Siliques_P Parameter: Organism Value: A. thaliana
  misc_feature: MA Experiment 20000234 PARAMETER Experiment Name: At_Siliques_P Parameter: Plant Line Value: WS
  misc_feature: MA Experiment 20000234 PARAMETER Experiment Name: At_Siliques_P Parameter: Tissue Value: Less Than 5mm Siliques vs. Whole Plant
  misc_feature: MA Experiment ID: 20000495 Result: Up-regulated in Transcription
  misc_feature: MA Experiment 20000495 PARAMETER Experiment Name: At_Guard_Cells_P Parameter: Harvest Date Value: 8/2/2002
  misc_feature: MA Experiment 20000495 PARAMETER Experiment Name: At_Guard_Cells_P Parameter: Organism Value: A. thaliana
  misc_feature: MA Experiment 20000495 PARAMETER Experiment Name: At_Guard_Cells_P Parameter: Tissue Value: Guard Cells vs. Leaves
  misc_feature: MA Experiment ID: 20001458 Result: Up-regulated in Transcription
  misc_feature: MA Experiment 20001458 PARAMETER Experiment Name: At_50mM_NH4NO3_L-to-H_P Parameter: Age (day) Value: Undefined
  misc_feature: MA Experiment 20001458 PARAMETER Experiment Name: At_50mM_NH4NO3_L-to-H_P Parameter: Organism Value: Undefined
  misc_feature: MA Experiment 20001458 PARAMETER Experiment Name: At_50mM_NH4NO3_L-to-H_P Parameter: Plant Line Value: Undefined
  misc_feature: MA Experiment 20001458 PARAMETER Experiment Name: At_50mM_NH4NO3_L-to-H_P Parameter: Timepoint (hr) Value: 2
  misc_feature: MA Experiment 20001458 PARAMETER Experiment Name: At_50mM_NH4NO3_L-to-H_P Parameter: Tissue Value: Siliques
  misc_feature: MA Experiment 20001458 PARAMETER Experiment Name: At_50mM_NH4NO3_L-to-H_P Parameter: Treatment Value: 50mM NH4NO3 vs. 100mM Manitol
  misc_feature: MA Experiment ID: 20001557 Result: Up-regulated in Transcription
  misc_feature: MA Experiment 20001557 PARAMETER Experiment Name: At_Drought_Soil_Dry_P Parameter: Age (day) Value: 27
  misc_feature: MA Experiment 20001557 PARAMETER Experiment Name: At_Drought_Soil_Dry_P Parameter: Organism Value: A. thaliana
  misc_feature: MA Experiment 20001557 PARAMETER Experiment Name: At_Drought_Soil_Dry_P Parameter: Plant Line Value: WS
  misc_feature: MA Experiment 20001557 PARAMETER Experiment Name: At_Drought_Soil_Dry_P Parameter: Post Timepoint (hr) Value: 3
  misc_feature: MA Experiment 20001557 PARAMETER Experiment Name: At_Drought_Soil_Dry_P Parameter: Post-Treatment Value: Re-Water vs. No Drought
  misc_feature: MA Experiment 20001557 PARAMETER Experiment Name: At_Drought_Soil_Dry_P Parameter: Timepoint (day) Value: 13
  misc_feature: MA Experiment 20001557 PARAMETER Experiment Name: At_Drought_Soil_Dry_P Parameter: Treatment Value: Drought vs. No Drought
  misc_feature: MA Experiment ID: 20001560 Result: Up-regulated in Transcription
  misc_feature: MA Experiment 20001560 PARAMETER Experiment Name: At_Drought_Soil_Dry_P Parameter: Age (day) Value: 28
  misc_feature: MA Experiment 20001560 PARAMETER Experiment Name: At_Drought_Soil_Dry_P Parameter: Organism Value: A. thaliana
  misc_feature: MA Experiment 20001560 PARAMETER Experiment Name: At_Drought_Soil_Dry_P Parameter: Plant Line Value: WS
  misc_feature: MA Experiment 20001560 PARAMETER Experiment Name: At_Drought_Soil_Dry_P Parameter: Post Timepoint (hr) Value: None
  misc_feature: MA Experiment 20001560 PARAMETER Experiment Name: At_Drought_Soil_Dry_P Parameter: Post-Treatment Value: None
  misc_feature: MA Experiment 20001560 PARAMETER Experiment Name: At_Drought_Soil_Dry_P Parameter: Timepoint (day) Value: 14
  misc_feature: MA Experiment 20001560 PARAMETER Experiment Name: At_Drought_Soil_Dry_P Parameter: Treatment Value: Drought vs. No Drought
gtttactctctctctctctcacattttctcattctctcctacaacaagtttccgccgctaagccactcactacgcagccatggcaaatcctgaccatgtttcagatgtgctacataatttgtcgattgatccaacaaccaaggctttagctcctgattctgaaacaaagttgcagggggcttatggcggaaacggtaatgacttcttgctcaatgatgagttagtggaggctaccaaaattggtaaacctagtcttttgtctaaagatggaggtgtgaccaaagacaagggatccaaccttaagaaactcgggtaccaaagtgcagcttataacgcaaagggttcatatgggaagggtgcctatgcttatgggtactatcccccagcatatcagtacccaagacatggttacactgggagctatgcttcagggaaaaccaatcttcagtatcagtacctgactcagcagggaagatcagctggtaatggtcaatcttatggaggatacatggacaacatttactccaattatgggatgtgtggaccttacacgaatggctatgggtatggctcttacggttatgactcatggaaatacatgcccaattggtatgcggttaacaatacctacaagccaagaaacgggtatcatggatatggcaaagaaaacattgaggggttaaatgagatgaatagaggtccacgagctaagggtttcaacagccaagatggttccaaggtgatggctgtgtctttgaaggagcagagagtgactgagactgagaaactcagtgaagatgtgtctcttttagatcccaaggactacaataagatagatttccctgagacctacacagaagcaaagttttatgtaatcaaatcgtacagtgaagatgatattcataaaagtatcaaatacagtgtttggtccagcactcctaatggtaacaagaagctggatgcctcatataacgaggcaaaacagaagtcagatggctgtcccgtgtttctacttttctctgtaaacactagtggacaatttgttggtttagccgagatggtaggccctgttgatttcaataagactgttgaatactggcaacaggacaaatggattggttgcttccctgttaagtggcatttcgttaaagatatccctaatagctccttgaggcatataactctggagaacaatgagaacaagccggttactaatagcagagacacacaggaagtaaagctcgagcaaggcattaaagtcatcaagattttcaaggaccacgcaagcaagacatgcatcctcgatgattttgagttctatgagaatcgtcaaaagattatccaagaaaggaaaagcaaacacctgcagatcaaaaaacagacattggtggccaatgcagacaaaggtgtaatgtcaaaaattaatcttgtgaaacctcaagagtctactacagcctcagaagatgcagcagcactaggagttgcggctgaagtgactaaagaatcgaaagtggtgaaagagaccgagttacctgtggagaaaaatgctgttgctactgcctgctgaaccaacctttggttttaagtgggaactgagtgggctgttttaggctatttagagcgtttctctagttttgtttccattcctgaatttgcagacttttttttttttttttttggaaccgagttgagagggtagtggcttagtagatgaagttttggcatgagcattcatcatcttgcagttattctctatccctttagtaatggtccaacatatgaggatatgggtaaaagattggtattgaatcagct

SEQ ID NO: 40622 - protein, 495 aa, Arabidopsis thaliana
  peptide (1)..(495): Ceres Seq. ID no. 15219327
  misc_feature (311)..(401): Pfam Name: YT521-B-like family Pfam Description: YT521-B-like family
  misc_feature (311)..(401): Pfam Name: YT521-B-like family Pfam Description: YT521-B-like family
  misc_feature (78)..(439): Homolog of NCBI NO: 25372787 NR Description: Rubisco subunit binding-protein beta subunit
  misc_feature (93)..(434): Homolog of NCBI NO: 6223640 NR Description: unknown protein [Arabidopsis thaliana]
  misc_feature (93)..(436): Homolog of NCBI NO: 30678991 NR Description: expressed protein [Arabidopsis thaliana]
  misc_feature (93)..(436): Homolog of NCBI NO: 18396717 NR Description: expressed protein [Arabidopsis thaliana]
  misc_feature (119)..(495): Homolog of NCBI NO: 30682679 NR Description: expressed protein [Arabidopsis thaliana]
  misc_feature (78)..(439): Homolog of NCBI NO: 25372787 NR Description: Rubisco subunit binding-protein beta subunit
  misc_feature (93)..(436): Homolog of NCBI NO: 30678991 NR Description: expressed protein [Arabidopsis thaliana]
  misc_feature (119)..(495): Homolog of NCBI NO: 30682679 NR Description: expressed protein [Arabidopsis thaliana]
  misc_feature (1)..(495): Homolog of NCBI NO: 30697464 NR Description: expressed protein [Arabidopsis thaliana]
  misc_feature (1)..(495): Homolog of NCBI NO: 15912287 NR Description: AT5g61020/maf19_20 [Arabidopsis thaliana]
  misc_feature (1)..(495): Homolog of NCBI NO: 30697466 NR Description: expressed protein [Arabidopsis thaliana]
  misc_feature (119)..(495): Homolog of NCBI NO: 25084169 NR Description: Unknown protein [Arabidopsis thaliana]
  misc_feature (119)..(495): Homolog of NCBI NO: 30682683 NR Description: expressed protein [Arabidopsis thaliana]
  misc_feature (93)..(436): Homolog of NCBI NO: 18396717 NR Description: expressed protein [Arabidopsis thaliana]
  misc_feature (93)..(434): Homolog of NCBI NO: 6223640 NR Description: unknown protein [Arabidopsis thaliana]
  misc_feature (119)..(495): Homolog of NCBI NO: 30682683 NR Description: expressed protein [Arabidopsis thaliana]
  misc_feature (119)..(495): Homolog of NCBI NO: 25084169 NR Description: Unknown protein [Arabidopsis thaliana]
  misc_feature (1)..(495): Homolog of NCBI NO: 30697466 NR Description: expressed protein [Arabidopsis thaliana]
  misc_feature (1)..(495): Homolog of NCBI NO: 15912287 NR Description: AT5g61020/maf19_20 [Arabidopsis thaliana]
  misc_feature (1)..(495): Homolog of NCBI NO: 30697464 NR Description: expressed protein [Arabidopsis thaliana]
MANPDHVSDVLHNLSIDPTTKALAPDSETKLQGAYGGNGNDFLLNDELVEATKIGKPSLLSKDGGVTKDKGSNLKKLGYQSAAYNAKGSYGKGAYAYGYYPPAYQYPRHGYTGSYASGKTNLQYQYLTQQGRSAGNGQSYGGYMDNIYSNYGMCGPYTNGYGYGSYGYDSWKYMPNWYAVNNTYKPRNGYHGYGKENIEGLNEMNRGPRAKGFNSQDGSKVMAVSLKEQRVTETEKLSEDVSLLDPKDYNKIDFPETYTEAKFYVIKSYSEDDIHKSIKYSVWSSTPNGNKKLDASYNEAKQKSDGCPVFLLFSVNTSGQFVGLAEMVGPVDFNKTVEYWQQDKWIGCFPVKWHFVKDIPNSSLRHITLENNENKPVTNSRDTQEVKLEQGIKVIKIFKDHASKTCILDDFEFYENRQKIIQERKSKHLQIKKQTLVANADKGVMSKINLVKPQESTTASEDAAALGVAAEVTKESKVVKETELPVEKNAVATAC

SEQ ID NO: 40623 - protein, 352 aa, Arabidopsis thaliana
  peptide (1)..(352): Ceres Seq. ID no. 15219328
  misc_feature (168)..(258): Pfam Name: YT521-B-like family Pfam Description: YT521-B-like family
  misc_feature (168)..(258): Pfam Name: YT521-B-like family Pfam Description: YT521-B-like family
  misc_feature (1)..(296): Homolog of NCBI NO: 25372787 NR Description: Rubisco subunit binding-protein beta subunit
  misc_feature (1)..(291): Homolog of NCBI NO: 6223640 NR Description: unknown protein [Arabidopsis thaliana]
  misc_feature (1)..(293): Homolog of NCBI NO: 30678991 NR Description: expressed protein [Arabidopsis thaliana]
  misc_feature (1)..(293): Homolog of NCBI NO: 18396717 NR Description: expressed protein [Arabidopsis thaliana]
  misc_feature (1)..(352): Homolog of NCBI NO: 30682683 NR Description: expressed protein [Arabidopsis thaliana]
  misc_feature (1)..(296): Homolog of NCBI NO: 25372787 NR Description: Rubisco subunit binding-protein beta subunit
  misc_feature (1)..(293): Homolog of NCBI NO: 30678991 NR Description: expressed protein [Arabidopsis thaliana]
  misc_feature (1)..(352): Homolog of NCBI NO: 30682683 NR Description: expressed protein [Arabidopsis thaliana]
  misc_feature (1)..(352): Homolog of NCBI NO: 30697464 NR Description: expressed protein [Arabidopsis thaliana]
  misc_feature (1)..(352): Homolog of NCBI NO: 15912287 NR Description: AT5g61020/maf19_20 [Arabidopsis thaliana]
  misc_feature (1)..(352): Homolog of NCBI NO: 30697466 NR Description: expressed protein [Arabidopsis thaliana]
  misc_feature (1)..(352): Homolog of NCBI NO: 25084169 NR Description: Unknown protein [Arabidopsis thaliana]
  misc_feature (1)..(352): Homolog of NCBI NO: 30682679 NR Description: expressed protein [Arabidopsis thaliana]
  misc_feature (1)..(293): Homolog of NCBI NO: 18396717 NR Description: expressed protein [Arabidopsis thaliana]
  misc_feature (1)..(291): Homolog of NCBI NO: 6223640 NR Description: unknown protein [Arabidopsis thaliana]
  misc_feature (1)..(352): Homolog of NCBI NO: 30682679 NR Description: expressed protein [Arabidopsis thaliana]
  misc_feature (1)..(352): Homolog of NCBI NO: 25084169 NR Description: Unknown protein [Arabidopsis thaliana]
  misc_feature (1)..(352): Homolog of NCBI NO: 30697466 NR Description: expressed protein [Arabidopsis thaliana]
  misc_feature (1)..(352): Homolog of NCBI NO: 15912287 NR Description: AT5g61020/maf19_20 [Arabidopsis thaliana]
  misc_feature (1)..(352): Homolog of NCBI NO: 30697464 NR Description: expressed protein [Arabidopsis thaliana]
MDNIYSNYGMCGPYTNGYGYGSYGYDSWKYMPNWYAVNNTYKPRNGYHGYGKENIEGLNEMNRGPRAKGFNSQDGSKVMAVSLKEQRVTETEKLSEDVSLLDPKDYNKIDFPETYTEAKFYVIKSYSEDDIHKSIKYSVWSSTPNGNKKLDASYNEAKQKSDGCPVFLLFSVNTSGQFVGLAEMVGPVDFNKTVEYWQQDKWIGCFPVKWHFVKDIPNSSLRHITLENNENKPVTNSRDTQEVKLEQGIKVIKIFKDHASKTCILDDFEFYENRQKIIQERKSKHLQIKKQTLVANADKGVMSKINLVKPQESTTASEDAAALGVAAEVTKESKVVKETELPVEKNAVATAC

SEQ ID NO: 40624 - protein, 343 aa, Arabidopsis thaliana
  peptide (1)..(343): Ceres Seq. ID no. 15219329
  misc_feature (159)..(249): Pfam Name: YT521-B-like family Pfam Description: YT521-B-like family
  misc_feature (159)..(249): Pfam Name: YT521-B-like family Pfam Description: YT521-B-like family
  misc_feature (1)..(287): Homolog of NCBI NO: 25372787 NR Description: Rubisco subunit binding-protein beta subunit
  misc_feature (1)..(282): Homolog of NCBI NO: 6223640 NR Description: unknown protein [Arabidopsis thaliana]
  misc_feature (1)..(284): Homolog of NCBI NO: 30678991 NR Description: expressed protein [Arabidopsis thaliana]
  misc_feature (1)..(284): Homolog of NCBI NO: 18396717 NR Description: expressed protein [Arabidopsis thaliana]
  misc_feature (1)..(343): Homolog of NCBI NO: 30682683 NR Description: expressed protein [Arabidopsis thaliana]
  misc_feature (1)..(287): Homolog of NCBI NO: 25372787 NR Description: Rubisco subunit binding-protein beta subunit
  misc_feature (1)..(284): Homolog of NCBI NO: 30678991 NR Description: expressed protein [Arabidopsis thaliana]
  misc_feature (1)..(343): Homolog of NCBI NO: 30682683 NR Description: expressed protein [Arabidopsis thaliana]
  misc_feature (1)..(343): Homolog of NCBI NO: 30697464 NR Description: expressed protein [Arabidopsis thaliana]
  misc_feature (1)..(343): Homolog of NCBI NO: 15912287 NR Description: AT5g61020/maf19_20 [Arabidopsis thaliana]
  misc_feature (1)..(343): Homolog of NCBI NO: 30697466 NR Description: expressed protein [Arabidopsis thaliana]
  misc_feature (1)..(343): Homolog of NCBI NO: 25084169 NR Description: Unknown protein [Arabidopsis thaliana]
  misc_feature (1)..(343): Homolog of NCBI NO: 30682679 NR Description: expressed protein [Arabidopsis thaliana]
  misc_feature (1)..(284): Homolog of NCBI NO: 18396717 NR Description: expressed protein [Arabidopsis thaliana]
  misc_feature (1)..(282): Homolog of NCBI NO: 6223640 NR Description: unknown protein [Arabidopsis thaliana]
  misc_feature (1)..(343): Homolog of NCBI NO: 30682679 NR Description: expressed protein [Arabidopsis thaliana]
  misc_feature (1)..(343): Homolog of NCBI NO: 25084169 NR Description: Unknown protein [Arabidopsis thaliana]
  misc_feature (1)..(343): Homolog of NCBI NO: 30697466 NR Description: expressed protein [Arabidopsis thaliana]
  misc_feature (1)..(343): Homolog of NCBI NO: 15912287 NR Description: AT5g61020/maf19_20 [Arabidopsis thaliana]
  misc_feature (1)..(343): Homolog of NCBI NO: 30697464 NR Description: expressed protein [Arabidopsis thaliana]
MCGPYTNGYGYGSYGYDSWKYMPNWYAVNNTYKPRNGYHGYGKENIEGLNEMNRGPRAKGFNSQDGSKVMAVSLKEQRVTETEKLSEDVSLLDPKDYNKIDFPETYTEAKFYVIKSYSEDDIHKSIKYSVWSSTPNGNKKLDASYNEAKQKSDGCPVFLLFSVNTSGQFVGLAEMVGPVDFNKTVEYWQQDKWIGCFPVKWHFVKDIPNSSLRHITLENNENKPVTNSRDTQEVKLEQGIKVIKIFKDHASKTCILDDFEFYENRQKIIQERKSKHLQIKKQTLVANADKGVMSKINLVKPQESTTASEDAAALGVAAEVTKESKVVKETELPVEKNAVATAC

SEQ ID NO: 40625 - DNA, 1187 bp, Arabidopsis thaliana
  misc_feature (1)..(1187): Ceres Seq. ID no. 12738589
  misc_feature: MA Experiment ID: 108473 Result: Down-regulated in Transcription
  misc_feature: MA Experiment 108473 PARAMETER Experiment Name: At_Drought_Flowers_cDNA_P Parameter: Timepoint (hr) Value: 7 d
  misc_feature: MA Experiment 108473 PARAMETER Experiment Name: At_Drought_Flowers_cDNA_P Parameter: Tissue Value: Flower
  misc_feature: MA Experiment 108473 PARAMETER Experiment Name: At_Drought_Flowers_cDNA_P Parameter: Treatment Value: Drought vs. No Drought
  misc_feature: MA Experiment ID: 108572 Result: Up-regulated in Transcription
  misc_feature: MA Experiment 108572 PARAMETER Experiment Name: At_Drought_cDNA_P Parameter: Timepoint (hr) Value: 1
  misc_feature: MA Experiment 108572 PARAMETER Experiment Name: At_Drought_cDNA_P Parameter: Tissue Value: Aerial
  misc_feature: MA Experiment 108572 PARAMETER Experiment Name: At_Drought_cDNA_P Parameter: Treatment Value: Drought vs. No Drought
  misc_feature: MA Experiment ID: 108576 Result: Down-regulated in Transcription
  misc_feature: MA Experiment 108576 PARAMETER Experiment Name: At_42deg_Heat_cDNA_P Parameter: Temperature (deg C) Value: 42 vs. 22
  misc_feature: MA Experiment 108576 PARAMETER Experiment Name: At_42deg_Heat_cDNA_P Parameter: Timepoint (hr) Value: 1
  misc_feature: MA Experiment 108576 PARAMETER Experiment Name: At_42deg_Heat_cDNA_P Parameter: Tissue Value: Aerial
  misc_feature: MA Experiment ID: 108577 Result: Down-regulated in Transcription
  misc_feature: MA Experiment 108577 PARAMETER Experiment Name: At_42deg_Heat_cDNA_P Parameter: Temperature (deg C) Value: 42 vs. 22
  misc_feature: MA Experiment 108577 PARAMETER Experiment Name: At_42deg_Heat_cDNA_P Parameter: Timepoint (hr) Value: 6
  misc_feature: MA Experiment 108577 PARAMETER Experiment Name: At_42deg_Heat_cDNA_P Parameter: Tissue Value: Aerial
  misc_feature: MA Experiment ID: 108594 Result: Down-regulated in Transcription
  misc_feature: MA Experiment 108594 PARAMETER Experiment Name: At_Ler-rhl_Root_cDNA_P Parameter: Plant Line Value: null
  misc_feature: MA Experiment ID: 108595 Result: Down-regulated in Transcription
  misc_feature: MA Experiment 108595 PARAMETER Experiment Name: At_Ler-pi_Ovule_cDNA_P Parameter: Plant Line Value: null
  misc_feature: MA Experiment ID: 108607 Result: Up-regulated in Transcription
  misc_feature: MA Experiment 108607 PARAMETER Experiment Name: At_100uM_ABA_cDNA_P Parameter: Timepoint (hr) Value: 4
  misc_feature: MA Experiment 108607 PARAMETER Experiment Name: At_100uM_ABA_cDNA_P Parameter: Tissue Value: Aerial
  misc_feature: MA Experiment 108607 PARAMETER Experiment Name: At_100uM_ABA_cDNA_P Parameter: Treatment Value: 100uM ABA vs. No Treatment
  misc_feature: MA Experiment ID: 20000090 Result: Down-regulated in Transcription
  misc_feature: MA Experiment ID: 20000111 Result: Down-regulated in Transcription
  misc_feature: MA Experiment 20000111 PARAMETER Experiment Name: At_42deg_Heat_cDNA_P Parameter: Temperature (deg C) Value: 42 vs. 22
  misc_feature: MA Experiment 20000111 PARAMETER Experiment Name: At_42deg_Heat_cDNA_P Parameter: Timepoint (hr) Value: 6
  misc_feature: MA Experiment 20000111 PARAMETER Experiment Name: At_42deg_Heat_cDNA_P Parameter: Tissue Value: Aerial
  misc_feature: MA Experiment ID: 20000112 Result: Down-regulated in Transcription
  misc_feature: MA Experiment 20000112 PARAMETER Experiment Name: At_42deg_Heat_cDNA_P Parameter: Temperature (deg C) Value: 42 vs. 22
  misc_feature: MA Experiment 20000112 PARAMETER Experiment Name: At_42deg_Heat_cDNA_P Parameter: Timepoint (hr) Value: 2
  misc_feature: MA Experiment 20000112 PARAMETER Experiment Name: At_42deg_Heat_cDNA_P Parameter: Tissue Value: Aerial
  misc_feature: MA Experiment ID: 20000113 Result: Down-regulated in Transcription
  misc_feature: MA Experiment 20000113 PARAMETER Experiment Name: At_42deg_Heat_cDNA_P Parameter: Temperature (deg C) Value: 42 vs. 22
  misc_feature: MA Experiment 20000113 PARAMETER Experiment Name: At_42deg_Heat_cDNA_P Parameter: Timepoint (hr) Value: 8
  misc_feature: MA Experiment 20000113 PARAMETER Experiment Name: At_42deg_Heat_cDNA_P Parameter: Tissue Value: Aerial
  misc_feature: MA Experiment ID: 20000117 Result: Down-regulated in Transcription
  misc_feature: MA Experiment 20000117 PARAMETER Experiment Name: At_100uM_ABA_Mutants_cDNA_P Parameter: Plant Line Value: Columbia
  misc_feature: MA Experiment 20000117 PARAMETER Experiment Name: At_100uM_ABA_Mutants_cDNA_P Parameter: Timepoint (hr) Value: 6
  misc_feature: MA Experiment 20000117 PARAMETER Experiment Name: At_100uM_ABA_Mutants_cDNA_P Parameter: Tissue Value: Aerial
  misc_feature: MA Experiment 20000117 PARAMETER Experiment Name: At_100uM_ABA_Mutants_cDNA_P Parameter: Treatment Value: 100uM ABA vs. No Treatment
  misc_feature: MA Experiment ID: 20000234 Result: Up-regulated in Transcription
  misc_feature: MA Experiment 20000234 PARAMETER Experiment Name: At_Siliques_P Parameter: Age (day) Value: 21
  misc_feature: MA Experiment 20000234 PARAMETER Experiment Name: At_Siliques_P Parameter: Organism Value: A. thaliana
  misc_feature: MA Experiment 20000234 PARAMETER Experiment Name: At_Siliques_P Parameter: Plant Line Value: WS
  misc_feature: MA Experiment 20000234 PARAMETER Experiment Name: At_Siliques_P Parameter: Tissue Value: Less Than 5mm Siliques vs. Whole Plant
  misc_feature: MA Experiment ID: 20000235 Result: Up-regulated in Transcription
  misc_feature: MA Experiment 20000235 PARAMETER Experiment Name: At_Siliques_P Parameter: Age (day) Value: 21
  misc_feature: MA Experiment 20000235 PARAMETER Experiment Name: At_Siliques_P Parameter: Organism Value: A. thaliana
  misc_feature: MA Experiment 20000235 PARAMETER Experiment Name: At_Siliques_P Parameter: Plant Line Value: WS
  misc_feature: MA Experiment 20000235 PARAMETER Experiment Name: At_Siliques_P Parameter: Tissue Value: 5-10mm Siliques vs. Whole Plant
  misc_feature: MA Experiment ID: 20000265 Result: Up-regulated in Transcription
  misc_feature: MA Experiment 20000265 PARAMETER Experiment Name: At_Open_Flower_P Parameter: Age (day) Value: 21
  misc_feature: MA Experiment 20000265 PARAMETER Experiment Name: At_Open_Flower_P Parameter: Plant Line Value: WS
  misc_feature: MA Experiment 20000265 PARAMETER Experiment Name: At_Open_Flower_P Parameter: Tissue Value: Closed Flower vs. Whole Plant
  misc_feature: MA Experiment ID: 20000286 Result: Up-regulated in Transcription
  misc_feature: MA Experiment 20000286 PARAMETER Experiment Name: At_Open_Flower_P Parameter: Age (day) Value: 21
  misc_feature: MA Experiment 20000286 PARAMETER Experiment Name: At_Open_Flower_P Parameter: Plant Line Value: WS
  misc_feature: MA Experiment 20000286 PARAMETER Experiment Name: At_Open_Flower_P Parameter: Tissue Value: Half Open vs. Whole Plant
  misc_feature: MA Experiment ID: 20000495 Result: Down-regulated in Transcription
  misc_feature: MA Experiment 20000495 PARAMETER Experiment Name: At_Guard_Cells_P Parameter: Harvest Date Value: 8/2/2002
  misc_feature: MA Experiment 20000495 PARAMETER Experiment Name: At_Guard_Cells_P Parameter: Organism Value: A. thaliana
  misc_feature: MA Experiment 20000495 PARAMETER Experiment Name: At_Guard_Cells_P Parameter: Tissue Value: Guard Cells vs. Leaves
  misc_feature: MA Experiment ID: 20000794 Result: Down-regulated in Transcription
  misc_feature: MA Experiment 20000794 PARAMETER Experiment Name: At_Petals_P Parameter: Age (day) Value: 23-25 days
  misc_feature: MA Experiment 20000794 PARAMETER Experiment Name: At_Petals_P Parameter: Plant Line Value: WS
  misc_feature: MA Experiment 20000794 PARAMETER Experiment Name: At_Petals_P Parameter: Tissue Value: Petals vs. Whole plant
  misc_feature: MA Experiment ID: 20001248 Result: Down-regulated in Transcription
  misc_feature: MA Experiment 20001248 PARAMETER Experiment Name: At_Far-red-induction_P Parameter: Age (day) Value: 7
  misc_feature: MA Experiment 20001248 PARAMETER Experiment Name: At_Far-red-induction_P Parameter: Light Value: Far-red vs. White
  misc_feature: MA Experiment 20001248 PARAMETER Experiment Name: At_Far-red-induction_P Parameter: Organism Value: A. thaliana
  misc_feature: MA Experiment 20001248 PARAMETER Experiment Name: At_Far-red-induction_P Parameter: Plant Line Value: Columbia
  misc_feature: MA Experiment 20001248 PARAMETER Experiment Name: At_Far-red-induction_P Parameter: Timepoint (hr) Value: 4
  misc_feature: MA Experiment 20001248 PARAMETER Experiment Name: At_Far-red-induction_P Parameter: Tissue Value: Whole Plant
  misc_feature: MA Experiment ID: 20001450 Result: Down-regulated in Transcription
  misc_feature: MA Experiment 20001450 PARAMETER Experiment Name: At_Far-red-induction_P Parameter: Age (day) Value: 7
  misc_feature: MA Experiment 20001450 PARAMETER Experiment Name: At_Far-red-induction_P Parameter: Light Value: Far-red vs. White
  misc_feature: MA Experiment 20001450 PARAMETER Experiment Name: At_Far-red-induction_P Parameter: Organism Value: A. thaliana
  misc_feature: MA Experiment 20001450 PARAMETER Experiment Name: At_Far-red-induction_P Parameter: Plant Line Value: Columbia
  misc_feature: MA Experiment 20001450 PARAMETER Experiment Name: At_Far-red-induction_P Parameter: Timepoint (hr) Value: 8
  misc_feature: MA Experiment 20001450 PARAMETER Experiment Name: At_Far-red-induction_P Parameter: Tissue Value: Whole Plant
  misc_feature: MA Experiment ID: 20001451 Result: Down-regulated in Transcription
  misc_feature: MA Experiment 20001451 PARAMETER Experiment Name: At_Far-red-induction_P Parameter: Age (day) Value: 7
  misc_feature: MA Experiment 20001451 PARAMETER Experiment Name: At_Far-red-induction_P Parameter: Light Value: Far-red vs. White
  misc_feature: MA Experiment 20001451 PARAMETER Experiment Name: At_Far-red-induction_P Parameter: Organism Value: A. thaliana
  misc_feature: MA Experiment 20001451 PARAMETER Experiment Name: At_Far-red-induction_P Parameter: Plant Line Value: Columbia
  misc_feature: MA Experiment 20001451 PARAMETER Experiment Name: At_Far-red-induction_P Parameter: Timepoint (hr) Value: 24
  misc_feature: MA Experiment 20001451 PARAMETER Experiment Name: At_Far-red-induction_P Parameter: Tissue Value: Whole Plant
  misc_feature: MA Experiment ID: 20001557 Result: Up-regulated in Transcription
  misc_feature: MA Experiment 20001557 PARAMETER Experiment Name: At_Drought_Soil_Dry_P Parameter: Age (day) Value: 27
  misc_feature: MA Experiment 20001557 PARAMETER Experiment Name: At_Drought_Soil_Dry_P Parameter: Organism Value: A. thaliana
  misc_feature: MA Experiment 20001557 PARAMETER Experiment Name: At_Drought_Soil_Dry_P Parameter: Plant Line Value: WS
  misc_feature: MA Experiment 20001557 PARAMETER Experiment Name: At_Drought_Soil_Dry_P Parameter: Post Timepoint (hr) Value: 3
  misc_feature: MA Experiment 20001557 PARAMETER Experiment Name: At_Drought_Soil_Dry_P Parameter: Post-Treatment Value: Re-Water vs. No Drought
  misc_feature: MA Experiment 20001557 PARAMETER Experiment Name: At_Drought_Soil_Dry_P Parameter: Timepoint (day) Value: 13
  misc_feature: MA Experiment 20001557 PARAMETER Experiment Name: At_Drought_Soil_Dry_P Parameter: Treatment Value: Drought vs. No Drought
  misc_feature: MA Experiment ID: 20001560 Result: Up-regulated in Transcription
  misc_feature: MA Experiment 20001560 PARAMETER Experiment Name: At_Drought_Soil_Dry_P Parameter: Age (day) Value: 28
  misc_feature: MA Experiment 20001560 PARAMETER Experiment Name: At_Drought_Soil_Dry_P Parameter: Organism Value: A. thaliana
  misc_feature: MA Experiment 20001560 PARAMETER Experiment Name: At_Drought_Soil_Dry_P Parameter: Plant Line Value: WS
  misc_feature: MA Experiment 20001560 PARAMETER Experiment Name: At_Drought_Soil_Dry_P Parameter: Post Timepoint (hr) Value: None
  misc_feature: MA Experiment 20001560 PARAMETER Experiment Name: At_Drought_Soil_Dry_P Parameter: Post-Treatment Value: None
  misc_feature: MA Experiment 20001560 PARAMETER Experiment Name: At_Drought_Soil_Dry_P Parameter: Timepoint (day) Value: 14
  misc_feature: MA Experiment 20001560 PARAMETER Experiment Name: At_Drought_Soil_Dry_P Parameter: Treatment Value: Drought vs. No Drought
  misc_feature: MA Experiment ID: 20001911 Result: Down-regulated in Transcription
  misc_feature: MA Experiment 20001911 PARAMETER Experiment Name: At_Drought_Reproduction_P Parameter: Age (day) Value: 40
  misc_feature: MA Experiment 20001911 PARAMETER Experiment Name: At_Drought_Reproduction_P Parameter: Organism Value: A. thaliana
  misc_feature: MA Experiment 20001911 PARAMETER Experiment Name: At_Drought_Reproduction_P Parameter: Plant Line Value: WS
  misc_feature: MA Experiment 20001911 PARAMETER Experiment Name: At_Drought_Reproduction_P Parameter: Timepoint (day) Value: 10
  misc_feature: MA Experiment 20001911 PARAMETER Experiment Name: At_Drought_Reproduction_P Parameter: Tissue Value: Flowers
  misc_feature: MA Experiment 20001911 PARAMETER Experiment Name: At_Drought_Reproduction_P Parameter: Treatment Value: Drought vs. No Drought
tccacgagtttacgacaaactatatgccggtataatgcaaaaaatatcagctagtggcttgatacgcaagaaactgtttgattttgcttataactacaaattgggaaatatgagaaaaggattctctcaagaagaagcttctcctcgtctagacagacttatgttcgataagataaaagaagcattaggaggaagagctcatatgttgttatcaggagcagcgcctctacctcgtcatgtagaggagttcttgagaatcattcctgcctctaatctctctcaaggttatggattgactgagagttgtgggggaagcttcacgaccttagccggagtattttctatggtggggacagtgggtgtgccaatgcccacggtggaggcaaggctagtgtccgtaccagagatgggttacgacgccttttccgctgacgtgccgagaggagagatttgtcttagaggaaattcaatgttttctggttaccataaaagacaagatctaactgatcaagtcctaatcgatggatggttccacacaggagatattggagaatggcaagaagatggatcaatgaagatcatcgataggaagaagaacatcttcaagttgtctcaaggtgaatatgttgctgttgaaaacctcgaaaacacttactcaagatgtcccctcattgctcagatatgggtctatggcaacagcttcgagtcatttttggtaggtgtggttgtacctgatagaaaagctattgaagattgggctaaactcaattaccaatctcccaatgatttcgaatctctatgtcaaaatctcaaagctcaaaaatacttcttggatgagcttaactctaccgcaaagcaatatcaacttaaaggatttgaaatgttaaaagctattcatttagaaccaaacccttttgatattgaaagagatcttattactccaactttcaagctgaaaaggccacagctcctccaacattacaagggcatagttgatcaactttattcagaagcaaagaggtccatggcatagataattagataccgatcggctattcattttctgatgctatttgggtttgtatgatagtatgttacaaaattgtgttcggatcctctcatcatgtgattcttgttacactaaatttatagtttggaaactatatatatactattaagcaacgttt

SEQ ID NO: 40626 - protein, 343 aa, Arabidopsis thaliana
  peptide (1)..(343): Ceres Seq. ID no. 12738590
  misc_feature (1)..(229): Pfam Name: AMP-binding enzyme Pfam Description: AMP-binding enzyme
  misc_feature (12)..(334): Homolog of NCBI NO: 7437841 NR Description: probable long-chain-fatty-acid-CoA ligase (EC
  misc_feature (1)..(339): Homolog of NCBI NO: 34898260 NR Description: similar to long-chain-fatty-acid--CoA ligase 1
  misc_feature (1)..(343): Homolog of NCBI NO: 15236634 NR Description: acyl-CoA synthetase - like protein
  misc_feature (1)..(343): Homolog of NCBI NO: 7437845 NR Description: probable long-chain-fatty-acid-CoA ligase (EC
  misc_feature (1)..(343): Homolog of NCBI NO: 20805871 NR Description: long chain acyl-CoA synthetase 5 [Arabidopsis
  misc_feature (1)..(343): Homolog of NCBI NO: 15237023 NR Description: putative acyl-CoA synthetase
  misc_feature (1)..(337): Homolog of NCBI NO: 15217631 NR Description: acyl-CoA synthetase, putative
  misc_feature (1)..(339): Homolog of NCBI NO: 34911190 NR Description: putative acyl-CoA synthetase
  misc_feature (1)..(343): Homolog of NCBI NO: 7437844 NR Description: probable long-chain-fatty-acid-CoA ligase (EC
  misc_feature (1)..(343): Homolog of NCBI NO: 22330132 NR Description: acyl CoA synthetase, putative
PRVYDKLYAGIMQKISASGLIRKKLFDFAYNYKLGNMRKGFSQEEASPRLDRLMFDKIKEALGGRAHMLLSGAAPLPRHVEEFLRIIPASNLSQGYGLTESCGGSFTTLAGVFSMVGTVGVPMPTVEARLVSVPEMGYDAFSADVPRGEICLRGNSMFSGYHKRQDLTDQVLIDGWFHTGDIGEWQEDGSMKIIDRKKNIFKLSQGEYVAVENLENTYSRCPLIAQIWVYGNSFESFLVGVVVPDRKAIEDWAKLNYQSPNDFESLCQNLKAQKYFLDELNSTAKQYQLKGFEMLKAIHLEPNPFDIERDLITPTFKLKRPQLLQHYKGIVDQLYSEAKRSMA

SEQ ID NO: 40627 - protein, 332 aa, Arabidopsis thaliana
  peptide (1)..(332): Ceres Seq. ID no. 12738591
  misc_feature (1)..(218): Pfam Name: AMP-binding enzyme Pfam Description: AMP-binding enzyme
  misc_feature (1)..(323): Homolog of NCBI NO: 7437841 NR Description: probable long-chain-fatty-acid-CoA ligase (EC
  misc_feature (1)..(328): Homolog of NCBI NO: 34898260 NR Description: similar to long-chain-fatty-acid--CoA ligase 1
  misc_feature (1)..(332): Homolog of NCBI NO: 15236634 NR Description: acyl-CoA synthetase - like protein
  misc_feature (1)..(332): Homolog of NCBI NO: 7437845 NR Description: probable long-chain-fatty-acid-CoA ligase (EC
  misc_feature (1)..(332): Homolog of NCBI NO: 20805871 NR Description: long chain acyl-CoA synthetase 5 [Arabidopsis
  misc_feature (1)..(332): Homolog of NCBI NO: 15237023 NR Description: putative acyl-CoA synthetase
  misc_feature (1)..(326): Homolog of NCBI NO: 15217631 NR Description: acyl-CoA synthetase, putative
  misc_feature (1)..(328): Homolog of NCBI NO: 34911190 NR Description: putative acyl-CoA synthetase
  misc_feature (1)..(332): Homolog of NCBI NO: 7437844 NR Description: probable long-chain-fatty-acid-CoA ligase (EC
  misc_feature (1)..(332): Homolog of NCBI NO: 22330132 NR Description: acyl CoA synthetase, putative
MQKISASGLIRKKLFDFAYNYKLGNMRKGFSQEEASPRLDRLMFDKIKEALGGRAHMLLSGAAPLPRHVEEFLRIIPASNLSQGYGLTESCGGSFTTLAGVFSMVGTVGVPMPTVEARLVSVPEMGYDAFSADVPRGEICLRGNSMFSGYHKRQDLTDQVLIDGWFHTGDIGEWQEDGSMKIIDRKKNIFKLSQGEYVAVENLENTYSRCPLIAQIWVYGNSFESFLVGVVVPDRKAIEDWAKLNYQSPNDFESLCQNLKAQKYFLDELNSTAKQYQLKGFEMLKAIHLEPNPFDIERDLITPTFKLKRPQLLQHYKGIVDQLYSEAKRSMA

SEQ ID NO: 40628 - protein, 307 aa, Arabidopsis thaliana; identical to SEQ ID NO: 25258
  peptide (1)..(307): Ceres Seq. ID no. 12738592
  misc_feature (1)..(193): Pfam Name: AMP-binding enzyme Pfam Description: AMP-binding enzyme
  misc_feature (1)..(298): Homolog of NCBI NO: 7437841 NR Description: probable long-chain-fatty-acid-CoA ligase (EC
  misc_feature (1)..(303): Homolog of NCBI NO: 34898260 NR Description: similar to long-chain-fatty-acid--CoA ligase 1
  misc_feature (1)..(307): Homolog of NCBI NO: 15236634 NR Description: acyl-CoA synthetase - like protein
  misc_feature (1)..(307): Homolog of NCBI NO: 7437845 NR Description: probable long-chain-fatty-acid-CoA ligase (EC
  misc_feature (1)..(307): Homolog of NCBI NO: 20805871 NR Description: long chain acyl-CoA synthetase 5 [Arabidopsis
  misc_feature (1)..(307): Homolog of NCBI NO: 15237023 NR Description: putative acyl-CoA synthetase
  misc_feature (1)..(301): Homolog of NCBI NO: 15217631 NR Description: acyl-CoA synthetase, putative
  misc_feature (1)..(303): Homolog of NCBI NO: 34911190 NR Description: putative acyl-CoA synthetase
  misc_feature (1)..(307): Homolog of NCBI NO: 7437844 NR Description: probable long-chain-fatty-acid-CoA ligase (EC
  misc_feature (1)..(307): Homolog of NCBI NO: 22330132 NR Description: acyl CoA synthetase, putative

SEQ ID NO: 40629 - DNA, 1385 bp, Arabidopsis thaliana
  misc_feature (1)..(1385): Ceres Seq. ID no. 12421894
  misc_feature: MA Experiment ID: 108434 Result: Down-regulated in Transcription
  misc_feature: MA Experiment 108434 PARAMETER Experiment Name: At_Root_Tips_cDNA_P Parameter: Tissue Value: Root Tips
  misc_feature: MA Experiment ID: 108435 Result: Down-regulated in Transcription
  misc_feature: MA Experiment 108435 PARAMETER Experiment Name: At_stm_Mutants_cDNA_P Parameter: Plant Line Value: wt Landsburg vs stm
  misc_feature: MA Experiment 108435 PARAMETER Experiment Name: At_stm_Mutants_cDNA_P Parameter: Tissue Value: Shoot Apical Meristem Region
  misc_feature: MA Experiment ID: 108461 Result: Down-regulated in Transcription
  misc_feature: MA Experiment 108461 PARAMETER Experiment Name: At_Germinating_Seeds_cDNA_P Parameter: Age (day) Value: 1 vs. 0
  misc_feature: MA Experiment 108461 PARAMETER Experiment Name: At_Germinating_Seeds_cDNA_P Parameter: Tissue Value: Germinating Seeds
  misc_feature: MA Experiment ID: 108462 Result: Down-regulated in Transcription
  misc_feature: MA Experiment 108462 PARAMETER Experiment Name: At_Germinating_Seeds_cDNA_P Parameter: Age (day) Value: 2 vs. 0
  misc_feature: MA Experiment 108462 PARAMETER Experiment Name: At_Germinating_Seeds_cDNA_P Parameter: Tissue Value: Germinating Seeds
  misc_feature: MA Experiment ID: 108463 Result: Down-regulated in Transcription
  misc_feature: MA Experiment 108463 PARAMETER Experiment Name: At_Germinating_Seeds_cDNA_P Parameter: Age (day) Value: 3 vs. 0
  misc_feature: MA Experiment 108463 PARAMETER Experiment Name: At_Germinating_Seeds_cDNA_P Parameter: Tissue Value: Germinating Seeds
  misc_feature: MA Experiment ID: 108464 Result: Down-regulated in Transcription
  misc_feature: MA Experiment 108464 PARAMETER Experiment Name: At_Germinating_Seeds_cDNA_P Parameter: Age (day) Value: 4 vs. 0
  misc_feature: MA Experiment 108464 PARAMETER Experiment Name: At_Germinating_Seeds_cDNA_P Parameter: Tissue Value: Germinating Seeds
  misc_feature: MA Experiment ID: 108473 Result: Up-regulated in Transcription
  misc_feature: MA Experiment 108473 PARAMETER Experiment Name: At_Drought_Flowers_cDNA_P Parameter: Timepoint (hr) Value: 7 d
  misc_feature: MA Experiment 108473 PARAMETER Experiment Name: At_Drought_Flowers_cDNA_P Parameter: Tissue Value: Flower
  misc_feature: MA Experiment 108473 PARAMETER Experiment Name: At_Drought_Flowers_cDNA_P Parameter: Treatment Value: Drought vs. No Drought
  misc_feature: MA Experiment ID: 108488 Result: Down-regulated in Transcription
  misc_feature: MA Experiment ID: 108561 Result: Up-regulated in Transcription
  misc_feature: MA Experiment 108561 PARAMETER Experiment Name: At_100uM_ABA_cDNA_P Parameter: Timepoint (hr) Value: 6
  misc_feature: MA Experiment 108561 PARAMETER Experiment Name: At_100uM_ABA_cDNA_P Parameter: Tissue Value: Aerial
  misc_feature: MA Experiment 108561 PARAMETER Experiment Name: At_100uM_ABA_cDNA_P Parameter: Treatment Value: 100uM ABA vs. No Treatment
  misc_feature: MA Experiment ID: 108573 Result: Up-regulated in Transcription
  misc_feature: MA Experiment 108573 PARAMETER Experiment Name: At_Drought_cDNA_P Parameter: Timepoint (hr) Value: 6
  misc_feature: MA Experiment 108573 PARAMETER Experiment Name: At_Drought_cDNA_P Parameter: Tissue Value: Aerial
  misc_feature: MA Experiment 108573 PARAMETER Experiment Name: At_Drought_cDNA_P Parameter: Treatment Value: Drought vs. No Drought
  misc_feature: MA Experiment ID: 108574 Result: Up-regulated in Transcription
  misc_feature: MA Experiment 108574 PARAMETER Experiment Name: At_Wounding__cDNA_P Parameter: Timepoint (hr) Value: 1
  misc_feature: MA Experiment 108574 PARAMETER Experiment Name: At_Wounding__cDNA_P Parameter: Tissue Value: Aerial
  misc_feature: MA Experiment 108574 PARAMETER Experiment Name: At_Wounding__cDNA_P Parameter: Treatment Value: Wounding vs. No Wounding
  misc_feature: MA Experiment ID: 108576 Result: Up-regulated in Transcription
  misc_feature: MA Experiment 108576 PARAMETER Experiment Name: At_42deg_Heat_cDNA_P Parameter: Temperature (deg C) Value: 42 vs. 22
  misc_feature: MA Experiment 108576 PARAMETER Experiment Name: At_42deg_Heat_cDNA_P Parameter: Timepoint (hr) Value: 1
  misc_feature: MA Experiment 108576 PARAMETER Experiment Name: At_42deg_Heat_cDNA_P Parameter: Tissue Value: Aerial
  misc_feature: MA Experiment ID: 108579 Result: Up-regulated in Transcription
  misc_feature: MA Experiment 108579 PARAMETER Experiment Name: At_4deg_Cold_cDNA_P Parameter: Temperature (deg C) Value: 4 vs. 22
  misc_feature: MA Experiment 108579 PARAMETER Experiment Name: At_4deg_Cold_cDNA_P Parameter: Timepoint (hr) Value: 6
  misc_feature: MA Experiment 108579 PARAMETER Experiment Name: At_4deg_Cold_cDNA_P Parameter: Tissue Value: Aerial
  misc_feature: MA Experiment ID: 108585 Result: Up-regulated in Transcription
  misc_feature: MA Experiment 108585 PARAMETER Experiment Name: At_5mM_NaNP_cDNA_P Parameter: Timepoint (hr) Value: 6
  misc_feature: MA Experiment 108585 PARAMETER Experiment Name: At_5mM_NaNP_cDNA_P Parameter: Tissue Value: Aerial
  misc_feature: MA Experiment 108585 PARAMETER Experiment Name: At_5mM_NaNP_cDNA_P Parameter: Treatment Value: null
  misc_feature: MA Experiment ID: 108595 Result: Up-regulated in Transcription
  misc_feature: MA Experiment 108595 PARAMETER Experiment Name: At_Ler-pi_Ovule_cDNA_P Parameter: Plant Line Value: null
  misc_feature: MA Experiment ID: 108668 Result: Up-regulated in Transcription
  misc_feature: MA Experiment 108668 PARAMETER Experiment Name: At_2mM_SA_cDNA_P Parameter: Plant Line Value: WS
  misc_feature: MA Experiment 108668 PARAMETER Experiment Name: At_2mM_SA_cDNA_P Parameter: Timepoint (hr) Value: 6
  misc_feature: MA Experiment 108668 PARAMETER Experiment Name: At_2mM_SA_cDNA_P Parameter: Treatment Value: 2mM SA vs. No Treatment
  misc_feature: MA Experiment ID: 20000072 Result: Up-regulated in Transcription
  misc_feature: MA Experiment 20000072 PARAMETER Experiment Name: At_100uM_ABA_Mutants_cDNA_P Parameter: Plant Line Value: CS8105
  misc_feature: MA Experiment 20000072 PARAMETER Experiment Name: At_100uM_ABA_Mutants_cDNA_P Parameter: Timepoint (hr) Value: 6
  misc_feature: MA Experiment 20000072 PARAMETER Experiment Name: At_100uM_ABA_Mutants_cDNA_P Parameter: Tissue Value: Aerial
  misc_feature: MA Experiment 20000072 PARAMETER Experiment Name: At_100uM_ABA_Mutants_cDNA_P Parameter: Treatment Value: 100uM ABA vs. No Treatment
  misc_feature: MA Experiment ID: 20000086 Result: Up-regulated in Transcription
  misc_feature: MA Experiment 20000086 PARAMETER Experiment Name: At_100uM_ABA_Mutants_cDNA_P Parameter: Plant Line Value: CS22
  misc_feature: MA Experiment 20000086 PARAMETER Experiment Name: At_100uM_ABA_Mutants_cDNA_P Parameter: Timepoint (hr) Value: 6
  misc_feature: MA Experiment 20000086 PARAMETER Experiment Name: At_100uM_ABA_Mutants_cDNA_P Parameter: Tissue Value: Aerial
  misc_feature: MA Experiment 20000086 PARAMETER Experiment Name: At_100uM_ABA_Mutants_cDNA_P Parameter: Treatment Value: 100uM ABA vs. No Treatment
  misc_feature: MA Experiment ID: 20000087 Result: Up-regulated in Transcription
  misc_feature: MA Experiment 20000087 PARAMETER Experiment Name: At_100uM_ABA_Mutants_cDNA_P Parameter: Plant Line Value: WS
  misc_feature: MA Experiment 20000087 PARAMETER Experiment Name: At_100uM_ABA_Mutants_cDNA_P Parameter: Timepoint (hr) Value: 6
  misc_feature: MA Experiment 20000087 PARAMETER Experiment Name: At_100uM_ABA_Mutants_cDNA_P Parameter: Tissue Value: Aerial
  misc_feature: MA Experiment 20000087 PARAMETER Experiment Name: At_100uM_ABA_Mutants_cDNA_P Parameter: Treatment Value: 100uM ABA vs. No Treatment
  misc_feature: MA Experiment ID: 20000090 Result: Up-regulated in Transcription
  misc_feature: MA Experiment ID: 20000111 Result: Up-regulated in Transcription
  misc_feature: MA Experiment 20000111 PARAMETER Experiment Name: At_42deg_Heat_cDNA_P Parameter: Temperature (deg C) Value: 42 vs. 22
  misc_feature: MA Experiment 20000111 PARAMETER Experiment Name: At_42deg_Heat_cDNA_P Parameter: Timepoint (hr) Value: 6
  misc_feature: MA Experiment 20000111 PARAMETER Experiment Name: At_42deg_Heat_cDNA_P Parameter: Tissue Value: Aerial
  misc_feature: MA Experiment ID: 20000113 Result: Up-regulated in Transcription
  misc_feature: MA Experiment 20000113 PARAMETER Experiment Name: At_42deg_Heat_cDNA_P Parameter: Temperature (deg C) Value: 42 vs. 22
  misc_feature: MA Experiment 20000113 PARAMETER Experiment Name: At_42deg_Heat_cDNA_P Parameter: Timepoint (hr) Value: 8
  misc_feature: MA Experiment 20000113 PARAMETER Experiment Name: At_42deg_Heat_cDNA_P Parameter: Tissue Value: Aerial
  misc_feature: MA Experiment ID: 20000144 Result: Up-regulated in Transcription
  misc_feature: MA Experiment 20000144 PARAMETER Experiment Name: At_42deg_Heat_cDNA_P Parameter: Temperature (deg C) Value: 42 vs. 22
  misc_feature: MA Experiment 20000144 PARAMETER Experiment Name: At_42deg_Heat_cDNA_P Parameter: Timepoint (hr) Value: 1
  misc_feature: MA Experiment 20000144 PARAMETER Experiment Name: At_42deg_Heat_cDNA_P Parameter: Tissue Value: Aerial
  misc_feature: MA Experiment ID: 20000173 Result: Up-regulated in Transcription
  misc_feature: MA Experiment 20000173 PARAMETER Experiment Name: At_42deg_Heat_P Parameter: Age (day) Value: 14
  misc_feature: MA Experiment 20000173 PARAMETER Experiment Name: At_42deg_Heat_P Parameter: Organism Value: A. thaliana
  misc_feature: MA Experiment 20000173 PARAMETER Experiment Name: At_42deg_Heat_P Parameter: Plant Line Value: WS
  misc_feature: MA Experiment 20000173 PARAMETER Experiment Name: At_42deg_Heat_P Parameter: Temperature (deg C) Value: 42 vs. 22
  misc_feature: MA Experiment 20000173 PARAMETER Experiment Name: At_42deg_Heat_P Parameter: Timepoint (hr) Value: 6
  misc_feature: MA Experiment 20000173 PARAMETER Experiment Name: At_42deg_Heat_P Parameter: Tissue Value: Aerial
  misc_feature: MA Experiment ID: 20000180 Result: Down-regulated in Transcription
  misc_feature: MA Experiment 20000180 PARAMETER Experiment Name: At_Germinating_Seeds_P Parameter: Age (hr) Value: 24 vs. 0
  misc_feature: MA Experiment 20000180 PARAMETER Experiment Name: At_Germinating_Seeds_P Parameter: Tissue Value: Germinating Seeds
  misc_feature: MA Experiment ID: 20000182 Result: Up-regulated in Transcription
  misc_feature: MA Experiment 20000182 PARAMETER Experiment Name: At_2mM_SA_P Parameter: Age (day) Value: 14
  misc_feature: MA Experiment 20000182 PARAMETER Experiment Name: At_2mM_SA_P Parameter: Organism Value: A. thaliana
  misc_feature: MA Experiment 20000182 PARAMETER Experiment Name: At_2mM_SA_P Parameter: Plant Line Value: WS
  misc_feature: MA Experiment 20000182 PARAMETER Experiment Name: At_2mM_SA_P Parameter: Timepoint (hr) Value: 6
  misc_feature: MA Experiment 20000182 PARAMETER Experiment Name: At_2mM_SA_P Parameter: Tissue Value: Aerial
  misc_feature: MA Experiment 20000182 PARAMETER Experiment Name: At_2mM_SA_P Parameter: Treatment Value: 2mM SA vs. No Treatment
  misc_feature: MA Experiment ID: 20000224 Result: Down-regulated in Transcription
  misc_feature: MA Experiment ID: 20000436 Result: Up-regulated in Transcription
  misc_feature: MA Experiment 20000436 PARAMETER Experiment Name: At_Drought_P Parameter: Age (day) Value: 7
  misc_feature: MA Experiment 20000436 PARAMETER Experiment Name: At_Drought_P Parameter: Organism Value: A. thaliana
  misc_feature: MA Experiment 20000436 PARAMETER Experiment Name: At_Drought_P Parameter: Plant Line Value: WS
  misc_feature: MA Experiment 20000436 PARAMETER Experiment Name: At_Drought_P Parameter: Timepoint (hr) Value: 12
  misc_feature: MA Experiment 20000436 PARAMETER Experiment Name: At_Drought_P Parameter: Tissue Value: Whole Plant
  misc_feature: MA Experiment 20000436 PARAMETER Experiment Name: At_Drought_P Parameter: Treatment Value: Drought vs. No Drought
  misc_feature: MA Experiment ID: 20000439 Result: Down-regulated in Transcription
  misc_feature: MA Experiment 20000439 PARAMETER Experiment Name: At_Roots__P Parameter: Age (day) Value: 14 vs. 21
  misc_feature: MA Experiment 20000439 PARAMETER Experiment Name: At_Roots__P Parameter: Organism Value: A. thaliana
  misc_feature: MA Experiment 20000439 PARAMETER Experiment Name: At_Roots__P Parameter: Tissue Value: Roots vs. Whole Plant
  misc_feature: MA Experiment ID: 20000573 Result: Up-regulated in Transcription
  misc_feature: MA Experiment 20000573 PARAMETER Experiment Name: At_100uM_ABA_Mutants__P Parameter: Organism Value: A. thaliana
  misc_feature: MA Experiment 20000573 PARAMETER Experiment Name: At_100uM_ABA_Mutants__P Parameter: Plant Line Value: CS22 vs. Ler wt
  misc_feature: MA Experiment 20000573 PARAMETER Experiment Name: At_100uM_ABA_Mutants__P Parameter: Timepoint (hr) Value: N/A
  misc_feature: MA Experiment 20000573 PARAMETER Experiment Name: At_100uM_ABA_Mutants__P Parameter: Tissue Value: Whole Plant
  misc_feature: MA Experiment 20000573 PARAMETER Experiment Name: At_100uM_ABA_Mutants__P Parameter: Treatment Value: None
  misc_feature: MA Experiment ID: 20000709 Result: Up-regulated in Transcription
  misc_feature: MA Experiment 20000709 PARAMETER Experiment Name: At_15mM_NH4NO3_L-to-H_P Parameter: Age (hr) Value: 14
  misc_feature: MA Experiment 20000709 PARAMETER Experiment Name: At_15mM_NH4NO3_L-to-H_P Parameter: Organism Value: A. thaliana
  misc_feature: MA Experiment 20000709 PARAMETER Experiment Name: At_15mM_NH4NO3_L-to-H_P Parameter: Plant Line Value: WS
  misc_feature: MA Experiment 20000709 PARAMETER Experiment Name: At_15mM_NH4NO3_L-to-H_P Parameter: Timepoint (hr) Value: 4
  misc_feature: MA Experiment 20000709 PARAMETER Experiment Name: At_15mM_NH4NO3_L-to-H_P Parameter: Tissue Value: Aerial
  misc_feature: MA Experiment 20000709 PARAMETER Experiment Name: At_15mM_NH4NO3_L-to-H_P Parameter: Treatment Value: 15mM NH4NO3 vs. 30mM Mannitol
  misc_feature: MA Experiment ID: 20000794 Result: Up-regulated in Transcription
  misc_feature: MA Experiment 20000794 PARAMETER Experiment Name: At_Petals_P Parameter: Age (day) Value: 23-25 days
  misc_feature: MA Experiment 20000794 PARAMETER Experiment Name: At_Petals_P Parameter: Plant Line Value: WS
  misc_feature: MA Experiment 20000794 PARAMETER Experiment Name: At_Petals_P Parameter: Tissue Value: Petals vs. Whole plant
  misc_feature: MA Experiment ID: 20001451 Result: Down-regulated in Transcription
  misc_feature: MA Experiment 20001451 PARAMETER Experiment Name: At_Far-red-induction_P Parameter: Age (day) Value: 7
  misc_feature: MA Experiment 20001451 PARAMETER Experiment Name: At_Far-red-induction_P Parameter: Light Value: Far-red vs. White
  misc_feature: MA Experiment 20001451 PARAMETER Experiment Name: At_Far-red-induction_P Parameter: Organism Value: A. thaliana
  misc_feature: MA Experiment 20001451 PARAMETER Experiment Name: At_Far-red-induction_P Parameter: Plant Line Value: Columbia
  misc_feature: MA Experiment 20001451 PARAMETER Experiment Name: At_Far-red-induction_P Parameter: Timepoint (hr) Value: 24
  misc_feature: MA Experiment 20001451 PARAMETER Experiment Name: At_Far-red-induction_P Parameter: Tissue Value: Whole Plant
  misc_feature: MA Experiment ID: 20001458 Result: Up-regulated in Transcription
  misc_feature: MA Experiment 20001458 PARAMETER Experiment Name: At_50mM_NH4NO3_L-to-H_P Parameter: Age (day) Value: Undefined
  misc_feature: MA Experiment 20001458 PARAMETER Experiment Name: At_50mM_NH4NO3_L-to-H_P Parameter: Organism Value: Undefined
  misc_feature: MA Experiment 20001458 PARAMETER Experiment Name: At_50mM_NH4NO3_L-to-H_P Parameter: Plant Line Value: Undefined
  misc_feature: MA Experiment 20001458 PARAMETER Experiment Name: At_50mM_NH4NO3_L-to-H_P Parameter: Timepoint (hr) Value: 2
  misc_feature: MA Experiment 20001458 PARAMETER Experiment Name: At_50mM_NH4NO3_L-to-H_P Parameter: Tissue Value: Siliques
  misc_feature: MA Experiment 20001458 PARAMETER Experiment Name: At_50mM_NH4NO3_L-to-H_P Parameter: Treatment Value: 50mM NH4NO3 vs. 100mM Manitol
  misc_feature: MA Experiment ID: 20001557 Result: Up-regulated in Transcription
  misc_feature: MA Experiment 20001557 PARAMETER Experiment Name: At_Drought_Soil_Dry_P Parameter: Age (day) Value: 27
  misc_feature: MA Experiment 20001557 PARAMETER Experiment Name: At_Drought_Soil_Dry_P Parameter: Organism Value: A. thaliana
  misc_feature: MA Experiment 20001557 PARAMETER Experiment Name: At_Drought_Soil_Dry_P Parameter: Plant Line Value: WS
  misc_feature: MA Experiment 20001557 PARAMETER Experiment Name: At_Drought_Soil_Dry_P Parameter: Post Timepoint (hr) Value: 3
  misc_feature: MA Experiment 20001557 PARAMETER Experiment Name: At_Drought_Soil_Dry_P Parameter: Post-Treatment Value: Re-Water vs. No Drought
  misc_feature: MA Experiment 20001557 PARAMETER Experiment Name: At_Drought_Soil_Dry_P Parameter: Timepoint (day) Value: 13
  misc_feature: MA Experiment 20001557 PARAMETER Experiment Name: At_Drought_Soil_Dry_P Parameter: Treatment Value: Drought vs. No Drought
  misc_feature: MA Experiment ID: 20001560 Result: Up-regulated in Transcription
  misc_feature: MA Experiment 20001560 PARAMETER Experiment Name: At_Drought_Soil_Dry_P Parameter: Age (day) Value: 28
  misc_feature: MA Experiment 20001560 PARAMETER Experiment Name: At_Drought_Soil_Dry_P Parameter: Organism Value: A. thaliana
  misc_feature: MA Experiment 20001560 PARAMETER Experiment Name: At_Drought_Soil_Dry_P Parameter: Plant Line Value: WS
  misc_feature: MA Experiment 20001560 PARAMETER Experiment Name: At_Drought_Soil_Dry_P Parameter: Post Timepoint (hr) Value: None
  misc_feature: MA Experiment 20001560 PARAMETER Experiment Name: At_Drought_Soil_Dry_P Parameter: Post-Treatment Value: None
  misc_feature: MA Experiment 20001560 PARAMETER Experiment Name: At_Drought_Soil_Dry_P Parameter: Timepoint (day) Value: 14
  misc_feature: MA Experiment 20001560 PARAMETER Experiment Name: At_Drought_Soil_Dry_P Parameter: Treatment Value: Drought vs. No Drought
  misc_feature: MA Experiment ID: 20001905 Result: Up-regulated in Transcription
  misc_feature: MA Experiment 20001905 PARAMETER Experiment Name: At_Drought_Reproduction_P Parameter: Age (day) Value: 40
  misc_feature: MA Experiment 20001905 PARAMETER Experiment Name: At_Drought_Reproduction_P Parameter: Organism Value: A. thaliana
  misc_feature: MA Experiment 20001905 PARAMETER Experiment Name: At_Drought_Reproduction_P Parameter: Plant Line Value: WS
  misc_feature: MA Experiment 20001905 PARAMETER Experiment Name: At_Drought_Reproduction_P Parameter: Timepoint (day) Value: 10
  misc_feature: MA Experiment 20001905 PARAMETER Experiment Name: At_Drought_Reproduction_P Parameter: Tissue Value: Rosettes
  misc_feature: MA Experiment 20001905 PARAMETER Experiment Name: At_Drought_Reproduction_P Parameter: Treatment Value: Drought vs. No Drought
  misc_feature: MA Experiment ID: 20001911 Result: Up-regulated in Transcription
  misc_feature: MA Experiment 20001911 PARAMETER Experiment Name: At_Drought_Reproduction_P Parameter: Age (day) Value: 40
  misc_feature: MA Experiment 20001911 PARAMETER Experiment Name: At_Drought_Reproduction_P Parameter: Organism Value: A. thaliana
  misc_feature: MA Experiment 20001911 PARAMETER Experiment Name: At_Drought_Reproduction_P Parameter: Plant Line Value: WS
  misc_feature: MA Experiment 20001911 PARAMETER Experiment Name: At_Drought_Reproduction_P Parameter: Timepoint (day) Value: 10
  misc_feature: MA Experiment 20001911 PARAMETER Experiment Name: At_Drought_Reproduction_P Parameter: Tissue Value: Flowers
  misc_feature: MA Experiment 20001911 PARAMETER Experiment Name: At_Drought_Reproduction_P Parameter: Treatment Value: Drought vs. No Drought
aaacctttctcttctctgctaacgagaaaacaaaagctatcgtctttgctactactactactgctattattacattgaatcctttgtgttcttcttcttcagctgctactttgttcgagtgctttcttacatgccgtcggagattgttgacaggaaaaggaagtctcgtggaacacgagatgtagctgagattctaaggcaatggagagagtacaatgagcagattgaggcagaatcttgtatcgatggtggtggtccaaaatcaatccgaaagcctcctccaaaaggttcgaggaagggttgtatgaaaggtaaaggtggacctgaaaacgggatttgtgactatagagaagttagacagaggagatggggtaaatgggttgctgagatccgtgagccagacggaggtgctaggttgtggctcggtactttctccagttcatatgaagctgcattggcttatgacgaggcggccaaagctatatatggtcagtctgccagactcaatcttcccgagatcacaaatcgctcttcttcgactgctgccactgccactgtgtcaggctcggttactgcattttctgatgaatctgaagtttgtgcacgtgaggatacaaatgcaagttcaggttttggtcaggtgaaactagaggattgtagcgatgaatatgttctcttagatagttctcagtgtattaaagaggagctgaaaggaaaagaggaagtgagggaagaacataacttggctgttggttttggaattggacaggactcgaaaagggagactttggatgcttggttgatgggaaatggcaatgaacaagaaccattggagtttggtgtggatgaaacgtttgatattaatgagctattgggtatattaaacgacaacaatgtgtctggtcaagagacaatgcagtatcaagtggatagacacccaaatttcagttaccaaacgcagtttccaaattctaacttgctcgggagcctcaaccctatggagattgctcaaccaggagttgattatggatgtccttatgtgcagcccagtgatatggagaactatggtattgatttagaccatcgcaggttcaatgatcttgacatacaggacttggattttggaggagacaaagatgttcatggatctacataagatttcaaatttcgtttgactgtcctaagtttgtgattctgctccgagacggtgtagctgttactagctagaagctgcccttctttgaagctactgatactttctgatattaatggttgtgagacgtagtacatgtagttaggtaatgtaggacaagttcaaatatgattccttctttctttttcttgtgaatacatatgacatatgaagaagttcaaacgttgggtcc

SEQ ID NO: 40630 - protein, 341 aa, Arabidopsis thaliana
  peptide (1)..(341): Ceres Seq. ID no. 12421895
  misc_feature (69)..(133): Pfam Name: AP2 domain Pfam Description: AP2 domain
  misc_feature (8)..(256): Homolog of NCBI NO: 30313898 NR Description: AP2 transcriptional activator DRF1.1 [Hordeum
  misc_feature (8)..(256): Homolog of NCBI NO: 27960760 NR Description: dehydration-responsive AP2 domain transcriptional
  misc_feature (8)..(176): Homolog of NCBI NO: 15228427 NR Description: DRE binding protein (DREB2B)
  misc_feature (8)..(213): Homolog of NCBI NO: 25992100 NR Description: dehydration responsive element binding protein
  misc_feature (8)..(330): Homolog of NCBI NO: 15239107 NR Description: DRE binding protein (DREB2A)
  misc_feature (1)..(202): Homolog of NCBI NO: 8346773 NR Description: AP2-domain DNA-binding protein [Catharanthus
  misc_feature (8)..(128): Homolog of NCBI NO: 15226661 NR Description: AP2 domain transcription factor; protein id:
  misc_feature (59)..(341): Homolog of NCBI NO: 25408687 NR Description: AP2 domain transcription factor [imported] -
  misc_feature (1)..(341): Homolog of NCBI NO: 18405354 NR Description: AP2 domain transcription factor
  misc_feature (1)..(341): Homolog of NCBI NO: 21536924 NR Description: AP2 domain transcription factor [Arabidopsis
MPSEIVDRKRKSRGTRDVAEILRQWREYNEQIEAESCIDGGGPKSIRKPPPKGSRKGCMKGKGGPENGICDYREVRQRRWGKWVAEIREPDGGARLWLGTFSSSYEAALAYDEAAKAIYGQSARLNLPEITNRSSSTAATATVSGSVTAFSDESEVCAREDTNASSGFGQVKLEDCSDEYVLLDSSQCIKEELKGKEEVREEHNLAVGFGIGQDSKRETLDAWLMGNGNEQEPLEFGVDETFDINELLGILNDNNVSGQETMQYQVDRHPNFSYQTQFPNSNLLGSLNPMEIAQPGVDYGCPYVQPSDMENYGIDLDHRRFNDLDIQDLDFGGDKDVHGST

SEQ ID NO: 40631 - protein, 283 aa, Arabidopsis thaliana
  peptide (1)..(283): Ceres Seq. ID no. 12421896
  misc_feature (11)..(75): Pfam Name: AP2 domain Pfam Description: AP2 domain
  misc_feature (1)..(198): Homolog of NCBI NO: 30313898 NR Description: AP2 transcriptional activator DRF1.1 [Hordeum
  misc_feature (1)..(198): Homolog of NCBI NO: 27960760 NR Description: dehydration-responsive AP2 domain transcriptional
  misc_feature (1)..(118): Homolog of NCBI NO: 15228427 NR Description: DRE binding protein (DREB2B)
  misc_feature (1)..(155): Homolog of NCBI NO: 25992100 NR Description: dehydration responsive element binding protein
  misc_feature (1)..(272): Homolog of NCBI NO: 15239107 NR Description: DRE binding protein (DREB2A)
  misc_feature (1)..(144): Homolog of NCBI NO: 8346773 NR Description: AP2-domain DNA-binding protein [Catharanthus
  misc_feature (1)..(70): Homolog of NCBI NO: 15226661 NR Description: AP2 domain transcription factor; protein id:
  misc_feature (1)..(283): Homolog of NCBI NO: 25408687 NR Description: AP2 domain transcription factor [imported] -
  misc_feature (1)..(283): Homolog of NCBI NO: 18405354 NR Description: AP2 domain transcription factor
  misc_feature (1)..(283): Homolog of NCBI NO: 21536924 NR Description: AP2 domain transcription factor [Arabidopsis
MKGKGGPENGICDYREVRQRRWGKWVAEIREPDGGARLWLGTFSSSYEAALAYDEAAKAIYGQSARLNLPEITNRSSSTAATATVSGSVTAFSDESEVCAREDTNASSGFGQVKLEDCSDEYVLLDSSQCIKEELKGKEEVREEHNLAVGFGIGQDSKRETLDAWLMGNGNEQEPLEFGVDETFDINELLGILNDNNVSGQETMQYQVDRHPNFSYQTQFPNSNLLGSLNPMEIAQPGVDYGCPYVQPSDMENYGIDLDHRRFNDLDIQDLDFGGDKDVHGST

SEQ ID NO: 40632 - DNA, 1712 bp, Arabidopsis thaliana; identical to SEQ ID NO: 24119
  misc_feature (1)..(1712): Ceres Seq. ID no. 12337203
  misc_feature: MA Experiment ID: 108569 Result: Up-regulated in Transcription
  misc_feature: MA Experiment 108569 PARAMETER Experiment Name: At_0.001%_MeJA__cDNA_P Parameter: Timepoint (hr) Value: 6
  misc_feature: MA Experiment 108569 PARAMETER Experiment Name: At_0.001%_MeJA__cDNA_P Parameter: Tissue Value: Aerial
  misc_feature: MA Experiment 108569 PARAMETER Experiment Name: At_0.001%_MeJA__cDNA_P Parameter: Treatment Value: 0.001% MeJA vs. No Treatment
  misc_feature: MA Experiment ID: 108573 Result: Up-regulated in Transcription
  misc_feature: MA Experiment 108573 PARAMETER Experiment Name: At_Drought_cDNA_P Parameter: Timepoint (hr) Value: 6
  misc_feature: MA Experiment 108573 PARAMETER Experiment Name: At_Drought_cDNA_P Parameter: Tissue Value: Aerial
  misc_feature: MA Experiment 108573 PARAMETER Experiment Name: At_Drought_cDNA_P Parameter: Treatment Value: Drought vs. No Drought
  misc_feature: MA Experiment ID: 20000185 Result: Down-regulated in Transcription
  misc_feature: MA Experiment 20000185 PARAMETER Experiment Name: At_Roots__P Parameter: Age (day) Value: 7 vs. 21
  misc_feature: MA Experiment 20000185 PARAMETER Experiment Name: At_Roots__P Parameter: Organism Value: A. thaliana
  misc_feature: MA Experiment 20000185 PARAMETER Experiment Name: At_Roots__P Parameter: Tissue Value: Roots vs. Whole Plant
  misc_feature: MA Experiment ID: 20000227 Result: Down-regulated in Transcription
  misc_feature: MA Experiment 20000227 PARAMETER Experiment Name: At_Root-Tips-vs-Tops_P Parameter: Tissue Value: Root Tips vs. Root Tops
  misc_feature: MA Experiment ID: 20000234 Result: Down-regulated in Transcription
  misc_feature: MA Experiment 20000234 PARAMETER Experiment Name: At_Siliques_P Parameter: Age (day) Value: 21
  misc_feature: MA Experiment 20000234 PARAMETER Experiment Name: At_Siliques_P Parameter: Organism Value: A. thaliana
  misc_feature: MA Experiment 20000234 PARAMETER Experiment Name: At_Siliques_P Parameter: Plant Line Value: WS
  misc_feature: MA Experiment 20000234 PARAMETER Experiment Name: At_Siliques_P Parameter: Tissue Value: Less Than 5mm Siliques vs. Whole Plant
  misc_feature: MA Experiment ID: 20000264 Result: Down-regulated in Transcription
  misc_feature: MA Experiment 20000264 PARAMETER Experiment Name: At_Open_Flower_P Parameter: Age (day) Value: 21
  misc_feature: MA Experiment 20000264 PARAMETER Experiment Name: At_Open_Flower_P Parameter: Plant Line Value: WS
  misc_feature: MA Experiment 20000264 PARAMETER Experiment Name: At_Open_Flower_P Parameter: Tissue Value: Open Flower vs. Whole Plant
  misc_feature: MA Experiment ID: 20000265 Result: Down-regulated in Transcription
  misc_feature: MA Experiment 20000265 PARAMETER Experiment Name: At_Open_Flower_P Parameter: Age (day) Value: 21
  misc_feature: MA Experiment 20000265 PARAMETER Experiment Name: At_Open_Flower_P Parameter: Plant Line Value: WS
  misc_feature: MA Experiment 20000265 PARAMETER Experiment Name: At_Open_Flower_P Parameter: Tissue Value: Closed Flower vs. Whole Plant
  misc_feature: MA Experiment ID: 20001451 Result: Up-regulated in Transcription
  misc_feature: MA Experiment 20001451 PARAMETER Experiment Name: At_Far-red-induction_P Parameter: Age (day) Value: 7
  misc_feature: MA Experiment 20001451 PARAMETER Experiment Name: At_Far-red-induction_P Parameter: Light Value: Far-red vs. White
  misc_feature: MA Experiment 20001451 PARAMETER Experiment Name: At_Far-red-induction_P Parameter: Organism Value: A. thaliana
  misc_feature: MA Experiment 20001451 PARAMETER Experiment Name: At_Far-red-induction_P Parameter: Plant Line Value: Columbia
  misc_feature: MA Experiment 20001451 PARAMETER Experiment Name: At_Far-red-induction_P Parameter: Timepoint (hr) Value: 24
  misc_feature: MA Experiment 20001451 PARAMETER Experiment Name: At_Far-red-induction_P Parameter: Tissue Value: Whole Plant
  misc_feature: MA Experiment ID: 20001560 Result: Down-regulated in Transcription
  misc_feature: MA Experiment 20001560 PARAMETER Experiment Name: At_Drought_Soil_Dry_P Parameter: Age (day) Value: 28
  misc_feature: MA Experiment 20001560 PARAMETER Experiment Name: At_Drought_Soil_Dry_P Parameter: Organism Value: A. thaliana
  misc_feature: MA Experiment 20001560 PARAMETER Experiment Name: At_Drought_Soil_Dry_P Parameter: Plant Line Value: WS
  misc_feature: MA Experiment 20001560 PARAMETER Experiment Name: At_Drought_Soil_Dry_P Parameter: Post Timepoint (hr) Value: None
  misc_feature: MA Experiment 20001560 PARAMETER Experiment Name: At_Drought_Soil_Dry_P Parameter: Post-Treatment Value: None
  misc_feature: MA Experiment 20001560 PARAMETER Experiment Name: At_Drought_Soil_Dry_P Parameter: Timepoint (day) Value: 14
  misc_feature: MA Experiment 20001560 PARAMETER Experiment Name: At_Drought_Soil_Dry_P Parameter: Treatment Value: Drought vs. No Drought

SEQ ID NO: 40633 - protein, 427 aa, Arabidopsis thaliana; identical to SEQ ID NO: 24120
  peptide (1)..(427): Ceres Seq. ID no. 12337204
  misc_feature (146)..(217): Pfam Name: RNA recognition motif. (a.k.a. RRM, RBD, or RNP domain) Pfam Description: RNA recognition motif. (a.k.a. RRM, RBD, or RNP
  misc_feature (146)..(217): Pfam Name: RNA recognition motif. (a.k.a. RRM, RBD, or RNP domain) Pfam Description: RNA recognition motif. (a.k.a. RRM, RBD, or RNP
  misc_feature (12)..(426): Homolog of NCBI NO: 6996560 NR Description: oligouridylate binding protein [Nicotiana
  misc_feature (5)..(41): Homolog of NCBI NO: 25402821 NR Description: protein F1L3.2 [imported] - Arabidopsis thaliana
  misc_feature (333)..(427): Homolog of NCBI NO: 25402821 NR Description: protein F1L3.2 [imported] - Arabidopsis thaliana
  misc_feature (206)..(339): Homolog of NCBI NO: 25402821 NR Description: protein F1L3.2 [imported] - Arabidopsis thaliana
  misc_feature (40)..(208): Homolog of NCBI NO: 25402821 NR Description: protein F1L3.2 [imported] - Arabidopsis thaliana
  misc_feature (12)..(426): Homolog of NCBI NO: 6996560 NR Description: oligouridylate binding protein [Nicotiana
  misc_feature (333)..(427): Homolog of NCBI NO: 25402821 NR Description: protein F1L3.2 [imported] - Arabidopsis thaliana
  misc_feature (40)..(208): Homolog of NCBI NO: 25402821 NR Description: protein F1L3.2 [imported] - Arabidopsis thaliana
  misc_feature (1)..(427): Homolog of NCBI NO: 15231783 NR Description: oligouridylate binding protein (UBP1), putative
  misc_feature (1)..(427): Homolog of NCBI NO: 21593280 NR Description: oligouridylate binding protein, putative
  misc_feature (1)..(427): Homolog of NCBI NO: 15221031 NR Description: oligouridylate binding protein (UBP1), putative
  misc_feature (1)..(427): Homolog of NCBI NO: 30695647 NR Description: oligouridylate binding protein (UBP1), putative
  misc_feature (5)..(427): Homolog of NCBI NO: 18394471 NR Description: oligouridylate binding protein (UBP1), putative
  misc_feature (206)..(339): Homolog of NCBI NO: 25402821 NR Description: protein F1L3.2 [imported] - Arabidopsis thaliana
  misc_feature (5)..(41): Homolog of NCBI NO: 25402821 NR Description: protein F1L3.2 [imported] - Arabidopsis thaliana
  misc_feature (5)..(427): Homolog of NCBI NO: 18394471 NR Description: oligouridylate binding protein (UBP1), putative
  misc_feature (1)..(427): Homolog of NCBI NO: 30695647 NR Description: oligouridylate binding protein (UBP1), putative
  misc_feature (1)..(427): Homolog of NCBI NO: 15221031 NR Description: oligouridylate binding protein (UBP1), putative
  misc_feature (1)..(427): Homolog of NCBI NO: 21593280 NR Description: oligouridylate binding protein, putative
  misc_feature (1)..(427): Homolog of NCBI NO: 15231783 NR Description: oligouridylate binding protein (UBP1), putative

SEQ ID NO: 40634 - protein, 410 aa, Arabidopsis thaliana; identical to SEQ ID NO: 24121
  peptide (1)..(410): Ceres Seq. ID no. 12337205
  misc_feature (129)..(200): Pfam Name: RNA recognition motif. (a.k.a. RRM, RBD, or RNP domain) Pfam Description: RNA recognition motif. (a.k.a. RRM, RBD, or RNP
  misc_feature (129)..(200): Pfam Name: RNA recognition motif. (a.k.a. RRM, RBD, or RNP domain) Pfam Description: RNA recognition motif. (a.k.a. RRM, RBD, or RNP
  misc_feature (1)..(409): Homolog of NCBI NO: 6996560 NR Description: oligouridylate binding protein [Nicotiana
  misc_feature (1)..(24): Homolog of NCBI NO: 25402821 NR Description: protein F1L3.2 [imported] - Arabidopsis thaliana
  misc_feature (316)..(410): Homolog of NCBI NO: 25402821 NR Description: protein F1L3.2 [imported] - Arabidopsis thaliana
  misc_feature (189)..(322): Homolog of NCBI NO: 25402821 NR Description: protein F1L3.2 [imported] - Arabidopsis thaliana
  misc_feature (23)..(191): Homolog of NCBI NO: 25402821 NR Description: protein F1L3.2 [imported] - Arabidopsis thaliana
  misc_feature (1)..(409): Homolog of NCBI NO: 6996560 NR Description: oligouridylate binding protein [Nicotiana
  misc_feature (316)..(410): Homolog of NCBI NO: 25402821 NR Description: protein F1L3.2 [imported] - Arabidopsis thaliana
  misc_feature (23)..(191): Homolog of NCBI NO: 25402821 NR Description: protein F1L3.2 [imported] - Arabidopsis thaliana
  misc_feature (1)..(410): Homolog of NCBI NO: 15231783 NR Description: oligouridylate binding protein (UBP1), putative
  misc_feature (1)..(410): Homolog of NCBI NO: 21593280 NR Description: oligouridylate binding protein, putative
  misc_feature (1)..(410): Homolog of NCBI NO: 15221031 NR Description: oligouridylate binding protein (UBP1), putative
  misc_feature (1)..(410): Homolog of NCBI NO: 30695647 NR Description: oligouridylate binding protein (UBP1), putative
  misc_feature (1)..(410): Homolog of NCBI NO: 18394471 NR Description: oligouridylate binding protein (UBP1), putative
  misc_feature (189)..(322): Homolog of NCBI NO: 25402821 NR Description: protein F1L3.2 [imported] - Arabidopsis thaliana
  misc_feature (1)..(24): Homolog of NCBI NO: 25402821 NR Description: protein F1L3.2 [imported] - Arabidopsis thaliana
  misc_feature (1)..(410): Homolog of NCBI NO: 18394471 NR Description: oligouridylate binding protein (UBP1), putative
  misc_feature (1)..(410): Homolog of NCBI NO: 30695647 NR Description: oligouridylate binding protein (UBP1), putative
  misc_feature (1)..(410): Homolog of NCBI NO: 15221031 NR Description: oligouridylate binding protein (UBP1), putative
  misc_feature (1)..(410): Homolog of NCBI NO: 21593280 NR Description: oligouridylate binding protein, putative
  misc_feature (1)..(410): Homolog of NCBI NO: 15231783 NR Description: oligouridylate binding protein (UBP1), putative

SEQ ID NO: 40635 - protein, 409 aa, Arabidopsis thaliana; identical to SEQ ID NO: 24122
  peptide (1)..(409): Ceres Seq. ID no. 12337206
  misc_feature (128)..(199): Pfam Name: RNA recognition motif. (a.k.a. RRM, RBD, or RNP domain) Pfam Description: RNA recognition motif. (a.k.a. RRM, RBD, or RNP
  misc_feature (128)..(199): Pfam Name: RNA recognition motif. (a.k.a. RRM, RBD, or RNP domain) Pfam Description: RNA recognition motif. (a.k.a. RRM, RBD, or RNP
  misc_feature (1)..(408): Homolog of NCBI NO: 6996560 NR Description: oligouridylate binding protein [Nicotiana
  misc_feature (1)..(23): Homolog of NCBI NO: 25402821 NR Description: protein F1L3.2 [imported] - Arabidopsis thaliana
  misc_feature (315)..(409): Homolog of NCBI NO: 25402821 NR Description: protein F1L3.2 [imported] - Arabidopsis thaliana
  misc_feature (188)..(321): Homolog of NCBI NO: 25402821 NR Description: protein F1L3.2 [imported] - Arabidopsis thaliana
  misc_feature (22)..(190): Homolog of NCBI NO: 25402821 NR Description: protein F1L3.2 [imported] - Arabidopsis thaliana
  misc_feature (1)..(408): Homolog of NCBI NO: 6996560 NR Description: oligouridylate binding protein [Nicotiana
  misc_feature (315)..(409): Homolog of NCBI NO: 25402821 NR Description: protein F1L3.2 [imported] - Arabidopsis thaliana
  misc_feature (22)..(190): Homolog of NCBI NO: 25402821 NR Description: protein F1L3.2 [imported] - Arabidopsis thaliana
  misc_feature (1)..(409): Homolog of NCBI NO: 15231783 NR Description: oligouridylate binding protein (UBP1), putative
  misc_feature (1)..(409): Homolog of NCBI NO: 21593280 NR Description: oligouridylate binding protein, putative
  misc_feature (1)..(409): Homolog of NCBI NO: 15221031 NR Description: oligouridylate binding protein (UBP1), putative
  misc_feature (1)..(409): Homolog of NCBI NO: 30695647 NR Description: oligouridylate binding protein (UBP1), putative
  misc_feature (1)..(409): Homolog of NCBI NO: 18394471 NR Description: oligouridylate binding protein (UBP1), putative
  misc_feature (188)..(321): Homolog of NCBI NO: 25402821 NR Description: protein F1L3.2 [imported] - Arabidopsis thaliana
  misc_feature (1)..(23): Homolog of NCBI NO: 25402821 NR Description: protein F1L3.2 [imported] - Arabidopsis thaliana
  misc_feature (1)..(409): Homolog of NCBI NO: 18394471 NR Description: oligouridylate binding protein (UBP1), putative
  misc_feature (1)..(409): Homolog of NCBI NO: 30695647 NR Description: oligouridylate binding protein (UBP1), putative
  misc_feature (1)..(409): Homolog of NCBI NO: 15221031 NR Description: oligouridylate binding protein (UBP1), putative
  misc_feature (1)..(409): Homolog of NCBI NO: 21593280 NR Description: oligouridylate binding protein, putative
  misc_feature (1)..(409): Homolog of NCBI NO: 15231783 NR Description: oligouridylate binding protein (UBP1), putative

SEQ ID NO: 40636 - DNA, 2252 bp, Arabidopsis thaliana
  misc_feature (1)..(2252): Ceres Seq. ID no. 13489083
  misc_feature: MA Experiment ID: 20000069 Result: Down-regulated in Transcription
  misc_feature: MA Experiment 20000069 PARAMETER Experiment Name: At_100uM_ABA_Mutants_cDNA_P Parameter: Plant Line Value: CS23
  misc_feature: MA Experiment 20000069 PARAMETER Experiment Name: At_100uM_ABA_Mutants_cDNA_P Parameter: Timepoint (hr) Value: 6
  misc_feature: MA Experiment 20000069 PARAMETER Experiment Name: At_100uM_ABA_Mutants_cDNA_P Parameter: Tissue Value: Aerial
  misc_feature: MA Experiment 20000069 PARAMETER Experiment Name: At_100uM_ABA_Mutants_cDNA_P Parameter: Treatment Value: 100uM ABA vs. No Treatment
  misc_feature: MA Experiment ID: 20000089 Result: Down-regulated in Transcription
  misc_feature: MA Experiment ID: 20000173 Result: Down-regulated in Transcription
  misc_feature: MA Experiment 20000173 PARAMETER Experiment Name: At_42deg_Heat_P Parameter: Age (day) Value: 14
  misc_feature: MA Experiment 20000173 PARAMETER Experiment Name: At_42deg_Heat_P Parameter: Organism Value: A. thaliana
  misc_feature: MA Experiment 20000173 PARAMETER Experiment Name: At_42deg_Heat_P Parameter: Plant Line Value: WS
  misc_feature: MA Experiment 20000173 PARAMETER Experiment Name: At_42deg_Heat_P Parameter: Temperature (deg C) Value: 42 vs. 22
  misc_feature: MA Experiment 20000173 PARAMETER Experiment Name: At_42deg_Heat_P Parameter: Timepoint (hr) Value: 6
  misc_feature: MA Experiment 20000173 PARAMETER Experiment Name: At_42deg_Heat_P Parameter: Tissue Value: Aerial
  misc_feature: MA Experiment ID: 20000227 Result: Up-regulated in Transcription
  misc_feature: MA Experiment 20000227 PARAMETER Experiment Name: At_Root-Tips-vs-Tops_P Parameter: Tissue Value: Root Tips vs. Root Tops
  misc_feature: MA Experiment ID: 20000573 Result: Down-regulated in Transcription
  misc_feature: MA Experiment 20000573 PARAMETER Experiment Name: At_100uM_ABA_Mutants__P Parameter: Organism Value: A. thaliana
  misc_feature: MA Experiment 20000573 PARAMETER Experiment Name: At_100uM_ABA_Mutants__P Parameter: Plant Line Value: CS22 vs. Ler wt
  misc_feature: MA Experiment 20000573 PARAMETER Experiment Name: At_100uM_ABA_Mutants__P Parameter: Timepoint (hr) Value: N/A
  misc_feature: MA Experiment 20000573 PARAMETER Experiment Name: At_100uM_ABA_Mutants__P Parameter: Tissue Value: Whole Plant
  misc_feature: MA Experiment 20000573 PARAMETER Experiment Name: At_100uM_ABA_Mutants__P Parameter: Treatment Value: None
  misc_feature: MA Experiment ID: 20000574 Result: Down-regulated in Transcription
  misc_feature: MA Experiment 20000574 PARAMETER Experiment Name: At_100uM_ABA_Mutants__P Parameter: Organism Value: A. thaliana
  misc_feature: MA Experiment 20000574 PARAMETER Experiment Name: At_100uM_ABA_Mutants__P Parameter: Plant Line Value: CS23 vs. Ler wt
  misc_feature: MA Experiment 20000574 PARAMETER Experiment Name: At_100uM_ABA_Mutants__P Parameter: Timepoint (hr) Value: N/A
  misc_feature: MA Experiment 20000574 PARAMETER Experiment Name: At_100uM_ABA_Mutants__P Parameter: Tissue Value: Whole Plant
  misc_feature: MA Experiment 20000574 PARAMETER Experiment Name: At_100uM_ABA_Mutants__P Parameter: Treatment Value: None
  misc_feature: MA Experiment ID: 20001451 Result: Up-regulated in Transcription
  misc_feature: MA Experiment 20001451 PARAMETER Experiment Name: At_Far-red-induction_P Parameter: Age (day) Value: 7
  misc_feature: MA Experiment 20001451 PARAMETER Experiment Name: At_Far-red-induction_P Parameter: Light Value: Far-red vs. White
  misc_feature: MA Experiment 20001451 PARAMETER Experiment Name: At_Far-red-induction_P Parameter: Organism Value: A. thaliana
  misc_feature: MA Experiment 20001451 PARAMETER Experiment Name: At_Far-red-induction_P Parameter: Plant Line Value: Columbia
  misc_feature: MA Experiment 20001451 PARAMETER Experiment Name: At_Far-red-induction_P Parameter: Timepoint (hr) Value: 24
  misc_feature: MA Experiment 20001451 PARAMETER Experiment Name: At_Far-red-induction_P Parameter: Tissue Value: Whole Plant
  misc_feature: MA Experiment ID: 20001906 Result: Down-regulated in Transcription
  misc_feature: MA Experiment 20001906 PARAMETER Experiment Name: At_Drought_Reproduction_P Parameter: Age (day) Value: 35
  misc_feature: MA Experiment 20001906 PARAMETER Experiment Name: At_Drought_Reproduction_P Parameter: Organism Value: A. thaliana
  misc_feature: MA Experiment 20001906 PARAMETER Experiment Name: At_Drought_Reproduction_P Parameter: Plant Line Value: WS
  misc_feature: MA Experiment 20001906 PARAMETER Experiment Name: At_Drought_Reproduction_P Parameter: Timepoint (day) Value: 5
  misc_feature: MA Experiment 20001906 PARAMETER Experiment Name: At_Drought_Reproduction_P Parameter: Tissue Value: Siliques
  misc_feature: MA Experiment 20001906 PARAMETER Experiment Name: At_Drought_Reproduction_P Parameter: Treatment Value: Drought vs. No Drought
gatgaaggtaagagagaaacaaacaaacaaaagagagagtacgggtttcttcttcgtcattctcacgaattcgtgaatttatttttgatttcgtcatctgggttttctcaaattctcttccttttttatcttttgagattttctggtattgaaagttcaaacctttgtactgggttcgttgatttttttttggtttccttctcattattcttcatgattcctccttttttctgtttctcgaaatttgtggttataaaattcacatttttttttgggagcagttgggtttcaatcatgtgtttatgatgttatattattaacaagagttgaatgaatcttctttttgaccgttgaaaagagaaaaactaaattaaagcaaagaggaaaaagaagaagaagaagattgtgttgttgttgttgttttaacgcttctttctgagataaagacatgcgtttctttttcagctcacattattttcccaaatgttgtgagtttgagaagaaaagtctgtttttttattgagatttttttgtttctatagattctatcgaaatgccgatgtttcagccgttaaagagagatgggttaataggatttgaaggtggtggtgagggcaagtcttagatctggatactgcagtgaaagatggagttctcggtggtgttaatggtggtggtgttggagttgttgatgagaaattggatctgaagaagatgataaaggagctagatttacaagatataccttctgttttcatttgtcctatctccttagagccgatgcaagatcctgtgactttgtgtactggtcaaacctatgaaaggttaaacattcacaaatggtttaacctaggtcacttgacttgtcctactacaatgcaagagctttgggatgatacggtaactcctaataaaactcttcatcatttgatctatacttggttctctcagaagtatgtgttgatgaagaaacgttctgaggatgttcaaggacgagctattgagattttggggactttgaagaaagctaaatgtcaagctagggttcatgctttgagtgagcttaaacagattgttattgctcatcttatggcgaggaagactgttgttgaagaaggtggtgtctctgtgatctcttctcttttgggtccttttacttctcatgctgttggatctgaggttgttgctattcttgtgagtcttgatcttgattctgattcgaaatccggcttgatgcaaccagctaaggtttctttgattgttgatatgttgaatgatggatctaatgagactaagatcaattgtgctagattgattagaggattggtggaagagaaagggtttagagcagagcttgtttcaagtcatagtttgcttgttgggttaatgagattggttaaggataagagacatagaaatggagtatctcctgcacttcggttgcttaaaccgatttcggttcataaacaagttcgaagcttgatggttagcattggagcagtgcctcaattagttgatatcttaccgtctttagacccggaatgtttggagttagctctgtttgttcttgatgctttgtgtacagacgtggaaggaagagttgctgtcaaagactctgcaaacacaataccttatacagttagggtgctgatgagggtgtctgagaattgcactaactacgcgctgtcgattctttggtctgtctgcaaattagctccagaagaatgttcaccacttgctgttgaggttggtcttgctgcaaagctgttactcgtgatccagagcgggtgtgatgcagcgttgaagcagcggtcagcagagctacttaagctttgtagtctacattattcagacaccatgtttatttccaaatgcaaactcacaaggacaatccaatagcattggcactgattgatcacaggattcagcgggttatccatgaaacggtaaatgtgaattgcattacgaatctgcctttgccctgatgtatatatagatgatgagtttgaagattgagctattggttttggtggtaacaattcaaaggaagaggcaatcagctgatggaaacatggggaagacgaagaaaccgggtggttgagggatcggtatgtaatgttaccatattggttcgttttgcaataagcattgggaattagaaaaaaactgtgtaaagttaccgcctctggctcaaatcaatttcagaagaacaaagaaaaagaagaatttgaagaaaggaaccatattaagtt

SEQ ID NO: 40637 - protein, 394 aa, Arabidopsis thaliana
  peptide (1)..(394): Ceres Seq. ID no. 13489084
  misc_feature (9)..(83): Pfam Name: U-box domain Pfam Description: U-box domain
  misc_feature (9)..(386): Homolog of NCBI NO: 25408431 NR Description: hypothetical protein At2g35930 [imported] -
  misc_feature (10)..(372): Homolog of NCBI NO: 13539578 NR Description: photoperiod responsive protein [Solanum tuberosum
  misc_feature (1)..(103): Homolog of NCBI NO: 20330772 NR Description: Unknown protein [Oryza sativa (japonica
  misc_feature (10)..(393): Homolog of NCBI NO: 20330772 NR Description: Unknown protein [Oryza sativa (japonica
  misc_feature (1)..(386): Homolog of NCBI NO: 7486518 NR Description: hypothetical protein F6H11.10 - Arabidopsis
  misc_feature (1)..(394): Homolog of NCBI NO: 17064800 NR Description: Unknown protein [Arabidopsis thaliana]
  misc_feature (1)..(394): Homolog of NCBI NO: 15239204 NR Description: expressed protein [Arabidopsis thaliana]
  misc_feature (1)..(394): Homolog of NCBI NO: 21536926 NR Description: unknown [Arabidopsis thaliana]
  misc_feature (1)..(394): Homolog of NCBI NO: 18408953 NR Description: expressed protein [Arabidopsis thaliana]
  misc_feature (1)..(366): Homolog of NCBI NO: 11358045 NR Description: hypothetical protein T16K5.160 - Arabidopsis
MIKELDLQDIPSVFICPISLEPMQDPVTLCTGQTYERLNIHKWFNLGHLTCPTTMQELWDDTVTPNKTLHHLIYTWFSQKYVLMKKRSEDVQGRAIEILGTLKKAKCQARVHALSELKQIVIAHLMARKTVVEEGGVSVISSLLGPFTSHAVGSEVVAILVSLDLDSDSKSGLMQPAKVSLIVDMLNDGSNETKINCARLIRGLVEEKGFRAELVSSHSLLVGLMRLVKDKRHRNGVSPALRLLKPISVHKQVRSLMVSIGAVPQLVDILPSLDPECLELALFVLDALCTDVEGRVAVKDSANTIPYTVRVLMRVSENCTNYALSILWSVCKLAPEECSPLAVEVGLAAKLLLVIQSGCDAALKQRSAELLKLCSLHYSDTMFISKCKLTRTIQ

SEQ ID NO: 40638 - protein, 372 aa, Arabidopsis thaliana
  peptide (1)..(372): Ceres Seq. ID no. 13489085
  misc_feature (1)..(61): Pfam Name: U-box domain Pfam Description: U-box domain
  misc_feature (1)..(364): Homolog of NCBI NO: 25408431 NR Description: hypothetical protein At2g35930 [imported] -
  misc_feature (1)..(350): Homolog of NCBI NO: 13539578 NR Description: photoperiod responsive protein [Solanum tuberosum
  misc_feature (1)..(81): Homolog of NCBI NO: 20330772 NR Description: Unknown protein [Oryza sativa (japonica
  misc_feature (1)..(371): Homolog of NCBI NO: 20330772 NR Description: Unknown protein [Oryza sativa (japonica
  misc_feature (1)..(364): Homolog of NCBI NO: 7486518 NR Description: hypothetical protein F6H11.10 - Arabidopsis
  misc_feature (1)..(372): Homolog of NCBI NO: 17064800 NR Description: Unknown protein [Arabidopsis thaliana]
  misc_feature (1)..(372): Homolog of NCBI NO: 15239204 NR Description: expressed protein [Arabidopsis thaliana]
  misc_feature (1)..(372): Homolog of NCBI NO: 21536926 NR Description: unknown [Arabidopsis thaliana]
  misc_feature (1)..(372): Homolog of NCBI NO: 18408953 NR Description: expressed protein [Arabidopsis thaliana]
  misc_feature (1)..(344): Homolog of NCBI NO: 11358045 NR Description: hypothetical protein T16K5.160 - Arabidopsis
MQDPVTLCTGQTYERLNIHKWFNLGHLTCPTTMQELWDDTVTPNKTLHHLIYTWFSQKYVLMKKRSEDVQGRAIEILGTLKKAKCQARVHALSELKQIVIAHLMARKTVVEEGGVSVISSLLGPFTSHAVGSEVVAILVSLDLDSDSKSGLMQPAKVSLIVDMLNDGSNETKINCARLIRGLVEEKGFRAELVSSHSLLVGLMRLVKDKRHRNGVSPALRLLKPISVHKQVRSLMVSIGAVPQLVDILPSLDPECLELALFVLDALCTDVEGRVAVKDSANTIPYTVRVLMRVSENCTNYALSILWSVCKLAPEECSPLAVEVGLAAKLLLVIQSGCDAALKQRSAELLKLCSLHYSDTMFISKCKLTRTIQ

SEQ ID NO: 40639 - protein, 340 aa, Arabidopsis thaliana
  peptide (1)..(340): Ceres Seq. ID no. 13489086
  misc_feature (1)..(332): Homolog of NCBI NO: 25408431 NR Description: hypothetical protein At2g35930 [imported] -
  misc_feature (1)..(318): Homolog of NCBI NO: 13539578 NR Description: photoperiod responsive protein [Solanum tuberosum
  misc_feature (1)..(49): Homolog of NCBI NO: 20330772 NR Description: Unknown protein [Oryza sativa (japonica
  misc_feature (1)..(339): Homolog of NCBI NO: 20330772 NR Description: Unknown protein [Oryza sativa (japonica
  misc_feature (1)..(332): Homolog of NCBI NO: 7486518 NR Description: hypothetical protein F6H11.10 - Arabidopsis
  misc_feature (1)..(340): Homolog of NCBI NO: 17064800 NR Description: Unknown protein [Arabidopsis thaliana]
  misc_feature (1)..(340): Homolog of NCBI NO: 15239204 NR Description: expressed protein [Arabidopsis thaliana]
  misc_feature (1)..(340): Homolog of NCBI NO: 21536926 NR Description: unknown [Arabidopsis thaliana]
  misc_feature (1)..(340): Homolog of NCBI NO: 18408953 NR Description: expressed protein [Arabidopsis thaliana]
  misc_feature (1)..(312): Homolog of NCBI NO: 11358045 NR Description: hypothetical protein T16K5.160 - Arabidopsis
MQELWDDTVTPNKTLHHLIYTWFSQKYVLMKKRSEDVQGRAIEILGTLKKAKCQARVHALSELKQIVIAHLMARKTVVEEGGVSVISSLLGPFTSHAVGSEVVAILVSLDLDSDSKSGLMQPAKVSLIVDMLNDGSNETKINCARLIRGLVEEKGFRAELVSSHSLLVGLMRLVKDKRHRNGVSPALRLLKPISVHKQVRSLMVSIGAVPQLVDILPSLDPECLELALFVLDALCTDVEGRVAVKDSANTIPYTVRVLMRVSENCTNYALSILWSVCKLAPEECSPLAVEVGLAAKLLLVIQSGCDAALKQRSAELLKLCSLHYSDTMFISKCKLTRTIQ

SEQ ID NO: 40640 - DNA, 1594 bp, Arabidopsis thaliana
  misc_feature (1)..(1594): Ceres Seq. ID no. 12439707
  misc_feature: MA Experiment ID: 108573 Result: Up-regulated in Transcription
  misc_feature: MA Experiment 108573 PARAMETER Experiment Name: At_Drought_cDNA_P Parameter: Timepoint (hr) Value: 6
  misc_feature: MA Experiment 108573 PARAMETER Experiment Name: At_Drought_cDNA_P Parameter: Tissue Value: Aerial
  misc_feature: MA Experiment 108573 PARAMETER Experiment Name: At_Drought_cDNA_P Parameter: Treatment Value: Drought vs. No Drought
  misc_feature: MA Experiment ID: 20000072 Result: Up-regulated in Transcription
  misc_feature: MA Experiment 20000072 PARAMETER Experiment Name: At_100uM_ABA_Mutants_cDNA_P Parameter: Plant Line Value: CS8105
  misc_feature: MA Experiment 20000072 PARAMETER Experiment Name: At_100uM_ABA_Mutants_cDNA_P Parameter: Timepoint (hr) Value: 6
  misc_feature: MA Experiment 20000072 PARAMETER Experiment Name: At_100uM_ABA_Mutants_cDNA_P Parameter: Tissue Value: Aerial
  misc_feature: MA Experiment 20000072 PARAMETER Experiment Name: At_100uM_ABA_Mutants_cDNA_P Parameter: Treatment Value: 100uM ABA vs. No Treatment
  misc_feature: MA Experiment ID: 20000184 Result: Down-regulated in Transcription
  misc_feature: MA Experiment 20000184 PARAMETER Experiment Name: At_Shoots__P Parameter: Age (day) Value: 7
  misc_feature: MA Experiment 20000184 PARAMETER Experiment Name: At_Shoots__P Parameter: Tissue Value: Shoots vs. Whole Plant
ataacgagaaccctttaccataaaaatctcaactttatcccttattcttatctgcaaaattcgttctcgtcccttggattatggttttttttgttcctcgagaaagttgattgctttcttggaatccatgcgtgccctttctctttgttgttttaaaggatgcgtctgcgttagattgttttagtaactttgtgaattgattaagcacttcttcaccataatcaagtttatagcttttgcttctgatcagatcctgttatggaatctccacattctgaggcatcaatcgtgaatggtagtatccatttgaatggcagtggtgaaaccaaaacaaagaatatagtcatgtcgtctgattcagacagtttcatcggtgtgcttgaggtttttgttcaccaagctagggacatccacaacatctgtatctatcataagcaagatgtgtatgctaagctttgtctcacaaatgatcccgaaaactccttgtccacaaagatcatcaatggtggagggcaaaaccctgtcttcgacgatacccttcagttcgacgttaagaacctggattgttcgcttaagtgtgagatatttatgatgagccgcgtgaagaattatcttgaggatcagttacttggattctctcttgtacctttgtctgaagtgattgtgaggaatgggaaattggagaaagagttctccctttcttcaaccgatttgtatcactctcctgcaggttttgtcgagttgtctctctcgtacgcaggagattcgcctgacgtgatgcatattcctgcggttccaactgcggatgagaccgagttggctcctatcgagtttgatgagagtgagtttttggatccaaagattgtctgtgaaaacaatcaaatggtgtctaagtacttctccactacgtgttctgattctgatgattttgcaagctctgaaactggctttgtggaagtaaacagcatcctgtctgcagttgttgaaactgctgttgacgaagcagcaccggccaatactgtctcaacaaatggaatctcatctccatcaactgcagttagctctggctcctcgggaactcatgatgtttcaaagcaatctagtgaaggaaacaactcagattcagaacaagaagcgaagaagccaacagatatcatcaagagtggtgatttagataagactgatgaagaagcagttgtgaaaccggttctgacagtgcacattgaaccagagcaaaaggtagtgcaacaagatattgttgacatgtacacaaaaagcttgcagcaattcactgagtcactggctaagatgaaacttcctttggacatcgatagcccaacccaatcagagaactcaagctcgtcccagcagacgccaaagagtgctagctcccgtgttttctacgggagtagagccttcttctgaagctcagaaatcatctcaagtttggcatcagaagtagcgagcatgtagtgaaagtgtaataagttaaaagtcgacactatctaaaatgtgtaactatcttcctttgaagcctttagcttttcttgttatctgcaacttttccaatttagtactaaagtttcataatccc

SEQ ID NO: 40641 - protein, 388 aa, Arabidopsis thaliana
  peptide (1)..(388): Ceres Seq. ID no. 12439708
  misc_feature (41)..(128): Pfam Name: C2 domain Pfam Description: C2 domain
  misc_feature (38)..(282): Homolog of NCBI NO: 34901084 NR Description: contains ESTs
  misc_feature (41)..(388): Homolog of NCBI NO: 34906644 NR Description: P0431G06.18 [Oryza sativa (japonica
  misc_feature (37)..(388): Homolog of NCBI NO: 18416832 NR Description: putative protein; protein id: At5g12300.1
  misc_feature (1)..(388): Homolog of NCBI NO: 24414275 NR Description: Unknown protein [Oryza sativa (japonica
  misc_feature (2)..(388): Homolog of NCBI NO: 28393796 NR Description: unknown protein [Arabidopsis thaliana]
  misc_feature (2)..(388): Homolog of NCBI NO: 30696612 NR Description: C2 domain-containing protein [Arabidopsis
  misc_feature (2)..(388): Homolog of NCBI NO: 9758185 NR Description: gene_id:MTE17.25~pir||T07080~similar to unknown
  misc_feature (1)..(388): Homolog of NCBI NO: 18403117 NR Description: Expressed protein
  misc_feature (1)..(388): Homolog of NCBI NO: 21593485 NR Description: unknown [Arabidopsis thaliana]
  misc_feature (1)..(388): Homolog of NCBI NO: 25405379 NR Description: unknown protein [imported] - Arabidopsis thaliana
MESPHSEASIVNGSIHLNGSGETKTKNIVMSSDSDSFIGVLEVFVHQARDIHNICIYHKQDVYAKLCLTNDPENSLSTKIINGGGQNPVFDDTLQFDVKNLDCSLKCEIFMMSRVKNYLEDQLLGFSLVPLSEVIVRNGKLEKEFSLSSTDLYHSPAGFVELSLSYAGDSPDVMHIPAVPTADETELAPIEFDESEFLDPKIVCENNQMVSKYFSTTCSDSDDFASSETGFVEVNSILSAVVETAVDEAAPANTVSTNGISSPSTAVSSGSSGTHDVSKQSSEGNNSDSEQEAKKPTDIIKSGDLDKTDEEAVVKPVLTVHIEPEQKVVQQDIVDMYTKSLQQFTESLAKMKLPLDIDSPTQSENSSSSQQTPKSASSRVFYGSRAFF

SEQ ID NO: 40642 - protein, 359 aa, Arabidopsis thaliana
  peptide (1)..(359): Ceres Seq. ID no. 12439709
  misc_feature (12)..(99): Pfam Name: C2 domain Pfam Description: C2 domain
  misc_feature (9)..(253): Homolog of NCBI NO: 34901084 NR Description: contains ESTs
  misc_feature (12)..(359): Homolog of NCBI NO: 34906644 NR Description: P0431G06.18 [Oryza sativa (japonica
  misc_feature (8)..(359): Homolog of NCBI NO: 18416832 NR Description: putative protein; protein id: At5g12300.1
  misc_feature (1)..(359): Homolog of NCBI NO: 24414275 NR Description: Unknown protein [Oryza sativa (japonica
  misc_feature (1)..(359): Homolog of NCBI NO: 28393796 NR Description: unknown protein [Arabidopsis thaliana]
  misc_feature (1)..(359): Homolog of NCBI NO: 30696612 NR Description: C2 domain-containing protein [Arabidopsis
  misc_feature (1)..(359): Homolog of NCBI NO: 9758185 NR Description: gene_id:MTE17.25~pir||T07080~similar to unknown
  misc_feature (1)..(359): Homolog of NCBI NO: 18403117 NR Description: Expressed protein
  misc_feature (1)..(359): Homolog of NCBI NO: 21593485 NR Description: unknown [Arabidopsis thaliana]
  misc_feature (1)..(359): Homolog of NCBI NO: 25405379 NR Description: unknown protein [imported] - Arabidopsis thaliana
MSSDSDSFIGVLEVFVHQARDIHNICIYHKQDVYAKLCLTNDPENSLSTKIINGGGQNPVFDDTLQFDVKNLDCSLKCEIFMMSRVKNYLEDQLLGFSLVPLSEVIVRNGKLEKEFSLSSTDLYHSPAGFVELSLSYAGDSPDVMHIPAVPTADETELAPIEFDESEFLDPKIVCENNQMVSKYFSTTCSDSDDFASSETGFVEVNSILSAVVETAVDEAAPANTVSTNGISSPSTAVSSGSSGTHDVSKQSSEGNNSDSEQEAKKPTDIIKSGDLDKTDEEAVVKPVLTVHIEPEQKVVQQDIVDMYTKSLQQFTESLAKMKLPLDIDSPTQSENSSSSQQTPKSASSRVFYGSRAFF

SEQ ID NO: 40643 - protein, 278 aa, Arabidopsis thaliana
  peptide (1)..(278): Ceres Seq. ID no. 12439710
  misc_feature (1)..(172): Homolog of NCBI NO: 34901084 NR Description: contains ESTs
  misc_feature (1)..(278): Homolog of NCBI NO: 34906644 NR Description: P0431G06.18 [Oryza sativa (japonica
  misc_feature (1)..(278): Homolog of NCBI NO: 18416832 NR Description: putative protein; protein id: At5g12300.1
  misc_feature (1)..(278): Homolog of NCBI NO: 24414275 NR Description: Unknown protein [Oryza sativa (japonica
  misc_feature (1)..(278): Homolog of NCBI NO: 28393796 NR Description: unknown protein [Arabidopsis thaliana]
  misc_feature (1)..(278): Homolog of NCBI NO: 30696612 NR Description: C2 domain-containing protein [Arabidopsis
  misc_feature (1)..(278): Homolog of NCBI NO: 9758185 NR Description: gene_id:MTE17.25~pir||T07080~similar to unknown
  misc_feature (1)..(278): Homolog of NCBI NO: 18403117 NR Description: Expressed protein
  misc_feature (1)..(278): Homolog of NCBI NO: 21593485 NR Description: unknown [Arabidopsis thaliana]
  misc_feature (1)..(278): Homolog of NCBI NO: 25405379 NR Description: unknown protein [imported] - Arabidopsis thaliana
MMSRVKNYLEDQLLGFSLVPLSEVIVRNGKLEKEFSLSSTDLYHSPAGFVELSLSYAGDSPDVMHIPAVPTADETELAPIEFDESEFLDPKIVCENNQMVSKYFSTTCSDSDDFASSETGFVEVNSILSAVVETAVDEAAPANTVSTNGISSPSTAVSSGSSGTHDVSKQSSEGNNSDSEQEAKKPTDIIKSGDLDKTDEEAVVKPVLTVHIEPEQKVVQQDIVDMYTKSLQQFTESLAKMKLPLDIDSPTQSENSSSSQQTPKSASSRVFYGSRAFF

SEQ ID NO: 40644 - DNA, 1529 bp, Arabidopsis thaliana
  misc_feature (1)..(1529): Ceres Seq. ID no. 13500021
  misc_feature: MA Experiment ID: 108434 Result: Up-regulated in Transcription
  misc_feature: MA Experiment 108434 PARAMETER Experiment Name: At_Root_Tips_cDNA_P Parameter: Tissue Value: Root Tips
  misc_feature: MA Experiment ID: 108462 Result: Down-regulated in Transcription
  misc_feature: MA Experiment 108462 PARAMETER Experiment Name: At_Germinating_Seeds_cDNA_P Parameter: Age (day) Value: 2 vs. 0
  misc_feature: MA Experiment 108462 PARAMETER Experiment Name: At_Germinating_Seeds_cDNA_P Parameter: Tissue Value: Germinating Seeds
  misc_feature: MA Experiment ID: 20000113 Result: Down-regulated in Transcription
  misc_feature: MA Experiment 20000113 PARAMETER Experiment Name: At_42deg_Heat_cDNA_P Parameter: Temperature (deg C) Value: 42 vs. 22
  misc_feature: MA Experiment 20000113 PARAMETER Experiment Name: At_42deg_Heat_cDNA_P Parameter: Timepoint (hr) Value: 8
  misc_feature: MA Experiment 20000113 PARAMETER Experiment Name: At_42deg_Heat_cDNA_P Parameter: Tissue Value: Aerial
  misc_feature: MA Experiment ID: 20000495 Result: Up-regulated in Transcription
  misc_feature: MA Experiment 20000495 PARAMETER Experiment Name: At_Guard_Cells_P Parameter: Harvest Date Value: 8/2/2002
  misc_feature: MA Experiment 20000495 PARAMETER Experiment Name: At_Guard_Cells_P Parameter: Organism Value: A. thaliana
  misc_feature: MA Experiment 20000495 PARAMETER Experiment Name: At_Guard_Cells_P Parameter: Tissue Value: Guard Cells vs. Leaves
  misc_feature: MA Experiment ID: 20000794 Result: Up-regulated in Transcription
  misc_feature: MA Experiment 20000794 PARAMETER Experiment Name: At_Petals_P Parameter: Age (day) Value: 23-25 days
  misc_feature: MA Experiment 20000794 PARAMETER Experiment Name: At_Petals_P Parameter: Plant Line Value: WS
  misc_feature: MA Experiment 20000794 PARAMETER Experiment Name: At_Petals_P Parameter: Tissue Value: Petals vs. Whole plant
  misc_feature: MA Experiment ID: 20001911 Result: Up-regulated in Transcription
  misc_feature: MA Experiment 20001911 PARAMETER Experiment Name: At_Drought_Reproduction_P Parameter: Age (day) Value: 40
  misc_feature: MA Experiment 20001911 PARAMETER Experiment Name: At_Drought_Reproduction_P Parameter: Organism Value: A. thaliana
  misc_feature: MA Experiment 20001911 PARAMETER Experiment Name: At_Drought_Reproduction_P Parameter: Plant Line Value: WS
  misc_feature: MA Experiment 20001911 PARAMETER Experiment Name: At_Drought_Reproduction_P Parameter: Timepoint (day) Value: 10
  misc_feature: MA Experiment 20001911 PARAMETER Experiment Name: At_Drought_Reproduction_P Parameter: Tissue Value: Flowers
  misc_feature: MA Experiment 20001911 PARAMETER Experiment Name: At_Drought_Reproduction_P Parameter: Treatment Value: Drought vs. No Drought
atcaaaaacccaaatctctctgttcgcagagaggatcaattcgtgattcagagaatcaaacttactgtgagagagagataacgaagatggacgctatgaggaagcaactcgatgtgctcatgggagctaacagaaacggcgatgtcactgaggtcaatcgcaaatactacgaccgcgatgtttgccgtctttacctctctggtctctgccctcacgagcttttccaattgacgaaaatggatatgggtccttgcccaaaggtgcactctttgcagctgaggaaagaatataaagatgcaaaggcaaaaggtgttgacaactatgatagggaattggaagatgcgatagataggcttattgttgagtgtgataggaagattggtagggctcttaatcgtcttcaagaagaggatgccaaagctgccattgcaatttctgtcacagaatttactcagtcacctgaaattcttgaattatcgaagcaaatcaaagaaaagatgaaggaagcagacctgcacgatcttgaaggcaaaacagatctgaagattagagctcttgagttagttgaagagatgaggacgaagagagctgacctacaggctgtgctactgttggatgcctttaacaaagataggacatccttgcaacaggcagttccagctcagcaaccagctgcaactttacctccgcccgatcctcgtactcaagaaatgatcaatgaaaaactaaagaaagcagaagagcttggtgaacaagggatggttgatgaagcgcagaaagcactagaagaggcggaagctcttaagaagcttactgctagacaagaacctgtagtggattcaaccaagtacactgctgctgacgtgcgcattacagaccagaagctgcgtctatgtgacatatgcggagcatttttgagcgtctatgacagtgatcgtcggttagctgatcattttggagggaagcttcacttgggttacatgctgatccgcgacaaattggcagagcttcaggaggagaagaacaaagttcacaaggaacgggtcgaagaaaggagatcaaaggagaggagtagagagcgagaatcaagtaaagacagagacggaggagataaccgtgaccgaggaagagatgttgaccgcaggagtagagatcgtgacaggcaccatgaccaccgagaacatgacagaaactataatcagtcacgtggctatgactcaagaagccggcgcagttcacggtcccggtctagggaaagaccgagggatcatgatcgccgcagacgccatgaccgctactaaaaccctgccaaagatggttgcacctggtttaagaggttcttacagatgcgtttaggatctatttggagttacaaacactttcttttttctttgctcaagtgttttaaggatttttgagattgtaacttactttaagtttgtaagaggagcttcttcagatatctttaatttgttttttatgttgttgacatcaaagacttgcgagtagaaagaagattttgttgatcc

SEQ ID NO: 40645 - protein, 432 aa, Arabidopsis thaliana
  peptide (1)..(432): Ceres Seq. ID no. 13500022
  misc_feature (170)..(431): Homolog of NCBI NO: 8922297 NR Description: LUC7-like; sarcoplasmic reticulum protein LUC7B1
  misc_feature (170)..(431): Homolog of NCBI NO: 8346914 NR Description: SR+89 [Homo sapiens]
  misc_feature (29)..(430): Homolog of NCBI NO: 24640172 NR Description: CG3198-PA [Drosophila melanogaster]
  misc_feature (29)..(429): Homolog of NCBI NO: 6017114 NR Description: unknown protein [Arabidopsis thaliana]
  misc_feature (126)..(432): Homolog of NCBI NO: 6017114 NR Description: unknown protein [Arabidopsis thaliana]
  misc_feature (79)..(432): Homolog of NCBI NO: 21595481 NR Description: unknown [Arabidopsis thaliana]
  misc_feature (29)..(432): Homolog of NCBI NO: 29367401 NR Description: sarcoplasmic reticulum protein-like protein
  misc_feature (101)..(432): Homolog of NCBI NO: 11357938 NR Description: hypothetical protein K3M16_10 - Arabidopsis
  misc_feature (29)..(432): Homolog of NCBI NO: 30678827 NR Description: expressed protein [Arabidopsis thaliana]
  misc_feature (29)..(432): Homolog of NCBI NO: 18418301 NR Description: expressed protein [Arabidopsis thaliana]
QKPKSLCSQRGSIRDSENQTYCEREITKMDAMRKQLDVLMGANRNGDVTEVNRKYYDRDVCRLYLSGLCPHELFQLTKMDMGPCPKVHSLQLRKEYKDAKAKGVDNYDRELEDAIDRLIVECDRKIGRALNRLQEEDAKAAIAISVTEFTQSPEILELSKQIKEKMKEADLHDLEGKTDLKIRALELVEEMRTKRADLQAVLLLDAFNKDRTSLQQAVPAQQPAATLPPPDPRTQEMINEKLKKAEELGEQGMVDEAQKALEEAEALKKLTARQEPVVDSTKYTAADVRITDQKLRLCDICGAFLSVYDSDRRLADHFGGKLHLGYMLIRDKLAELQEEKNKVHKERVEERRSKERSRERESSKDRDGGDNRDRGRDVDRRSRDRDRHHDHREHDRNYNQSRGYDSRSRRSSRSRSRERPRDHDRRRRHDRY

SEQ ID NO: 40646 - protein, 404 aa, Arabidopsis thaliana
  peptide (1)..(404): Ceres Seq. ID no. 13500023
  misc_feature (142)..(403): Homolog of NCBI NO: 8922297 NR Description: LUC7-like; sarcoplasmic reticulum protein LUC7B1
  misc_feature (142)..(403): Homolog of NCBI NO: 8346914 NR Description: SR+89 [Homo sapiens]
  misc_feature (1)..(402): Homolog of NCBI NO: 24640172 NR Description: CG3198-PA [Drosophila melanogaster]
  misc_feature (1)..(401): Homolog of NCBI NO: 6017114 NR Description: unknown protein [Arabidopsis thaliana]
  misc_feature (98)..(404): Homolog of NCBI NO: 6017114 NR Description: unknown protein [Arabidopsis thaliana]
  misc_feature (51)..(404): Homolog of NCBI NO: 21595481 NR Description: unknown [Arabidopsis thaliana]
  misc_feature (1)..(404): Homolog of NCBI NO: 29367401 NR Description: sarcoplasmic reticulum protein-like protein
  misc_feature (73)..(404): Homolog of NCBI NO: 11357938 NR Description: hypothetical protein K3M16_10 - Arabidopsis
  misc_feature (1)..(404): Homolog of NCBI NO: 30678827 NR Description: expressed protein [Arabidopsis thaliana]
  misc_feature (1)..(404): Homolog of NCBI NO: 18418301 NR Description: expressed protein [Arabidopsis thaliana]
MDAMRKQLDVLMGANRNGDVTEVNRKYYDRDVCRLYLSGLCPHELFQLTKMDMGPCPKVHSLQLRKEYKDAKAKGVDNYDRELEDAIDRLIVECDRKIGRALNRLQEEDAKAAIAISVTEFTQSPEILELSKQIKEKMKEADLHDLEGKTDLKIRALELVEEMRTKRADLQAVLLLDAFNKDRTSLQQAVPAQQPAATLPPPDPRTQEMINEKLKKAEELGEQGMVDEAQKALEEAEALKKLTARQEPVVDSTKYTAADVRITDQKLRLCDICGAFLSVYDSDRRLADHFGGKLHLGYMLIRDKLAELQEEKNKVHKERVEERRSKERSRERESSKDRDGGDNRDRGRDVDRRSRDRDRHHDHREHDRNYNQSRGYDSRSRRSSRSRSRERPRDHDRRRRHDRY

SEQ ID NO: 40647 - protein, 401 aa, Arabidopsis thaliana
  peptide (1)..(401): Ceres Seq. ID no. 13500024
  misc_feature (139)..(400): Homolog of NCBI NO: 8922297 NR Description: LUC7-like; sarcoplasmic reticulum protein LUC7B1
  misc_feature (139)..(400): Homolog of NCBI NO: 8346914 NR Description: SR+89 [Homo sapiens]
  misc_feature (1)..(399): Homolog of NCBI NO: 24640172 NR Description: CG3198-PA [Drosophila melanogaster]
  misc_feature (1)..(398): Homolog of NCBI NO: 6017114 NR Description: unknown protein [Arabidopsis thaliana]
  misc_feature (95)..(401): Homolog of NCBI NO: 6017114 NR Description: unknown protein [Arabidopsis thaliana]
  misc_feature (48)..(401): Homolog of NCBI NO: 21595481 NR Description: unknown [Arabidopsis thaliana]
  misc_feature (1)..(401): Homolog of NCBI NO: 29367401 NR Description: sarcoplasmic reticulum protein-like protein
  misc_feature (70)..(401): Homolog of NCBI NO: 11357938 NR Description: hypothetical protein K3M16_10 - Arabidopsis
  misc_feature (1)..(401): Homolog of NCBI NO: 30678827 NR Description: expressed protein [Arabidopsis thaliana]
  misc_feature (1)..(401): Homolog of NCBI NO: 18418301 NR Description: expressed protein [Arabidopsis thaliana]
MRKQLDVLMGANRNGDVTEVNRKYYDRDVCRLYLSGLCPHELFQLTKMDMGPCPKVHSLQLRKEYKDAKAKGVDNYDRELEDAIDRLIVECDRKIGRALNRLQEEDAKAAIAISVTEFTQSPEILELSKQIKEKMKEADLHDLEGKTDLKIRALELVEEMRTKRADLQAVLLLDAFNKDRTSLQQAVPAQQPAATLPPPDPRTQEMINEKLKKAEELGEQGMVDEAQKALEEAEALKKLTARQEPVVDSTKYTAADVRITDQKLRLCDICGAFLSVYDSDRRLADHFGGKLHLGYMLIRDKLAELQEEKNKVHKERVEERRSKERSRERESSKDRDGGDNRDRGRDVDRRSRDRDRHHDHREHDRNYNQSRGYDSRSRRSSRSRSRERPRDHDRRRRHDRY

SEQ ID NO: 40648 - DNA, 1531 bp, Arabidopsis thaliana
  misc_feature (1)..(1531): Ceres Seq. ID no. 13504905
  misc_feature: MA Experiment ID: 108433 Result: Up-regulated in Transcription
  misc_feature: MA Experiment 108433 PARAMETER Experiment Name: At_rhl_Mutant2_cDNA_P Parameter: Age (day) Value: 7
  misc_feature: MA Experiment 108433 PARAMETER Experiment Name: At_rhl_Mutant2_cDNA_P Parameter: Organism Value: A. thaliana
  misc_feature: MA Experiment 108433 PARAMETER Experiment Name: At_rhl_Mutant2_cDNA_P Parameter: Plant Line Value: rhl Mutant vs. wt landsburg
  misc_feature: MA Experiment 108433 PARAMETER Experiment Name: At_rhl_Mutant2_cDNA_P Parameter: Tissue Value: Roots
  misc_feature: MA Experiment ID: 108434 Result: Down-regulated in Transcription
  misc_feature: MA Experiment 108434 PARAMETER Experiment Name: At_Root_Tips_cDNA_P Parameter: Tissue Value: Root Tips
  misc_feature: MA Experiment ID: 108461 Result: Up-regulated in Transcription
  misc_feature: MA Experiment 108461 PARAMETER Experiment Name: At_Germinating_Seeds_cDNA_P Parameter: Age (day) Value: 1 vs. 0
  misc_feature: MA Experiment 108461 PARAMETER Experiment Name: At_Germinating_Seeds_cDNA_P Parameter: Tissue Value: Germinating Seeds
  misc_feature: MA Experiment ID: 108462 Result: Up-regulated in Transcription
  misc_feature: MA Experiment 108462 PARAMETER Experiment Name: At_Germinating_Seeds_cDNA_P Parameter: Age (day) Value: 2 vs. 0
  misc_feature: MA Experiment 108462 PARAMETER Experiment Name: At_Germinating_Seeds_cDNA_P Parameter: Tissue Value: Germinating Seeds
  misc_feature: MA Experiment ID: 108463 Result: Up-regulated in Transcription
  misc_feature: MA Experiment 108463 PARAMETER Experiment Name: At_Germinating_Seeds_cDNA_P Parameter: Age (day) Value: 3 vs. 0
  misc_feature: MA Experiment 108463 PARAMETER Experiment Name: At_Germinating_Seeds_cDNA_P Parameter: Tissue Value: Germinating Seeds
  misc_feature: MA Experiment ID: 108464 Result: Up-regulated in Transcription
  misc_feature: MA Experiment 108464 PARAMETER Experiment Name: At_Germinating_Seeds_cDNA_P Parameter: Age (day) Value: 4 vs. 0
  misc_feature: MA Experiment 108464 PARAMETER Experiment Name: At_Germinating_Seeds_cDNA_P Parameter: Tissue Value: Germinating Seeds
  misc_feature: MA Experiment ID: 108501 Result: Down-regulated in Transcription
  misc_feature: MA Experiment 108501 PARAMETER Experiment Name: At_ap2_floral_buds_cDNA_P Parameter: Plant Line Value: ap2 (Ler.)
  misc_feature: MA Experiment 108501 PARAMETER Experiment Name: At_ap2_floral_buds_cDNA_P Parameter: Tissue Value: Closed Flower
  misc_feature: MA Experiment ID: 108572 Result: Up-regulated in Transcription
  misc_feature: MA Experiment 108572 PARAMETER Experiment Name: At_Drought_cDNA_P Parameter: Timepoint (hr) Value: 1
  misc_feature: MA Experiment 108572 PARAMETER Experiment Name: At_Drought_cDNA_P Parameter: Tissue Value: Aerial
  misc_feature: MA Experiment 108572 PARAMETER Experiment Name: At_Drought_cDNA_P Parameter: Treatment Value: Drought vs. No Drought
  misc_feature: MA Experiment ID: 108576 Result: Down-regulated in Transcription
  misc_feature: MA Experiment 108576 PARAMETER Experiment Name: At_42deg_Heat_cDNA_P Parameter: Temperature (deg C) Value: 42 vs. 22
  misc_feature: MA Experiment 108576 PARAMETER Experiment Name: At_42deg_Heat_cDNA_P Parameter: Timepoint (hr) Value: 1
  misc_feature: MA Experiment 108576 PARAMETER Experiment Name: At_42deg_Heat_cDNA_P Parameter: Tissue Value: Aerial
  misc_feature: MA Experiment ID: 108577 Result: Down-regulated in Transcription
  misc_feature: MA Experiment 108577 PARAMETER Experiment Name: At_42deg_Heat_cDNA_P Parameter: Temperature (deg C) Value: 42 vs. 22
  misc_feature: MA Experiment 108577 PARAMETER Experiment Name: At_42deg_Heat_cDNA_P Parameter: Timepoint (hr) Value: 6
  misc_feature: MA Experiment 108577 PARAMETER Experiment Name: At_42deg_Heat_cDNA_P Parameter: Tissue Value: Aerial
  misc_feature: MA Experiment ID: 108579 Result: Down-regulated in Transcription
  misc_feature: MA Experiment 108579 PARAMETER Experiment Name: At_4deg_Cold_cDNA_P Parameter: Temperature (deg C) Value: 4 vs. 22
  misc_feature: MA Experiment 108579 PARAMETER Experiment Name: At_4deg_Cold_cDNA_P Parameter: Timepoint (hr) Value: 6
  misc_feature: MA Experiment 108579 PARAMETER Experiment Name: At_4deg_Cold_cDNA_P Parameter: Tissue Value: Aerial
  misc_feature: MA Experiment ID: 108585 Result: Up-regulated in Transcription
  misc_feature: MA Experiment 108585 PARAMETER Experiment Name: At_5mM_NaNP_cDNA_P Parameter: Timepoint (hr) Value: 6
  misc_feature: MA Experiment 108585 PARAMETER Experiment Name: At_5mM_NaNP_cDNA_P Parameter: Tissue Value: Aerial
  misc_feature: MA Experiment 108585 PARAMETER Experiment Name: At_5mM_NaNP_cDNA_P Parameter: Treatment Value: null
  misc_feature: MA Experiment ID: 108594 Result: Up-regulated in Transcription
  misc_feature: MA Experiment 108594 PARAMETER Experiment Name: At_Ler-rhl_Root_cDNA_P Parameter: Plant Line Value: null
  misc_feature: MA Experiment ID: 108595 Result: Down-regulated in Transcription
  misc_feature: MA Experiment 108595 PARAMETER Experiment Name: At_Ler-pi_Ovule_cDNA_P Parameter: Plant Line Value: null
  misc_feature: MA Experiment ID: 20000070 Result: Up-regulated in Transcription
  misc_feature: MA Experiment 20000070 PARAMETER Experiment Name: At_100uM_ABA_Mutants_cDNA_P Parameter: Plant Line Value: CS24
  misc_feature: MA Experiment 20000070 PARAMETER Experiment Name: At_100uM_ABA_Mutants_cDNA_P Parameter: Timepoint (hr) Value: 6
  misc_feature: MA Experiment 20000070 PARAMETER Experiment Name: At_100uM_ABA_Mutants_cDNA_P Parameter: Tissue Value: Aerial
  misc_feature: MA Experiment 20000070 PARAMETER Experiment Name: At_100uM_ABA_Mutants_cDNA_P Parameter: Treatment Value: 100uM ABA vs. No Treatment
  misc_feature: MA Experiment ID: 20000111 Result: Down-regulated in Transcription
  misc_feature: MA Experiment 20000111 PARAMETER Experiment Name: At_42deg_Heat_cDNA_P Parameter: Temperature (deg C) Value: 42 vs. 22
  misc_feature: MA Experiment 20000111 PARAMETER Experiment Name: At_42deg_Heat_cDNA_P Parameter: Timepoint (hr) Value: 6
  misc_feature: MA Experiment 20000111 PARAMETER Experiment Name: At_42deg_Heat_cDNA_P Parameter: Tissue Value: Aerial
  misc_feature: MA Experiment ID: 20000112 Result: Down-regulated in Transcription
  misc_feature: MA Experiment 20000112 PARAMETER Experiment Name: At_42deg_Heat_cDNA_P Parameter: Temperature (deg C) Value: 42 vs. 22
  misc_feature: MA Experiment 20000112 PARAMETER Experiment Name: At_42deg_Heat_cDNA_P Parameter: Timepoint (hr) Value: 2
  misc_feature: MA Experiment 20000112 PARAMETER Experiment Name: At_42deg_Heat_cDNA_P Parameter: Tissue Value: Aerial
  misc_feature: MA Experiment ID: 20000113 Result: Down-regulated in Transcription
  misc_feature: MA Experiment 20000113 PARAMETER Experiment Name: At_42deg_Heat_cDNA_P Parameter: Temperature (deg C) Value: 42 vs. 22
  misc_feature: MA Experiment 20000113 PARAMETER Experiment Name: At_42deg_Heat_cDNA_P Parameter: Timepoint (hr) Value: 8
  misc_feature: MA Experiment 20000113 PARAMETER Experiment Name: At_42deg_Heat_cDNA_P Parameter: Tissue Value: Aerial
  misc_feature: MA Experiment ID: 20000306 Result: Up-regulated in Transcription
  misc_feature: MA Experiment 20000306 PARAMETER Experiment Name: At_Germinating_Seeds_Sub_P Parameter: Age (hr) Value: 6 vs. 0
  misc_feature: MA Experiment 20000306 PARAMETER Experiment Name: At_Germinating_Seeds_Sub_P Parameter: Organism Value: A. thaliana
  misc_feature: MA Experiment 20000306 PARAMETER Experiment Name: At_Germinating_Seeds_Sub_P Parameter: Plant Line Value: WS
  misc_feature: MA Experiment 20000306 PARAMETER Experiment Name: At_Germinating_Seeds_Sub_P Parameter: Tissue Value: Germinating Seeds
  misc_feature: MA Experiment ID: 20000307 Result: Up-regulated in Transcription
  misc_feature: MA Experiment 20000307 PARAMETER Experiment Name: At_Germinating_Seeds_Sub_P Parameter: Age (hr) Value: 24 vs. 0
  misc_feature: MA Experiment 20000307 PARAMETER Experiment Name: At_Germinating_Seeds_Sub_P Parameter: Organism Value: A. thaliana
  misc_feature: MA Experiment 20000307 PARAMETER Experiment Name: At_Germinating_Seeds_Sub_P Parameter: Plant Line Value: WS
  misc_feature: MA Experiment 20000307 PARAMETER Experiment Name: At_Germinating_Seeds_Sub_P Parameter: Tissue Value: Germinating Seeds
  misc_feature: MA Experiment ID: 20000314 Result: Down-regulated in Transcription
  misc_feature: MA Experiment 20000314 PARAMETER Experiment Name: At_14day_Shoots-Roots_Sub_P Parameter: Age (day) Value: 14
  misc_feature: MA Experiment 20000314 PARAMETER Experiment Name: At_14day_Shoots-Roots_Sub_P Parameter: Organism Value: A. thaliana
  misc_feature: MA Experiment 20000314 PARAMETER Experiment Name: At_14day_Shoots-Roots_Sub_P Parameter: Plant Line Value: WS
  misc_feature: MA Experiment 20000314 PARAMETER Experiment Name: At_14day_Shoots-Roots_Sub_P Parameter: Tissue Value: Roots vs. Whole Plant
  misc_feature: MA Experiment ID: 20000315 Result: Down-regulated in Transcription
  misc_feature: MA Experiment 20000315 PARAMETER Experiment Name: At_14day_Shoots-Roots_Sub_P Parameter: Age (day) Value: 14
  misc_feature: MA Experiment 20000315 PARAMETER Experiment Name: At_14day_Shoots-Roots_Sub_P Parameter: Organism Value: A. thaliana
  misc_feature: MA Experiment 20000315 PARAMETER Experiment Name: At_14day_Shoots-Roots_Sub_P Parameter: Plant Line Value: WS
  misc_feature: MA Experiment 20000315 PARAMETER Experiment Name: At_14day_Shoots-Roots_Sub_P Parameter: Tissue Value: Shoots vs. Whole Plant
  misc_feature: MA Experiment ID: 20000327 Result: Down-regulated in Transcription
  misc_feature: MA Experiment 20000327 PARAMETER Experiment Name: At_42deg_Heat_Sub_P Parameter: Age (day) Value: 14
  misc_feature: MA Experiment 20000327 PARAMETER Experiment Name: At_42deg_Heat_Sub_P Parameter: Organism Value: A. thaliana
  misc_feature: MA Experiment 20000327 PARAMETER Experiment Name: At_42deg_Heat_Sub_P Parameter: Plant Line Value: WS
  misc_feature: MA Experiment 20000327 PARAMETER Experiment Name: At_42deg_Heat_Sub_P Parameter: Temperature (deg C) Value: 42 vs. 22
  misc_feature: MA Experiment 20000327 PARAMETER Experiment Name: At_42deg_Heat_Sub_P Parameter: Timepoint (hr) Value: 1
  misc_feature: MA Experiment 20000327 PARAMETER Experiment Name: At_42deg_Heat_Sub_P Parameter: Tissue Value: Aerial
  misc_feature: MA Experiment ID: 20000328 Result: Down-regulated in Transcription
  misc_feature: MA Experiment 20000328 PARAMETER Experiment Name: At_42deg_Heat_Sub_P Parameter: Age (day) Value: 14
  misc_feature: MA Experiment 20000328 PARAMETER Experiment Name: At_42deg_Heat_Sub_P Parameter: Organism Value: A. thaliana
  misc_feature: MA Experiment 20000328 PARAMETER Experiment Name: At_42deg_Heat_Sub_P Parameter: Plant Line Value: WS
  misc_feature: MA Experiment 20000328 PARAMETER Experiment Name: At_42deg_Heat_Sub_P Parameter: Temperature (deg C) Value: 42 vs. 22
  misc_feature: MA Experiment 20000328 PARAMETER Experiment Name: At_42deg_Heat_Sub_P Parameter: Timepoint (hr) Value: 6
  misc_feature: MA Experiment 20000328 PARAMETER Experiment Name: At_42deg_Heat_Sub_P Parameter: Tissue Value: Aerial
  misc_feature: MA Experiment ID: 20000329 Result: Down-regulated in Transcription
  misc_feature: MA Experiment 20000329 PARAMETER Experiment Name: At_4deg_Cold_Sub_P Parameter: Age (day) Value: 14
  misc_feature: MA Experiment 20000329 PARAMETER Experiment Name: At_4deg_Cold_Sub_P Parameter: Organism Value: A. thaliana
  misc_feature: MA Experiment 20000329 PARAMETER Experiment Name: At_4deg_Cold_Sub_P Parameter: Plant Line Value: WS
  misc_feature: MA Experiment 20000329 PARAMETER Experiment Name: At_4deg_Cold_Sub_P Parameter: Temperature (deg C) Value: 4 vs. 22
  misc_feature: MA Experiment 20000329 PARAMETER Experiment Name: At_4deg_Cold_Sub_P Parameter: Timepoint (hr) Value: 6
  misc_feature: MA Experiment 20000329 PARAMETER Experiment Name: At_4deg_Cold_Sub_P Parameter: Tissue Value: Aerial
  misc_feature: MA Experiment ID: 20000355 Result: Down-regulated in Transcription
  misc_feature: MA Experiment 20000355 PARAMETER Experiment Name: At_Siliques_Sub_P Parameter: Age (day) Value: 21
  misc_feature: MA Experiment 20000355 PARAMETER Experiment Name: At_Siliques_Sub_P Parameter: Organism Value: A. thaliana
  misc_feature: MA Experiment 20000355 PARAMETER Experiment Name: At_Siliques_Sub_P Parameter: Plant Line Value: WS
  misc_feature: MA Experiment 20000355 PARAMETER Experiment Name: At_Siliques_Sub_P Parameter: Tissue Value: Less Than 5mm Siliques vs. Whole Plant
  misc_feature: MA Experiment ID: 20000440 Result: Down-regulated in Transcription
  misc_feature: MA Experiment 20000440 PARAMETER Experiment Name: At_Closed-Flower__Sub_P Parameter: Tissue Value: Closed Flower vs. Whole Plant
aattgtcaaaaactcacaaggcattatcatgtggacatgcaaccttttttttctatacgcattacagaaatgaaaacaatgattaggatcgcatgcacgtcaagaaaacaacctatagctgtactttgatatactaactcaaatcatgtcttggctcaagcacacaagcttctagctagatacaactgcaaacatatatgatggctttgtctaataagaagacgacgacttgggcaccgctttgaccagtcaatacaccaaatctgtatgtatcatttatataaatattatctttccacagttgttgaagaatcacatagacagcacacacggattccatggagactaaacagagtatccctctcctcatgccctataagatgggacccttcaatctttctcacagggttgttttggcgccattgactagatcgagatcgtatggtaacattcctcagcctaatgccaaattatattacactcagagaacaacacctggtggtcttcttatttccgaatcctgtgtagtctccgagacatcattgggctatccggatttacctggattatggaacagagaccaagtggaggcatggaagcccatcgtggatgcggttcattcgaaaggcggtatcttcttctgccagatttggcatggtggcagagtttttcatcaagaccagccaaatggggaagcacccgtctcctctacagacaagccattgatgtgcaagaacatgtatggaggtcagtttaagcctccacggcggttaaggagcgacgagcttcccgccattgtcaacgactttagaatcgctgcacgaaacgcgatcgaagctggcttcgatggagtggaggttcacggcgcacatggttacctgatcgatcagttcctgaaagacaaagtgaatgacagaagtgaccaatatggtgggtcattagagaaccgctgtagatttgctcttgaagtaatcgaagcagtggtgaacgagatcggttcagatcgtgttggaatcagactctcgccatttgcagattacatggagtcaggagactcgaatccagaagcattagggctctacctggtgcaagctatgaacaagcatggcatggagtcgtctacggtcacatggttgaacctagaatgaaaacccttgaaggaatcttcgaatgcacggaatcgcttacgcccatgcgaaaagccttcaaaggtacgttcatagtagcaggaggatattctagagaagacgggaacaaggcggtggaagagggaagaaccgatcttgtggcttatggacggccgttcttggcgaatccggatctgacgaggagattcgaactcaatgagccgttgaataggtacgatagatcaacgttctacacttcagatcctgtagtgggctatacagactaccctttcctcgagaccacagatacaacaactgcttaaggggtttattcagatgcattattagcaaaacatatttttcaatcacataaggctaaaagcttgcctcaaacaagcttcggc

SEQ ID NO: 40649 - protein, 269 aa, Arabidopsis thaliana
  peptide (1)..(269): Ceres Seq. ID no. 13504906
  misc_feature (8)..(256): Pfam Name: NADH:flavin oxidoreductase / NADH oxidase family Pfam Description: NADH:flavin oxidoreductase / NADH oxidase family
  misc_feature (1)..(258): Homolog of NCBI NO: 4894182 NR Description: 12-oxophytodienoate reductase [Lycopersicon
  misc_feature (2)..(258): Homolog of NCBI NO: 2765083 NR Description: 12-oxophytodienoate reductase [Arabidopsis
  misc_feature (1)..(258): Homolog of NCBI NO: 14277800 NR Description: Chain A, Crystal Structure Of 12-Oxophytodienoate
  misc_feature (2)..(258): Homolog of NCBI NO: 21593388 NR Description: 12-oxophytodienoate reductase (OPR1) [Arabidopsis
  misc_feature (2)..(258): Homolog of NCBI NO: 15223138 NR Description: 12-oxophytodienoate reductase (OPR1) [Arabidopsis
  misc_feature (1)..(258): Homolog of NCBI NO: 40645459 NR Description: LEDI-5c protein [Lithospermum erythrorhizon]
  misc_feature (2)..(258): Homolog of NCBI NO: 26450549 NR Description: putative 12-oxophytodienoate reductase OPR2
  misc_feature (2)..(258): Homolog of NCBI NO: 15223140 NR Description: 12-oxophytodienoate reductase (OPR2) [Arabidopsis
  misc_feature (1)..(269): Homolog of NCBI NO: 22329640 NR Description: 12-oxophytodienoate reductase, putative
  misc_feature (1)..(256): Homolog of NCBI NO: 25325975 NR Description: hypothetical protein T10F20.3 - Arabidopsis
METKQSIPLLMPYKMGPFNLSHRVVLAPLTRSRSYGNIPQPNAKLYYTQRTTPGGLLISESCVVSETSLGYPDLPGLWNRDQVEAWKPIVDAVHSKGGIFFCQIWHGGRVFHQDQPNGEAPVSSTDKPLMCKNMYGGQFKPPRRLRSDELPAIVNDFRIAARNAIEAGFDGVEVHGAHGYLIDQFLKDKVNDRSDQYGGSLENRCRFALEVIEAVVNEIGSDRVGIRLSPFADYMESGDSNPEALGLYLVQAMNKHGMESSTVTWLNLE

SEQ ID NO: 40650 - protein, 259 aa, Arabidopsis thaliana
  peptide (1)..(259): Ceres Seq. ID no. 13504907
  misc_feature (1)..(246): Pfam Name: NADH:flavin oxidoreductase / NADH oxidase family Pfam Description: NADH:flavin oxidoreductase / NADH oxidase family
  misc_feature (1)..(248): Homolog of NCBI NO: 4894182 NR Description: 12-oxophytodienoate reductase [Lycopersicon
  misc_feature (1)..(248): Homolog of NCBI NO: 2765083 NR Description: 12-oxophytodienoate reductase [Arabidopsis
  misc_feature (1)..(248): Homolog of NCBI NO: 14277800 NR Description: Chain A, Crystal Structure Of 12-Oxophytodienoate
  misc_feature (1)..(248): Homolog of NCBI NO: 21593388 NR Description: 12-oxophytodienoate reductase (OPR1) [Arabidopsis
  misc_feature (1)..(248): Homolog of NCBI NO: 15223138 NR Description: 12-oxophytodienoate reductase (OPR1) [Arabidopsis
  misc_feature (1)..(248): Homolog of NCBI NO: 40645459 NR Description: LEDI-5c protein [Lithospermum erythrorhizon]
  misc_feature (1)..(248): Homolog of NCBI NO: 26450549 NR Description: putative 12-oxophytodienoate reductase OPR2
  misc_feature (1)..(248): Homolog of NCBI NO: 15223140 NR Description: 12-oxophytodienoate reductase (OPR2) [Arabidopsis
  misc_feature (1)..(259): Homolog of NCBI NO: 22329640 NR Description: 12-oxophytodienoate reductase, putative
  misc_feature (1)..(246): Homolog of NCBI NO: 25325975 NR Description: hypothetical protein T10F20.3 - Arabidopsis
MPYKMGPFNLSHRVVLAPLTRSRSYGNIPQPNAKLYYTQRTTPGGLLISESCVVSETSLGYPDLPGLWNRDQVEAWKPIVDAVHSKGGIFFCQIWHGGRVFHQDQPNGEAPVSSTDKPLMCKNMYGGQFKPPRRLRSDELPAIVNDFRIAARNAIEAGFDGVEVHGAHGYLIDQFLKDKVNDRSDQYGGSLENRCRFALEVIEAVVNEIGSDRVGIRLSPFADYMESGDSNPEALGLYLVQAMNKHGMESSTVTWLNLE

SEQ ID NO: 40651 - protein, 255 aa, Arabidopsis thaliana
  peptide (1)..(255): Ceres Seq. ID no. 13504908
  misc_feature (1)..(242): Pfam Name: NADH:flavin oxidoreductase / NADH oxidase family Pfam Description: NADH:flavin oxidoreductase / NADH oxidase family
  misc_feature (1)..(244): Homolog of NCBI NO: 4894182 NR Description: 12-oxophytodienoate reductase [Lycopersicon
  misc_feature (1)..(244): Homolog of NCBI NO: 2765083 NR Description: 12-oxophytodienoate reductase [Arabidopsis
  misc_feature (1)..(244): Homolog of NCBI NO: 14277800 NR Description: Chain A, Crystal Structure Of 12-Oxophytodienoate
  misc_feature (1)..(244): Homolog of NCBI NO: 21593388 NR Description: 12-oxophytodienoate reductase (OPR1) [Arabidopsis
  misc_feature (1)..(244): Homolog of NCBI NO: 15223138 NR Description: 12-oxophytodienoate reductase (OPR1) [Arabidopsis
  misc_feature (1)..(244): Homolog of NCBI NO: 40645459 NR Description: LEDI-5c protein [Lithospermum erythrorhizon]
  misc_feature (1)..(244): Homolog of NCBI NO: 26450549 NR Description: putative 12-oxophytodienoate reductase OPR2
  misc_feature (1)..(244): Homolog of NCBI NO: 15223140 NR Description: 12-oxophytodienoate reductase (OPR2) [Arabidopsis
  misc_feature (1)..(255): Homolog of NCBI NO: 22329640 NR Description: 12-oxophytodienoate reductase, putative
  misc_feature (1)..(242): Homolog of NCBI NO: 25325975 NR Description: hypothetical protein T10F20.3 - Arabidopsis
MGPFNLSHRVVLAPLTRSRSYGNIPQPNAKLYYTQRTTPGGLLISESCVVSETSLGYPDLPGLWNRDQVEAWKPIVDAVHSKGGIFFCQIWHGGRVFHQDQPNGEAPVSSTDKPLMCKNMYGGQFKPPRRLRSDELPAIVNDFRIAARNAIEAGFDGVEVHGAHGYLIDQFLKDKVNDRSDQYGGSLENRCRFALEVIEAVVNEIGSDRVGIRLSPFADYMESGDSNPEALGLYLVQAMNKHGMESSTVTWLNLE

SEQ ID NO: 40652 - DNA, 1374 bp, Arabidopsis thaliana
  misc_feature (1)..(1374): Ceres Seq. ID no. 12397166
  misc_feature: MA Experiment ID: 108462 Result: Up-regulated in Transcription
  misc_feature: MA Experiment 108462 PARAMETER Experiment Name: At_Germinating_Seeds_cDNA_P Parameter: Age (day) Value: 2 vs. 0
  misc_feature: MA Experiment 108462 PARAMETER Experiment Name: At_Germinating_Seeds_cDNA_P Parameter: Tissue Value: Germinating Seeds
  misc_feature: MA Experiment ID: 108463 Result: Up-regulated in Transcription
  misc_feature: MA Experiment 108463 PARAMETER Experiment Name: At_Germinating_Seeds_cDNA_P Parameter: Age (day) Value: 3 vs. 0
  misc_feature: MA Experiment 108463 PARAMETER Experiment Name: At_Germinating_Seeds_cDNA_P Parameter: Tissue Value: Germinating Seeds
  misc_feature: MA Experiment ID: 108488 Result: Down-regulated in Transcription
  misc_feature: MA Experiment ID: 108561 Result: Up-regulated in Transcription
  misc_feature: MA Experiment 108561 PARAMETER Experiment Name: At_100uM_ABA_cDNA_P Parameter: Timepoint (hr) Value: 6
  misc_feature: MA Experiment 108561 PARAMETER Experiment Name: At_100uM_ABA_cDNA_P Parameter: Tissue Value: Aerial
  misc_feature: MA Experiment 108561 PARAMETER Experiment Name: At_100uM_ABA_cDNA_P Parameter: Treatment Value: 100uM ABA vs. No Treatment
  misc_feature: MA Experiment ID: 108573 Result: Up-regulated in Transcription
  misc_feature: MA Experiment 108573 PARAMETER Experiment Name: At_Drought_cDNA_P Parameter: Timepoint (hr) Value: 6
  misc_feature: MA Experiment 108573 PARAMETER Experiment Name: At_Drought_cDNA_P Parameter: Tissue Value: Aerial
  misc_feature: MA Experiment 108573 PARAMETER Experiment Name: At_Drought_cDNA_P Parameter: Treatment Value: Drought vs. No Drought
  misc_feature: MA Experiment ID: 108577 Result: Down-regulated in Transcription
  misc_feature: MA Experiment 108577 PARAMETER Experiment Name: At_42deg_Heat_cDNA_P Parameter: Temperature (deg C) Value: 42 vs. 22
  misc_feature: MA Experiment 108577 PARAMETER Experiment Name: At_42deg_Heat_cDNA_P Parameter: Timepoint (hr) Value: 6
  misc_feature: MA Experiment 108577 PARAMETER Experiment Name: At_42deg_Heat_cDNA_P Parameter: Tissue Value: Aerial
  misc_feature: MA Experiment ID: 108605 Result: Up-regulated in Transcription
  misc_feature: MA Experiment 108605 PARAMETER Experiment Name: At_100uM_ABA_cDNA_P Parameter: Timepoint (hr) Value: 6
  misc_feature: MA Experiment 108605 PARAMETER Experiment Name: At_100uM_ABA_cDNA_P Parameter: Tissue Value: Aerial
  misc_feature: MA Experiment 108605 PARAMETER Experiment Name: At_100uM_ABA_cDNA_P Parameter: Treatment Value: 100uM ABA vs. No Treatment
  misc_feature: MA Experiment ID: 108607 Result: Up-regulated in Transcription
  misc_feature: MA Experiment 108607 PARAMETER Experiment Name: At_100uM_ABA_cDNA_P Parameter: Timepoint (hr) Value: 4
  misc_feature: MA Experiment 108607 PARAMETER Experiment Name: At_100uM_ABA_cDNA_P Parameter: Tissue Value: Aerial
  misc_feature: MA Experiment 108607 PARAMETER Experiment Name: At_100uM_ABA_cDNA_P Parameter: Treatment Value: 100uM ABA vs. No Treatment
  misc_feature: MA Experiment ID: 108609 Result: Up-regulated in Transcription
  misc_feature: MA Experiment 108609 PARAMETER Experiment Name: At_100uM_ABA_cDNA_P Parameter: Timepoint (hr) Value: 24
  misc_feature: MA Experiment 108609 PARAMETER Experiment Name: At_100uM_ABA_cDNA_P Parameter: Tissue Value: Aerial
  misc_feature: MA Experiment 108609 PARAMETER Experiment Name: At_100uM_ABA_cDNA_P Parameter: Treatment Value: 100uM ABA vs. No Treatment
  misc_feature: MA Experiment ID: 20000068 Result: Down-regulated in Transcription
  misc_feature: MA Experiment ID: 20000069 Result: Up-regulated in Transcription
  misc_feature: MA Experiment 20000069 PARAMETER Experiment Name: At_100uM_ABA_Mutants_cDNA_P Parameter: Plant Line Value: CS23
  misc_feature: MA Experiment 20000069 PARAMETER Experiment Name: At_100uM_ABA_Mutants_cDNA_P Parameter: Timepoint (hr) Value: 6
  misc_feature: MA Experiment 20000069 PARAMETER Experiment Name: At_100uM_ABA_Mutants_cDNA_P Parameter: Tissue Value: Aerial
  misc_feature: MA Experiment 20000069 PARAMETER Experiment Name: At_100uM_ABA_Mutants_cDNA_P Parameter: Treatment Value: 100uM ABA vs. No Treatment
  misc_feature: MA Experiment ID: 20000070 Result: Up-regulated in Transcription
  misc_feature: MA Experiment 20000070 PARAMETER Experiment Name: At_100uM_ABA_Mutants_cDNA_P Parameter: Plant Line Value: CS24
  misc_feature: MA Experiment 20000070 PARAMETER Experiment Name: At_100uM_ABA_Mutants_cDNA_P Parameter: Timepoint (hr) Value: 6
  misc_feature: MA Experiment 20000070 PARAMETER Experiment Name: At_100uM_ABA_Mutants_cDNA_P Parameter: Tissue Value: Aerial
  misc_feature: MA Experiment 20000070 PARAMETER Experiment Name: At_100uM_ABA_Mutants_cDNA_P Parameter: Treatment Value: 100uM ABA vs. No Treatment
  misc_feature: MA Experiment ID: 20000071 Result: Up-regulated in Transcription
  misc_feature: MA Experiment 20000071 PARAMETER Experiment Name: At_100uM_ABA_Mutants_cDNA_P Parameter: Plant Line Value: CS8104
  misc_feature: MA Experiment 20000071 PARAMETER Experiment Name: At_100uM_ABA_Mutants_cDNA_P Parameter: Timepoint (hr) Value: 6
  misc_feature: MA Experiment 20000071 PARAMETER Experiment Name: At_100uM_ABA_Mutants_cDNA_P Parameter: Tissue Value: Aerial
  misc_feature: MA Experiment 20000071 PARAMETER Experiment Name: At_100uM_ABA_Mutants_cDNA_P Parameter: Treatment Value: 100uM ABA vs. No Treatment
  misc_feature: MA Experiment ID: 20000072 Result: Up-regulated in Transcription
  misc_feature: MA Experiment 20000072 PARAMETER Experiment Name: At_100uM_ABA_Mutants_cDNA_P Parameter: Plant Line Value: CS8105
  misc_feature: MA Experiment 20000072 PARAMETER Experiment Name: At_100uM_ABA_Mutants_cDNA_P Parameter: Timepoint (hr) Value: 6
  misc_feature: MA Experiment 20000072 PARAMETER Experiment Name: At_100uM_ABA_Mutants_cDNA_P Parameter: Tissue Value: Aerial
  misc_feature: MA Experiment 20000072 PARAMETER Experiment Name: At_100uM_ABA_Mutants_cDNA_P Parameter: Treatment Value: 100uM ABA vs. No Treatment
  misc_feature: MA Experiment ID: 20000086 Result: Up-regulated in Transcription
  misc_feature: MA Experiment 20000086 PARAMETER Experiment Name: At_100uM_ABA_Mutants_cDNA_P Parameter: Plant Line Value: CS22
  misc_feature: MA Experiment 20000086 PARAMETER Experiment Name: At_100uM_ABA_Mutants_cDNA_P Parameter: Timepoint (hr) Value: 6
  misc_feature: MA Experiment 20000086 PARAMETER Experiment Name: At_100uM_ABA_Mutants_cDNA_P Parameter: Tissue Value: Aerial
  misc_feature: MA Experiment 20000086 PARAMETER Experiment Name: At_100uM_ABA_Mutants_cDNA_P Parameter: Treatment Value: 100uM ABA vs. No Treatment
  misc_feature: MA Experiment ID: 20000087 Result: Up-regulated in Transcription
  misc_feature: MA Experiment 20000087 PARAMETER Experiment Name: At_100uM_ABA_Mutants_cDNA_P Parameter: Plant Line Value: WS
  misc_feature: MA Experiment 20000087 PARAMETER Experiment Name: At_100uM_ABA_Mutants_cDNA_P Parameter: Timepoint (hr) Value: 6
  misc_feature: MA Experiment 20000087 PARAMETER Experiment Name: At_100uM_ABA_Mutants_cDNA_P Parameter: Tissue Value: Aerial
  misc_feature: MA Experiment 20000087 PARAMETER Experiment Name: At_100uM_ABA_Mutants_cDNA_P Parameter: Treatment Value: 100uM ABA vs. No Treatment
  misc_feature: MA Experiment ID: 20000088 Result: Up-regulated in Transcription
  misc_feature: MA Experiment 20000088 PARAMETER Experiment Name: At_100uM_ABA_Mutants_cDNA_P Parameter: Plant Line Value: Landsberg
  misc_feature: MA Experiment 20000088 PARAMETER Experiment Name: At_100uM_ABA_Mutants_cDNA_P Parameter: Timepoint (hr) Value: 6
  misc_feature: MA Experiment 20000088 PARAMETER Experiment Name: At_100uM_ABA_Mutants_cDNA_P Parameter: Tissue Value: Aerial
  misc_feature: MA Experiment 20000088 PARAMETER Experiment Name: At_100uM_ABA_Mutants_cDNA_P Parameter: Treatment Value: 100uM ABA vs. No Treatment
  misc_feature: MA Experiment ID: 20000089 Result: Up-regulated in Transcription
  misc_feature: MA Experiment ID: 20000113 Result: Down-regulated in Transcription
  misc_feature: MA Experiment 20000113 PARAMETER Experiment Name: At_42deg_Heat_cDNA_P Parameter: Temperature (deg C) Value: 42 vs. 22
  misc_feature: MA Experiment 20000113 PARAMETER Experiment Name: At_42deg_Heat_cDNA_P Parameter: Timepoint (hr) Value: 8
  misc_feature: MA Experiment 20000113 PARAMETER Experiment Name: At_42deg_Heat_cDNA_P Parameter: Tissue Value: Aerial
  misc_feature: MA Experiment ID: 20000117 Result: Up-regulated in Transcription
  misc_feature: MA Experiment 20000117 PARAMETER Experiment Name: At_100uM_ABA_Mutants_cDNA_P Parameter: Plant Line Value: Columbia
  misc_feature: MA Experiment 20000117 PARAMETER Experiment Name: At_100uM_ABA_Mutants_cDNA_P Parameter: Timepoint (hr) Value: 6
  misc_feature: MA Experiment 20000117 PARAMETER Experiment Name: At_100uM_ABA_Mutants_cDNA_P Parameter: Tissue Value: Aerial
  misc_feature: MA Experiment 20000117 PARAMETER Experiment Name: At_100uM_ABA_Mutants_cDNA_P Parameter: Treatment Value: 100uM ABA vs. No Treatment
  misc_feature: MA Experiment ID: 20000169 Result: Up-regulated in Transcription
  misc_feature: MA Experiment 20000169 PARAMETER Experiment Name: At_100uM_ABA_P Parameter: Age (day) Value: 14
  misc_feature: MA Experiment 20000169 PARAMETER Experiment Name: At_100uM_ABA_P Parameter: Organism Value: A. thaliana
  misc_feature: MA Experiment 20000169 PARAMETER Experiment Name: At_100uM_ABA_P Parameter: Plant Line Value: WS
  misc_feature: MA Experiment 20000169 PARAMETER Experiment Name: At_100uM_ABA_P Parameter: Timepoint (hr) Value: 6
  misc_feature: MA Experiment 20000169 PARAMETER Experiment Name: At_100uM_ABA_P Parameter: Tissue Value: Aerial
  misc_feature: MA Experiment 20000169 PARAMETER Experiment Name: At_100uM_ABA_P Parameter: Treatment Value: 100uM ABA vs. No Treatment
  misc_feature: MA Experiment ID: 20000173 Result: Down-regulated in Transcription
  misc_feature: MA Experiment 20000173 PARAMETER Experiment Name: At_42deg_Heat_P Parameter: Age (day) Value: 14
  misc_feature: MA Experiment 20000173 PARAMETER Experiment Name: At_42deg_Heat_P Parameter: Organism Value: A. thaliana
  misc_feature: MA Experiment 20000173 PARAMETER Experiment Name: At_42deg_Heat_P Parameter: Plant Line Value: WS
  misc_feature: MA Experiment 20000173 PARAMETER Experiment Name: At_42deg_Heat_P Parameter: Temperature (deg C) Value: 42 vs. 22
  misc_feature: MA Experiment 20000173 PARAMETER Experiment Name: At_42deg_Heat_P Parameter: Timepoint (hr) Value: 6
  misc_feature: MA Experiment 20000173 PARAMETER Experiment Name: At_42deg_Heat_P Parameter: Tissue Value: Aerial
  misc_feature: MA Experiment ID: 20000185 Result: Up-regulated in Transcription
  misc_feature: MA Experiment 20000185 PARAMETER Experiment Name: At_Roots__P Parameter: Age (day) Value: 7 vs. 21
  misc_feature: MA Experiment 20000185 PARAMETER Experiment Name: At_Roots__P Parameter: Organism Value: A. thaliana
  misc_feature: MA Experiment 20000185 PARAMETER Experiment Name: At_Roots__P Parameter: Tissue Value: Roots vs. Whole Plant
  misc_feature: MA Experiment ID: 20000227 Result: Up-regulated in Transcription
  misc_feature: MA Experiment 20000227 PARAMETER Experiment Name: At_Root-Tips-vs-Tops_P Parameter: Tissue Value: Root Tips vs. Root Tops
  misc_feature: MA Experiment ID: 20000264 Result: Up-regulated in Transcription
  misc_feature: MA Experiment 20000264 PARAMETER Experiment Name: At_Open_Flower_P Parameter: Age (day) Value: 21
  misc_feature: MA Experiment 20000264 PARAMETER Experiment Name: At_Open_Flower_P Parameter: Plant Line Value: WS
  misc_feature: MA Experiment 20000264 PARAMETER Experiment Name: At_Open_Flower_P Parameter: Tissue Value: Open Flower vs. Whole Plant
  misc_feature: MA Experiment ID: 20000267 Result: Up-regulated in Transcription
  misc_feature: MA Experiment 20000267 PARAMETER Experiment Name: At_Drought_P Parameter: Age (day) Value: 7
  misc_feature: MA Experiment 20000267 PARAMETER Experiment Name: At_Drought_P Parameter: Organism Value: A. thaliana
  misc_feature: MA Experiment 20000267 PARAMETER Experiment Name: At_Drought_P Parameter: Plant Line Value: WS
  misc_feature: MA Experiment 20000267 PARAMETER Experiment Name: At_Drought_P Parameter: Timepoint (hr) Value: 6
  misc_feature: MA Experiment 20000267 PARAMETER Experiment Name: At_Drought_P Parameter: Tissue Value: Whole Plant
  misc_feature: MA Experiment 20000267 PARAMETER Experiment Name: At_Drought_P Parameter: Treatment Value: Drought vs. No Drought
  misc_feature: MA Experiment ID: 20000268 Result: Up-regulated in Transcription
  misc_feature: MA Experiment 20000268 PARAMETER Experiment Name: At_100mM_NaCl__P Parameter: Age (day) Value: 14
  misc_feature: MA Experiment 20000268 PARAMETER Experiment Name: At_100mM_NaCl__P Parameter: Organism Value: A. thaliana
  misc_feature: MA Experiment 20000268 PARAMETER Experiment Name: At_100mM_NaCl__P Parameter: Plant Line Value: WS
  misc_feature: MA Experiment 20000268 PARAMETER Experiment Name: At_100mM_NaCl__P Parameter: Timepoint (hr) Value: 6
  misc_feature: MA Experiment 20000268 PARAMETER Experiment Name: At_100mM_NaCl__P Parameter: Tissue Value: Whole Plant
  misc_feature: MA Experiment 20000268 PARAMETER Experiment Name: At_100mM_NaCl__P Parameter: Treatment Value: 100mM NaCl vs. No Treatment
  misc_feature: MA Experiment ID: 20000286 Result: Up-regulated in Transcription
  misc_feature: MA Experiment 20000286 PARAMETER Experiment Name: At_Open_Flower_P Parameter: Age (day) Value: 21
  misc_feature: MA Experiment 20000286 PARAMETER Experiment Name: At_Open_Flower_P Parameter: Plant Line Value: WS
  misc_feature: MA Experiment 20000286 PARAMETER Experiment Name: At_Open_Flower_P Parameter: Tissue Value: Half Open vs. Whole Plant
  misc_feature: MA Experiment ID: 20000436 Result: Up-regulated in Transcription
  misc_feature: MA Experiment 20000436 PARAMETER Experiment Name: At_Drought_P Parameter: Age (day) Value: 7
  misc_feature: MA Experiment 20000436 PARAMETER Experiment Name: At_Drought_P Parameter: Organism Value: A. thaliana
  misc_feature: MA Experiment 20000436 PARAMETER Experiment Name: At_Drought_P Parameter: Plant Line Value: WS
  misc_feature: MA Experiment 20000436 PARAMETER Experiment Name: At_Drought_P Parameter: Timepoint (hr) Value: 12
  misc_feature: MA Experiment 20000436 PARAMETER Experiment Name: At_Drought_P Parameter: Tissue Value: Whole Plant
  misc_feature: MA Experiment 20000436 PARAMETER Experiment Name: At_Drought_P Parameter: Treatment Value: Drought vs. No Drought
  misc_feature: MA Experiment ID: 20000437 Result: Up-regulated in Transcription
  misc_feature: MA Experiment 20000437 PARAMETER Experiment Name: At_Drought_P Parameter: Age (day) Value: 8
  misc_feature: MA Experiment 20000437 PARAMETER Experiment Name: At_Drought_P Parameter: Organism Value: A. thaliana
  misc_feature: MA Experiment 20000437 PARAMETER Experiment Name: At_Drought_P Parameter: Plant Line Value: WS
  misc_feature: MA Experiment 20000437 PARAMETER Experiment Name: At_Drought_P Parameter: Timepoint (hr) Value: 24
  misc_feature: MA Experiment 20000437 PARAMETER Experiment Name: At_Drought_P Parameter: Tissue Value: Whole Plant
  misc_feature: MA Experiment 20000437 PARAMETER Experiment Name: At_Drought_P Parameter: Treatment Value: Drought vs. No Drought
  misc_feature: MA Experiment ID: 20000453 Result: Up-regulated in Transcription
  misc_feature: MA Experiment 20000453 PARAMETER Experiment Name: At_100uM_ABA_P Parameter: Age (day) Value: 15
  misc_feature: MA Experiment 20000453 PARAMETER Experiment Name: At_100uM_ABA_P Parameter: Organism Value: A. thaliana
  misc_feature: MA Experiment 20000453 PARAMETER Experiment Name: At_100uM_ABA_P Parameter: Plant Line Value: WS
  misc_feature: MA Experiment 20000453 PARAMETER Experiment Name: At_100uM_ABA_P Parameter: Timepoint (hr) Value: 24
  misc_feature: MA Experiment 20000453 PARAMETER Experiment Name: At_100uM_ABA_P Parameter: Tissue Value: Aerial
  misc_feature: MA Experiment 20000453 PARAMETER Experiment Name: At_100uM_ABA_P Parameter: Treatment Value: 100uM ABA vs. No Treatment
  misc_feature: MA Experiment ID: 20000709 Result: Down-regulated in Transcription
  misc_feature: MA Experiment 20000709 PARAMETER Experiment Name: At_15mM_NH4NO3_L-to-H_P Parameter: Age (hr) Value: 14
  misc_feature: MA Experiment 20000709 PARAMETER Experiment Name: At_15mM_NH4NO3_L-to-H_P Parameter: Organism Value: A. thaliana
  misc_feature: MA Experiment 20000709 PARAMETER Experiment Name: At_15mM_NH4NO3_L-to-H_P Parameter: Plant Line Value: WS
  misc_feature: MA Experiment 20000709 PARAMETER Experiment Name: At_15mM_NH4NO3_L-to-H_P Parameter: Timepoint (hr) Value: 4
  misc_feature: MA Experiment 20000709 PARAMETER Experiment Name: At_15mM_NH4NO3_L-to-H_P Parameter: Tissue Value: Aerial
  misc_feature: MA Experiment 20000709 PARAMETER Experiment Name: At_15mM_NH4NO3_L-to-H_P Parameter: Treatment Value: 15mM NH4NO3 vs. 30mM Mannitol
  misc_feature: MA Experiment ID: 20000794 Result: Up-regulated in Transcription
  misc_feature: MA Experiment 20000794 PARAMETER Experiment Name: At_Petals_P Parameter: Age (day) Value: 23-25 days
  misc_feature: MA Experiment 20000794 PARAMETER Experiment Name: At_Petals_P Parameter: Plant Line Value: WS
  misc_feature: MA Experiment 20000794 PARAMETER Experiment Name: At_Petals_P Parameter: Tissue Value: Petals vs. Whole plant
  misc_feature: MA Experiment ID: 20001247 Result: Down-regulated in Transcription
  misc_feature: MA Experiment 20001247 PARAMETER Experiment Name: At_Far-red-induction_P Parameter: Age (day) Value: 7
  misc_feature: MA Experiment 20001247 PARAMETER Experiment Name: At_Far-red-induction_P Parameter: Light Value: Far-red vs. White
  misc_feature: MA Experiment 20001247 PARAMETER Experiment Name: At_Far-red-induction_P Parameter: Organism Value: A. thaliana
  misc_feature: MA Experiment 20001247 PARAMETER Experiment Name: At_Far-red-induction_P Parameter: Plant Line Value: Columbia
  misc_feature: MA Experiment 20001247 PARAMETER Experiment Name: At_Far-red-induction_P Parameter: Timepoint (hr) Value: 1
  misc_feature: MA Experiment 20001247 PARAMETER Experiment Name: At_Far-red-induction_P Parameter: Tissue Value: Whole Plant
  misc_feature: MA Experiment ID: 20001248 Result: Down-regulated in Transcription
  misc_feature: MA Experiment 20001248 PARAMETER Experiment Name: At_Far-red-induction_P Parameter: Age (day) Value: 7
  misc_feature: MA Experiment 20001248 PARAMETER Experiment Name: At_Far-red-induction_P Parameter: Light Value: Far-red vs. White
  misc_feature: MA Experiment 20001248 PARAMETER Experiment Name: At_Far-red-induction_P Parameter: Organism Value: A. thaliana
  misc_feature: MA Experiment 20001248 PARAMETER Experiment Name: At_Far-red-induction_P Parameter: Plant Line Value: Columbia
  misc_feature: MA Experiment 20001248 PARAMETER Experiment Name: At_Far-red-induction_P Parameter: Timepoint (hr) Value: 4
  misc_feature: MA Experiment 20001248 PARAMETER Experiment Name: At_Far-red-induction_P Parameter: Tissue Value: Whole Plant
  misc_feature: MA Experiment ID: 20001450 Result: Down-regulated in Transcription
  misc_feature: MA Experiment 20001450 PARAMETER Experiment Name: At_Far-red-induction_P Parameter: Age (day) Value: 7
  misc_feature: MA Experiment 20001450 PARAMETER Experiment Name: At_Far-red-induction_P Parameter: Light Value: Far-red vs. White
  misc_feature: MA Experiment 20001450 PARAMETER Experiment Name: At_Far-red-induction_P Parameter: Organism Value: A. thaliana
  misc_feature: MA Experiment 20001450 PARAMETER Experiment Name: At_Far-red-induction_P Parameter: Plant Line Value: Columbia
  misc_feature: MA Experiment 20001450 PARAMETER Experiment Name: At_Far-red-induction_P Parameter: Timepoint (hr) Value: 8
  misc_feature: MA Experiment 20001450 PARAMETER Experiment Name: At_Far-red-induction_P Parameter: Tissue Value: Whole Plant
  misc_feature: MA Experiment ID: 20001451 Result: Down-regulated in Transcription
  misc_feature: MA Experiment 20001451 PARAMETER Experiment Name: At_Far-red-induction_P Parameter: Age (day) Value: 7
  misc_feature: MA Experiment 20001451 PARAMETER Experiment Name: At_Far-red-induction_P Parameter: Light Value: Far-red vs. White
  misc_feature: MA Experiment 20001451 PARAMETER Experiment Name: At_Far-red-induction_P Parameter: Organism Value: A. thaliana
  misc_feature: MA Experiment 20001451 PARAMETER Experiment Name: At_Far-red-induction_P Parameter: Plant Line Value: Columbia
  misc_feature: MA Experiment 20001451 PARAMETER Experiment Name: At_Far-red-induction_P Parameter: Timepoint (hr) Value: 24
  misc_feature: MA Experiment 20001451 PARAMETER Experiment Name: At_Far-red-induction_P Parameter: Tissue Value: Whole Plant
  misc_feature: MA Experiment ID: 20001504 Result: Up-regulated in Transcription
  misc_feature: MA Experiment 20001504 PARAMETER Experiment Name: At_Far-red-enriched_P Parameter: Age (day) Value: 10
  misc_feature: MA Experiment 20001504 PARAMETER Experiment Name: At_Far-red-enriched_P Parameter: Light Value: Far-red enriched vs. White
  misc_feature: MA Experiment 20001504 PARAMETER Experiment Name: At_Far-red-enriched_P Parameter: Organism Value: A. thaliana
  misc_feature: MA Experiment 20001504 PARAMETER Experiment Name: At_Far-red-enriched_P Parameter: Plant Line Value: Columbia
  misc_feature: MA Experiment 20001504 PARAMETER Experiment Name: At_Far-red-enriched_P Parameter: Timepoint (day) Value: 6
  misc_feature: MA Experiment 20001504 PARAMETER Experiment Name: At_Far-red-enriched_P Parameter: Tissue Value: Whole Plant
  misc_feature: MA Experiment ID: 20001554 Result: Up-regulated in Transcription
  misc_feature: MA Experiment 20001554 PARAMETER Experiment Name: At_Drought_Soil_Dry_P Parameter: Age (day) Value: 21
  misc_feature: MA Experiment 20001554 PARAMETER Experiment Name: At_Drought_Soil_Dry_P Parameter: Organism Value: A. thaliana
  misc_feature: MA Experiment 20001554 PARAMETER Experiment Name: At_Drought_Soil_Dry_P Parameter: Plant Line Value: WS
  misc_feature: MA Experiment 20001554 PARAMETER Experiment Name: At_Drought_Soil_Dry_P Parameter: Post Timepoint (hr) Value: None
  misc_feature: MA Experiment 20001554 PARAMETER Experiment Name: At_Drought_Soil_Dry_P Parameter: Post-Treatment Value: None
  misc_feature: MA Experiment 20001554 PARAMETER Experiment Name: At_Drought_Soil_Dry_P Parameter: Timepoint (day) Value: 7
  misc_feature: MA Experiment 20001554 PARAMETER Experiment Name: At_Drought_Soil_Dry_P Parameter: Treatment Value: Drought vs. No Drought
  misc_feature: MA Experiment ID: 20001555 Result: Up-regulated in Transcription
  misc_feature: MA Experiment 20001555 PARAMETER Experiment Name: At_Drought_Soil_Dry_P Parameter: Age (day) Value: 24
  misc_feature: MA Experiment 20001555 PARAMETER Experiment Name: At_Drought_Soil_Dry_P Parameter: Organism Value: A. thaliana
  misc_feature: MA Experiment 20001555 PARAMETER Experiment Name: At_Drought_Soil_Dry_P Parameter: Plant Line Value: WS
  misc_feature: MA Experiment 20001555 PARAMETER Experiment Name: At_Drought_Soil_Dry_P Parameter: Post Timepoint (hr) Value: None
  misc_feature: MA Experiment 20001555 PARAMETER Experiment Name: At_Drought_Soil_Dry_P Parameter: Post-Treatment Value: None
  misc_feature: MA Experiment 20001555 PARAMETER Experiment Name: At_Drought_Soil_Dry_P Parameter: Timepoint (day) Value: 10
  misc_feature: MA Experiment 20001555 PARAMETER Experiment Name: At_Drought_Soil_Dry_P Parameter: Treatment Value: Drought vs. No Drought
  misc_feature: MA Experiment ID: 20001556 Result: Up-regulated in Transcription
  misc_feature: MA Experiment 20001556 PARAMETER Experiment Name: At_Drought_Soil_Dry_P Parameter: Age (day) Value: 26
  misc_feature: MA Experiment 20001556 PARAMETER Experiment Name: At_Drought_Soil_Dry_P Parameter: Organism Value: A. thaliana
  misc_feature: MA Experiment 20001556 PARAMETER Experiment Name: At_Drought_Soil_Dry_P Parameter: Plant Line Value: WS
  misc_feature: MA Experiment 20001556 PARAMETER Experiment Name: At_Drought_Soil_Dry_P Parameter: Post Timepoint (hr) Value: None
  misc_feature: MA Experiment 20001556 PARAMETER Experiment Name: At_Drought_Soil_Dry_P Parameter: Post-Treatment Value: None
  misc_feature: MA Experiment 20001556 PARAMETER Experiment Name: At_Drought_Soil_Dry_P Parameter: Timepoint (day) Value: 12
  misc_feature: MA Experiment 20001556 PARAMETER Experiment Name: At_Drought_Soil_Dry_P Parameter: Treatment Value: Drought vs. No Drought
  misc_feature: MA Experiment ID: 20001559 Result: Up-regulated in Transcription
  misc_feature: MA Experiment 20001559 PARAMETER Experiment Name: At_Drought_Soil_Dry_P Parameter: Age (day) Value: 28
  misc_feature: MA Experiment 20001559 PARAMETER Experiment Name: At_Drought_Soil_Dry_P Parameter: Organism Value: A. thaliana
  misc_feature: MA Experiment 20001559 PARAMETER Experiment Name: At_Drought_Soil_Dry_P Parameter: Plant Line Value: WS
  misc_feature: MA Experiment 20001559 PARAMETER Experiment Name: At_Drought_Soil_Dry_P Parameter: Post Timepoint (hr) Value: 29
  misc_feature: MA Experiment 20001559 PARAMETER Experiment Name: At_Drought_Soil_Dry_P Parameter: Post-Treatment Value: Re-Water vs. No Drought
  misc_feature: MA Experiment 20001559 PARAMETER Experiment Name: At_Drought_Soil_Dry_P Parameter: Timepoint (day) Value: 14
  misc_feature: MA Experiment 20001559 PARAMETER Experiment Name: At_Drought_Soil_Dry_P Parameter: Treatment Value: Drought vs. No Drought
  misc_feature: MA Experiment ID: 20001560 Result: Up-regulated in Transcription
  misc_feature: MA Experiment 20001560 PARAMETER Experiment Name: At_Drought_Soil_Dry_P Parameter: Age (day) Value: 28
  misc_feature: MA Experiment 20001560 PARAMETER Experiment Name: At_Drought_Soil_Dry_P Parameter: Organism Value: A. thaliana
  misc_feature: MA Experiment 20001560 PARAMETER Experiment Name: At_Drought_Soil_Dry_P Parameter: Plant Line Value: WS
  misc_feature: MA Experiment 20001560 PARAMETER Experiment Name: At_Drought_Soil_Dry_P Parameter: Post Timepoint (hr) Value: None
  misc_feature: MA Experiment 20001560 PARAMETER Experiment Name: At_Drought_Soil_Dry_P Parameter: Post-Treatment Value: None
  misc_feature: MA Experiment 20001560 PARAMETER Experiment Name: At_Drought_Soil_Dry_P Parameter: Timepoint (day) Value: 14
  misc_feature: MA Experiment 20001560 PARAMETER Experiment Name: At_Drought_Soil_Dry_P Parameter: Treatment Value: Drought vs. No Drought
  misc_feature: MA Experiment ID: 20001757 Result: Down-regulated in Transcription
  misc_feature: MA Experiment 20001757 PARAMETER Experiment Name: At_50mM_NH4NO3_L-to-H_P Parameter: Timepoint (hr) Value: 6
  misc_feature: MA Experiment 20001757 PARAMETER Experiment Name: At_50mM_NH4NO3_L-to-H_P Parameter: Tissue Value: Leaf
  misc_feature: MA Experiment 20001757 PARAMETER Experiment Name: At_50mM_NH4NO3_L-to-H_P Parameter: Treatment Value: 50mM NH4NO3 vs 100mM Mannitol
  misc_feature: MA Experiment ID: 20001768 Result: Up-regulated in Transcription
  misc_feature: MA Experiment 20001768 PARAMETER Experiment Name: At_Far-red-enriched-adult_P Parameter: Age (day) Value: 28
  misc_feature: MA Experiment 20001768 PARAMETER Experiment Name: At_Far-red-enriched-adult_P Parameter: Light Value: Far-red enriched vs. White
  misc_feature: MA Experiment 20001768 PARAMETER Experiment Name: At_Far-red-enriched-adult_P Parameter: Organism Value: A. thaliana
  misc_feature: MA Experiment 20001768 PARAMETER Experiment Name: At_Far-red-enriched-adult_P Parameter: Plant Line Value: Columbia
  misc_feature: MA Experiment 20001768 PARAMETER Experiment Name: At_Far-red-enriched-adult_P Parameter: Timepoint (hr) Value: 1
  misc_feature: MA Experiment 20001768 PARAMETER Experiment Name: At_Far-red-enriched-adult_P Parameter: Tissue Value: Aerial
  misc_feature: MA Experiment ID: 20001770 Result: Up-regulated in Transcription
  misc_feature: MA Experiment 20001770 PARAMETER Experiment Name: At_Far-red-enriched-adult_P Parameter: Age (day) Value: 28
  misc_feature: MA Experiment 20001770 PARAMETER Experiment Name: At_Far-red-enriched-adult_P Parameter: Light Value: Far-red enriched vs. White
  misc_feature: MA Experiment 20001770 PARAMETER Experiment Name: At_Far-red-enriched-adult_P Parameter: Organism Value: A. thaliana
  misc_feature: MA Experiment 20001770 PARAMETER Experiment Name: At_Far-red-enriched-adult_P Parameter: Plant Line Value: Columbia
  misc_feature: MA Experiment 20001770 PARAMETER Experiment Name: At_Far-red-enriched-adult_P Parameter: Timepoint (hr) Value: 8
  misc_feature: MA Experiment 20001770 PARAMETER Experiment Name: At_Far-red-enriched-adult_P Parameter: Tissue Value: Aerial
  misc_feature: MA Experiment ID: 20001771 Result: Up-regulated in Transcription
  misc_feature: MA Experiment 20001771 PARAMETER Experiment Name: At_Far-red-enriched-adult_P Parameter: Age (day) Value: 28
  misc_feature: MA Experiment 20001771 PARAMETER Experiment Name: At_Far-red-enriched-adult_P Parameter: Light Value: Far-red enriched vs. White
  misc_feature: MA Experiment 20001771 PARAMETER Experiment Name: At_Far-red-enriched-adult_P Parameter: Organism Value: A. thaliana
  misc_feature: MA Experiment 20001771 PARAMETER Experiment Name: At_Far-red-enriched-adult_P Parameter: Plant Line Value: Columbia
  misc_feature: MA Experiment 20001771 PARAMETER Experiment Name: At_Far-red-enriched-adult_P Parameter: Timepoint (hr) Value: 16
  misc_feature: MA Experiment 20001771 PARAMETER Experiment Name: At_Far-red-enriched-adult_P Parameter: Tissue Value: Aerial
  misc_feature: MA Experiment ID: 20001773 Result: Up-regulated in Transcription
  misc_feature: MA Experiment 20001773 PARAMETER Experiment Name: At_Far-red-enriched-adult_P Parameter: Age (day) Value: 30
  misc_feature: MA Experiment 20001773 PARAMETER Experiment Name: At_Far-red-enriched-adult_P Parameter: Light Value: Far-red enriched vs. White
  misc_feature: MA Experiment 20001773 PARAMETER Experiment Name: At_Far-red-enriched-adult_P Parameter: Organism Value: A. thaliana
  misc_feature: MA Experiment 20001773 PARAMETER Experiment Name: At_Far-red-enriched-adult_P Parameter: Plant Line Value: Columbia
  misc_feature: MA Experiment 20001773 PARAMETER Experiment Name: At_Far-red-enriched-adult_P Parameter: Timepoint (hr) Value: 48
  misc_feature: MA Experiment 20001773 PARAMETER Experiment Name: At_Far-red-enriched-adult_P Parameter: Tissue Value: Aerial
  misc_feature: MA Experiment ID: 20001904 Result: Up-regulated in Transcription
  misc_feature: MA Experiment 20001904 PARAMETER Experiment Name: At_Drought_Reproduction_P Parameter: Age (day) Value: 37
  misc_feature: MA Experiment 20001904 PARAMETER Experiment Name: At_Drought_Reproduction_P Parameter: Organism Value: A. thaliana
  misc_feature: MA Experiment 20001904 PARAMETER Experiment Name: At_Drought_Reproduction_P Parameter: Plant Line Value: WS
  misc_feature: MA Experiment 20001904 PARAMETER Experiment Name: At_Drought_Reproduction_P Parameter: Timepoint (day) Value: 7
  misc_feature: MA Experiment 20001904 PARAMETER Experiment Name: At_Drought_Reproduction_P Parameter: Tissue Value: Rosettes
  misc_feature: MA Experiment 20001904 PARAMETER Experiment Name: At_Drought_Reproduction_P Parameter: Treatment Value: Drought vs. No Drought
  misc_feature: MA Experiment ID: 20001905 Result: Up-regulated in Transcription
  misc_feature: MA Experiment 20001905 PARAMETER Experiment Name: At_Drought_Reproduction_P Parameter: Age (day) Value: 40
  misc_feature: MA Experiment 20001905 PARAMETER Experiment Name: At_Drought_Reproduction_P Parameter: Organism Value: A. thaliana
  misc_feature: MA Experiment 20001905 PARAMETER Experiment Name: At_Drought_Reproduction_P Parameter: Plant Line Value: WS
  misc_feature: MA Experiment 20001905 PARAMETER Experiment Name: At_Drought_Reproduction_P Parameter: Timepoint (day) Value: 10
  misc_feature: MA Experiment 20001905 PARAMETER Experiment Name: At_Drought_Reproduction_P Parameter: Tissue Value: Rosettes
  misc_feature: MA Experiment 20001905 PARAMETER Experiment Name: At_Drought_Reproduction_P Parameter: Treatment Value: Drought vs. No Drought
  misc_feature: MA Experiment ID: 20001906 Result: Up-regulated in Transcription
  misc_feature: MA Experiment 20001906 PARAMETER Experiment Name: At_Drought_Reproduction_P Parameter: Age (day) Value: 35
  misc_feature: MA Experiment 20001906 PARAMETER Experiment Name: At_Drought_Reproduction_P Parameter: Organism Value: A. thaliana
  misc_feature: MA Experiment 20001906 PARAMETER Experiment Name: At_Drought_Reproduction_P Parameter: Plant Line Value: WS
  misc_feature: MA Experiment 20001906 PARAMETER Experiment Name: At_Drought_Reproduction_P Parameter: Timepoint (day) Value: 5
  misc_feature: MA Experiment 20001906 PARAMETER Experiment Name: At_Drought_Reproduction_P Parameter: Tissue Value: Siliques
  misc_feature: MA Experiment 20001906 PARAMETER Experiment Name: At_Drought_Reproduction_P Parameter: Treatment Value: Drought vs. No Drought
atccatgatcaagaagtgtaaaatgaagaagcttctatggagttggatcattctcttcaacatccatgtaaatggaatgatgatggagtttgatgaaatggagtggttcacagttttcaatggaacaaaagtgtttcagactcaaaatgatgttttttctgaagctaagtttcctatggttggactcactctgattcaatctgctgctgctaaaggagctgtgtgtttggatggaagtcttcccggataccatttgcatcgcgggtttggttccggagcgaacaattggctcgttcaattagagggaggtggatggtgtgataccattagaaattgtgtttaccgtaaaaccactcgtcgtggatcttcttcatatatggagaaagagataccatttaccggcattctaagtgataaagccgcggataatccagacttttataactggaatagagtaaaagttcggtattgtgacggtggatcgtttagcggggatagcgaaaataaggctgcacaacttcagtttagaggaaagagaatttggttagctgctatggaagatttgatggcaaaaggtatgcgtcaagctaagcaggctctgctctctggatgttctgcaggaggtcttgcggtgattttacgatgtgatgattttgggaaattgtttcctccttccaccagagtgaaatgtttgagtgatgctggtttcttccttgatgccatcgatgtgtctggaggtcgatctcttagacgattatacgccggtgtggtcagattacagaatctgcaaaccaaccttcctcagtattgtgtaaaccgtcttaatcccacttcgtgttttttcccacaaaacctaatcaaccaagtcaagactccactttttattcttaatgctgcatatgattcttggcagattcaagagagtttagctccaaaatctgcagatccaagtggaagttggaatgattgtagacttaactacgccaagtgtagtgcatctcagatccaattcttgcaaggttttaggacgcgtatggtgaatttggtaaaaggtttcgcgatgccaagtaagaacggtgtgttcctcaattcgtgctttgctcattgccaaacagagaggcatgacacttggttcgcccaaaactctccagctattaagaacaagggtattgcagtagctgtgggagattggtatttcgaaagaggaggagcaaagctcatagactgtgcttatccttgtgacaagacttgtcacaatttggtctttagaagataaaactagtttttctttggtatcacaatgtatttttttaagaagcatccatttatttattcaggcaacacaatgaaatgaaataaaacccatttgataac

SEQ ID NO: 40653 - protein, 424 aa, Arabidopsis thaliana
  peptide (1)..(424): Ceres Seq. ID no. 12397167
  misc_feature (38)..(407): Pfam Name: Pectinacetylesterase Pfam Description: Pectinacetylesterase
  misc_feature (40)..(423): Homolog of NCBI NO: 34913332 NR Description: putative pectin acetylesterase precursor
  misc_feature (304)..(423): Homolog of NCBI NO: 6714404 NR Description: putative pectinacetylesterase [Arabidopsis
  misc_feature (16)..(266): Homolog of NCBI NO: 6714404 NR Description: putative pectinacetylesterase [Arabidopsis
  misc_feature (58)..(422): Homolog of NCBI NO: 28392968 NR Description: putative pectinacetylesterase [Arabidopsis
  misc_feature (11)..(423): Homolog of NCBI NO: 15226462 NR Description: pectinacetylesterase, putative
  misc_feature (16)..(423): Homolog of NCBI NO: 7487997 NR Description: pectin acetylesterase homolog F21E10.11 -
  misc_feature (16)..(423): Homolog of NCBI NO: 18397406 NR Description: pectinacetylesterase, putative
  misc_feature (8)..(424): Homolog of NCBI NO: 25347293 NR Description: probable pectinacetylesterase precursor T8L23.6
  misc_feature (2)..(424): Homolog of NCBI NO: 21703105 NR Description: At1g57590/T8L23_6 [Arabidopsis thaliana]
  misc_feature (2)..(424): Homolog of NCBI NO: 30696158 NR Description: pectinacetylesterase, putative [Arabidopsis
SMIKKCKMKKLLWSWIILFNIHVNGMMMEFDEMEWFTVFNGTKVFQTQNDVFSEAKFPMVGLTLIQSAAAKGAVCLDGSLPGYHLHRGFGSGANNWLVQLEGGGWCDTIRNCVYRKTTRRGSSSYMEKEIPFTGILSDKAADNPDFYNWNRVKVRYCDGGSFSGDSENKAAQLQFRGKRIWLAAMEDLMAKGMRQAKQALLSGCSAGGLAVILRCDDFGKLFPPSTRVKCLSDAGFFLDAIDVSGGRSLRRLYAGVVRLQNLQTNLPQYCVNRLNPTSCFFPQNLINQVKTPLFILNAAYDSWQIQESLAPKSADPSGSWNDCRLNYAKCSASQIQFLQGFRTRMVNLVKGFAMPSKNGVFLNSCFAHCQTERHDTWFAQNSPAIKNKGIAVAVGDWYFERGGAKLIDCAYPCDKTCHNLVFRR

SEQ ID NO: 40654 - protein, 423 aa, Arabidopsis thaliana
  peptide (1)..(423): Ceres Seq. ID no. 12397168
  misc_feature (37)..(406): Pfam Name: Pectinacetylesterase Pfam Description: Pectinacetylesterase
  misc_feature (39)..(422): Homolog of NCBI NO: 34913332 NR Description: putative pectin acetylesterase precursor
  misc_feature (303)..(422): Homolog of NCBI NO: 6714404 NR Description: putative pectinacetylesterase [Arabidopsis
  misc_feature (15)..(265): Homolog of NCBI NO: 6714404 NR Description: putative pectinacetylesterase [Arabidopsis
  misc_feature (57)..(421): Homolog of NCBI NO: 28392968 NR Description: putative pectinacetylesterase [Arabidopsis
  misc_feature (10)..(422): Homolog of NCBI NO: 15226462 NR Description: pectinacetylesterase, putative
  misc_feature (15)..(422): Homolog of NCBI NO: 7487997 NR Description: pectin acetylesterase homolog F21E10.11 -
  misc_feature (15)..(422): Homolog of NCBI NO: 18397406 NR Description: pectinacetylesterase, putative
  misc_feature (7)..(423): Homolog of NCBI NO: 25347293 NR Description: probable pectinacetylesterase precursor T8L23.6
  misc_feature (1)..(423): Homolog of NCBI NO: 21703105 NR Description: At1g57590/T8L23_6 [Arabidopsis thaliana]
  misc_feature (1)..(423): Homolog of NCBI NO: 30696158 NR Description: pectinacetylesterase, putative [Arabidopsis
MIKKCKMKKLLWSWIILFNIHVNGMMMEFDEMEWFTVFNGTKVFQTQNDVFSEAKFPMVGLTLIQSAAAKGAVCLDGSLPGYHLHRGFGSGANNWLVQLEGGGWCDTIRNCVYRKTTRRGSSSYMEKEIPFTGILSDKAADNPDFYNWNRVKVRYCDGGSFSGDSENKAAQLQFRGKRIWLAAMEDLMAKGMRQAKQALLSGCSAGGLAVILRCDDFGKLFPPSTRVKCLSDAGFFLDAIDVSGGRSLRRLYAGVVRLQNLQTNLPQYCVNRLNPTSCFFPQNLINQVKTPLFILNAAYDSWQIQESLAPKSADPSGSWNDCRLNYAKCSASQIQFLQGFRTRMVNLVKGFAMPSKNGVFLNSCFAHCQTERHDTWFAQNSPAIKNKGIAVAVGDWYFERGGAKLIDCAYPCDKTCHNLVFRR

SEQ ID NO: 40655 - protein, 417 aa, Arabidopsis thaliana
  peptide (1)..(417): Ceres Seq. ID no. 12397169
  misc_feature (31)..(400): Pfam Name: Pectinacetylesterase Pfam Description: Pectinacetylesterase
  misc_feature (33)..(416): Homolog of NCBI NO: 34913332 NR Description: putative pectin acetylesterase precursor
  misc_feature (297)..(416): Homolog of NCBI NO: 6714404 NR Description: putative pectinacetylesterase [Arabidopsis
  misc_feature (9)..(259): Homolog of NCBI NO: 6714404 NR Description: putative pectinacetylesterase [Arabidopsis
  misc_feature (51)..(415): Homolog of NCBI NO: 28392968 NR Description: putative pectinacetylesterase [Arabidopsis
  misc_feature (4)..(416): Homolog of NCBI NO: 15226462 NR Description: pectinacetylesterase, putative
  misc_feature (9)..(416): Homolog of NCBI NO: 7487997 NR Description: pectin acetylesterase homolog F21E10.11 -
  misc_feature (9)..(416): Homolog of NCBI NO: 18397406 NR Description: pectinacetylesterase, putative
  misc_feature (1)..(417): Homolog of NCBI NO: 25347293 NR Description: probable pectinacetylesterase precursor T8L23.6
  misc_feature (1)..(417): Homolog of NCBI NO: 21703105 NR Description: At1g57590/T8L23_6 [Arabidopsis thaliana]
  misc_feature (1)..(417): Homolog of NCBI NO: 30696158 NR Description: pectinacetylesterase, putative [Arabidopsis
MKKLLWSWIILFNIHVNGMMMEFDEMEWFTVFNGTKVFQTQNDVFSEAKFPMVGLTLIQSAAAKGAVCLDGSLPGYHLHRGFGSGANNWLVQLEGGGWCDTIRNCVYRKTTRRGSSSYMEKEIPFTGILSDKAADNPDFYNWNRVKVRYCDGGSFSGDSENKAAQLQFRGKRIWLAAMEDLMAKGMRQAKQALLSGCSAGGLAVILRCDDFGKLFPPSTRVKCLSDAGFFLDAIDVSGGRSLRRLYAGVVRLQNLQTNLPQYCVNRLNPTSCFFPQNLINQVKTPLFILNAAYDSWQIQESLAPKSADPSGSWNDCRLNYAKCSASQIQFLQGFRTRMVNLVKGFAMPSKNGVFLNSCFAHCQTERHDTWFAQNSPAIKNKGIAVAVGDWYFERGGAKLIDCAYPCDKTCHNLVFRR

SEQ ID NO: 40656 - DNA, 1483 bp, Arabidopsis thaliana
  misc_feature (1)..(1483): Ceres Seq. ID no. 12370973
  misc_feature: MA Experiment ID: 108473 Result: Down-regulated in Transcription
  misc_feature: MA Experiment 108473 PARAMETER Experiment Name: At_Drought_Flowers_cDNA_P Parameter: Timepoint (hr) Value: 7 d
  misc_feature: MA Experiment 108473 PARAMETER Experiment Name: At_Drought_Flowers_cDNA_P Parameter: Tissue Value: Flower
  misc_feature: MA Experiment 108473 PARAMETER Experiment Name: At_Drought_Flowers_cDNA_P Parameter: Treatment Value: Drought vs. No Drought
  misc_feature: MA Experiment ID: 108501 Result: Down-regulated in Transcription
  misc_feature: MA Experiment 108501 PARAMETER Experiment Name: At_ap2_floral_buds_cDNA_P Parameter: Plant Line Value: ap2 (Ler.)
  misc_feature: MA Experiment 108501 PARAMETER Experiment Name: At_ap2_floral_buds_cDNA_P Parameter: Tissue Value: Closed Flower
  misc_feature: MA Experiment ID: 20000265 Result: Up-regulated in Transcription
  misc_feature: MA Experiment 20000265 PARAMETER Experiment Name: At_Open_Flower_P Parameter: Age (day) Value: 21
  misc_feature: MA Experiment 20000265 PARAMETER Experiment Name: At_Open_Flower_P Parameter: Plant Line Value: WS
  misc_feature: MA Experiment 20000265 PARAMETER Experiment Name: At_Open_Flower_P Parameter: Tissue Value: Closed Flower vs. Whole Plant
  misc_feature: MA Experiment ID: 20000286 Result: Up-regulated in Transcription
  misc_feature: MA Experiment 20000286 PARAMETER Experiment Name: At_Open_Flower_P Parameter: Age (day) Value: 21
  misc_feature: MA Experiment 20000286 PARAMETER Experiment Name: At_Open_Flower_P Parameter: Plant Line Value: WS
  misc_feature: MA Experiment 20000286 PARAMETER Experiment Name: At_Open_Flower_P Parameter: Tissue Value: Half Open vs. Whole Plant
aaaaattatacgtcttaaaaaatttcttctctcttctctgatcgtctctctttgtgtgctcacaatgaagcacaacaacaaagtctccaagagacttactatgacaggttcctcttctttgcatttcttgctttttcctcggagcaatcttcacctccaaattacgatcagcttcgtcagattccggtagccagctcattttacagcaccggcgtgatcaggagcttaagattgttacgcaagattatgctcatgagaaaaaaaaatcacaagacaatgatgtaatggaagaggttttaaaaactcataaagcaatcgaatcattggataagtcagtttctatgcttcaaaagcagctctctgctacacatagccctcaacagattgtgaatgtctcagcaaccaattcttcaacagaaggaaaccaaaagaacaaagtttttatggtgattggtatcaatactgcatttagcagtcgaaaacgtcgcgattcgcttagagagacttggatgcctcaaggggaaaagcttgagaaattggaaaaagagaagggaattgtcgtcaaatttatgattggacacagttcaacgccaaacagtatgttggataaggagattgattcagaagatgctcaatacaacgatttctttaggctggatcatgtcgaaggatattacaatctatctgcaaaaaccaaaagcttcttctctagtgcagttgcaaagtgggatgctgagttttatgtcaagattgatgatgatgttcacgtcaatcttggcacgcttgcttccacattagctagtcaccgttctaagccaagggtctacattggatgtatgaaatccggtcctgtccttactaaaaagacggccaagtaccgtgaacccgagttttggaaatttggagaagaaggtaacaaatattttcgacatgctacgggacagatttatgccatatcaaaggatcttgccacatacatatctaacaaccagccaattttgcataagtatgcaaatgaagatgtgacactcgggtcatggtttatcggtcttgaggttgagcaaatcgatgatcgtaatttctgttgtggtactcctccagactgtgaaatgagggcagaggctggcgaaatgtgtgtggctacatttgactggaagtgtagtggagtatgcagatcagtcgatagaatgtggatggttcatgtgatgtgtggtgaaggtagtaaagctgtgtgggacgcaaatttaaaactctcttagatcggagaaagacacaagagaagatgaacattttgttttgtaaagaaccaaaaggtatacaaatgtgagaaaagacgctgaggaagaccttttagttcaatattctcgttttatttgtggaaaaataaaaattaaaaagaaagaatgagactttctatagatacagacgtgacatacttgcttcttataaacattttgctcgatatgaacaattctatttcttc

SEQ ID NO: 40657 - protein, 324 aa, Arabidopsis thaliana
  peptide (1)..(324): Ceres Seq. ID no. 12370974
  misc_feature (66)..(264): Pfam Name: Galactosyltransferase Pfam Description: Galactosyltransferase
  misc_feature (79)..(100): Homolog of NCBI NO: 25370617 NR Description: protein F28K19.2 [imported] - Arabidopsis
  misc_feature (44)..(79): Homolog of NCBI NO: 25370617 NR Description: protein F28K19.2 [imported] - Arabidopsis
  misc_feature (95)..(165): Homolog of NCBI NO: 25370617 NR Description: protein F28K19.2 [imported] - Arabidopsis
  misc_feature (165)..(323): Homolog of NCBI NO: 25370617 NR Description: protein F28K19.2 [imported] - Arabidopsis
  misc_feature (1)..(312): Homolog of NCBI NO: 15217544 NR Description: elicitor response protein, putative; protein id:
  misc_feature (1)..(319): Homolog of NCBI NO: 4138265 NR Description: Avr9 elicitor response protein [Nicotiana tabacum]
  misc_feature (1)..(321): Homolog of NCBI NO: 34365705 NR Description: At1g77810 [Arabidopsis thaliana]
  misc_feature (1)..(321): Homolog of NCBI NO: 12323294 NR Description: putative (Avr9) elicitor response protein;
  misc_feature (1)..(321): Homolog of NCBI NO: 30699558 NR Description: Avr9 elicitor response protein -related
  misc_feature (1)..(324): Homolog of NCBI NO: 18395060 NR Description: Expressed protein
MEEVLKTHKAIESLDKSVSMLQKQLSATHSPQQIVNVSATNSSTEGNQKNKVFMVIGINTAFSSRKRRDSLRETWMPQGEKLEKLEKEKGIVVKFMIGHSSTPNSMLDKEIDSEDAQYNDFFRLDHVEGYYNLSAKTKSFFSSAVAKWDAEFYVKIDDDVHVNLGTLASTLASHRSKPRVYIGCMKSGPVLTKKTAKYREPEFWKFGEEGNKYFRHATGQIYAISKDLATYISNNQPILHKYANEDVTLGSWFIGLEVEQIDDRNFCCGTPPDCEMRAEAGEMCVATFDWKCSGVCRSVDRMWMVHVMCGEGSKAVWDANLKLS

SEQ ID NO: 40658 - protein, 305 aa, Arabidopsis thaliana
  peptide (1)..(305): Ceres Seq. ID no. 12370975
  misc_feature (47)..(245): Pfam Name: Galactosyltransferase Pfam Description: Galactosyltransferase
  misc_feature (60)..(81): Homolog of NCBI NO: 25370617 NR Description: protein F28K19.2 [imported] - Arabidopsis
  misc_feature (25)..(60): Homolog of NCBI NO: 25370617 NR Description: protein F28K19.2 [imported] - Arabidopsis
  misc_feature (76)..(146): Homolog of NCBI NO: 25370617 NR Description: protein F28K19.2 [imported] - Arabidopsis
  misc_feature (146)..(304): Homolog of NCBI NO: 25370617 NR Description: protein F28K19.2 [imported] - Arabidopsis
  misc_feature (1)..(293): Homolog of NCBI NO: 15217544 NR Description: elicitor response protein, putative; protein id:
  misc_feature (1)..(300): Homolog of NCBI NO: 4138265 NR Description: Avr9 elicitor response protein [Nicotiana tabacum]
  misc_feature (1)..(302): Homolog of NCBI NO: 34365705 NR Description: At1g77810 [Arabidopsis thaliana]
  misc_feature (1)..(302): Homolog of NCBI NO: 12323294 NR Description: putative (Avr9) elicitor response protein;
  misc_feature (1)..(302): Homolog of NCBI NO: 30699558 NR Description: Avr9 elicitor response protein -related
  misc_feature (1)..(305): Homolog of NCBI NO: 18395060 NR Description: Expressed protein
MLQKQLSATHSPQQIVNVSATNSSTEGNQKNKVFMVIGINTAFSSRKRRDSLRETWMPQGEKLEKLEKEKGIVVKFMIGHSSTPNSMLDKEIDSEDAQYNDFFRLDHVEGYYNLSAKTKSFFSSAVAKWDAEFYVKIDDDVHVNLGTLASTLASHRSKPRVYIGCMKSGPVLTKKTAKYREPEFWKFGEEGNKYFRHATGQIYAISKDLATYISNNQPILHKYANEDVTLGSWFIGLEVEQIDDRNFCCGTPPDCEMRAEAGEMCVATFDWKCSGVCRSVDRMWMVHVMCGEGSKAVWDANLKLS

SEQ ID NO: 40659 - protein, 271 aa, Arabidopsis thaliana
  peptide (1)..(271): Ceres Seq. ID no. 12370976
  misc_feature (13)..(211): Pfam Name: Galactosyltransferase Pfam Description: Galactosyltransferase
  misc_feature (26)..(47): Homolog of NCBI NO: 25370617 NR Description: protein F28K19.2 [imported] - Arabidopsis
  misc_feature (1)..(26): Homolog of NCBI NO: 25370617 NR Description: protein F28K19.2 [imported] - Arabidopsis
  misc_feature (42)..(112): Homolog of NCBI NO: 25370617 NR Description: protein F28K19.2 [imported] - Arabidopsis
  misc_feature (112)..(270): Homolog of NCBI NO: 25370617 NR Description: protein F28K19.2 [imported] - Arabidopsis
  misc_feature (1)..(259): Homolog of NCBI NO: 15217544 NR Description: elicitor response protein, putative; protein id:
  misc_feature (1)..(266): Homolog of NCBI NO: 4138265 NR Description: Avr9 elicitor response protein [Nicotiana tabacum]
  misc_feature (1)..(268): Homolog of NCBI NO: 34365705 NR Description: At1g77810 [Arabidopsis thaliana]
  misc_feature (1)..(268): Homolog of NCBI NO: 12323294 NR Description: putative (Avr9) elicitor response protein;
  misc_feature (1)..(268): Homolog of NCBI NO: 30699558 NR Description: Avr9 elicitor response protein -related
  misc_feature (1)..(271): Homolog of NCBI NO: 18395060 NR Description: Expressed protein
MVIGINTAFSSRKRRDSLRETWMPQGEKLEKLEKEKGIVVKFMIGHSSTPNSMLDKEIDSEDAQYNDFFRLDHVEGYYNLSAKTKSFFSSAVAKWDAEFYVKIDDDVHVNLGTLASTLASHRSKPRVYIGCMKSGPVLTKKTAKYREPEFWKFGEEGNKYFRHATGQIYAISKDLATYISNNQPILHKYANEDVTLGSWFIGLEVEQIDDRNFCCGTPPDCEMRAEAGEMCVATFDWKCSGVCRSVDRMWMVHVMCGEGSKAVWDANLKLS

SEQ ID NO: 40660 - DNA, 1292 bp, Arabidopsis thaliana
  misc_feature (1)..(1292): Ceres Seq. ID no. 12328659
  misc_feature: MA Experiment ID: 108434 Result: Up-regulated in Transcription
  misc_feature: MA Experiment 108434 PARAMETER Experiment Name: At_Root_Tips_cDNA_P Parameter: Tissue Value: Root Tips
  misc_feature: MA Experiment ID: 108462 Result: Down-regulated in Transcription
  misc_feature: MA Experiment 108462 PARAMETER Experiment Name: At_Germinating_Seeds_cDNA_P Parameter: Age (day) Value: 2 vs. 0
  misc_feature: MA Experiment 108462 PARAMETER Experiment Name: At_Germinating_Seeds_cDNA_P Parameter: Tissue Value: Germinating Seeds
  misc_feature: MA Experiment ID: 108463 Result: Down-regulated in Transcription
  misc_feature: MA Experiment 108463 PARAMETER Experiment Name: At_Germinating_Seeds_cDNA_P Parameter: Age (day) Value: 3 vs. 0
  misc_feature: MA Experiment 108463 PARAMETER Experiment Name: At_Germinating_Seeds_cDNA_P Parameter: Tissue Value: Germinating Seeds
  misc_feature: MA Experiment ID: 108464 Result: Down-regulated in Transcription
  misc_feature: MA Experiment 108464 PARAMETER Experiment Name: At_Germinating_Seeds_cDNA_P Parameter: Age (day) Value: 4 vs. 0
  misc_feature: MA Experiment 108464 PARAMETER Experiment Name: At_Germinating_Seeds_cDNA_P Parameter: Tissue Value: Germinating Seeds
agaagaaaaaagaggcgaagaagagagaggaatggcgccagttcttcagagctcacagccatgggttgagaaataccggccgaagcaggttaaggacgtggctcaccaggaagaggtggttcgtgtcctcaccaacactctccagactgctgactgcccgcacatgctcttctatggaccaccaggcactggaaaaaccactactgctcttgccatcgctcaccagctctttggacctgaactatacaagtctagggtgttggagcttaatgcaagtgatgacagaggtattaatgttgttcggactaagatcaaggattttgctgctgttgctgttgggtctaatcatcgtcaaagtggttatccttgcccatcgtttaagatcatcatcctagatgaggctgattcgatgacagaagatgctcagaatgccttgaggcgcacaatggaaacttactccaaagtcaccagattctttttcatatgtaattacatcagcaggatcatagagccccttgcttccaggtgtgcgaagttcaggtttaaaccactttccgaagaagtcatgagtaaccgtatattgcatatttgtaatgaagaaggtctcagccttgatggagaggctctttcaactttgagctccatatcacaaggtgatctccgtagggccatcacatatctgcagagtgctactcggttgtttggatcaacaataacttctacagatttactcaatgtgtctggggtagttcctctagaggtagtcaataaactttttactgcatgcaaaagtggtgatttcgatattgcaaacaaggaagtggataacatagttgcagaaggatatcctgcatctcaaatcatcaatcagctattcgatatagttgcggaggctgacagtgacataacagacatgcaaaaggctaagatctgcaaatgtttagctgaaactgataagcgacttgtagacggggcggatgagtacttgcagcttctggatgtggcaagcagtacaatttgtgccctctcagaaatggctcaagacttctaatgcaaattctgcttgaattggacctgtgccttaagacttatgagactatcatagtgtaggttttgataaaaagttggagcgttatgacgttttactggttacttatctgttattgttttaagaaaaactattagatatatttattgcatcattacttaagtctatttgttttgtgggtaagatcattaaatatcattacaatgtgaaatacatgatcgaatcaaaataattaacatctctt

SEQ ID NO: 40661 - protein, 349 aa, Arabidopsis thaliana
  peptide (1)..(349): Ceres Seq. ID no. 12328660
  misc_feature (54)..(228): Pfam Name: ATPase family associated with various cellular Pfam Description: ATPase family associated with various cellular
  misc_feature (20)..(344): Homolog of NCBI NO: 283966 NR Description: activator 1 37K chain - human
  misc_feature (20)..(344): Homolog of NCBI NO: 34869304 NR Description: similar to expressed sequence AU040575 [Rattus
  misc_feature (20)..(344): Homolog of NCBI NO: 21703948 NR Description: expressed sequence AU040575; similar to CG8142
  misc_feature (16)..(332): Homolog of NCBI NO: 34097966 NR Description: replication factor C p37 subunit [Xenopus laevis]
  misc_feature (20)..(344): Homolog of NCBI NO: 30584245 NR Description: Homo sapiens replication factor C (activator 1)
  misc_feature (20)..(344): Homolog of NCBI NO: 4506491 NR Description: replication factor C (activator 1) 4, 37kDa
  misc_feature (11)..(273): Homolog of NCBI NO: 25301746 NR Description: hypothetical protein F8K7.11 - Arabidopsis
  misc_feature (11)..(347): Homolog of NCBI NO: 10798806 NR Description: OsRFC 37 kDa subunit [Oryza sativa (japonica
  misc_feature (11)..(349): Homolog of NCBI NO: 30687479 NR Description: replication factor -related [Arabidopsis thaliana]
  misc_feature (11)..(349): Homolog of NCBI NO: 18395021 NR Description: putative replication factor
EEKRGEEERGMAPVLQSSQPWVEKYRPKQVKDVAHQEEVVRVLTNTLQTADCPHMLFYGPPGTGKTTTALAIAHQLFGPELYKSRVLELNASDDRGINVVRTKIKDFAAVAVGSNHRQSGYPCPSFKIIILDEADSMTEDAQNALRRTMETYSKVTRFFFICNYISRIIEPLASRCAKFRFKPLSEEVMSNRILHICNEEGLSLDGEALSTLSSISQGDLRRAITYLQSATRLFGSTITSTDLLNVSGVVPLEVVNKLFTACKSGDFDIANKEVDNIVAEGYPASQIINQLFDIVAEADSDITDMQKAKICKCLAETDKRLVDGADEYLQLLDVASSTICALSEMAQDF

SEQ ID NO: 40662 - protein, 339 aa, Arabidopsis thaliana
  peptide (1)..(339): Ceres Seq. ID no. 12328661
  misc_feature (44)..(218): Pfam Name: ATPase family associated with various cellular Pfam Description: ATPase family associated with various cellular
  misc_feature (10)..(334): Homolog of NCBI NO: 283966 NR Description: activator 1 37K chain - human
  misc_feature (10)..(334): Homolog of NCBI NO: 34869304 NR Description: similar to expressed sequence AU040575 [Rattus
  misc_feature (10)..(334): Homolog of NCBI NO: 21703948 NR Description: expressed sequence AU040575; similar to CG8142
  misc_feature (6)..(322): Homolog of NCBI NO: 34097966 NR Description: replication factor C p37 subunit [Xenopus laevis]
  misc_feature (10)..(334): Homolog of NCBI NO: 30584245 NR Description: Homo sapiens replication factor C (activator 1)
  misc_feature (10)..(334): Homolog of NCBI NO: 4506491 NR Description: replication factor C (activator 1) 4, 37kDa
  misc_feature (1)..(263): Homolog of NCBI NO: 25301746 NR Description: hypothetical protein F8K7.11 - Arabidopsis
  misc_feature (1)..(337): Homolog of NCBI NO: 10798806 NR Description: OsRFC 37 kDa subunit [Oryza sativa (japonica
  misc_feature (1)..(339): Homolog of NCBI NO: 30687479 NR Description: replication factor -related [Arabidopsis thaliana]
  misc_feature (1)..(339): Homolog of NCBI NO: 18395021 NR Description: putative replication factor
MAPVLQSSQPWVEKYRPKQVKDVAHQEEVVRVLTNTLQTADCPHMLFYGPPGTGKTTTALAIAHQLFGPELYKSRVLELNASDDRGINVVRTKIKDFAAVAVGSNHRQSGYPCPSFKIIILDEADSMTEDAQNALRRTMETYSKVTRFFFICNYISRIIEPLASRCAKFRFKPLSEEVMSNRILHICNEEGLSLDGEALSTLSSISQGDLRRAITYLQSATRLFGSTITSTDLLNVSGVVPLEVVNKLFTACKSGDFDIANKEVDNIVAEGYPASQIINQLFDIVAEADSDITDMQKAKICKCLAETDKRLVDGADEYLQLLDVASSTICALSEMAQDF

SEQ ID NO: 40663 - protein, 295 aa, Arabidopsis thaliana
  peptide (1)..(295): Ceres Seq. ID no. 12328662
  misc_feature (1)..(174): Pfam Name: ATPase family associated with various cellular Pfam Description: ATPase family associated with various cellular
  misc_feature (1)..(290): Homolog of NCBI NO: 283966 NR Description: activator 1 37K chain - human
  misc_feature (1)..(290): Homolog of NCBI NO: 34869304 NR Description: similar to expressed sequence AU040575 [Rattus
  misc_feature (1)..(290): Homolog of NCBI NO: 21703948 NR Description: expressed sequence AU040575; similar to CG8142
  misc_feature (1)..(278): Homolog of NCBI NO: 34097966 NR Description: replication factor C p37 subunit [Xenopus laevis]
  misc_feature (1)..(290): Homolog of NCBI NO: 30584245 NR Description: Homo sapiens replication factor C (activator 1)
  misc_feature (1)..(290): Homolog of NCBI NO: 4506491 NR Description: replication factor C (activator 1) 4, 37kDa
  misc_feature (1)..(219): Homolog of NCBI NO: 25301746 NR Description: hypothetical protein F8K7.11 - Arabidopsis
  misc_feature (1)..(293): Homolog of NCBI NO: 10798806 NR Description: OsRFC 37 kDa subunit [Oryza sativa (japonica
  misc_feature (1)..(295): Homolog of NCBI NO: 30687479 NR Description: replication factor -related [Arabidopsis thaliana]
  misc_feature (1)..(295): Homolog of NCBI NO: 18395021 NR Description: putative replication factor
MLFYGPPGTGKTTTALAIAHQLFGPELYKSRVLELNASDDRGINVVRTKIKDFAAVAVGSNHRQSGYPCPSFKIIILDEADSMTEDAQNALRRTMETYSKVTRFFFICNYISRIIEPLASRCAKFRFKPLSEEVMSNRILHICNEEGLSLDGEALSTLSSISQGDLRRAITYLQSATRLFGSTITSTDLLNVSGVVPLEVVNKLFTACKSGDFDIANKEVDNIVAEGYPASQIINQLFDIVAEADSDITDMQKAKICKCLAETDKRLVDGADEYLQLLDVASSTICALSEMAQDF

SEQ ID NO: 40664 - DNA, 1517 bp, Arabidopsis thaliana
  misc_feature (1)..(1517): Ceres Seq. ID no. 13494118
  misc_feature: MA Experiment ID: 108569 Result: Up-regulated in Transcription
  misc_feature: MA Experiment 108569 PARAMETER Experiment Name: At_0.001%_MeJA__cDNA_P Parameter: Timepoint (hr) Value: 6
  misc_feature: MA Experiment 108569 PARAMETER Experiment Name: At_0.001%_MeJA__cDNA_P Parameter: Tissue Value: Aerial
  misc_feature: MA Experiment 108569 PARAMETER Experiment Name: At_0.001%_MeJA__cDNA_P Parameter: Treatment Value: 0.001% MeJA vs. No Treatment
  misc_feature: MA Experiment ID: 108585 Result: Up-regulated in Transcription
  misc_feature: MA Experiment 108585 PARAMETER Experiment Name: At_5mM_NaNP_cDNA_P Parameter: Timepoint (hr) Value: 6
  misc_feature: MA Experiment 108585 PARAMETER Experiment Name: At_5mM_NaNP_cDNA_P Parameter: Tissue Value: Aerial
  misc_feature: MA Experiment 108585 PARAMETER Experiment Name: At_5mM_NaNP_cDNA_P Parameter: Treatment Value: null
  misc_feature: MA Experiment ID: 108668 Result: Up-regulated in Transcription
  misc_feature: MA Experiment 108668 PARAMETER Experiment Name: At_2mM_SA_cDNA_P Parameter: Plant Line Value: WS
  misc_feature: MA Experiment 108668 PARAMETER Experiment Name: At_2mM_SA_cDNA_P Parameter: Timepoint (hr) Value: 6
  misc_feature: MA Experiment 108668 PARAMETER Experiment Name: At_2mM_SA_cDNA_P Parameter: Treatment Value: 2mM SA vs. No Treatment
  misc_feature: MA Experiment ID: 20000171 Result: Up-regulated in Transcription
  misc_feature: MA Experiment 20000171 PARAMETER Experiment Name: At_42deg_Heat_P Parameter: Age (day) Value: 14
  misc_feature: MA Experiment 20000171 PARAMETER Experiment Name: At_42deg_Heat_P Parameter: Organism Value: A. thaliana
  misc_feature: MA Experiment 20000171 PARAMETER Experiment Name: At_42deg_Heat_P Parameter: Plant Line Value: WS
  misc_feature: MA Experiment 20000171 PARAMETER Experiment Name: At_42deg_Heat_P Parameter: Temperature (deg C) Value: 42 vs. 22
  misc_feature: MA Experiment 20000171 PARAMETER Experiment Name: At_42deg_Heat_P Parameter: Timepoint (hr) Value: 1
  misc_feature: MA Experiment 20000171 PARAMETER Experiment Name: At_42deg_Heat_P Parameter: Tissue Value: Aerial
  misc_feature: MA Experiment ID: 20000182 Result: Up-regulated in Transcription
  misc_feature: MA Experiment 20000182 PARAMETER Experiment Name: At_2mM_SA_P Parameter: Age (day) Value: 14
  misc_feature: MA Experiment 20000182 PARAMETER Experiment Name: At_2mM_SA_P Parameter: Organism Value: A. thaliana
  misc_feature: MA Experiment 20000182 PARAMETER Experiment Name: At_2mM_SA_P Parameter: Plant Line Value: WS
  misc_feature: MA Experiment 20000182 PARAMETER Experiment Name: At_2mM_SA_P Parameter: Timepoint (hr) Value: 6
  misc_feature: MA Experiment 20000182 PARAMETER Experiment Name: At_2mM_SA_P Parameter: Tissue Value: Aerial
  misc_feature: MA Experiment 20000182 PARAMETER Experiment Name: At_2mM_SA_P Parameter: Treatment Value: 2mM SA vs. No Treatment
  misc_feature: MA Experiment ID: 20000184 Result: Down-regulated in Transcription
  misc_feature: MA Experiment 20000184 PARAMETER Experiment Name: At_Shoots__P Parameter: Age (day) Value: 7
  misc_feature: MA Experiment 20000184 PARAMETER Experiment Name: At_Shoots__P Parameter: Tissue Value: Shoots vs. Whole Plant
  misc_feature: MA Experiment ID: 20000185 Result: Up-regulated in Transcription
  misc_feature: MA Experiment 20000185 PARAMETER Experiment Name: At_Roots__P Parameter: Age (day) Value: 7 vs. 21
  misc_feature: MA Experiment 20000185 PARAMETER Experiment Name: At_Roots__P Parameter: Organism Value: A. thaliana
  misc_feature: MA Experiment 20000185 PARAMETER Experiment Name: At_Roots__P Parameter: Tissue Value: Roots vs. Whole Plant
  misc_feature: MA Experiment ID: 20000437 Result: Up-regulated in Transcription
  misc_feature: MA Experiment 20000437 PARAMETER Experiment Name: At_Drought_P Parameter: Age (day) Value: 8
  misc_feature: MA Experiment 20000437 PARAMETER Experiment Name: At_Drought_P Parameter: Organism Value: A. thaliana
  misc_feature: MA Experiment 20000437 PARAMETER Experiment Name: At_Drought_P Parameter: Plant Line Value: WS
  misc_feature: MA Experiment 20000437 PARAMETER Experiment Name: At_Drought_P Parameter: Timepoint (hr) Value: 24
  misc_feature: MA Experiment 20000437 PARAMETER Experiment Name: At_Drought_P Parameter: Tissue Value: Whole Plant
  misc_feature: MA Experiment 20000437 PARAMETER Experiment Name: At_Drought_P Parameter: Treatment Value: Drought vs. No Drought
  misc_feature: MA Experiment ID: 20000438 Result: Down-regulated in Transcription
  misc_feature: MA Experiment 20000438 PARAMETER Experiment Name: At_Shoots__P Parameter: Age (day) Value: 14
  misc_feature: MA Experiment 20000438 PARAMETER Experiment Name: At_Shoots__P Parameter: Tissue Value: Shoots vs. Whole Plant
  misc_feature: MA Experiment ID: 20000794 Result: Down-regulated in Transcription
  misc_feature: MA Experiment 20000794 PARAMETER Experiment Name: At_Petals_P Parameter: Age (day) Value: 23-25 days
  misc_feature: MA Experiment 20000794 PARAMETER Experiment Name: At_Petals_P Parameter: Plant Line Value: WS
  misc_feature: MA Experiment 20000794 PARAMETER Experiment Name: At_Petals_P Parameter: Tissue Value: Petals vs. Whole plant
  misc_feature: MA Experiment ID: 20001557 Result: Down-regulated in Transcription
  misc_feature: MA Experiment 20001557 PARAMETER Experiment Name: At_Drought_Soil_Dry_P Parameter: Age (day) Value: 27
  misc_feature: MA Experiment 20001557 PARAMETER Experiment Name: At_Drought_Soil_Dry_P Parameter: Organism Value: A. thaliana
  misc_feature: MA Experiment 20001557 PARAMETER Experiment Name: At_Drought_Soil_Dry_P Parameter: Plant Line Value: WS
  misc_feature: MA Experiment 20001557 PARAMETER Experiment Name: At_Drought_Soil_Dry_P Parameter: Post Timepoint (hr) Value: 3
  misc_feature: MA Experiment 20001557 PARAMETER Experiment Name: At_Drought_Soil_Dry_P Parameter: Post-Treatment Value: Re-Water vs. No Drought
  misc_feature: MA Experiment 20001557 PARAMETER Experiment Name: At_Drought_Soil_Dry_P Parameter: Timepoint (day) Value: 13
  misc_feature: MA Experiment 20001557 PARAMETER Experiment Name: At_Drought_Soil_Dry_P Parameter: Treatment Value: Drought vs. No Drought
aaaaaaatctcacattttttttcttcagtttcatctaaaaagattcaattcatatcgaaaataaaaaaggaacaaactttgctttttgttttcgcaatctccgattcgttaactcgttttctctcttcacctgtttcaagcttttcgatccaacaaatcacgagattcctctttccggtgtggtctccggcgacctaaaataaagagttaattctcgtggtcgtggagagcaaatgagggatgttctcctggttagcgagaatggctcttttttgtttacgacctatgcggcgatacggtcgtatgaacagagatgatgacgatgatgatgatcacgacggtgactcttcttcctccggtgactcccttctttggtctagagaactcgagagacattctttcggagatttctctattgctgttgtgcaagctaacgaggttattgaagatcatagtcaagtcgagactggaaacggtgccgttttcgtcggagtttacgatggtcatggtggtcctgaagcttctagatacatctctgatcatctcttttctcatttgatgagagtttcgagagaaaggagttgtatttcagaggaggctttaagagctgcattttctgctactgaggaagggtttctcacgcttgtgcgaaggacttgcgggttgaaaccgttgattgcagctgttggatcttgttgtttggttggagttatttggaaagggactttgcttatcgctaatgttggtgattctcgtgctgtgcttggttccatgggtagtaataataataggtcaaacaagattgtagctgagcaactgactagtgatcacaatgctgctttggaagaagttagacaagagcttaggtcgttgcatcctgatgattcacatatcgttgtccttaaacatggtgtgtggcgcatcaaaggcatcattcaggtatctagatcaataggggatgcatatttaaagcgcccagagttctcacttgacccttcatttccgcggttccatctcgctgaagaactacaaagacctgttttatcagcagagccttgtgtctacacaagagtcttacaaacaagtgacaagtttgtgatattcgcatcagatggactctgggaacaaatgaccaaccagcaagctgtagagatagtgaataaacacccccgtcctggaatagcgagaaggctggtgagaagagcgataaccatagctgcgaaaaagagagagatgaattacgatgatttgaagaaagtggagagaggagtgaggagattctttcatgatgatataacagtggttgtgatattcatagacaatgagcttcttatggtggagaaagctactgttcctgaattgtccattaaaggtttttctcataccgttggaccttccaagttcagtatcttcctctcttagacatttttgttacatttctttactttactatcacagtcttcacaaatatgataaaaatgaacacggatcgattttgtaccaacacgtttgagttt

SEQ ID NO: 40665 - protein, 393 aa, Arabidopsis thaliana
  peptide (1)..(393): Ceres Seq. ID no. 13494119
  misc_feature (33)..(331): Pfam Name: Protein phosphatase 2C Pfam Description: Protein phosphatase 2C
  misc_feature (24)..(378): Homolog of NCBI NO: 7768153 NR Description: protein phosphatase 2C (PP2C) [Fagus sylvatica]
  misc_feature (35)..(391): Homolog of NCBI NO: 37536574 NR Description: putative protein phosphatase 2C
  misc_feature (35)..(391): Homolog of NCBI NO: 13357263 NR Description: putative protein phosphatase 2C
  misc_feature (35)..(387): Homolog of NCBI NO: 11282001 NR Description: protein phosphatase 2C-like protein - Arabidopsis
  misc_feature (35)..(387): Homolog of NCBI NO: 15239244 NR Description: protein phosphatase 2C-related protein
  misc_feature (35)..(387): Homolog of NCBI NO: 20340237 NR Description: protein phosphatase 2c-like protein
  misc_feature (1)..(389): Homolog of NCBI NO: 38346816 NR Description: OSJNBa0088A01.23 [Oryza sativa (japonica
  misc_feature (8)..(393): Homolog of NCBI NO: 9759303 NR Description: protein phosphatase 2C-like [Arabidopsis thaliana]
  misc_feature (1)..(393): Homolog of NCBI NO: 21536936 NR Description: protein phosphatase 2C-like [Arabidopsis thaliana]
  misc_feature (1)..(393): Homolog of NCBI NO: 18415301 NR Description: protein phosphatase 2C-related [Arabidopsis
MFSWLARMALFCLRPMRRYGRMNRDDDDDDDHDGDSSSSGDSLLWSRELERHSFGDFSIAVVQANEVIEDHSQVETGNGAVFVGVYDGHGGPEASRYISDHLFSHLMRVSRERSCISEEALRAAFSATEEGFLTLVRRTCGLKPLIAAVGSCCLVGVIWKGTLLIANVGDSRAVLGSMGSNNNRSNKIVAEQLTSDHNAALEEVRQELRSLHPDDSHIVVLKHGVWRIKGIIQVSRSIGDAYLKRPEFSLDPSFPRFHLAEELQRPVLSAEPCVYTRVLQTSDKFVIFASDGLWEQMTNQQAVEIVNKHPRPGIARRLVRRAITIAAKKREMNYDDLKKVERGVRRFFHDDITVVVIFIDNELLMVEKATVPELSIKGFSHTVGPSKFSIFLS

SEQ ID NO: 40666 - protein, 386 aa, Arabidopsis thaliana
  peptide (1)..(386): Ceres Seq. ID no. 13494120
  misc_feature (26)..(324): Pfam Name: Protein phosphatase 2C Pfam Description: Protein phosphatase 2C
  misc_feature (17)..(371): Homolog of NCBI NO: 7768153 NR Description: protein phosphatase 2C (PP2C) [Fagus sylvatica]
  misc_feature (28)..(384): Homolog of NCBI NO: 37536574 NR Description: putative protein phosphatase 2C
  misc_feature (28)..(384): Homolog of NCBI NO: 13357263 NR Description: putative protein phosphatase 2C
  misc_feature (28)..(380): Homolog of NCBI NO: 11282001 NR Description: protein phosphatase 2C-like protein - Arabidopsis
  misc_feature (28)..(380): Homolog of NCBI NO: 15239244 NR Description: protein phosphatase 2C-related protein
  misc_feature (28)..(380): Homolog of NCBI NO: 20340237 NR Description: protein phosphatase 2c-like protein
  misc_feature (1)..(382): Homolog of NCBI NO: 38346816 NR Description: OSJNBa0088A01.23 [Oryza sativa (japonica
  misc_feature (1)..(386): Homolog of NCBI NO: 9759303 NR Description: protein phosphatase 2C-like [Arabidopsis thaliana]
  misc_feature (1)..(386): Homolog of NCBI NO: 21536936 NR Description: protein phosphatase 2C-like [Arabidopsis thaliana]
  misc_feature (1)..(386): Homolog of NCBI NO: 18415301 NR Description: protein phosphatase 2C-related [Arabidopsis
MALFCLRPMRRYGRMNRDDDDDDDHDGDSSSSGDSLLWSRELERHSFGDFSIAVVQANEVIEDHSQVETGNGAVFVGVYDGHGGPEASRYISDHLFSHLMRVSRERSCISEEALRAAFSATEEGFLTLVRRTCGLKPLIAAVGSCCLVGVIWKGTLLIANVGDSRAVLGSMGSNNNRSNKIVAEQLTSDHNAALEEVRQELRSLHPDDSHIVVLKHGVWRIKGIIQVSRSIGDAYLKRPEFSLDPSFPRFHLAEELQRPVLSAEPCVYTRVLQTSDKFVIFASDGLWEQMTNQQAVEIVNKHPRPGIARRLVRRAITIAAKKREMNYDDLKKVERGVRRFFHDDITVVVIFIDNELLMVEKATVPELSIKGFSHTVGPSKFSIFLS

SEQ ID NO: 40667 - protein, 378 aa, Arabidopsis thaliana
  peptide (1)..(378): Ceres Seq. ID no. 13494121
  misc_feature (18)..(316): Pfam Name: Protein phosphatase 2C Pfam Description: Protein phosphatase 2C
  misc_feature (9)..(363): Homolog of NCBI NO: 7768153 NR Description: protein phosphatase 2C (PP2C) [Fagus sylvatica]
  misc_feature (20)..(376): Homolog of NCBI NO: 37536574 NR Description: putative protein phosphatase 2C
  misc_feature (20)..(376): Homolog of NCBI NO: 13357263 NR Description: putative protein phosphatase 2C
  misc_feature (20)..(372): Homolog of NCBI NO: 11282001 NR Description: protein phosphatase 2C-like protein - Arabidopsis
  misc_feature (20)..(372): Homolog of NCBI NO: 15239244 NR Description: protein phosphatase 2C-related protein
  misc_feature (20)..(372): Homolog of NCBI NO: 20340237 NR Description: protein phosphatase 2c-like protein
  misc_feature (1)..(374): Homolog of NCBI NO: 38346816 NR Description: OSJNBa0088A01.23 [Oryza sativa (japonica
  misc_feature (1)..(378): Homolog of NCBI NO: 9759303 NR Description: protein phosphatase 2C-like [Arabidopsis thaliana]
  misc_feature (1)..(378): Homolog of NCBI NO: 21536936 NR Description: protein phosphatase 2C-like [Arabidopsis thaliana]
  misc_feature (1)..(378): Homolog of NCBI NO: 18415301 NR Description: protein phosphatase 2C-related [Arabidopsis
MRRYGRMNRDDDDDDDHDGDSSSSGDSLLWSRELERHSFGDFSIAVVQANEVIEDHSQVETGNGAVFVGVYDGHGGPEASRYISDHLFSHLMRVSRERSCISEEALRAAFSATEEGFLTLVRRTCGLKPLIAAVGSCCLVGVIWKGTLLIANVGDSRAVLGSMGSNNNRSNKIVAEQLTSDHNAALEEVRQELRSLHPDDSHIVVLKHGVWRIKGIIQVSRSIGDAYLKRPEFSLDPSFPRFHLAEELQRPVLSAEPCVYTRVLQTSDKFVIFASDGLWEQMTNQQAVEIVNKHPRPGIARRLVRRAITIAAKKREMNYDDLKKVERGVRRFFHDDITVVVIFIDNELLMVEKATVPELSIKGFSHTVGPSKFSIFLS

SEQ ID NO: 40668 - DNA, 2325 bp, Arabidopsis thaliana
  misc_feature (1)..(2325): Ceres Seq. ID no. 12600038
  misc_feature: MA Experiment ID: 108464 Result: Down-regulated in Transcription
  misc_feature: MA Experiment 108464 PARAMETER Experiment Name: At_Germinating_Seeds_cDNA_P Parameter: Age (day) Value: 4 vs. 0
  misc_feature: MA Experiment 108464 PARAMETER Experiment Name: At_Germinating_Seeds_cDNA_P Parameter: Tissue Value: Germinating Seeds
  misc_feature: MA Experiment ID: 108488 Result: Down-regulated in Transcription
  misc_feature: MA Experiment ID: 108605 Result: Up-regulated in Transcription
  misc_feature: MA Experiment 108605 PARAMETER Experiment Name: At_100uM_ABA_cDNA_P Parameter: Timepoint (hr) Value: 6
  misc_feature: MA Experiment 108605 PARAMETER Experiment Name: At_100uM_ABA_cDNA_P Parameter: Tissue Value: Aerial
  misc_feature: MA Experiment 108605 PARAMETER Experiment Name: At_100uM_ABA_cDNA_P Parameter: Treatment Value: 100uM ABA vs. No Treatment
  misc_feature: MA Experiment ID: 108607 Result: Up-regulated in Transcription
  misc_feature: MA Experiment 108607 PARAMETER Experiment Name: At_100uM_ABA_cDNA_P Parameter: Timepoint (hr) Value: 4
  misc_feature: MA Experiment 108607 PARAMETER Experiment Name: At_100uM_ABA_cDNA_P Parameter: Tissue Value: Aerial
  misc_feature: MA Experiment 108607 PARAMETER Experiment Name: At_100uM_ABA_cDNA_P Parameter: Treatment Value: 100uM ABA vs. No Treatment
  misc_feature: MA Experiment ID: 20000069 Result: Up-regulated in Transcription
  misc_feature: MA Experiment 20000069 PARAMETER Experiment Name: At_100uM_ABA_Mutants_cDNA_P Parameter: Plant Line Value: CS23
  misc_feature: MA Experiment 20000069 PARAMETER Experiment Name: At_100uM_ABA_Mutants_cDNA_P Parameter: Timepoint (hr) Value: 6
  misc_feature: MA Experiment 20000069 PARAMETER Experiment Name: At_100uM_ABA_Mutants_cDNA_P Parameter: Tissue Value: Aerial
  misc_feature: MA Experiment 20000069 PARAMETER Experiment Name: At_100uM_ABA_Mutants_cDNA_P Parameter: Treatment Value: 100uM ABA vs. No Treatment
  misc_feature: MA Experiment ID: 20000072 Result: Up-regulated in Transcription
  misc_feature: MA Experiment 20000072 PARAMETER Experiment Name: At_100uM_ABA_Mutants_cDNA_P Parameter: Plant Line Value: CS8105
  misc_feature: MA Experiment 20000072 PARAMETER Experiment Name: At_100uM_ABA_Mutants_cDNA_P Parameter: Timepoint (hr) Value: 6
  misc_feature: MA Experiment 20000072 PARAMETER Experiment Name: At_100uM_ABA_Mutants_cDNA_P Parameter: Tissue Value: Aerial
  misc_feature: MA Experiment 20000072 PARAMETER Experiment Name: At_100uM_ABA_Mutants_cDNA_P Parameter: Treatment Value: 100uM ABA vs. No Treatment
  misc_feature: MA Experiment ID: 20000087 Result: Up-regulated in Transcription
  misc_feature: MA Experiment 20000087 PARAMETER Experiment Name: At_100uM_ABA_Mutants_cDNA_P Parameter: Plant Line Value: WS
  misc_feature: MA Experiment 20000087 PARAMETER Experiment Name: At_100uM_ABA_Mutants_cDNA_P Parameter: Timepoint (hr) Value: 6
  misc_feature: MA Experiment 20000087 PARAMETER Experiment Name: At_100uM_ABA_Mutants_cDNA_P Parameter: Tissue Value: Aerial
  misc_feature: MA Experiment 20000087 PARAMETER Experiment Name: At_100uM_ABA_Mutants_cDNA_P Parameter: Treatment Value: 100uM ABA vs. No Treatment
  misc_feature: MA Experiment ID: 20000113 Result: Down-regulated in Transcription
  misc_feature: MA Experiment 20000113 PARAMETER Experiment Name: At_42deg_Heat_cDNA_P Parameter: Temperature (deg C) Value: 42 vs. 22
  misc_feature: MA Experiment 20000113 PARAMETER Experiment Name: At_42deg_Heat_cDNA_P Parameter: Timepoint (hr) Value: 8
  misc_feature: MA Experiment 20000113 PARAMETER Experiment Name: At_42deg_Heat_cDNA_P Parameter: Tissue Value: Aerial
  misc_feature: MA Experiment ID: 20000185 Result: Up-regulated in Transcription
  misc_feature: MA Experiment 20000185 PARAMETER Experiment Name: At_Roots__P Parameter: Age (day) Value: 7 vs. 21
  misc_feature: MA Experiment 20000185 PARAMETER Experiment Name: At_Roots__P Parameter: Organism Value: A. thaliana
  misc_feature: MA Experiment 20000185 PARAMETER Experiment Name: At_Roots__P Parameter: Tissue Value: Roots vs. Whole Plant
  misc_feature: MA Experiment ID: 20000224 Result: Up-regulated in Transcription
  misc_feature: MA Experiment ID: 20000234 Result: Up-regulated in Transcription
  misc_feature: MA Experiment 20000234 PARAMETER Experiment Name: At_Siliques_P Parameter: Age (day) Value: 21
  misc_feature: MA Experiment 20000234 PARAMETER Experiment Name: At_Siliques_P Parameter: Organism Value: A. thaliana
  misc_feature: MA Experiment 20000234 PARAMETER Experiment Name: At_Siliques_P Parameter: Plant Line Value: WS
  misc_feature: MA Experiment 20000234 PARAMETER Experiment Name: At_Siliques_P Parameter: Tissue Value: Less Than 5mm Siliques vs. Whole Plant
  misc_feature: MA Experiment ID: 20000264 Result: Up-regulated in Transcription
  misc_feature: MA Experiment 20000264 PARAMETER Experiment Name: At_Open_Flower_P Parameter: Age (day) Value: 21
  misc_feature: MA Experiment 20000264 PARAMETER Experiment Name: At_Open_Flower_P Parameter: Plant Line Value: WS
  misc_feature: MA Experiment 20000264 PARAMETER Experiment Name: At_Open_Flower_P Parameter: Tissue Value: Open Flower vs. Whole Plant
  misc_feature: MA Experiment ID: 20000286 Result: Up-regulated in Transcription
  misc_feature: MA Experiment 20000286 PARAMETER Experiment Name: At_Open_Flower_P Parameter: Age (day) Value: 21
  misc_feature: MA Experiment 20000286 PARAMETER Experiment Name: At_Open_Flower_P Parameter: Plant Line Value: WS
  misc_feature: MA Experiment 20000286 PARAMETER Experiment Name: At_Open_Flower_P Parameter: Tissue Value: Half Open vs. Whole Plant
  misc_feature: MA Experiment ID: 20000436 Result: Up-regulated in Transcription
  misc_feature: MA Experiment 20000436 PARAMETER Experiment Name: At_Drought_P Parameter: Age (day) Value: 7
  misc_feature: MA Experiment 20000436 PARAMETER Experiment Name: At_Drought_P Parameter: Organism Value: A. thaliana
  misc_feature: MA Experiment 20000436 PARAMETER Experiment Name: At_Drought_P Parameter: Plant Line Value: WS
  misc_feature: MA Experiment 20000436 PARAMETER Experiment Name: At_Drought_P Parameter: Timepoint (hr) Value: 12
  misc_feature: MA Experiment 20000436 PARAMETER Experiment Name: At_Drought_P Parameter: Tissue Value: Whole Plant
  misc_feature: MA Experiment 20000436 PARAMETER Experiment Name: At_Drought_P Parameter: Treatment Value: Drought vs. No Drought
  misc_feature: MA Experiment ID: 20000437 Result: Up-regulated in Transcription
  misc_feature: MA Experiment 20000437 PARAMETER Experiment Name: At_Drought_P Parameter: Age (day) Value: 8
  misc_feature: MA Experiment 20000437 PARAMETER Experiment Name: At_Drought_P Parameter: Organism Value: A. thaliana
  misc_feature: MA Experiment 20000437 PARAMETER Experiment Name: At_Drought_P Parameter: Plant Line Value: WS
  misc_feature: MA Experiment 20000437 PARAMETER Experiment Name: At_Drought_P Parameter: Timepoint (hr) Value: 24
  misc_feature: MA Experiment 20000437 PARAMETER Experiment Name: At_Drought_P Parameter: Tissue Value: Whole Plant
  misc_feature: MA Experiment 20000437 PARAMETER Experiment Name: At_Drought_P Parameter: Treatment Value: Drought vs. No Drought
  misc_feature: MA Experiment ID: 20000439 Result: Up-regulated in Transcription
  misc_feature: MA Experiment 20000439 PARAMETER Experiment Name: At_Roots__P Parameter: Age (day) Value: 14 vs. 21
  misc_feature: MA Experiment 20000439 PARAMETER Experiment Name: At_Roots__P Parameter: Organism Value: A. thaliana
  misc_feature: MA Experiment 20000439 PARAMETER Experiment Name: At_Roots__P Parameter: Tissue Value: Roots vs. Whole Plant
  misc_feature: MA Experiment ID: 20000794 Result: Up-regulated in Transcription
  misc_feature: MA Experiment 20000794 PARAMETER Experiment Name: At_Petals_P Parameter: Age (day) Value: 23-25 days
  misc_feature: MA Experiment 20000794 PARAMETER Experiment Name: At_Petals_P Parameter: Plant Line Value: WS
  misc_feature: MA Experiment 20000794 PARAMETER Experiment Name: At_Petals_P Parameter: Tissue Value: Petals vs. Whole plant
  misc_feature: MA Experiment ID: 20001557 Result: Up-regulated in Transcription
  misc_feature: MA Experiment 20001557 PARAMETER Experiment Name: At_Drought_Soil_Dry_P Parameter: Age (day) Value: 27
  misc_feature: MA Experiment 20001557 PARAMETER Experiment Name: At_Drought_Soil_Dry_P Parameter: Organism Value: A. thaliana
  misc_feature: MA Experiment 20001557 PARAMETER Experiment Name: At_Drought_Soil_Dry_P Parameter: Plant Line Value: WS
  misc_feature: MA Experiment 20001557 PARAMETER Experiment Name: At_Drought_Soil_Dry_P Parameter: Post Timepoint (hr) Value: 3
  misc_feature: MA Experiment 20001557 PARAMETER Experiment Name: At_Drought_Soil_Dry_P Parameter: Post-Treatment Value: Re-Water vs. No Drought
  misc_feature: MA Experiment 20001557 PARAMETER Experiment Name: At_Drought_Soil_Dry_P Parameter: Timepoint (day) Value: 13
  misc_feature: MA Experiment 20001557 PARAMETER Experiment Name: At_Drought_Soil_Dry_P Parameter: Treatment Value: Drought vs. No Drought
  misc_feature: MA Experiment ID: 20001757 Result: Down-regulated in Transcription
  misc_feature: MA Experiment 20001757 PARAMETER Experiment Name: At_50mM_NH4NO3_L-to-H_P Parameter: Timepoint (hr) Value: 6
  misc_feature: MA Experiment 20001757 PARAMETER Experiment Name: At_50mM_NH4NO3_L-to-H_P Parameter: Tissue Value: Leaf
  misc_feature: MA Experiment 20001757 PARAMETER Experiment Name: At_50mM_NH4NO3_L-to-H_P Parameter: Treatment Value: 50mM NH4NO3 vs 100mM Mannitol
  misc_feature: MA Experiment ID: 20001904 Result: Up-regulated in Transcription
  misc_feature: MA Experiment 20001904 PARAMETER Experiment Name: At_Drought_Reproduction_P Parameter: Age (day) Value: 37
  misc_feature: MA Experiment 20001904 PARAMETER Experiment Name: At_Drought_Reproduction_P Parameter: Organism Value: A. thaliana
  misc_feature: MA Experiment 20001904 PARAMETER Experiment Name: At_Drought_Reproduction_P Parameter: Plant Line Value: WS
  misc_feature: MA Experiment 20001904 PARAMETER Experiment Name: At_Drought_Reproduction_P Parameter: Timepoint (day) Value: 7
  misc_feature: MA Experiment 20001904 PARAMETER Experiment Name: At_Drought_Reproduction_P Parameter: Tissue Value: Rosettes
  misc_feature: MA Experiment 20001904 PARAMETER Experiment Name: At_Drought_Reproduction_P Parameter: Treatment Value: Drought vs. No Drought
  misc_feature: MA Experiment ID: 20001905 Result: Up-regulated in Transcription
  misc_feature: MA Experiment 20001905 PARAMETER Experiment Name: At_Drought_Reproduction_P Parameter: Age (day) Value: 40
  misc_feature: MA Experiment 20001905 PARAMETER Experiment Name: At_Drought_Reproduction_P Parameter: Organism Value: A. thaliana
  misc_feature: MA Experiment 20001905 PARAMETER Experiment Name: At_Drought_Reproduction_P Parameter: Plant Line Value: WS
  misc_feature: MA Experiment 20001905 PARAMETER Experiment Name: At_Drought_Reproduction_P Parameter: Timepoint (day) Value: 10
  misc_feature: MA Experiment 20001905 PARAMETER Experiment Name: At_Drought_Reproduction_P Parameter: Tissue Value: Rosettes
  misc_feature: MA Experiment 20001905 PARAMETER Experiment Name: At_Drought_Reproduction_P Parameter: Treatment Value: Drought vs. No Drought
ccgttcgcgtcttcctcttaaaggaaacctcctctacgcgaaattcgtattctctcatttcttctacggagatttgcatcgaagaaactgactcgcttgtggaatcaacaacaagacgatgtggcgctgcgtctctcgtggctttcgagctcctgcttcaaagacctcttcactctttgatggcgtctctggatctcgcttttccagattcttctccactggttctaccgatacgagatcctcttatacgatagtggatcacacttatgatgcggttgtggtgggagctggtggtgctggtcttagggcggcgattgggttatcggagcatggctttaacaccgcttgcattactaagcttttccccacaaggtcacatactgttgctgctcagggtggtattaatgctgcactgggaaatatgtccgaagatgactggagatggcacatgtatgacactgtcaaaggaagtgactggctaggtgatcaagatgctatccagtacatgtgtagagaggcaccaaaagcagtcattgaacttgagaattatgggctgcctttctctcgtactgaagaagggaaaatttaccagcgtgcatttggtggtcagagtcttgactttggaaaaggtggtcaggcctatcgttgtgcttgtgctgcggataggactggtcatgctctgttgcatactctctatggacaagctatgaagcataacacacagttctttgttgaatacttcgccttggatctgctcatggctagtgatggcagttgccagggtgtaattgcactaaacatggaagatggaacattgcatcgtttccgttcttctcaaacaattttggcaactggggggtacggcagagcatacttctctgcaacctcagcacatacatgcacaggggatggaaatgcaatggttgcacgggccggtcttccactgcaggacttggagtttgttcaattccatccaactggtatatatggggccggatgtctcatcaccgaaggatctcgaggtgaaggtggtatccttagaaacagtgaaggtgaacgttttatggaacgatatgctcctacagccaaggatcttgcatcaagagatgttgtctccagatccatgactatggaaatcagggaaggtcgtggtgtaggaccgcataaggatcatatctatctccatctgaatcatcttcctccagaagttctaaaagaaaggcttcctggaatctctgagaccgctgccatctttgctggtgttgatgttaccaaagagccaattcctgtcttacccacggttcattataacatgggtggtatcccaacaaactaccatggcgaggtagttaccatcaaaggcgatgatccagatgcagtgattcctgggctaatggctgctggggaggcagcttgtgcatctgttcatggtgccaacaggcttggtgcaaattcactgctcgacattgtcgtatttggtcgtgcttgtgcaaatagggttgcagagataagcaaaccaggggagaaacagaaacctcttgagaaggatgcgggtgagaagactattgcatggctggacaggttgagaaactcaaacgggtctctacctacttcaactatcagattgaacatgcagaggattatgcagaacaacgcagctgtgttccgcacgcaagaaacattggaagaaggttgtcagttgattgacaaggcctgggaaagttttggggacgtccaggtgaaagatcggagtatgatatggaactcggatttgatagagacattggaactggagaaccttttgataaacgcatccataacaatgcattcagcagaagcacgaaaggaaagcagaggagcacatgctcgggaagacttcacgaaaagagaggatggagaatggatgaagcatacattgggatattgggaagatgagaaagtgagattggattataggcctgttcacatggacactctcgacgatgagatcgacactttccctcccaaagctcgtgtctattgatcgagcccatgtttttattttatctgttatcggaataataataataatcaggaaccccccaaaaaaagggaattaggagaagaagacggagttatgagctgatggagcacaaaggactgttctgaaactgggtttacgttttacaccagaaacgatgaaaataaattgatagaaagaggaaaaaacactacaattcttattttctttatcagttcctgaaattgttacattctttgttacctgttaattacgccttggtgatattcattttttttttttaaatcaaaatgttcgaattccgt

SEQ ID NO: 40669 - protein, 634 aa, Arabidopsis thaliana
  peptide (1)..(634): Ceres Seq. ID no. 12600039
  misc_feature (150)..(483): Pfam Name: FAD binding domain Pfam Description: FAD binding domain
  misc_feature (150)..(483): Pfam Name: FAD binding domain Pfam Description: FAD binding domain
  misc_feature (36)..(592): Homolog of NCBI NO: 1169337 NR Description: Succinate dehydrogenase
  misc_feature (3)..(592): Homolog of NCBI NO: 28703813 NR Description: Similar to succinate dehydrogenase complex,
  misc_feature (42)..(634): Homolog of NCBI NO: 6649876 NR Description: SdhA; succinate dehydrogenase flavoprotein
  misc_feature (41)..(634): Homolog of NCBI NO: 6322416 NR Description: Similar to SDH1; Yjl045wp [Saccharomyces
  misc_feature (34)..(634): Homolog of NCBI NO: 6322701 NR Description: Yeast succinate dehydrogenase (SDH) is a tetramer non-equivalent subunits--Sdh1p, Sdh2p, Sdh3p, Sdh4p--that couples oxidation of succinate to the transfer of electrons to
  misc_feature (36)..(592): Homolog of NCBI NO: 1169337 NR Description: Succinate dehydrogenase
  misc_feature (42)..(634): Homolog of NCBI NO: 6649876 NR Description: SdhA; succinate dehydrogenase flavoprotein
  misc_feature (34)..(634): Homolog of NCBI NO: 6322701 NR Description: Yeast succinate dehydrogenase (SDH) is a tetramer non-equivalent subunits--Sdh1p, Sdh2p, Sdh3p, Sdh4p--that couples oxidation of succinate to the transfer of electrons to
  misc_feature (1)..(634): Homolog of NCBI NO: 15224174 NR Description: putative succinate dehydrogenase flavoprotein
  misc_feature (33)..(634): Homolog of NCBI NO: 23011974 NR Description: hypothetical protein [Magnetospirillum
  misc_feature (16)..(634): Homolog of NCBI NO: 19115231 NR Description: probable succinate dehydrogenase flavoprotein
  misc_feature (33)..(634): Homolog of NCBI NO: 27902658 NR Description: succinate dehydrogenase alpha subunit
  misc_feature (30)..(634): Homolog of NCBI NO: 6644394 NR Description: SdhA [Dictyostelium discoideum]
  misc_feature (41)..(634): Homolog of NCBI NO: 6322416 NR Description: Similar to SDH1; Yjl045wp [Saccharomyces
  misc_feature (3)..(592): Homolog of NCBI NO: 28703813 NR Description: Similar to succinate dehydrogenase complex,
  misc_feature (30)..(634): Homolog of NCBI NO: 6644394 NR Description: SdhA [Dictyostelium discoideum]
  misc_feature (33)..(634): Homolog of NCBI NO: 27902658 NR Description: succinate dehydrogenase alpha subunit
  misc_feature (16)..(634): Homolog of NCBI NO: 19115231 NR Description: probable succinate dehydrogenase flavoprotein
  misc_feature (33)..(634): Homolog of NCBI NO: 23011974 NR Description: hypothetical protein [Magnetospirillum
  misc_feature (1)..(634): Homolog of NCBI NO: 15224174 NR Description: putative succinate dehydrogenase flavoprotein
MWRCVSRGFRAPASKTSSLFDGVSGSRFSRFFSTGSTDTRSSYTIVDHTYDAVVVGAGGAGLRAAIGLSEHGFNTACITKLFPTRSHTVAAQGGINAALGNMSEDDWRWHMYDTVKGSDWLGDQDAIQYMCREAPKAVIELENYGLPFSRTEEGKIYQRAFGGQSLDFGKGGQAYRCACAADRTGHALLHTLYGQAMKHNTQFFVEYFALDLLMASDGSCQGVIALNMEDGTLHRFRSSQTILATGGYGRAYFSATSAHTCTGDGNAMVARAGLPLQDLEFVQFHPTGIYGAGCLITEGSRGEGGILRNSEGERFMERYAPTAKDLASRDVVSRSMTMEIREGRGVGPHKDHIYLHLNHLPPEVLKERLPGISETAAIFAGVDVTKEPIPVLPTVHYNMGGIPTNYHGEVVTIKGDDPDAVIPGLMAAGEAACASVHGANRLGANSLLDIVVFGRACANRVAEISKPGEKQKPLEKDAGEKTIAWLDRLRNSNGSLPTSTIRLNMQRIMQNNAAVFRTQETLEEGCQLIDKAWESFGDVQVKDRSMIWNSDLIETLELENLLINASITMHSAEARKESRGAHAREDFTKREDGEWMKHTLGYWEDEKVRLDYRPVHMDTLDDEIDTFPPKARVY

SEQ ID NO: 40670 - protein, 533 aa, Arabidopsis thaliana
  peptide (1)..(533): Ceres Seq. ID no. 12600040
  misc_feature (49)..(382): Pfam Name: FAD binding domain Pfam Description: FAD binding domain
  misc_feature (49)..(382): Pfam Name: FAD binding domain Pfam Description: FAD binding domain
  misc_feature (1)..(491): Homolog of NCBI NO: 1169337 NR Description: Succinate dehydrogenase
  misc_feature (1)..(491): Homolog of NCBI NO: 28703813 NR Description: Similar to succinate dehydrogenase complex,
  misc_feature (1)..(533): Homolog of NCBI NO: 6649876 NR Description: SdhA; succinate dehydrogenase flavoprotein
  misc_feature (1)..(533): Homolog of NCBI NO: 6322416 NR Description: Similar to SDH1; Yjl045wp [Saccharomyces
  misc_feature (1)..(533): Homolog of NCBI NO: 6322701 NR Description: Yeast succinate dehydrogenase (SDH) is a tetramer non-equivalent subunits--Sdh1p, Sdh2p, Sdh3p, Sdh4p--that couples oxidation of succinate to the transfer of electrons to
  misc_feature (1)..(491): Homolog of NCBI NO: 1169337 NR Description: Succinate dehydrogenase
  misc_feature (1)..(533): Homolog of NCBI NO: 6649876 NR Description: SdhA; succinate dehydrogenase flavoprotein
  misc_feature (1)..(533): Homolog of NCBI NO: 6322701 NR Description: Yeast succinate dehydrogenase (SDH) is a tetramer non-equivalent subunits--Sdh1p, Sdh2p, Sdh3p, Sdh4p--that couples oxidation of succinate to the transfer of electrons to
  misc_feature (1)..(533): Homolog of NCBI NO: 15224174 NR Description: putative succinate dehydrogenase flavoprotein
  misc_feature (1)..(533): Homolog of NCBI NO: 23011974 NR Description: hypothetical protein [Magnetospirillum
  misc_feature (1)..(533): Homolog of NCBI NO: 19115231 NR Description: probable succinate dehydrogenase flavoprotein
  misc_feature (1)..(533): Homolog of NCBI NO: 27902658 NR Description: succinate dehydrogenase alpha subunit
  misc_feature (1)..(533): Homolog of NCBI NO: 6644394 NR Description: SdhA [Dictyostelium discoideum]
  misc_feature (1)..(533): Homolog of NCBI NO: 6322416 NR Description: Similar to SDH1; Yjl045wp [Saccharomyces
  misc_feature (1)..(491): Homolog of NCBI NO: 28703813 NR Description: Similar to succinate dehydrogenase complex,
  misc_feature (1)..(533): Homolog of NCBI NO: 6644394 NR Description: SdhA [Dictyostelium discoideum]
  misc_feature (1)..(533): Homolog of NCBI NO: 27902658 NR Description: succinate dehydrogenase alpha subunit
  misc_feature (1)..(533): Homolog of NCBI NO: 19115231 NR Description: probable succinate dehydrogenase flavoprotein
  misc_feature (1)..(533): Homolog of NCBI NO: 23011974 NR Description: hypothetical protein [Magnetospirillum
  misc_feature (1)..(533): Homolog of NCBI NO: 15224174 NR Description: putative succinate dehydrogenase flavoprotein
MSEDDWRWHMYDTVKGSDWLGDQDAIQYMCREAPKAVIELENYGLPFSRTEEGKIYQRAFGGQSLDFGKGGQAYRCACAADRTGHALLHTLYGQAMKHNTQFFVEYFALDLLMASDGSCQGVIALNMEDGTLHRFRSSQTILATGGYGRAYFSATSAHTCTGDGNAMVARAGLPLQDLEFVQFHPTGIYGAGCLITEGSRGEGGILRNSEGERFMERYAPTAKDLASRDVVSRSMTMEIREGRGVGPHKDHIYLHLNHLPPEVLKERLPGISETAAIFAGVDVTKEPIPVLPTVHYNMGGIPTNYHGEVVTIKGDDPDAVIPGLMAAGEAACASVHGANRLGANSLLDIVVFGRACANRVAEISKPGEKQKPLEKDAGEKTIAWLDRLRNSNGSLPTSTIRLNMQRIMQNNAAVFRTQETLEEGCQLIDKAWESFGDVQVKDRSMIWNSDLIETLELENLLINASITMHSAEARKESRGAHAREDFTKREDGEWMKHTLGYWEDEKVRLDYRPVHMDTLDDEIDTFPPKARVY

SEQ ID NO: 40671 - protein, 524 aa, Arabidopsis thaliana
  peptide (1)..(524): Ceres Seq. ID no. 12600041
  misc_feature (40)..(373): Pfam Name: FAD binding domain Pfam Description: FAD binding domain
  misc_feature (40)..(373): Pfam Name: FAD binding domain Pfam Description: FAD binding domain
  misc_feature (1)..(482): Homolog of NCBI NO: 1169337 NR Description: Succinate dehydrogenase
  misc_feature (1)..(482): Homolog of NCBI NO: 28703813 NR Description: Similar to succinate dehydrogenase complex,
  misc_feature (1)..(524): Homolog of NCBI NO: 6649876 NR Description: SdhA; succinate dehydrogenase flavoprotein
  misc_feature (1)..(524): Homolog of NCBI NO: 6322416 NR Description: Similar to SDH1; Yjl045wp [Saccharomyces
  misc_feature (1)..(524): Homolog of NCBI NO: 6322701 NR Description: Yeast succinate dehydrogenase (SDH) is a tetramer non-equivalent subunits--Sdh1p, Sdh2p, Sdh3p, Sdh4p--that couples oxidation of succinate to the transfer of electrons to
  misc_feature (1)..(482): Homolog of NCBI NO: 1169337 NR Description: Succinate dehydrogenase
  misc_feature (1)..(524): Homolog of NCBI NO: 6649876 NR Description: SdhA; succinate dehydrogenase flavoprotein
  misc_feature (1)..(524): Homolog of NCBI NO: 6322701 NR Description: Yeast succinate dehydrogenase (SDH) is a tetramer non-equivalent subunits--Sdh1p, Sdh2p, Sdh3p, Sdh4p--that couples oxidation of succinate to the transfer of electrons to
  misc_feature (1)..(524): Homolog of NCBI NO: 15224174 NR Description: putative succinate dehydrogenase flavoprotein
  misc_feature (1)..(524): Homolog of NCBI NO: 23011974 NR Description: hypothetical protein [Magnetospirillum
  misc_feature (1)..(524): Homolog of NCBI NO: 19115231 NR Description: probable succinate dehydrogenase flavoprotein
  misc_feature (1)..(524): Homolog of NCBI NO: 27902658 NR Description: succinate dehydrogenase alpha subunit
  misc_feature (1)..(524): Homolog of NCBI NO: 6644394 NR Description: SdhA [Dictyostelium discoideum]
  misc_feature (1)..(524): Homolog of NCBI NO: 6322416 NR Description: Similar to SDH1; Yjl045wp [Saccharomyces
  misc_feature (1)..(482): Homolog of NCBI NO: 28703813 NR Description: Similar to succinate dehydrogenase complex,
  misc_feature (1)..(524): Homolog of NCBI NO: 6644394 NR Description: SdhA [Dictyostelium discoideum]
  misc_feature (1)..(524): Homolog of NCBI NO: 27902658 NR Description: succinate dehydrogenase alpha subunit
  misc_feature (1)..(524): Homolog of NCBI NO: 19115231 NR Description: probable succinate dehydrogenase flavoprotein
  misc_feature (1)..(524): Homolog of NCBI NO: 23011974 NR Description: hypothetical protein [Magnetospirillum
  misc_feature (1)..(524): Homolog of NCBI NO: 15224174 NR Description: putative succinate dehydrogenase flavoprotein
MYDTVKGSDWLGDQDAIQYMCREAPKAVIELENYGLPFSRTEEGKIYQRAFGGQSLDFGKGGQAYRCACAADRTGHALLHTLYGQAMKHNTQFFVEYFALDLLMASDGSCQGVIALNMEDGTLHRFRSSQTILATGGYGRAYFSATSAHTCTGDGNAMVARAGLPLQDLEFVQFHPTGIYGAGCLITEGSRGEGGILRNSEGERFMERYAPTAKDLASRDVVSRSMTMEIREGRGVGPHKDHIYLHLNHLPPEVLKERLPGISETAAIFAGVDVTKEPIPVLPTVHYNMGGIPTNYHGEVVTIKGDDPDAVIPGLMAAGEAACASVHGANRLGANSLLDIVVFGRACANRVAEISKPGEKQKPLEKDAGEKTIAWLDRLRNSNGSLPTSTIRLNMQRIMQNNAAVFRTQETLEEGCQLIDKAWESFGDVQVKDRSMIWNSDLIETLELENLLINASITMHSAEARKESRGAHAREDFTKREDGEWMKHTLGYWEDEKVRLDYRPVHMDTLDDEIDTFPPKARVY

SEQ ID NO: 40672 - DNA, 1106 bp, Arabidopsis thaliana
  misc_feature (1)..(1106): Ceres Seq. ID no. 12370963
  misc_feature: MA Experiment ID: 108434 Result: Up-regulated in Transcription
  misc_feature: MA Experiment 108434 PARAMETER Experiment Name: At_Root_Tips_cDNA_P Parameter: Tissue Value: Root Tips
  misc_feature: MA Experiment ID: 108461 Result: Down-regulated in Transcription
  misc_feature: MA Experiment 108461 PARAMETER Experiment Name: At_Germinating_Seeds_cDNA_P Parameter: Age (day) Value: 1 vs. 0
  misc_feature: MA Experiment 108461 PARAMETER Experiment Name: At_Germinating_Seeds_cDNA_P Parameter: Tissue Value: Germinating Seeds
  misc_feature: MA Experiment ID: 108462 Result: Down-regulated in Transcription
  misc_feature: MA Experiment 108462 PARAMETER Experiment Name: At_Germinating_Seeds_cDNA_P Parameter: Age (day) Value: 2 vs. 0
  misc_feature: MA Experiment 108462 PARAMETER Experiment Name: At_Germinating_Seeds_cDNA_P Parameter: Tissue Value: Germinating Seeds
  misc_feature: MA Experiment ID: 108463 Result: Down-regulated in Transcription
  misc_feature: MA Experiment 108463 PARAMETER Experiment Name: At_Germinating_Seeds_cDNA_P Parameter: Age (day) Value: 3 vs. 0
  misc_feature: MA Experiment 108463 PARAMETER Experiment Name: At_Germinating_Seeds_cDNA_P Parameter: Tissue Value: Germinating Seeds
  misc_feature: MA Experiment ID: 108464 Result: Down-regulated in Transcription
  misc_feature: MA Experiment 108464 PARAMETER Experiment Name: At_Germinating_Seeds_cDNA_P Parameter: Age (day) Value: 4 vs. 0
  misc_feature: MA Experiment 108464 PARAMETER Experiment Name: At_Germinating_Seeds_cDNA_P Parameter: Tissue Value: Germinating Seeds
  misc_feature: MA Experiment ID: 108585 Result: Up-regulated in Transcription
  misc_feature: MA Experiment 108585 PARAMETER Experiment Name: At_5mM_NaNP_cDNA_P Parameter: Timepoint (hr) Value: 6
  misc_feature: MA Experiment 108585 PARAMETER Experiment Name: At_5mM_NaNP_cDNA_P Parameter: Tissue Value: Aerial
  misc_feature: MA Experiment 108585 PARAMETER Experiment Name: At_5mM_NaNP_cDNA_P Parameter: Treatment Value: null
  misc_feature: MA Experiment ID: 20000179 Result: Down-regulated in Transcription
  misc_feature: MA Experiment 20000179 PARAMETER Experiment Name: At_Germinating_Seeds_P Parameter: Age (hr) Value: 6 vs. 0
  misc_feature: MA Experiment 20000179 PARAMETER Experiment Name: At_Germinating_Seeds_P Parameter: Tissue Value: Germinating Seeds
  misc_feature: MA Experiment ID: 20000180 Result: Down-regulated in Transcription
  misc_feature: MA Experiment 20000180 PARAMETER Experiment Name: At_Germinating_Seeds_P Parameter: Age (hr) Value: 24 vs. 0
  misc_feature: MA Experiment 20000180 PARAMETER Experiment Name: At_Germinating_Seeds_P Parameter: Tissue Value: Germinating Seeds
ggcttgtcgcagaagttgggattcgtctttttataatttgccctgaaaacgaaaacgaaaataaaaagcggagagagagatggctagatacgatcgagcaattactgtcttctcccccgacggtcacctctttcaagtcgaatacgcccttgaagccgtccgcaagggtaacgccgccgtcggtgtccgcggtaccgacaccgttgtcctcgccgtcgagaagaagtccacccccaagcttcaggattctagatcagccagaaaaattgtgagccttgacaatcacattgccttggcatgcgcggggctcaaggctgatgcccgagtcttgattaacaaagcaaggatcgagtgtcaaagccacaggcttacacttgaggaccctgtcactgttgagtacatcactcgctacattgctggccttcaacagaagtatacccaaagtggtggtgtcagacccttcggtctttctactcttatcgttggctttgacccttactctcgcctcccttccctatatcagactgatccttctgggactttctctgcttggaaagctaatgctaccggcagaaactccaactctattagggaattcctcgagaagaactacaaagaatcctctggccaagaaactattaaactcgctatccgtgctctgcttgaggtagttgagagtggcggaaagaacattgaggttgccgtaatgacacgggaggaaactgggctgcgccagctagaagaagctgaaattgatgcaatcgtggccaagatcgaagctgaaaaggcggccgcagaagcagccaagaaaggccctccaaaggaaacttgataaaacaataactgtttctgtttctcaatctgaacttaccttcttcgctgcttctgtttctcaatcttgttttgactcgagccaactctttggcaaaagaagaacctgaccccatcgttttgttaacttgaaaatgctccaaaaaaaaactgaagaaagggtttaaaattcgcttgatcttgatcaaaccaaggataaatttgctgttgctcattgttagatagagaagtgactctccattttctatttataagtaagcagaacaattagtgtt

SEQ ID NO: 40673 - protein, 250 aa, Arabidopsis thaliana
  peptide (1)..(250): Ceres Seq. ID no. 12370964
  misc_feature (27)..(210): Pfam Name: Proteasome A-type and B-type Pfam Description: Proteasome A-type and B-type
  misc_feature (2)..(250): Homolog of NCBI NO: 12229928 NR Description: Proteasome subunit alpha type 7 (Proteasome
  misc_feature (35)..(250): Homolog of NCBI NO: 14594917 NR Description: putative alpha4 proteasome subunit [Nicotiana
  misc_feature (1)..(250): Homolog of NCBI NO: 12644044 NR Description: Proteasome subunit alpha type 7 (20S proteasome
  misc_feature (1)..(244): Homolog of NCBI NO: 3334299 NR Description: Proteasome subunit alpha type 7 (20S proteasome
  misc_feature (1)..(250): Homolog of NCBI NO: 7435885 NR Description: probable C 3.4.25.1 proteasome endopeptidase
  misc_feature (1)..(250): Homolog of NCBI NO: 12229936 NR Description: Proteasome subunit alpha type 7 (20S proteasome
  misc_feature (1)..(235): Homolog of NCBI NO: 2511580 NR Description: multicatalytic endopeptidase [Arabidopsis
  misc_feature (1)..(250): Homolog of NCBI NO: 21593040 NR Description: multicatalytic endopeptidase complex  alpha chain
  misc_feature (1)..(250): Homolog of NCBI NO: 15230435 NR Description: 20S proteasome alpha subunit D (PAD1)
  misc_feature (1)..(250): Homolog of NCBI NO: 15239271 NR Description: 20S proteasome alpha subunit D2 (PAD2)
MARYDRAITVFSPDGHLFQVEYALEAVRKGNAAVGVRGTDTVVLAVEKKSTPKLQDSRSARKIVSLDNHIALACAGLKADARVLINKARIECQSHRLTLEDPVTVEYITRYIAGLQQKYTQSGGVRPFGLSTLIVGFDPYSRLPSLYQTDPSGTFSAWKANATGRNSNSIREFLEKNYKESSGQETIKLAIRALLEVVESGGKNIEVAVMTREETGLRQLEEAEIDAIVAKIEAEKAAAEAAKKGPPKET

SEQ ID NO: 40674 - DNA, 1266 bp, Arabidopsis thaliana
  misc_feature (1)..(1266): Ceres Seq. ID no. 13497266
  misc_feature: MA Experiment ID: 20000794 Result: Up-regulated in Transcription
  misc_feature: MA Experiment 20000794 PARAMETER Experiment Name: At_Petals_P Parameter: Age (day) Value: 23-25 days
  misc_feature: MA Experiment 20000794 PARAMETER Experiment Name: At_Petals_P Parameter: Plant Line Value: WS
  misc_feature: MA Experiment 20000794 PARAMETER Experiment Name: At_Petals_P Parameter: Tissue Value: Petals vs. Whole plant
  misc_feature: MA Experiment ID: 20001905 Result: Up-regulated in Transcription
  misc_feature: MA Experiment 20001905 PARAMETER Experiment Name: At_Drought_Reproduction_P Parameter: Age (day) Value: 40
  misc_feature: MA Experiment 20001905 PARAMETER Experiment Name: At_Drought_Reproduction_P Parameter: Organism Value: A. thaliana
  misc_feature: MA Experiment 20001905 PARAMETER Experiment Name: At_Drought_Reproduction_P Parameter: Plant Line Value: WS
  misc_feature: MA Experiment 20001905 PARAMETER Experiment Name: At_Drought_Reproduction_P Parameter: Timepoint (day) Value: 10
  misc_feature: MA Experiment 20001905 PARAMETER Experiment Name: At_Drought_Reproduction_P Parameter: Tissue Value: Rosettes
  misc_feature: MA Experiment 20001905 PARAMETER Experiment Name: At_Drought_Reproduction_P Parameter: Treatment Value: Drought vs. No Drought
  misc_feature: MA Experiment ID: 20001911 Result: Up-regulated in Transcription
  misc_feature: MA Experiment 20001911 PARAMETER Experiment Name: At_Drought_Reproduction_P Parameter: Age (day) Value: 40
  misc_feature: MA Experiment 20001911 PARAMETER Experiment Name: At_Drought_Reproduction_P Parameter: Organism Value: A. thaliana
  misc_feature: MA Experiment 20001911 PARAMETER Experiment Name: At_Drought_Reproduction_P Parameter: Plant Line Value: WS
  misc_feature: MA Experiment 20001911 PARAMETER Experiment Name: At_Drought_Reproduction_P Parameter: Timepoint (day) Value: 10
  misc_feature: MA Experiment 20001911 PARAMETER Experiment Name: At_Drought_Reproduction_P Parameter: Tissue Value: Flowers
  misc_feature: MA Experiment 20001911 PARAMETER Experiment Name: At_Drought_Reproduction_P Parameter: Treatment Value: Drought vs. No Drought
agtaatctcaatcacaaactatttcccccccttcgttcatcaaatcctcaagagaaaaaaaaaatccccaaaagcttcctcaaaaccctaacacagatctctcgatcttctccgatctgtcttttctcctaatctggtttagtttgattttattggattgaagatgtcagacgctttgaatatgactcttgatgaaattgtgaagaagagtaagagtgaaaggtctgcagctgcaaggtctggaggtaaaggagtttcccgtaagagtggacgtggacgtggtggacctaatggtgttgtaggaggtggaagaggaggtggacctgttcgtagaggtcctcttgctgttaatactcggccatcatcatccttctccataaacaagcttgcccgcaggaagaggagcttgccatggcagaatcagaatgatttgtatgaagaaacccttagagctgttggggtatcaggagtggaagtcggaaccacagtttatattaccaaccttgatcagggagtgacaaatgaagatataagggaactctatgctgaaattggagagctgaaaagatatgcaattcactatgacaaaaatgggcgtccaagtggatcggctgaagttgtgtatatgagaagaagtgatgcaattcaagctatgaggaaatacaataatgtacttttggatggaaggcctatgaaactggagattctgggtggaaatactgaatctgctcctgtcgcagctcgtgttaatgtgactggattgaatggaaggatgaagaggagtgtcttcattggacaaggagttagaggtgggagagtaggaagaggaagaggttcaggtccttctgggagacgccttccactccaacaaaaccaacaaggtggtgtgacagctggtcgaggcgggttccgtggtagaggccggggtaatggtggtggcagagggaataaaagcggtgggcgaggtggaaagaagccagtggagaagtctgctgcggatctcgacaaagatctcgaaagctatcatgctgaagctatgaacatctcttaaacagaagcaagacttcgcatcttgtcatgtacttttgtgttctttattcttagtctctgactaaatatgtggcaaagtctggtttggtttaattacgtttaggatggctctactctgcttttattttcctcttttcttgtttcacactttcacagtcacttttggttattgaagttaaaagagatttagctgtaaatgagaaagctgttcttgtt

SEQ ID NO: 40675 - protein, 295 aa, Arabidopsis thaliana
  peptide (1)..(295): Ceres Seq. ID no. 13497267
  misc_feature (109)..(179): Pfam Name: RNA recognition motif. (a.k.a. RRM, RBD, or RNP domain) Pfam Description: RNA recognition motif. (a.k.a. RRM, RBD, or RNP
  misc_feature (1)..(255): Homolog of NCBI NO: 40644804 NR Description: putative DIP2 protein [Triticum aestivum]
  misc_feature (1)..(295): Homolog of NCBI NO: 11358209 NR Description: hypothetical protein T22P11.120 - Arabidopsis
  misc_feature (1)..(295): Homolog of NCBI NO: 30679669 NR Description: RNA and export factor binding protein, putative
  misc_feature (24)..(292): Homolog of NCBI NO: 38175495 NR Description: putative transcriptional coactivator(DIP2)
  misc_feature (69)..(295): Homolog of NCBI NO: 9757981 NR Description: gene_id:K12B20.19~unknown protein [Arabidopsis
  misc_feature (1)..(295): Homolog of NCBI NO: 9663025 NR Description: DIP2 protein [Arabidopsis thaliana]
  misc_feature (1)..(295): Homolog of NCBI NO: 30693141 NR Description: RNA and export factor binding protein, putative
  misc_feature (1)..(295): Homolog of NCBI NO: 25404603 NR Description: hypothetical protein T6J19.1 [imported] -
  misc_feature (1)..(295): Homolog of NCBI NO: 9663023 NR Description: DIP1 protein [Arabidopsis thaliana]
  misc_feature (1)..(295): Homolog of NCBI NO: 18408471 NR Description: RNA and export factor binding protein, putative
MSDALNMTLDEIVKKSKSERSAAARSGGKGVSRKSGRGRGGPNGVVGGGRGGGPVRRGPLAVNTRPSSSFSINKLARRKRSLPWQNQNDLYEETLRAVGVSGVEVGTTVYITNLDQGVTNEDIRELYAEIGELKRYAIHYDKNGRPSGSAEVVYMRRSDAIQAMRKYNNVLLDGRPMKLEILGGNTESAPVAARVNVTGLNGRMKRSVFIGQGVRGGRVGRGRGSGPSGRRLPLQQNQQGGVTAGRGGFRGRGRGNGGGRGNKSGGRGGKKPVEKSAADLDKDLESYHAEAMNIS

SEQ ID NO: 40676 - protein, 289 aa, Arabidopsis thaliana
  peptide (1)..(289): Ceres Seq. ID no. 13497268
  misc_feature (103)..(173): Pfam Name: RNA recognition motif. (a.k.a. RRM, RBD, or RNP domain) Pfam Description: RNA recognition motif. (a.k.a. RRM, RBD, or RNP
  misc_feature (1)..(249): Homolog of NCBI NO: 40644804 NR Description: putative DIP2 protein [Triticum aestivum]
  misc_feature (1)..(289): Homolog of NCBI NO: 11358209 NR Description: hypothetical protein T22P11.120 - Arabidopsis
  misc_feature (1)..(289): Homolog of NCBI NO: 30679669 NR Description: RNA and export factor binding protein, putative
  misc_feature (18)..(286): Homolog of NCBI NO: 38175495 NR Description: putative transcriptional coactivator(DIP2)
  misc_feature (63)..(289): Homolog of NCBI NO: 9757981 NR Description: gene_id:K12B20.19~unknown protein [Arabidopsis
  misc_feature (1)..(289): Homolog of NCBI NO: 9663025 NR Description: DIP2 protein [Arabidopsis thaliana]
  misc_feature (1)..(289): Homolog of NCBI NO: 30693141 NR Description: RNA and export factor binding protein, putative
  misc_feature (1)..(289): Homolog of NCBI NO: 25404603 NR Description: hypothetical protein T6J19.1 [imported] -
  misc_feature (1)..(289): Homolog of NCBI NO: 9663023 NR Description: DIP1 protein [Arabidopsis thaliana]
  misc_feature (1)..(289): Homolog of NCBI NO: 18408471 NR Description: RNA and export factor binding protein, putative
MTLDEIVKKSKSERSAAARSGGKGVSRKSGRGRGGPNGVVGGGRGGGPVRRGPLAVNTRPSSSFSINKLARRKRSLPWQNQNDLYEETLRAVGVSGVEVGTTVYITNLDQGVTNEDIRELYAEIGELKRYAIHYDKNGRPSGSAEVVYMRRSDAIQAMRKYNNVLLDGRPMKLEILGGNTESAPVAARVNVTGLNGRMKRSVFIGQGVRGGRVGRGRGSGPSGRRLPLQQNQQGGVTAGRGGFRGRGRGNGGGRGNKSGGRGGKKPVEKSAADLDKDLESYHAEAMNIS

SEQ ID NO: 40677 - DNA, 1248 bp, Arabidopsis thaliana
  misc_feature (1)..(1248): Ceres Seq. ID no. 12395497
  misc_feature: MA Experiment ID: 108461 Result: Up-regulated in Transcription
  misc_feature: MA Experiment 108461 PARAMETER Experiment Name: At_Germinating_Seeds_cDNA_P Parameter: Age (day) Value: 1 vs. 0
  misc_feature: MA Experiment 108461 PARAMETER Experiment Name: At_Germinating_Seeds_cDNA_P Parameter: Tissue Value: Germinating Seeds
  misc_feature: MA Experiment ID: 108462 Result: Up-regulated in Transcription
  misc_feature: MA Experiment 108462 PARAMETER Experiment Name: At_Germinating_Seeds_cDNA_P Parameter: Age (day) Value: 2 vs. 0
  misc_feature: MA Experiment 108462 PARAMETER Experiment Name: At_Germinating_Seeds_cDNA_P Parameter: Tissue Value: Germinating Seeds
  misc_feature: MA Experiment ID: 108569 Result: Up-regulated in Transcription
  misc_feature: MA Experiment 108569 PARAMETER Experiment Name: At_0.001%_MeJA__cDNA_P Parameter: Timepoint (hr) Value: 6
  misc_feature: MA Experiment 108569 PARAMETER Experiment Name: At_0.001%_MeJA__cDNA_P Parameter: Tissue Value: Aerial
  misc_feature: MA Experiment 108569 PARAMETER Experiment Name: At_0.001%_MeJA__cDNA_P Parameter: Treatment Value: 0.001% MeJA vs. No Treatment
  misc_feature: MA Experiment ID: 108577 Result: Down-regulated in Transcription
  misc_feature: MA Experiment 108577 PARAMETER Experiment Name: At_42deg_Heat_cDNA_P Parameter: Temperature (deg C) Value: 42 vs. 22
  misc_feature: MA Experiment 108577 PARAMETER Experiment Name: At_42deg_Heat_cDNA_P Parameter: Timepoint (hr) Value: 6
  misc_feature: MA Experiment 108577 PARAMETER Experiment Name: At_42deg_Heat_cDNA_P Parameter: Tissue Value: Aerial
  misc_feature: MA Experiment ID: 108595 Result: Up-regulated in Transcription
  misc_feature: MA Experiment 108595 PARAMETER Experiment Name: At_Ler-pi_Ovule_cDNA_P Parameter: Plant Line Value: null
  misc_feature: MA Experiment ID: 20000111 Result: Down-regulated in Transcription
  misc_feature: MA Experiment 20000111 PARAMETER Experiment Name: At_42deg_Heat_cDNA_P Parameter: Temperature (deg C) Value: 42 vs. 22
  misc_feature: MA Experiment 20000111 PARAMETER Experiment Name: At_42deg_Heat_cDNA_P Parameter: Timepoint (hr) Value: 6
  misc_feature: MA Experiment 20000111 PARAMETER Experiment Name: At_42deg_Heat_cDNA_P Parameter: Tissue Value: Aerial
  misc_feature: MA Experiment ID: 20000113 Result: Down-regulated in Transcription
  misc_feature: MA Experiment 20000113 PARAMETER Experiment Name: At_42deg_Heat_cDNA_P Parameter: Temperature (deg C) Value: 42 vs. 22
  misc_feature: MA Experiment 20000113 PARAMETER Experiment Name: At_42deg_Heat_cDNA_P Parameter: Timepoint (hr) Value: 8
  misc_feature: MA Experiment 20000113 PARAMETER Experiment Name: At_42deg_Heat_cDNA_P Parameter: Tissue Value: Aerial
  misc_feature: MA Experiment ID: 20000180 Result: Up-regulated in Transcription
  misc_feature: MA Experiment 20000180 PARAMETER Experiment Name: At_Germinating_Seeds_P Parameter: Age (hr) Value: 24 vs. 0
  misc_feature: MA Experiment 20000180 PARAMETER Experiment Name: At_Germinating_Seeds_P Parameter: Tissue Value: Germinating Seeds
  misc_feature: MA Experiment ID: 20000234 Result: Up-regulated in Transcription
  misc_feature: MA Experiment 20000234 PARAMETER Experiment Name: At_Siliques_P Parameter: Age (day) Value: 21
  misc_feature: MA Experiment 20000234 PARAMETER Experiment Name: At_Siliques_P Parameter: Organism Value: A. thaliana
  misc_feature: MA Experiment 20000234 PARAMETER Experiment Name: At_Siliques_P Parameter: Plant Line Value: WS
  misc_feature: MA Experiment 20000234 PARAMETER Experiment Name: At_Siliques_P Parameter: Tissue Value: Less Than 5mm Siliques vs. Whole Plant
  misc_feature: MA Experiment ID: 20000264 Result: Up-regulated in Transcription
  misc_feature: MA Experiment 20000264 PARAMETER Experiment Name: At_Open_Flower_P Parameter: Age (day) Value: 21
  misc_feature: MA Experiment 20000264 PARAMETER Experiment Name: At_Open_Flower_P Parameter: Plant Line Value: WS
  misc_feature: MA Experiment 20000264 PARAMETER Experiment Name: At_Open_Flower_P Parameter: Tissue Value: Open Flower vs. Whole Plant
  misc_feature: MA Experiment ID: 20000265 Result: Up-regulated in Transcription
  misc_feature: MA Experiment 20000265 PARAMETER Experiment Name: At_Open_Flower_P Parameter: Age (day) Value: 21
  misc_feature: MA Experiment 20000265 PARAMETER Experiment Name: At_Open_Flower_P Parameter: Plant Line Value: WS
  misc_feature: MA Experiment 20000265 PARAMETER Experiment Name: At_Open_Flower_P Parameter: Tissue Value: Closed Flower vs. Whole Plant
  misc_feature: MA Experiment ID: 20001557 Result: Down-regulated in Transcription
  misc_feature: MA Experiment 20001557 PARAMETER Experiment Name: At_Drought_Soil_Dry_P Parameter: Age (day) Value: 27
  misc_feature: MA Experiment 20001557 PARAMETER Experiment Name: At_Drought_Soil_Dry_P Parameter: Organism Value: A. thaliana
  misc_feature: MA Experiment 20001557 PARAMETER Experiment Name: At_Drought_Soil_Dry_P Parameter: Plant Line Value: WS
  misc_feature: MA Experiment 20001557 PARAMETER Experiment Name: At_Drought_Soil_Dry_P Parameter: Post Timepoint (hr) Value: 3
  misc_feature: MA Experiment 20001557 PARAMETER Experiment Name: At_Drought_Soil_Dry_P Parameter: Post-Treatment Value: Re-Water vs. No Drought
  misc_feature: MA Experiment 20001557 PARAMETER Experiment Name: At_Drought_Soil_Dry_P Parameter: Timepoint (day) Value: 13
  misc_feature: MA Experiment 20001557 PARAMETER Experiment Name: At_Drought_Soil_Dry_P Parameter: Treatment Value: Drought vs. No Drought
  misc_feature: MA Experiment ID: 20001558 Result: Down-regulated in Transcription
  misc_feature: MA Experiment 20001558 PARAMETER Experiment Name: At_Drought_Soil_Dry_P Parameter: Age (day) Value: 27
  misc_feature: MA Experiment 20001558 PARAMETER Experiment Name: At_Drought_Soil_Dry_P Parameter: Organism Value: A. thaliana
  misc_feature: MA Experiment 20001558 PARAMETER Experiment Name: At_Drought_Soil_Dry_P Parameter: Plant Line Value: WS
  misc_feature: MA Experiment 20001558 PARAMETER Experiment Name: At_Drought_Soil_Dry_P Parameter: Post Timepoint (hr) Value: 6
  misc_feature: MA Experiment 20001558 PARAMETER Experiment Name: At_Drought_Soil_Dry_P Parameter: Post-Treatment Value: Re-Water vs. No Drought
  misc_feature: MA Experiment 20001558 PARAMETER Experiment Name: At_Drought_Soil_Dry_P Parameter: Timepoint (day) Value: 13
  misc_feature: MA Experiment 20001558 PARAMETER Experiment Name: At_Drought_Soil_Dry_P Parameter: Treatment Value: Drought vs. No Drought
atcacgatcaaaaatgccatagtacataaagtatccattaaaacgtagatctagtctcttcacaacacttcaactaataacgcaaaaatcagtttctctttgagtaagtgtttactacaattaaactaactcaggcaagtctatgatcatggcttcttctgctgctgcatcgatctctatgataactctaaggaacctctctcgcaatcatcaatctcaccaaagcactcttctcggtttctctagatccttccataaccaaaggatctcatctaacagtccaggtctctccacacgagcaagatccaccacttcctccactggaggtttcttcagaaccatttgcagcagcagcagcaacgacaactccagaccaagtaagtaaaaactaaaaagttaacctttatgctcacaactaagtacccatttcatgatttgagaaaattagcatcaaattaggtataagaattaagaacaaaaaaagaatcaacctttaagttcaaaatcaagtacccatttcacaaaaactgatttttaacttgataaaaatctcagctaagatccaagagcttaacgtctacgagttcaacgaaggtgatcgaaacagtccagcggttttaaaactagggaaaaaaccagatcagctttgtctcggagatcttgtccccttcacaaacaaactctacacaggagatctcacaaaacgcataggaatcaccgcaggtctctgcgttttgatccaacacgttccagagaagaaaggtgatcgctttgaagcttcttacagtttctacttcggagattacggtcacatatcagttcaaggaccttatctcacttacgaggatacgtttcttgctatcaccggtggctccggcgtgtttgaaggagcttacggacaggtcaagcttcgtcagcttgtgtatcctacgaagctgttttacactttttacttgaaaggtgttgctgctgatttaccggtggagcttaccgggaaacatgttgagccgtcgaaggaagtgaaaccggcggctgaagctcaggcgactcagcccggcgctacgatcgctaactttactaattgaaatctaaatctttgtgggtgtctttgtcatggatcttattgggctgttgttcattgtgtttacattttaataatgggcctaaataatgagcctttgtattgggccgttctcgtaagcctaatgtgtcccgtccctataagctggatttaagcgcgtgaactcc

SEQ ID NO: 40678 - protein, 80 aa, Arabidopsis thaliana
  peptide (1)..(80): Ceres Seq. ID no. 12395498
  misc_feature (10)..(80): Homolog of NCBI NO: 15320414 NR Description: ERD12 protein [Arabidopsis thaliana]
  misc_feature (3)..(80): Homolog of NCBI NO: 15230874 NR Description: hypothetical protein; protein id: At3g25760.1
  misc_feature (3)..(80): Homolog of NCBI NO: 18404656 NR Description: expressed protein
  misc_feature (3)..(80): Homolog of NCBI NO: 18404658 NR Description: expressed protein
  misc_feature (1)..(80): Homolog of NCBI NO: 15222241 NR Description: allene oxide cyclase, putative
MIMASSAAASISMITLRNLSRNHQSHQSTLLGFSRSFHNQRISSNSPGLSTRARSTTSSTGGFFRTICSSSSNDNSRPSK

SEQ ID NO: 40679 - protein, 78 aa, Arabidopsis thaliana
  peptide (1)..(78): Ceres Seq. ID no. 12395499
  misc_feature (8)..(78): Homolog of NCBI NO: 15320414 NR Description: ERD12 protein [Arabidopsis thaliana]
  misc_feature (1)..(78): Homolog of NCBI NO: 15230874 NR Description: hypothetical protein; protein id: At3g25760.1
  misc_feature (1)..(78): Homolog of NCBI NO: 18404656 NR Description: expressed protein
  misc_feature (1)..(78): Homolog of NCBI NO: 18404658 NR Description: expressed protein
  misc_feature (1)..(78): Homolog of NCBI NO: 15222241 NR Description: allene oxide cyclase, putative
MASSAAASISMITLRNLSRNHQSHQSTLLGFSRSFHNQRISSNSPGLSTRARSTTSSTGGFFRTICSSSSNDNSRPSK

SEQ ID NO: 40680 - protein, 68 aa, Arabidopsis thaliana
  peptide (1)..(68): Ceres Seq. ID no. 12395500
  misc_feature (1)..(68): Homolog of NCBI NO: 15320414 NR Description: ERD12 protein [Arabidopsis thaliana]
  misc_feature (1)..(68): Homolog of NCBI NO: 15230874 NR Description: hypothetical protein; protein id: At3g25760.1
  misc_feature (1)..(68): Homolog of NCBI NO: 18404656 NR Description: expressed protein
  misc_feature (1)..(68): Homolog of NCBI NO: 18404658 NR Description: expressed protein
  misc_feature (1)..(68): Homolog of NCBI NO: 15222241 NR Description: allene oxide cyclase, putative
MITLRNLSRNHQSHQSTLLGFSRSFHNQRISSNSPGLSTRARSTTSSTGGFFRTICSSSSNDNSRPSK

SEQ ID NO: 40681 - DNA, 2073 bp, Arabidopsis thaliana
  misc_feature (1)..(2073): Ceres Seq. ID no. 13488774
  misc_feature: MA Experiment ID: 108433 Result: Down-regulated in Transcription
  misc_feature: MA Experiment 108433 PARAMETER Experiment Name: At_rhl_Mutant2_cDNA_P Parameter: Age (day) Value: 7
  misc_feature: MA Experiment 108433 PARAMETER Experiment Name: At_rhl_Mutant2_cDNA_P Parameter: Organism Value: A. thaliana
  misc_feature: MA Experiment 108433 PARAMETER Experiment Name: At_rhl_Mutant2_cDNA_P Parameter: Plant Line Value: rhl Mutant vs. wt landsburg
  misc_feature: MA Experiment 108433 PARAMETER Experiment Name: At_rhl_Mutant2_cDNA_P Parameter: Tissue Value: Roots
  misc_feature: MA Experiment ID: 108434 Result: Up-regulated in Transcription
  misc_feature: MA Experiment 108434 PARAMETER Experiment Name: At_Root_Tips_cDNA_P Parameter: Tissue Value: Root Tips
  misc_feature: MA Experiment ID: 108461 Result: Up-regulated in Transcription
  misc_feature: MA Experiment 108461 PARAMETER Experiment Name: At_Germinating_Seeds_cDNA_P Parameter: Age (day) Value: 1 vs. 0
  misc_feature: MA Experiment 108461 PARAMETER Experiment Name: At_Germinating_Seeds_cDNA_P Parameter: Tissue Value: Germinating Seeds
  misc_feature: MA Experiment ID: 108561 Result: Down-regulated in Transcription
  misc_feature: MA Experiment 108561 PARAMETER Experiment Name: At_100uM_ABA_cDNA_P Parameter: Timepoint (hr) Value: 6
  misc_feature: MA Experiment 108561 PARAMETER Experiment Name: At_100uM_ABA_cDNA_P Parameter: Tissue Value: Aerial
  misc_feature: MA Experiment 108561 PARAMETER Experiment Name: At_100uM_ABA_cDNA_P Parameter: Treatment Value: 100uM ABA vs. No Treatment
  misc_feature: MA Experiment ID: 108573 Result: Down-regulated in Transcription
  misc_feature: MA Experiment 108573 PARAMETER Experiment Name: At_Drought_cDNA_P Parameter: Timepoint (hr) Value: 6
  misc_feature: MA Experiment 108573 PARAMETER Experiment Name: At_Drought_cDNA_P Parameter: Tissue Value: Aerial
  misc_feature: MA Experiment 108573 PARAMETER Experiment Name: At_Drought_cDNA_P Parameter: Treatment Value: Drought vs. No Drought
  misc_feature: MA Experiment ID: 108577 Result: Down-regulated in Transcription
  misc_feature: MA Experiment 108577 PARAMETER Experiment Name: At_42deg_Heat_cDNA_P Parameter: Temperature (deg C) Value: 42 vs. 22
  misc_feature: MA Experiment 108577 PARAMETER Experiment Name: At_42deg_Heat_cDNA_P Parameter: Timepoint (hr) Value: 6
  misc_feature: MA Experiment 108577 PARAMETER Experiment Name: At_42deg_Heat_cDNA_P Parameter: Tissue Value: Aerial
  misc_feature: MA Experiment ID: 108579 Result: Up-regulated in Transcription
  misc_feature: MA Experiment 108579 PARAMETER Experiment Name: At_4deg_Cold_cDNA_P Parameter: Temperature (deg C) Value: 4 vs. 22
  misc_feature: MA Experiment 108579 PARAMETER Experiment Name: At_4deg_Cold_cDNA_P Parameter: Timepoint (hr) Value: 6
  misc_feature: MA Experiment 108579 PARAMETER Experiment Name: At_4deg_Cold_cDNA_P Parameter: Tissue Value: Aerial
  misc_feature: MA Experiment ID: 108585 Result: Down-regulated in Transcription
  misc_feature: MA Experiment 108585 PARAMETER Experiment Name: At_5mM_NaNP_cDNA_P Parameter: Timepoint (hr) Value: 6
  misc_feature: MA Experiment 108585 PARAMETER Experiment Name: At_5mM_NaNP_cDNA_P Parameter: Tissue Value: Aerial
  misc_feature: MA Experiment 108585 PARAMETER Experiment Name: At_5mM_NaNP_cDNA_P Parameter: Treatment Value: null
  misc_feature: MA Experiment ID: 20000113 Result: Down-regulated in Transcription
  misc_feature: MA Experiment 20000113 PARAMETER Experiment Name: At_42deg_Heat_cDNA_P Parameter: Temperature (deg C) Value: 42 vs. 22
  misc_feature: MA Experiment 20000113 PARAMETER Experiment Name: At_42deg_Heat_cDNA_P Parameter: Timepoint (hr) Value: 8
  misc_feature: MA Experiment 20000113 PARAMETER Experiment Name: At_42deg_Heat_cDNA_P Parameter: Tissue Value: Aerial
  misc_feature: MA Experiment ID: 20000224 Result: Up-regulated in Transcription
  misc_feature: MA Experiment ID: 20000306 Result: Up-regulated in Transcription
  misc_feature: MA Experiment 20000306 PARAMETER Experiment Name: At_Germinating_Seeds_Sub_P Parameter: Age (hr) Value: 6 vs. 0
  misc_feature: MA Experiment 20000306 PARAMETER Experiment Name: At_Germinating_Seeds_Sub_P Parameter: Organism Value: A. thaliana
  misc_feature: MA Experiment 20000306 PARAMETER Experiment Name: At_Germinating_Seeds_Sub_P Parameter: Plant Line Value: WS
  misc_feature: MA Experiment 20000306 PARAMETER Experiment Name: At_Germinating_Seeds_Sub_P Parameter: Tissue Value: Germinating Seeds
  misc_feature: MA Experiment ID: 20000307 Result: Up-regulated in Transcription
  misc_feature: MA Experiment 20000307 PARAMETER Experiment Name: At_Germinating_Seeds_Sub_P Parameter: Age (hr) Value: 24 vs. 0
  misc_feature: MA Experiment 20000307 PARAMETER Experiment Name: At_Germinating_Seeds_Sub_P Parameter: Organism Value: A. thaliana
  misc_feature: MA Experiment 20000307 PARAMETER Experiment Name: At_Germinating_Seeds_Sub_P Parameter: Plant Line Value: WS
  misc_feature: MA Experiment 20000307 PARAMETER Experiment Name: At_Germinating_Seeds_Sub_P Parameter: Tissue Value: Germinating Seeds
  misc_feature: MA Experiment ID: 20000314 Result: Up-regulated in Transcription
  misc_feature: MA Experiment 20000314 PARAMETER Experiment Name: At_14day_Shoots-Roots_Sub_P Parameter: Age (day) Value: 14
  misc_feature: MA Experiment 20000314 PARAMETER Experiment Name: At_14day_Shoots-Roots_Sub_P Parameter: Organism Value: A. thaliana
  misc_feature: MA Experiment 20000314 PARAMETER Experiment Name: At_14day_Shoots-Roots_Sub_P Parameter: Plant Line Value: WS
  misc_feature: MA Experiment 20000314 PARAMETER Experiment Name: At_14day_Shoots-Roots_Sub_P Parameter: Tissue Value: Roots vs. Whole Plant
  misc_feature: MA Experiment ID: 20000328 Result: Down-regulated in Transcription
  misc_feature: MA Experiment 20000328 PARAMETER Experiment Name: At_42deg_Heat_Sub_P Parameter: Age (day) Value: 14
  misc_feature: MA Experiment 20000328 PARAMETER Experiment Name: At_42deg_Heat_Sub_P Parameter: Organism Value: A. thaliana
  misc_feature: MA Experiment 20000328 PARAMETER Experiment Name: At_42deg_Heat_Sub_P Parameter: Plant Line Value: WS
  misc_feature: MA Experiment 20000328 PARAMETER Experiment Name: At_42deg_Heat_Sub_P Parameter: Temperature (deg C) Value: 42 vs. 22
  misc_feature: MA Experiment 20000328 PARAMETER Experiment Name: At_42deg_Heat_Sub_P Parameter: Timepoint (hr) Value: 6
  misc_feature: MA Experiment 20000328 PARAMETER Experiment Name: At_42deg_Heat_Sub_P Parameter: Tissue Value: Aerial
  misc_feature: MA Experiment ID: 20000355 Result: Up-regulated in Transcription
  misc_feature: MA Experiment 20000355 PARAMETER Experiment Name: At_Siliques_Sub_P Parameter: Age (day) Value: 21
  misc_feature: MA Experiment 20000355 PARAMETER Experiment Name: At_Siliques_Sub_P Parameter: Organism Value: A. thaliana
  misc_feature: MA Experiment 20000355 PARAMETER Experiment Name: At_Siliques_Sub_P Parameter: Plant Line Value: WS
  misc_feature: MA Experiment 20000355 PARAMETER Experiment Name: At_Siliques_Sub_P Parameter: Tissue Value: Less Than 5mm Siliques vs. Whole Plant
  misc_feature: MA Experiment ID: 20000440 Result: Up-regulated in Transcription
  misc_feature: MA Experiment 20000440 PARAMETER Experiment Name: At_Closed-Flower__Sub_P Parameter: Tissue Value: Closed Flower vs. Whole Plant
actatctcacggcttttagttttcaccattctgattaaagagaaaccaaacgtttcatttttcaatatctagagagaaagatgcagacttcggtgaccccagatgccatctccaccgttttgtcaaacccatcctttgattcgtcttccgatcgatctgagatcgttgttcaagttgtggatcttaaacctatcggcaatcgctatacatttagtgcaaatgacggaaagacgaaagtcaaagcaatgtttactgcttcactcacacctgaaatcatttctgggaagatccagaacttgggtctaattcgtctcattgatttcactgttaacgacatttcaagcaaatctacaaaatatttccttgtgactaaatgtgaggctgttggttctgtgcttgattctgagattaacttggacagtaagagcggagaggaggaggctcgtgagcccaagaagcagaaactagagcattctcctgtcagtcctctgaatgatgttgtttctactggtatcacattgaaaccgaagcaggaatttgtagccaaatcagcttctcagataatgagtgaacaaaggggaaatgctgcaccagctgcaagaatggccatgactagaagggttcatccacttgtgtcattaaatccatatcaaggaaactggaccatcaaagtccgagttacaaacaagggagtgatgagaaattacaaaaacgctaggggtgaaggatgtgtcttcaatgttgaactaacagatgaagaaggaacacaaattcaagcaacgatgtttaatgatgctgcaaggaagttttttgacagattccagttgggaaaggtttattatatatcaagggggtcactaaaactcgctaacaagcagttcaaaacagttcagaatgattatgagatgacactgaatgaaaattcagaggttgaggaagctagtagcgaagaaatgttcatccctgagacaaaattcaacttcgtacccattgaagagttgggtctgtatgttaatcagaaggaacttattgatcttattggagttgttcaaagtgtatctcctaccatgagtattagaaggagaactgacaatgagatgattcctaagagggatataactttggctgatgagtcaaggaaaactgttgtggtgtccctgtggaatgatcttgcaactggcataggtcaggagctactagacatggctgatcagtcacctgtgattgcaatcaagtctctcaaagttggagattttcaaggtgtttcgttgtctaccatcagcagaagcaatgtggttattaacccggaatcaccagaagctaaaaagttgaaatcttggtttgattctgaaggcaaggaaatatccatgtcttctattggctcagggatgagcccttctgccaaaaatggatctcggtctttgtatactgaccgagtgcttctctctcacatcacaagcaatccatctttattcgaagaaaagcctgtatttttcagcactagggcttacataagcttcatcaaaccagaccaaacaatgtggtaccaagcttgtaagacttgtaacaagaaagtgacagaagcacttgactctggttactggtgtgaaggatgccagagaaagtatgaagaatgcagcttaaggtacataatggcggtgaaagtcaccgactcatctggagaaacttggatttcgtcattcaacgatgaagcagagaagattcttggatgttcagctgatgagctcaacaaactaaaatcagaggaaggtgaagtaaatgaatatcagacaaaactgaaagaggcaacatggtcatctcatgtcttccgggttagtgtcacacagaatgagtataacggtgagaagagacagagggtaactgtaaaaggagtagctcctcttgattttgctgctgaaacaagattgttgcttcaagacatctccaacaagaacaaaacatctcagtagtagcttttacttcttttttttctctattggcctaaaaaagtctcaaaacttttccttgtataatataagcctttctgcaatttataaaattagggttttgctt

SEQ ID NO: 40682 - protein, 629 aa, Arabidopsis thaliana
  peptide (1)..(629): Ceres Seq. ID no. 13488775
  misc_feature (4)..(104): Pfam Name: Replication factor-A protein 1, N-terminal domain Pfam Description: Replication factor-A protein 1, N-terminal
  misc_feature (180)..(625): Homolog of NCBI NO: 13536993 NR Description: replication protein A 70kDa
  misc_feature (20)..(623): Homolog of NCBI NO: 19111884 NR Description: replication factor-a protein 1
  misc_feature (9)..(621): Homolog of NCBI NO: 400975 NR Description: REPLICATION PROTEIN A 70 KD DNA-BINDING SUBUNIT (RF-A) (REPLICATION FACTOR-A PROTEIN 1) (SINGLE-STRANDED
  misc_feature (29)..(625): Homolog of NCBI NO: 34872759 NR Description: similar to replication protein A1 [Rattus
  misc_feature (29)..(625): Homolog of NCBI NO: 18390321 NR Description: replication protein A1
  misc_feature (29)..(621): Homolog of NCBI NO: 4506583 NR Description: replication protein A1, 70kDa; replication
  misc_feature (1)..(618): Homolog of NCBI NO: 15225129 NR Description: replication protein, putative [Arabidopsis
  misc_feature (4)..(622): Homolog of NCBI NO: 31580977 NR Description: replication protein A 70b [Oryza sativa (japonica
  misc_feature (4)..(622): Homolog of NCBI NO: 7440032 NR Description: probable replication protein A1 - rice
  misc_feature (54)..(629): Homolog of NCBI NO: 15241489 NR Description: replication protein, putative [Arabidopsis
MQTSVTPDAISTVLSNPSFDSSSDRSEIVVQVVDLKPIGNRYTFSANDGKTKVKAMFTASLTPEIISGKIQNLGLIRLIDFTVNDISSKSTKYFLVTKCEAVGSVLDSEINLDSKSGEEEAREPKKQKLEHSPVSPLNDVVSTGITLKPKQEFVAKSASQIMSEQRGNAAPAARMAMTRRVHPLVSLNPYQGNWTIKVRVTNKGVMRNYKNARGEGCVFNVELTDEEGTQIQATMFNDAARKFFDRFQLGKVYYISRGSLKLANKQFKTVQNDYEMTLNENSEVEEASSEEMFIPETKFNFVPIEELGLYVNQKELIDLIGVVQSVSPTMSIRRRTDNEMIPKRDITLADESRKTVVVSLWNDLATGIGQELLDMADQSPVIAIKSLKVGDFQGVSLSTISRSNVVINPESPEAKKLKSWFDSEGKEISMSSIGSGMSPSAKNGSRSLYTDRVLLSHITSNPSLFEEKPVFFSTRAYISFIKPDQTMWYQACKTCNKKVTEALDSGYWCEGCQRKYEECSLRYIMAVKVTDSSGETWISSFNDEAEKILGCSADELNKLKSEEGEVNEYQTKLKEATWSSHVFRVSVTQNEYNGEKRQRVTVKGVAPLDFAAETRLLLQDISNKNKTSQ

SEQ ID NO: 40683 - protein, 574 aa, Arabidopsis thaliana
  peptide (1)..(574): Ceres Seq. ID no. 13488776
  misc_feature (139)..(223): Pfam Name: OB-fold nucleic acid binding domain Pfam Description: OB-fold nucleic acid binding domain
  misc_feature (125)..(570): Homolog of NCBI NO: 13536993 NR Description: replication protein A 70kDa
  misc_feature (1)..(568): Homolog of NCBI NO: 19111884 NR Description: replication factor-a protein 1
  misc_feature (1)..(566): Homolog of NCBI NO: 400975 NR Description: REPLICATION PROTEIN A 70 KD DNA-BINDING SUBUNIT (RF-A) (REPLICATION FACTOR-A PROTEIN 1) (SINGLE-STRANDED
  misc_feature (1)..(570): Homolog of NCBI NO: 34872759 NR Description: similar to replication protein A1 [Rattus
  misc_feature (1)..(570): Homolog of NCBI NO: 18390321 NR Description: replication protein A1
  misc_feature (1)..(566): Homolog of NCBI NO: 4506583 NR Description: replication protein A1, 70kDa; replication
  misc_feature (1)..(563): Homolog of NCBI NO: 15225129 NR Description: replication protein, putative [Arabidopsis
  misc_feature (1)..(567): Homolog of NCBI NO: 31580977 NR Description: replication protein A 70b [Oryza sativa (japonica
  misc_feature (1)..(567): Homolog of NCBI NO: 7440032 NR Description: probable replication protein A1 - rice
  misc_feature (1)..(574): Homolog of NCBI NO: 15241489 NR Description: replication protein, putative [Arabidopsis
MFTASLTPEIISGKIQNLGLIRLIDFTVNDISSKSTKYFLVTKCEAVGSVLDSEINLDSKSGEEEAREPKKQKLEHSPVSPLNDVVSTGITLKPKQEFVAKSASQIMSEQRGNAAPAARMAMTRRVHPLVSLNPYQGNWTIKVRVTNKGVMRNYKNARGEGCVFNVELTDEEGTQIQATMFNDAARKFFDRFQLGKVYYISRGSLKLANKQFKTVQNDYEMTLNENSEVEEASSEEMFIPETKFNFVPIEELGLYVNQKELIDLIGVVQSVSPTMSIRRRTDNEMIPKRDITLADESRKTVVVSLWNDLATGIGQELLDMADQSPVIAIKSLKVGDFQGVSLSTISRSNVVINPESPEAKKLKSWFDSEGKEISMSSIGSGMSPSAKNGSRSLYTDRVLLSHITSNPSLFEEKPVFFSTRAYISFIKPDQTMWYQACKTCNKKVTEALDSGYWCEGCQRKYEECSLRYIMAVKVTDSSGETWISSFNDEAEKILGCSADELNKLKSEEGEVNEYQTKLKEATWSSHVFRVSVTQNEYNGEKRQRVTVKGVAPLDFAAETRLLLQDISNKNKTSQ

SEQ ID NO: 40684 - protein, 468 aa, Arabidopsis thaliana
  peptide (1)..(468): Ceres Seq. ID no. 13488777
  misc_feature (33)..(117): Pfam Name: OB-fold nucleic acid binding domain Pfam Description: OB-fold nucleic acid binding domain
  misc_feature (19)..(464): Homolog of NCBI NO: 13536993 NR Description: replication protein A 70kDa
  misc_feature (1)..(462): Homolog of NCBI NO: 19111884 NR Description: replication factor-a protein 1
  misc_feature (1)..(460): Homolog of NCBI NO: 400975 NR Description: REPLICATION PROTEIN A 70 KD DNA-BINDING SUBUNIT (RF-A) (REPLICATION FACTOR-A PROTEIN 1) (SINGLE-STRANDED
  misc_feature (1)..(464): Homolog of NCBI NO: 34872759 NR Description: similar to replication protein A1 [Rattus
  misc_feature (1)..(464): Homolog of NCBI NO: 18390321 NR Description: replication protein A1
  misc_feature (1)..(460): Homolog of NCBI NO: 4506583 NR Description: replication protein A1, 70kDa; replication
  misc_feature (1)..(457): Homolog of NCBI NO: 15225129 NR Description: replication protein, putative [Arabidopsis
  misc_feature (1)..(461): Homolog of NCBI NO: 31580977 NR Description: replication protein A 70b [Oryza sativa (japonica
  misc_feature (1)..(461): Homolog of NCBI NO: 7440032 NR Description: probable replication protein A1 - rice
  misc_feature (1)..(468): Homolog of NCBI NO: 15241489 NR Description: replication protein, putative [Arabidopsis
MSEQRGNAAPAARMAMTRRVHPLVSLNPYQGNWTIKVRVTNKGVMRNYKNARGEGCVFNVELTDEEGTQIQATMFNDAARKFFDRFQLGKVYYISRGSLKLANKQFKTVQNDYEMTLNENSEVEEASSEEMFIPETKFNFVPIEELGLYVNQKELIDLIGVVQSVSPTMSIRRRTDNEMIPKRDITLADESRKTVVVSLWNDLATGIGQELLDMADQSPVIAIKSLKVGDFQGVSLSTISRSNVVINPESPEAKKLKSWFDSEGKEISMSSIGSGMSPSAKNGSRSLYTDRVLLSHITSNPSLFEEKPVFFSTRAYISFIKPDQTMWYQACKTCNKKVTEALDSGYWCEGCQRKYEECSLRYIMAVKVTDSSGETWISSFNDEAEKILGCSADELNKLKSEEGEVNEYQTKLKEATWSSHVFRVSVTQNEYNGEKRQRVTVKGVAPLDFAAETRLLLQDISNKNKTSQ

SEQ ID NO: 40685 - DNA, 1327 bp, Arabidopsis thaliana
  misc_feature (1)..(1327): Ceres Seq. ID no. 12388491
  misc_feature: MA Experiment ID: 20000093 Result: Up-regulated in Transcription
  misc_feature: MA Experiment 20000093 PARAMETER Experiment Name: At_42deg_Heat_cDNA_P Parameter: Temperature (deg C) Value: 42 vs. 22
  misc_feature: MA Experiment 20000093 PARAMETER Experiment Name: At_42deg_Heat_cDNA_P Parameter: Timepoint (hr) Value: 0.5
  misc_feature: MA Experiment 20000093 PARAMETER Experiment Name: At_42deg_Heat_cDNA_P Parameter: Tissue Value: Aerial
  misc_feature: MA Experiment ID: 20000171 Result: Down-regulated in Transcription
  misc_feature: MA Experiment 20000171 PARAMETER Experiment Name: At_42deg_Heat_P Parameter: Age (day) Value: 14
  misc_feature: MA Experiment 20000171 PARAMETER Experiment Name: At_42deg_Heat_P Parameter: Organism Value: A. thaliana
  misc_feature: MA Experiment 20000171 PARAMETER Experiment Name: At_42deg_Heat_P Parameter: Plant Line Value: WS
  misc_feature: MA Experiment 20000171 PARAMETER Experiment Name: At_42deg_Heat_P Parameter: Temperature (deg C) Value: 42 vs. 22
  misc_feature: MA Experiment 20000171 PARAMETER Experiment Name: At_42deg_Heat_P Parameter: Timepoint (hr) Value: 1
  misc_feature: MA Experiment 20000171 PARAMETER Experiment Name: At_42deg_Heat_P Parameter: Tissue Value: Aerial
  misc_feature: MA Experiment ID: 20000173 Result: Down-regulated in Transcription
  misc_feature: MA Experiment 20000173 PARAMETER Experiment Name: At_42deg_Heat_P Parameter: Age (day) Value: 14
  misc_feature: MA Experiment 20000173 PARAMETER Experiment Name: At_42deg_Heat_P Parameter: Organism Value: A. thaliana
  misc_feature: MA Experiment 20000173 PARAMETER Experiment Name: At_42deg_Heat_P Parameter: Plant Line Value: WS
  misc_feature: MA Experiment 20000173 PARAMETER Experiment Name: At_42deg_Heat_P Parameter: Temperature (deg C) Value: 42 vs. 22
  misc_feature: MA Experiment 20000173 PARAMETER Experiment Name: At_42deg_Heat_P Parameter: Timepoint (hr) Value: 6
  misc_feature: MA Experiment 20000173 PARAMETER Experiment Name: At_42deg_Heat_P Parameter: Tissue Value: Aerial
ctttccttatcgatttttctctccgcgaattgttcgttgttttcttctggcacctgattctcatcttctttcttgtggaatctgggttttgttgcggagttttcgaggttcctcattcgttgcttctgttgaaactctcttttttttttgggtggtttactttgtttttttgttgttgttgctttcaacctttaaatgccctaattttgaggttctagttgtggtttttaagattaggagcagaagccctttcgactaaagttcatgttagctgcaatttgctgaagtattcacagttttgttctgttggaagctctatgtgtttccttctgtgattgaaacacagagagaatgattttaccaaagcagtattgttgcacacactcgccgagctgccaatgcaccaaaggccatttaaacgaagacgtgttgttattagtgttccaacatttgaattggaatccgaaattagttgcaacactttcctgtgtatgcagatggtttgatgatttcgccaaacgggtactatggaaagagttttgcaagactcgtgccccaaaaatgatgcttgatttgcagtctagcggtagtcactgcattgacggtaactggcgagcccttgggaagcttctcatctactgctcaggatgtacacaaggtggtcttttcaatagctctgttcaaatcccaggccactttgtttatagaacccggttctcaagaacattaggaagaagcctccttccgcctcagtgtagaactgatgtactctatgtttgtgatccatgcgagcatcttgaccaaggagaagaaggcgacgtgggtttgttccgtgggattttcaagtcattcccaacatcgaaagttcggaaagtgatcattaacaaggcggttccttttcatccatccgaggtttgcccgtattgtaaagctaagctatggagcatgctacaagctaagataatacctcagagtgcctgcattcgtttggaagcttatgaagactgcattgagtattttgtttgccttaatggacatttgctgggtatctgcactctcgcgcctttgtctgattcagaggatgcaattccaagcgaagataacaatcacacagagaagaaacaagacaatggctttcctagagagaacgtattgaaaaggagaaattctttgttgggtggaagtgaaaatggacctccgccgcaaaaacgactgaccaatcctaatcagtgaaacatctgtaaatttgtgtactactgctaaatttattgtatctgcagagattcttcaacattcatatacagtcaaattatgatcaacaattttc

SEQ ID NO: 40686 - protein, 293 aa, Arabidopsis thaliana
  peptide (1)..(293): Ceres Seq. ID no. 12388492
  misc_feature (123)..(239): Homolog of NCBI NO: 21553661 NR Description: unknown [Arabidopsis thaliana]
  misc_feature (24)..(105): Homolog of NCBI NO: 15235367 NR Description: putative protein
  misc_feature (123)..(239): Homolog of NCBI NO: 15235367 NR Description: putative protein
  misc_feature (20)..(243): Homolog of NCBI NO: 34908976 NR Description: putative circadian clock coupling factor ZGT
  misc_feature (23)..(252): Homolog of NCBI NO: 18412596 NR Description: putative protein
  misc_feature (23)..(252): Homolog of NCBI NO: 11281127 NR Description: hypothetical protein T20O10.160 - Arabidopsis
  misc_feature (20)..(281): Homolog of NCBI NO: 14210079 NR Description: circadian clock coupling factor ZGT [Nicotiana
  misc_feature (1)..(249): Homolog of NCBI NO: 34393587 NR Description: unknown protein [Oryza sativa (japonica
  misc_feature (1)..(245): Homolog of NCBI NO: 15241717 NR Description: putative protein
  misc_feature (1)..(293): Homolog of NCBI NO: 15242296 NR Description: putative protein; protein id: At5g15440.1
MILPKQYCCTHSPSCQCTKGHLNEDVLLLVFQHLNWNPKLVATLSCVCRWFDDFAKRVLWKEFCKTRAPKMMLDLQSSGSHCIDGNWRALGKLLIYCSGCTQGGLFNSSVQIPGHFVYRTRFSRTLGRSLLPPQCRTDVLYVCDPCEHLDQGEEGDVGLFRGIFKSFPTSKVRKVIINKAVPFHPSEVCPYCKAKLWSMLQAKIIPQSACIRLEAYEDCIEYFVCLNGHLLGICTLAPLSDSEDAIPSEDNNHTEKKQDNGFPRENVLKRRNSLLGGSENGPPPQKRLTNPNQ

SEQ ID NO: 40687 - protein, 223 aa, Arabidopsis thaliana
  peptide (1)..(223): Ceres Seq. ID no. 12388493
  misc_feature (53)..(169): Homolog of NCBI NO: 21553661 NR Description: unknown [Arabidopsis thaliana]
  misc_feature (1)..(35): Homolog of NCBI NO: 15235367 NR Description: putative protein
  misc_feature (53)..(169): Homolog of NCBI NO: 15235367 NR Description: putative protein
  misc_feature (1)..(173): Homolog of NCBI NO: 34908976 NR Description: putative circadian clock coupling factor ZGT
  misc_feature (1)..(182): Homolog of NCBI NO: 18412596 NR Description: putative protein
  misc_feature (1)..(182): Homolog of NCBI NO: 11281127 NR Description: hypothetical protein T20O10.160 - Arabidopsis
  misc_feature (1)..(211): Homolog of NCBI NO: 14210079 NR Description: circadian clock coupling factor ZGT [Nicotiana
  misc_feature (1)..(179): Homolog of NCBI NO: 34393587 NR Description: unknown protein [Oryza sativa (japonica
  misc_feature (1)..(175): Homolog of NCBI NO: 15241717 NR Description: putative protein
  misc_feature (1)..(223): Homolog of NCBI NO: 15242296 NR Description: putative protein; protein id: At5g15440.1
MMLDLQSSGSHCIDGNWRALGKLLIYCSGCTQGGLFNSSVQIPGHFVYRTRFSRTLGRSLLPPQCRTDVLYVCDPCEHLDQGEEGDVGLFRGIFKSFPTSKVRKVIINKAVPFHPSEVCPYCKAKLWSMLQAKIIPQSACIRLEAYEDCIEYFVCLNGHLLGICTLAPLSDSEDAIPSEDNNHTEKKQDNGFPRENVLKRRNSLLGGSENGPPPQKRLTNPNQ

SEQ ID NO: 40688 - protein, 222 aa, Arabidopsis thaliana
  peptide (1)..(222): Ceres Seq. ID no. 12388494
  misc_feature (52)..(168): Homolog of NCBI NO: 21553661 NR Description: unknown [Arabidopsis thaliana]
  misc_feature (1)..(34): Homolog of NCBI NO: 15235367 NR Description: putative protein
  misc_feature (52)..(168): Homolog of NCBI NO: 15235367 NR Description: putative protein
  misc_feature (1)..(172): Homolog of NCBI NO: 34908976 NR Description: putative circadian clock coupling factor ZGT
  misc_feature (1)..(181): Homolog of NCBI NO: 18412596 NR Description: putative protein
  misc_feature (1)..(181): Homolog of NCBI NO: 11281127 NR Description: hypothetical protein T20O10.160 - Arabidopsis
  misc_feature (1)..(210): Homolog of NCBI NO: 14210079 NR Description: circadian clock coupling factor ZGT [Nicotiana
  misc_feature (1)..(178): Homolog of NCBI NO: 34393587 NR Description: unknown protein [Oryza sativa (japonica
  misc_feature (1)..(174): Homolog of NCBI NO: 15241717 NR Description: putative protein
  misc_feature (1)..(222): Homolog of NCBI NO: 15242296 NR Description: putative protein; protein id: At5g15440.1
MLDLQSSGSHCIDGNWRALGKLLIYCSGCTQGGLFNSSVQIPGHFVYRTRFSRTLGRSLLPPQCRTDVLYVCDPCEHLDQGEEGDVGLFRGIFKSFPTSKVRKVIINKAVPFHPSEVCPYCKAKLWSMLQAKIIPQSACIRLEAYEDCIEYFVCLNGHLLGICTLAPLSDSEDAIPSEDNNHTEKKQDNGFPRENVLKRRNSLLGGSENGPPPQKRLTNPNQ

SEQ ID NO: 40689 - DNA, 1615 bp, Arabidopsis thaliana
  misc_feature (1)..(1615): Ceres Seq. ID no. 12328333
  misc_feature: MA Experiment ID: 108434 Result: Up-regulated in Transcription
  misc_feature: MA Experiment 108434 PARAMETER Experiment Name: At_Root_Tips_cDNA_P Parameter: Tissue Value: Root Tips
  misc_feature: MA Experiment ID: 108461 Result: Down-regulated in Transcription
  misc_feature: MA Experiment 108461 PARAMETER Experiment Name: At_Germinating_Seeds_cDNA_P Parameter: Age (day) Value: 1 vs. 0
  misc_feature: MA Experiment 108461 PARAMETER Experiment Name: At_Germinating_Seeds_cDNA_P Parameter: Tissue Value: Germinating Seeds
  misc_feature: MA Experiment ID: 108462 Result: Down-regulated in Transcription
  misc_feature: MA Experiment 108462 PARAMETER Experiment Name: At_Germinating_Seeds_cDNA_P Parameter: Age (day) Value: 2 vs. 0
  misc_feature: MA Experiment 108462 PARAMETER Experiment Name: At_Germinating_Seeds_cDNA_P Parameter: Tissue Value: Germinating Seeds
  misc_feature: MA Experiment ID: 108464 Result: Down-regulated in Transcription
  misc_feature: MA Experiment 108464 PARAMETER Experiment Name: At_Germinating_Seeds_cDNA_P Parameter: Age (day) Value: 4 vs. 0
  misc_feature: MA Experiment 108464 PARAMETER Experiment Name: At_Germinating_Seeds_cDNA_P Parameter: Tissue Value: Germinating Seeds
  misc_feature: MA Experiment ID: 108573 Result: Up-regulated in Transcription
  misc_feature: MA Experiment 108573 PARAMETER Experiment Name: At_Drought_cDNA_P Parameter: Timepoint (hr) Value: 6
  misc_feature: MA Experiment 108573 PARAMETER Experiment Name: At_Drought_cDNA_P Parameter: Tissue Value: Aerial
  misc_feature: MA Experiment 108573 PARAMETER Experiment Name: At_Drought_cDNA_P Parameter: Treatment Value: Drought vs. No Drought
  misc_feature: MA Experiment ID: 108595 Result: Down-regulated in Transcription
  misc_feature: MA Experiment 108595 PARAMETER Experiment Name: At_Ler-pi_Ovule_cDNA_P Parameter: Plant Line Value: null
tttgcaaattctcaaaaatctatcaagggtttgccgtacaaaggtatcggaggagagagtaaaggtgctttgttatcaaggtgaaaatcgatttgaagatggcgagcgaaagtcctgatgttgctgttgtagctccggtggtggagaatggcggcgctgagtcctctaatggtaaagaggaacaattggaatctgagctttcgaagaagcttgagattgcagaagatggtcaagaggagaacgatggagaagaaggaagcaaagctgagacttcaacgaagaagaagaagaagaaaaataaaagcaagaagaagaaggaactccctcaacagactgatccaccttcaattcctgtcgttgagctcttcccatcaggagagtttcctgaaggtgaaatccaagagtataaggatgataatctttggagaacaacatctgaagagaagagagagctggagcgttttgaaaagccaatatataactctgttcgccgagctgcagaagttcatcgccaggttcgtaaatatgtcagaagcatagtgaagcctggaatgttgatgactgatatatgtgagaccctagagaatactgttcgtaagttgatatcagagaatggtcttcaagctggtattgcattccctacaggatgctctttgaattgggtcgctgctcattggacaccaaactctggagataagactgtacttcagtacgacgatgttatgaaattggactttggaacacatattgatgggcatattattgactgtgcatttacagttgccttcaaccctatgttcgatcctctcttagcagcctctcgtgaagctacgtataccggtatcaaggaagctgggatcgatgtccgtctctgtgatatcggtgctgctattcaggaggtcatggagtcttatgaggttgaaatcaacggaaaggtcttccaagttaaaagtatccgaaacttgaatggtcacagcattggaccctatcagatacatgctgggaaatctgttcctatcgtaaaaggaggcgagcagacaaagatggaagagggcgagttttatgccatcgaaacatttggatcaaccgggaaaggatatgtgagagaagacctagaatgtagccattacatgaagaactttgacgctggccacgtccccttgaggttgcctagagcaaaacaactccttgcaaccattaacaagaatttctcgactctcgccttctgcagacgttatttggaccgcattggtgaaaccaaatacttaatggctctaaagaatctttgtgactctggcattgttcagccgtatcctcctctgtgtgatgtgaaaggaagctatgtatcacagtttgaacacaccattttactgcgacctacttgcaaagaagttctctccaagggagacgactactgattcagatcctctgttttgctctgtttacctttattatctcatactgttgtcgagattgtacacttgcttgtttcttttgtcgtcgttaacacaagctttgaatccttttataaaaagcttcagtgcctctgttaaaaaaaaactatgtatttgccatgaacatgaatttgctcatcaatcttactagaagttgattg

SEQ ID NO: 40690 - protein, 439 aa, Arabidopsis thaliana; identical to SEQ ID NO: 21518
  peptide (1)..(439): Ceres Seq. ID no. 12328334
  misc_feature (19)..(439): Homolog of NCBI NO: 1703275 NR Description: Methionine aminopeptidase 2 (MetAP 2) (Peptidase
  misc_feature (30)..(439): Homolog of NCBI NO: 9789873 NR Description: methionine aminopeptidase 2
  misc_feature (28)..(439): Homolog of NCBI NO: 27694969 NR Description: Similar to methionine aminopeptidase 2 [Xenopus
  misc_feature (59)..(439): Homolog of NCBI NO: 38636687 NR Description: putative methionyl aminopeptidase (EC 3.4.11.18)
  misc_feature (16)..(439): Homolog of NCBI NO: 7435570 NR Description: methionyl aminopeptidase (EC 3.4.11.18) F6E13.31
  misc_feature (1)..(439): Homolog of NCBI NO: 18406472 NR Description: putative methionine aminopeptidase
  misc_feature (1)..(439): Homolog of NCBI NO: 11320962 NR Description: methionine aminopeptidase-like protein
  misc_feature (1)..(439): Homolog of NCBI NO: 11264654 NR Description: hypothetical protein F24G16.260 - Arabidopsis
  misc_feature (1)..(439): Homolog of NCBI NO: 17473819 NR Description: putative protein [Arabidopsis thaliana]
  misc_feature (1)..(439): Homolog of NCBI NO: 18411408 NR Description: putative protein

SEQ ID NO: 40691 - protein, 288 aa, Arabidopsis thaliana; identical to SEQ ID NO: 21519
  peptide (1)..(288): Ceres Seq. ID no. 12328335
  misc_feature (1)..(288): Homolog of NCBI NO: 1703275 NR Description: Methionine aminopeptidase 2 (MetAP 2) (Peptidase
  misc_feature (1)..(288): Homolog of NCBI NO: 9789873 NR Description: methionine aminopeptidase 2
  misc_feature (1)..(288): Homolog of NCBI NO: 27694969 NR Description: Similar to methionine aminopeptidase 2 [Xenopus
  misc_feature (1)..(288): Homolog of NCBI NO: 38636687 NR Description: putative methionyl aminopeptidase (EC 3.4.11.18)
  misc_feature (1)..(288): Homolog of NCBI NO: 7435570 NR Description: methionyl aminopeptidase (EC 3.4.11.18) F6E13.31
  misc_feature (1)..(288): Homolog of NCBI NO: 18406472 NR Description: putative methionine aminopeptidase
  misc_feature (1)..(288): Homolog of NCBI NO: 11320962 NR Description: methionine aminopeptidase-like protein
  misc_feature (1)..(288): Homolog of NCBI NO: 11264654 NR Description: hypothetical protein F24G16.260 - Arabidopsis
  misc_feature (1)..(288): Homolog of NCBI NO: 17473819 NR Description: putative protein [Arabidopsis thaliana]
  misc_feature (1)..(288): Homolog of NCBI NO: 18411408 NR Description: putative protein

SEQ ID NO: 40692 - protein, 286 aa, Arabidopsis thaliana; identical to SEQ ID NO: 21520
  peptide (1)..(286): Ceres Seq. ID no. 12328336
  misc_feature (1)..(286): Homolog of NCBI NO: 1703275 NR Description: Methionine aminopeptidase 2 (MetAP 2) (Peptidase
  misc_feature (1)..(286): Homolog of NCBI NO: 9789873 NR Description: methionine aminopeptidase 2
  misc_feature (1)..(286): Homolog of NCBI NO: 27694969 NR Description: Similar to methionine aminopeptidase 2 [Xenopus
  misc_feature (1)..(286): Homolog of NCBI NO: 38636687 NR Description: putative methionyl aminopeptidase (EC 3.4.11.18)
  misc_feature (1)..(286): Homolog of NCBI NO: 7435570 NR Description: methionyl aminopeptidase (EC 3.4.11.18) F6E13.31
  misc_feature (1)..(286): Homolog of NCBI NO: 18406472 NR Description: putative methionine aminopeptidase
  misc_feature (1)..(286): Homolog of NCBI NO: 11320962 NR Description: methionine aminopeptidase-like protein
  misc_feature (1)..(286): Homolog of NCBI NO: 11264654 NR Description: hypothetical protein F24G16.260 - Arabidopsis
  misc_feature (1)..(286): Homolog of NCBI NO: 17473819 NR Description: putative protein [Arabidopsis thaliana]
  misc_feature (1)..(286): Homolog of NCBI NO: 18411408 NR Description: putative protein

SEQ ID NO: 40693 - DNA, 1466 bp, Arabidopsis thaliana
  misc_feature (1)..(1466): Ceres Seq. ID no. 12328673
  misc_feature: MA Experiment ID: 108573 Result: Up-regulated in Transcription
  misc_feature: MA Experiment 108573 PARAMETER Experiment Name: At_Drought_cDNA_P Parameter: Timepoint (hr) Value: 6
  misc_feature: MA Experiment 108573 PARAMETER Experiment Name: At_Drought_cDNA_P Parameter: Tissue Value: Aerial
  misc_feature: MA Experiment 108573 PARAMETER Experiment Name: At_Drought_cDNA_P Parameter: Treatment Value: Drought vs. No Drought
  misc_feature: MA Experiment ID: 108576 Result: Down-regulated in Transcription
  misc_feature: MA Experiment 108576 PARAMETER Experiment Name: At_42deg_Heat_cDNA_P Parameter: Temperature (deg C) Value: 42 vs. 22
  misc_feature: MA Experiment 108576 PARAMETER Experiment Name: At_42deg_Heat_cDNA_P Parameter: Timepoint (hr) Value: 1
  misc_feature: MA Experiment 108576 PARAMETER Experiment Name: At_42deg_Heat_cDNA_P Parameter: Tissue Value: Aerial
  misc_feature: MA Experiment ID: 108577 Result: Down-regulated in Transcription
  misc_feature: MA Experiment 108577 PARAMETER Experiment Name: At_42deg_Heat_cDNA_P Parameter: Temperature (deg C) Value: 42 vs. 22
  misc_feature: MA Experiment 108577 PARAMETER Experiment Name: At_42deg_Heat_cDNA_P Parameter: Timepoint (hr) Value: 6
  misc_feature: MA Experiment 108577 PARAMETER Experiment Name: At_42deg_Heat_cDNA_P Parameter: Tissue Value: Aerial
  misc_feature: MA Experiment ID: 108595 Result: Down-regulated in Transcription
  misc_feature: MA Experiment 108595 PARAMETER Experiment Name: At_Ler-pi_Ovule_cDNA_P Parameter: Plant Line Value: null
  misc_feature: MA Experiment ID: 20000111 Result: Down-regulated in Transcription
  misc_feature: MA Experiment 20000111 PARAMETER Experiment Name: At_42deg_Heat_cDNA_P Parameter: Temperature (deg C) Value: 42 vs. 22
  misc_feature: MA Experiment 20000111 PARAMETER Experiment Name: At_42deg_Heat_cDNA_P Parameter: Timepoint (hr) Value: 6
  misc_feature: MA Experiment 20000111 PARAMETER Experiment Name: At_42deg_Heat_cDNA_P Parameter: Tissue Value: Aerial
  misc_feature: MA Experiment ID: 20000112 Result: Down-regulated in Transcription
  misc_feature: MA Experiment 20000112 PARAMETER Experiment Name: At_42deg_Heat_cDNA_P Parameter: Temperature (deg C) Value: 42 vs. 22
  misc_feature: MA Experiment 20000112 PARAMETER Experiment Name: At_42deg_Heat_cDNA_P Parameter: Timepoint (hr) Value: 2
  misc_feature: MA Experiment 20000112 PARAMETER Experiment Name: At_42deg_Heat_cDNA_P Parameter: Tissue Value: Aerial
  misc_feature: MA Experiment ID: 20000113 Result: Down-regulated in Transcription
  misc_feature: MA Experiment 20000113 PARAMETER Experiment Name: At_42deg_Heat_cDNA_P Parameter: Temperature (deg C) Value: 42 vs. 22
  misc_feature: MA Experiment 20000113 PARAMETER Experiment Name: At_42deg_Heat_cDNA_P Parameter: Timepoint (hr) Value: 8
  misc_feature: MA Experiment 20000113 PARAMETER Experiment Name: At_42deg_Heat_cDNA_P Parameter: Tissue Value: Aerial
  misc_feature: MA Experiment ID: 20000144 Result: Down-regulated in Transcription
  misc_feature: MA Experiment 20000144 PARAMETER Experiment Name: At_42deg_Heat_cDNA_P Parameter: Temperature (deg C) Value: 42 vs. 22
  misc_feature: MA Experiment 20000144 PARAMETER Experiment Name: At_42deg_Heat_cDNA_P Parameter: Timepoint (hr) Value: 1
  misc_feature: MA Experiment 20000144 PARAMETER Experiment Name: At_42deg_Heat_cDNA_P Parameter: Tissue Value: Aerial
  misc_feature: MA Experiment ID: 20000224 Result: Down-regulated in Transcription
acttttcggttaattgctcctcttcagctaactttggggctttaaagtgataggatggctcgcttcagttttccttgttttccaaattttgggggttttaatcaggtccaagtaattagttgagtgactcttggttccagattcgtttttggtggtcatagtcgcgagctgtgacaaatcgggggcctgagatttcagaaactgctgataattgggtctcaccatctgacattccactcatagaacctaatagtaaagagcacaggatgagagaggcacagctaggcggtcacactctgaggtcccatggaatgactgttgcaaggactcacatgcatgattggatcattctcgtgttacttgttattctcgagtgtgtactccttataatccacccattttatcgctttgttggtaaagatatgatgactgatctaagttacccgttaaagagtaacaccgtaccaatttggtctgtcccggtatatgcgatgctgttacctttggtaatcttcatctttatctacttccgtcgaagagatgtttatgatcttcatcacgcggtgctaggtctcttatactctgttctggtgacagcagtacttaccgatgcaataaagaatgcagttggtcgaccacgtcctgacttcttctggcgttgttttccagatggcaaagctctttatgatagccttggagatgttatatgccatggtgataaaagcgtcataagggaaggtcacaaaagctttccaagtggacacacgtcatggtctttttcgggtctcggatttctttcgctttacttatcgggaaagattcaagcatttgacggtaaaggccacgttgcaaagctatgcatagtcatactccctttgctatttgcagctcttgtcggcatttcccgtgttgatgactattggcatcattggcaagacgtctttgcaggaggcttgctaggtcttgcgatctctacaatctgttatcttcaatttttcccgccaccatatcacaccgaaggttggggaccatatgcttacttccaagtgttggaggctgcgagagtgcaaggagcagcgaatggagcagtgcagcagccgccgccccaagttaacaacggtgaagaagaagacggtgggtttatgggtttacatttggtggataatccgactatgaggagagaagaggatgtagaaactggtagaggctgagatgaagaaactctgaagctggtttggttacttgttaggacactttctcttgttcttttgattctttgttggacaactttagtagatttctctaagataactaatagagtcgtttggttttggttttggtttaaatggatgaccggttttatggttccggtattggtggttaaagtttatgtttttcaaaaaagttcactggataaatgtagctttattttcaatattttaaggattgaaatcggatttgaactt

SEQ ID NO: 40694 - protein, 314 aa, Arabidopsis thaliana; identical to SEQ ID NO: 27353
  peptide (1)..(314): Ceres Seq. ID no. 12328674
  misc_feature (108)..(248): Pfam Name: PAP2 superfamily Pfam Description: PAP2 superfamily
  misc_feature (1)..(313): Homolog of NCBI NO: 38637528 NR Description: unknown protein [Oryza sativa (japonica
  misc_feature (1)..(284): Homolog of NCBI NO: 10673973 NR Description: phosphatidic acid phosphatase beta [Vigna
  misc_feature (1)..(273): Homolog of NCBI NO: 21554001 NR Description: putative phosphatidic acid phosphatase
  misc_feature (1)..(273): Homolog of NCBI NO: 25353094 NR Description: probable phosphatidic acid phosphatase
  misc_feature (1)..(273): Homolog of NCBI NO: 18379166 NR Description: putative phosphatidic acid phosphatase
  misc_feature (1)..(273): Homolog of NCBI NO: 15724220 NR Description: At2g01180/F10A8.6 [Arabidopsis thaliana]
  misc_feature (1)..(271): Homolog of NCBI NO: 15218051 NR Description: putative phosphatidic acid phosphatase
  misc_feature (1)..(314): Homolog of NCBI NO: 9621903 NR Description: phosphatidic acid phosphatase alpha [Vigna
  misc_feature (1)..(314): Homolog of NCBI NO: 6957723 NR Description: putative phosphatidate phosphohydrolase
  misc_feature (1)..(314): Homolog of NCBI NO: 18396250 NR Description: putative phosphatidate phosphohydrolase

SEQ ID NO: 40695 - protein, 299 aa, Arabidopsis thaliana; identical to SEQ ID NO: 27354
  peptide (1)..(299): Ceres Seq. ID no. 12328675
  misc_feature (93)..(233): Pfam Name: PAP2 superfamily Pfam Description: PAP2 superfamily
  misc_feature (1)..(298): Homolog of NCBI NO: 38637528 NR Description: unknown protein [Oryza sativa (japonica
  misc_feature (1)..(269): Homolog of NCBI NO: 10673973 NR Description: phosphatidic acid phosphatase beta [Vigna
  misc_feature (1)..(258): Homolog of NCBI NO: 21554001 NR Description: putative phosphatidic acid phosphatase
  misc_feature (1)..(258): Homolog of NCBI NO: 25353094 NR Description: probable phosphatidic acid phosphatase
  misc_feature (1)..(258): Homolog of NCBI NO: 18379166 NR Description: putative phosphatidic acid phosphatase
  misc_feature (1)..(258): Homolog of NCBI NO: 15724220 NR Description: At2g01180/F10A8.6 [Arabidopsis thaliana]
  misc_feature (1)..(256): Homolog of NCBI NO: 15218051 NR Description: putative phosphatidic acid phosphatase
  misc_feature (1)..(299): Homolog of NCBI NO: 9621903 NR Description: phosphatidic acid phosphatase alpha [Vigna
  misc_feature (1)..(299): Homolog of NCBI NO: 6957723 NR Description: putative phosphatidate phosphohydrolase
  misc_feature (1)..(299): Homolog of NCBI NO: 18396250 NR Description: putative phosphatidate phosphohydrolase

SEQ ID NO: 40696 - protein, 292 aa, Arabidopsis thaliana; identical to SEQ ID NO: 27355
  peptide (1)..(292): Ceres Seq. ID no. 12328676
  misc_feature (86)..(226): Pfam Name: PAP2 superfamily Pfam Description: PAP2 superfamily
  misc_feature (1)..(291): Homolog of NCBI NO: 38637528 NR Description: unknown protein [Oryza sativa (japonica
  misc_feature (1)..(262): Homolog of NCBI NO: 10673973 NR Description: phosphatidic acid phosphatase beta [Vigna
  misc_feature (1)..(251): Homolog of NCBI NO: 21554001 NR Description: putative phosphatidic acid phosphatase
  misc_feature (1)..(251): Homolog of NCBI NO: 25353094 NR Description: probable phosphatidic acid phosphatase
  misc_feature (1)..(251): Homolog of NCBI NO: 18379166 NR Description: putative phosphatidic acid phosphatase
  misc_feature (1)..(251): Homolog of NCBI NO: 15724220 NR Description: At2g01180/F10A8.6 [Arabidopsis thaliana]
  misc_feature (1)..(249): Homolog of NCBI NO: 15218051 NR Description: putative phosphatidic acid phosphatase
  misc_feature (1)..(292): Homolog of NCBI NO: 9621903 NR Description: phosphatidic acid phosphatase alpha [Vigna
  misc_feature (1)..(292): Homolog of NCBI NO: 6957723 NR Description: putative phosphatidate phosphohydrolase
  misc_feature (1)..(292): Homolog of NCBI NO: 18396250 NR Description: putative phosphatidate phosphohydrolase

SEQ ID NO: 40697 - DNA, 1870 bp, Arabidopsis thaliana; identical to SEQ ID NO: 27024
  misc_feature (1)..(1870): Ceres Seq. ID no. 12328430
  misc_feature: MA Experiment ID: 108435 Result: Down-regulated in Transcription
  misc_feature: MA Experiment 108435 PARAMETER Experiment Name: At_stm_Mutants_cDNA_P Parameter: Plant Line Value: wt Landsburg vs stm
  misc_feature: MA Experiment 108435 PARAMETER Experiment Name: At_stm_Mutants_cDNA_P Parameter: Tissue Value: Shoot Apical Meristem Region
  misc_feature: MA Experiment ID: 108461 Result: Up-regulated in Transcription
  misc_feature: MA Experiment 108461 PARAMETER Experiment Name: At_Germinating_Seeds_cDNA_P Parameter: Age (day) Value: 1 vs. 0
  misc_feature: MA Experiment 108461 PARAMETER Experiment Name: At_Germinating_Seeds_cDNA_P Parameter: Tissue Value: Germinating Seeds
  misc_feature: MA Experiment ID: 108462 Result: Up-regulated in Transcription
  misc_feature: MA Experiment 108462 PARAMETER Experiment Name: At_Germinating_Seeds_cDNA_P Parameter: Age (day) Value: 2 vs. 0
  misc_feature: MA Experiment 108462 PARAMETER Experiment Name: At_Germinating_Seeds_cDNA_P Parameter: Tissue Value: Germinating Seeds
  misc_feature: MA Experiment ID: 108463 Result: Up-regulated in Transcription
  misc_feature: MA Experiment 108463 PARAMETER Experiment Name: At_Germinating_Seeds_cDNA_P Parameter: Age (day) Value: 3 vs. 0
  misc_feature: MA Experiment 108463 PARAMETER Experiment Name: At_Germinating_Seeds_cDNA_P Parameter: Tissue Value: Germinating Seeds
  misc_feature: MA Experiment ID: 108464 Result: Up-regulated in Transcription
  misc_feature: MA Experiment 108464 PARAMETER Experiment Name: At_Germinating_Seeds_cDNA_P Parameter: Age (day) Value: 4 vs. 0
  misc_feature: MA Experiment 108464 PARAMETER Experiment Name: At_Germinating_Seeds_cDNA_P Parameter: Tissue Value: Germinating Seeds
  misc_feature: MA Experiment ID: 108595 Result: Down-regulated in Transcription
  misc_feature: MA Experiment 108595 PARAMETER Experiment Name: At_Ler-pi_Ovule_cDNA_P Parameter: Plant Line Value: null
  misc_feature: MA Experiment ID: 20000087 Result: Down-regulated in Transcription
  misc_feature: MA Experiment 20000087 PARAMETER Experiment Name: At_100uM_ABA_Mutants_cDNA_P Parameter: Plant Line Value: WS
  misc_feature: MA Experiment 20000087 PARAMETER Experiment Name: At_100uM_ABA_Mutants_cDNA_P Parameter: Timepoint (hr) Value: 6
  misc_feature: MA Experiment 20000087 PARAMETER Experiment Name: At_100uM_ABA_Mutants_cDNA_P Parameter: Tissue Value: Aerial
  misc_feature: MA Experiment 20000087 PARAMETER Experiment Name: At_100uM_ABA_Mutants_cDNA_P Parameter: Treatment Value: 100uM ABA vs. No Treatment
  misc_feature: MA Experiment ID: 20000179 Result: Up-regulated in Transcription
  misc_feature: MA Experiment 20000179 PARAMETER Experiment Name: At_Germinating_Seeds_P Parameter: Age (hr) Value: 6 vs. 0
  misc_feature: MA Experiment 20000179 PARAMETER Experiment Name: At_Germinating_Seeds_P Parameter: Tissue Value: Germinating Seeds
  misc_feature: MA Experiment ID: 20000180 Result: Up-regulated in Transcription
  misc_feature: MA Experiment 20000180 PARAMETER Experiment Name: At_Germinating_Seeds_P Parameter: Age (hr) Value: 24 vs. 0
  misc_feature: MA Experiment 20000180 PARAMETER Experiment Name: At_Germinating_Seeds_P Parameter: Tissue Value: Germinating Seeds
  misc_feature: MA Experiment ID: 20000185 Result: Down-regulated in Transcription
  misc_feature: MA Experiment 20000185 PARAMETER Experiment Name: At_Roots__P Parameter: Age (day) Value: 7 vs. 21
  misc_feature: MA Experiment 20000185 PARAMETER Experiment Name: At_Roots__P Parameter: Organism Value: A. thaliana
  misc_feature: MA Experiment 20000185 PARAMETER Experiment Name: At_Roots__P Parameter: Tissue Value: Roots vs. Whole Plant
  misc_feature: MA Experiment ID: 20000439 Result: Down-regulated in Transcription
  misc_feature: MA Experiment 20000439 PARAMETER Experiment Name: At_Roots__P Parameter: Age (day) Value: 14 vs. 21
  misc_feature: MA Experiment 20000439 PARAMETER Experiment Name: At_Roots__P Parameter: Organism Value: A. thaliana
  misc_feature: MA Experiment 20000439 PARAMETER Experiment Name: At_Roots__P Parameter: Tissue Value: Roots vs. Whole Plant
  misc_feature: MA Experiment ID: 20000451 Result: Up-regulated in Transcription
  misc_feature: MA Experiment 20000451 PARAMETER Experiment Name: At_CS6879_Shoots-Roots_P Parameter: Age (day) Value: 14
  misc_feature: MA Experiment 20000451 PARAMETER Experiment Name: At_CS6879_Shoots-Roots_P Parameter: Organism Value: A. thaliana
  misc_feature: MA Experiment 20000451 PARAMETER Experiment Name: At_CS6879_Shoots-Roots_P Parameter: Plant Line Value: CS6879 vs. WS
  misc_feature: MA Experiment 20000451 PARAMETER Experiment Name: At_CS6879_Shoots-Roots_P Parameter: Tissue Value: Roots
  misc_feature: MA Experiment ID: 20000495 Result: Down-regulated in Transcription
  misc_feature: MA Experiment 20000495 PARAMETER Experiment Name: At_Guard_Cells_P Parameter: Harvest Date Value: 8/2/2002
  misc_feature: MA Experiment 20000495 PARAMETER Experiment Name: At_Guard_Cells_P Parameter: Organism Value: A. thaliana
  misc_feature: MA Experiment 20000495 PARAMETER Experiment Name: At_Guard_Cells_P Parameter: Tissue Value: Guard Cells vs. Leaves
  misc_feature: MA Experiment ID: 20000794 Result: Down-regulated in Transcription
  misc_feature: MA Experiment 20000794 PARAMETER Experiment Name: At_Petals_P Parameter: Age (day) Value: 23-25 days
  misc_feature: MA Experiment 20000794 PARAMETER Experiment Name: At_Petals_P Parameter: Plant Line Value: WS
  misc_feature: MA Experiment 20000794 PARAMETER Experiment Name: At_Petals_P Parameter: Tissue Value: Petals vs. Whole plant
  misc_feature: MA Experiment ID: 20001248 Result: Down-regulated in Transcription
  misc_feature: MA Experiment 20001248 PARAMETER Experiment Name: At_Far-red-induction_P Parameter: Age (day) Value: 7
  misc_feature: MA Experiment 20001248 PARAMETER Experiment Name: At_Far-red-induction_P Parameter: Light Value: Far-red vs. White
  misc_feature: MA Experiment 20001248 PARAMETER Experiment Name: At_Far-red-induction_P Parameter: Organism Value: A. thaliana
  misc_feature: MA Experiment 20001248 PARAMETER Experiment Name: At_Far-red-induction_P Parameter: Plant Line Value: Columbia
  misc_feature: MA Experiment 20001248 PARAMETER Experiment Name: At_Far-red-induction_P Parameter: Timepoint (hr) Value: 4
  misc_feature: MA Experiment 20001248 PARAMETER Experiment Name: At_Far-red-induction_P Parameter: Tissue Value: Whole Plant
  misc_feature: MA Experiment ID: 20001450 Result: Down-regulated in Transcription
  misc_feature: MA Experiment 20001450 PARAMETER Experiment Name: At_Far-red-induction_P Parameter: Age (day) Value: 7
  misc_feature: MA Experiment 20001450 PARAMETER Experiment Name: At_Far-red-induction_P Parameter: Light Value: Far-red vs. White
  misc_feature: MA Experiment 20001450 PARAMETER Experiment Name: At_Far-red-induction_P Parameter: Organism Value: A. thaliana
  misc_feature: MA Experiment 20001450 PARAMETER Experiment Name: At_Far-red-induction_P Parameter: Plant Line Value: Columbia
  misc_feature: MA Experiment 20001450 PARAMETER Experiment Name: At_Far-red-induction_P Parameter: Timepoint (hr) Value: 8
  misc_feature: MA Experiment 20001450 PARAMETER Experiment Name: At_Far-red-induction_P Parameter: Tissue Value: Whole Plant
  misc_feature: MA Experiment ID: 20001451 Result: Down-regulated in Transcription
  misc_feature: MA Experiment 20001451 PARAMETER Experiment Name: At_Far-red-induction_P Parameter: Age (day) Value: 7
  misc_feature: MA Experiment 20001451 PARAMETER Experiment Name: At_Far-red-induction_P Parameter: Light Value: Far-red vs. White
  misc_feature: MA Experiment 20001451 PARAMETER Experiment Name: At_Far-red-induction_P Parameter: Organism Value: A. thaliana
  misc_feature: MA Experiment 20001451 PARAMETER Experiment Name: At_Far-red-induction_P Parameter: Plant Line Value: Columbia
  misc_feature: MA Experiment 20001451 PARAMETER Experiment Name: At_Far-red-induction_P Parameter: Timepoint (hr) Value: 24
  misc_feature: MA Experiment 20001451 PARAMETER Experiment Name: At_Far-red-induction_P Parameter: Tissue Value: Whole Plant

SEQ ID NO: 40698 - protein, 520 aa, Arabidopsis thaliana; identical to SEQ ID NO: 27025
  peptide (1)..(520): Ceres Seq. ID no. 12328431
  misc_feature (91)..(366): Pfam Name: Nucleotidyl transferase Pfam Description: Nucleotidyl transferase
  misc_feature (91)..(366): Pfam Name: Nucleotidyl transferase Pfam Description: Nucleotidyl transferase
  misc_feature (5)..(520): Homolog of NCBI NO: 17865461 NR Description: Glucose-1-phosphate adenylyltransferase small chloroplast precursor (ADP-glucose synthase) (ADP-glucose
  misc_feature (1)..(520): Homolog of NCBI NO: 29421116 NR Description: ADP-glucose pyrophosphorylase small subunit
  misc_feature (4)..(520): Homolog of NCBI NO: 1707944 NR Description: Glucose-1-phosphate adenylyltransferase small
  misc_feature (5)..(520): Homolog of NCBI NO: 232164 NR Description: Glucose-1-phosphate adenylyltransferase small chloroplast precursor (ADP-glucose synthase) (ADP-glucose
  misc_feature (1)..(520): Homolog of NCBI NO: 1237080 NR Description: ADP-glucose pyrophosphorylase [Pisum sativum]
  misc_feature (5)..(520): Homolog of NCBI NO: 17865461 NR Description: Glucose-1-phosphate adenylyltransferase small chloroplast precursor (ADP-glucose synthase) (ADP-glucose
  misc_feature (4)..(520): Homolog of NCBI NO: 1707944 NR Description: Glucose-1-phosphate adenylyltransferase small
  misc_feature (1)..(520): Homolog of NCBI NO: 1237080 NR Description: ADP-glucose pyrophosphorylase [Pisum sativum]
  misc_feature (1)..(520): Homolog of NCBI NO: 15238933 NR Description: ADPG pyrophosphorylase small subunit (gb
  misc_feature (1)..(520): Homolog of NCBI NO: 1575754 NR Description: ADP glucose pyrophosphorylase small subunit
  misc_feature (1)..(520): Homolog of NCBI NO: 17865468 NR Description: Glucose-1-phosphate adenylyltransferase small chloroplast precursor (ADP-glucose synthase) (ADP-glucose
  misc_feature (1)..(520): Homolog of NCBI NO: 13487787 NR Description: ADP-glucose pyrophosphorylase small subunit
  misc_feature (5)..(520): Homolog of NCBI NO: 1071859 NR Description: glucose-1-phosphate adenylyltransferase (EC
  misc_feature (5)..(520): Homolog of NCBI NO: 232164 NR Description: Glucose-1-phosphate adenylyltransferase small chloroplast precursor (ADP-glucose synthase) (ADP-glucose
  misc_feature (1)..(520): Homolog of NCBI NO: 29421116 NR Description: ADP-glucose pyrophosphorylase small subunit
  misc_feature (5)..(520): Homolog of NCBI NO: 1071859 NR Description: glucose-1-phosphate adenylyltransferase (EC
  misc_feature (1)..(520): Homolog of NCBI NO: 13487787 NR Description: ADP-glucose pyrophosphorylase small subunit
  misc_feature (1)..(520): Homolog of NCBI NO: 17865468 NR Description: Glucose-1-phosphate adenylyltransferase small chloroplast precursor (ADP-glucose synthase) (ADP-glucose
  misc_feature (1)..(520): Homolog of NCBI NO: 1575754 NR Description: ADP glucose pyrophosphorylase small subunit
  misc_feature (1)..(520): Homolog of NCBI NO: 15238933 NR Description: ADPG pyrophosphorylase small subunit (gb

SEQ ID NO: 40699 - protein, 359 aa, Arabidopsis thaliana; identical to SEQ ID NO: 27026
  peptide (1)..(359): Ceres Seq. ID no. 12328432
  misc_feature (1)..(205): Pfam Name: Nucleotidyl transferase Pfam Description: Nucleotidyl transferase
  misc_feature (1)..(205): Pfam Name: Nucleotidyl transferase Pfam Description: Nucleotidyl transferase
  misc_feature (1)..(359): Homolog of NCBI NO: 17865461 NR Description: Glucose-1-phosphate adenylyltransferase small chloroplast precursor (ADP-glucose synthase) (ADP-glucose
  misc_feature (1)..(359): Homolog of NCBI NO: 29421116 NR Description: ADP-glucose pyrophosphorylase small subunit
  misc_feature (1)..(359): Homolog of NCBI NO: 1707944 NR Description: Glucose-1-phosphate adenylyltransferase small
  misc_feature (1)..(359): Homolog of NCBI NO: 232164 NR Description: Glucose-1-phosphate adenylyltransferase small chloroplast precursor (ADP-glucose synthase) (ADP-glucose
  misc_feature (1)..(359): Homolog of NCBI NO: 1237080 NR Description: ADP-glucose pyrophosphorylase [Pisum sativum]
  misc_feature (1)..(359): Homolog of NCBI NO: 17865461 NR Description: Glucose-1-phosphate adenylyltransferase small chloroplast precursor (ADP-glucose synthase) (ADP-glucose
  misc_feature (1)..(359): Homolog of NCBI NO: 1707944 NR Description: Glucose-1-phosphate adenylyltransferase small
  misc_feature (1)..(359): Homolog of NCBI NO: 1237080 NR Description: ADP-glucose pyrophosphorylase [Pisum sativum]
  misc_feature (1)..(359): Homolog of NCBI NO: 15238933 NR Description: ADPG pyrophosphorylase small subunit (gb
  misc_feature (1)..(359): Homolog of NCBI NO: 1575754 NR Description: ADP glucose pyrophosphorylase small subunit
  misc_feature (1)..(359): Homolog of NCBI NO: 17865468 NR Description: Glucose-1-phosphate adenylyltransferase small chloroplast precursor (ADP-glucose synthase) (ADP-glucose
  misc_feature (1)..(359): Homolog of NCBI NO: 13487787 NR Description: ADP-glucose pyrophosphorylase small subunit
  misc_feature (1)..(359): Homolog of NCBI NO: 1071859 NR Description: glucose-1-phosphate adenylyltransferase (EC
  misc_feature (1)..(359): Homolog of NCBI NO: 232164 NR Description: Glucose-1-phosphate adenylyltransferase small chloroplast precursor (ADP-glucose synthase) (ADP-glucose
  misc_feature (1)..(359): Homolog of NCBI NO: 29421116 NR Description: ADP-glucose pyrophosphorylase small subunit
  misc_feature (1)..(359): Homolog of NCBI NO: 1071859 NR Description: glucose-1-phosphate adenylyltransferase (EC
  misc_feature (1)..(359): Homolog of NCBI NO: 13487787 NR Description: ADP-glucose pyrophosphorylase small subunit
  misc_feature (1)..(359): Homolog of NCBI NO: 17865468 NR Description: Glucose-1-phosphate adenylyltransferase small chloroplast precursor (ADP-glucose synthase) (ADP-glucose
  misc_feature (1)..(359): Homolog of NCBI NO: 1575754 NR Description: ADP glucose pyrophosphorylase small subunit
  misc_feature (1)..(359): Homolog of NCBI NO: 15238933 NR Description: ADPG pyrophosphorylase small subunit (gb

SEQ ID NO: 40700 - protein, 302 aa, Arabidopsis thaliana; identical to SEQ ID NO: 27027
  peptide (1)..(302): Ceres Seq. ID no. 12328433
  misc_feature (1)..(148): Pfam Name: Nucleotidyl transferase Pfam Description: Nucleotidyl transferase
  misc_feature (1)..(148): Pfam Name: Nucleotidyl transferase Pfam Description: Nucleotidyl transferase
  misc_feature (1)..(302): Homolog of NCBI NO: 17865461 NR Description: Glucose-1-phosphate adenylyltransferase small chloroplast precursor (ADP-glucose synthase) (ADP-glucose
  misc_feature (1)..(302): Homolog of NCBI NO: 29421116 NR Description: ADP-glucose pyrophosphorylase small subunit
  misc_feature (1)..(302): Homolog of NCBI NO: 1707944 NR Description: Glucose-1-phosphate adenylyltransferase small
  misc_feature (1)..(302): Homolog of NCBI NO: 232164 NR Description: Glucose-1-phosphate adenylyltransferase small chloroplast precursor (ADP-glucose synthase) (ADP-glucose
  misc_feature (1)..(302): Homolog of NCBI NO: 1237080 NR Description: ADP-glucose pyrophosphorylase [Pisum sativum]
  misc_feature (1)..(302): Homolog of NCBI NO: 17865461 NR Description: Glucose-1-phosphate adenylyltransferase small chloroplast precursor (ADP-glucose synthase) (ADP-glucose
  misc_feature (1)..(302): Homolog of NCBI NO: 1707944 NR Description: Glucose-1-phosphate adenylyltransferase small
  misc_feature (1)..(302): Homolog of NCBI NO: 1237080 NR Description: ADP-glucose pyrophosphorylase [Pisum sativum]
  misc_feature (1)..(302): Homolog of NCBI NO: 15238933 NR Description: ADPG pyrophosphorylase small subunit (gb
  misc_feature (1)..(302): Homolog of NCBI NO: 1575754 NR Description: ADP glucose pyrophosphorylase small subunit
  misc_feature (1)..(302): Homolog of NCBI NO: 17865468 NR Description: Glucose-1-phosphate adenylyltransferase small chloroplast precursor (ADP-glucose synthase) (ADP-glucose
  misc_feature (1)..(302): Homolog of NCBI NO: 13487787 NR Description: ADP-glucose pyrophosphorylase small subunit
  misc_feature (1)..(302): Homolog of NCBI NO: 1071859 NR Description: glucose-1-phosphate adenylyltransferase (EC
  misc_feature (1)..(302): Homolog of NCBI NO: 232164 NR Description: Glucose-1-phosphate adenylyltransferase small chloroplast precursor (ADP-glucose synthase) (ADP-glucose
  misc_feature (1)..(302): Homolog of NCBI NO: 29421116 NR Description: ADP-glucose pyrophosphorylase small subunit
  misc_feature (1)..(302): Homolog of NCBI NO: 1071859 NR Description: glucose-1-phosphate adenylyltransferase (EC
  misc_feature (1)..(302): Homolog of NCBI NO: 13487787 NR Description: ADP-glucose pyrophosphorylase small subunit
  misc_feature (1)..(302): Homolog of NCBI NO: 17865468 NR Description: Glucose-1-phosphate adenylyltransferase small chloroplast precursor (ADP-glucose synthase) (ADP-glucose
  misc_feature (1)..(302): Homolog of NCBI NO: 1575754 NR Description: ADP glucose pyrophosphorylase small subunit
  misc_feature (1)..(302): Homolog of NCBI NO: 15238933 NR Description: ADPG pyrophosphorylase small subunit (gb

SEQ ID NO: 40701 - DNA, 1170 bp, Arabidopsis thaliana
  misc_feature (1)..(1170): Ceres Seq. ID no. 12330304
  misc_feature: MA Experiment ID: 108435 Result: Down-regulated in Transcription
  misc_feature: MA Experiment 108435 PARAMETER Experiment Name: At_stm_Mutants_cDNA_P Parameter: Plant Line Value: wt Landsburg vs stm
  misc_feature: MA Experiment 108435 PARAMETER Experiment Name: At_stm_Mutants_cDNA_P Parameter: Tissue Value: Shoot Apical Meristem Region
  misc_feature: MA Experiment ID: 108489 Result: Down-regulated in Transcription
  misc_feature: MA Experiment ID: 108501 Result: Down-regulated in Transcription
  misc_feature: MA Experiment 108501 PARAMETER Experiment Name: At_ap2_floral_buds_cDNA_P Parameter: Plant Line Value: ap2 (Ler.)
  misc_feature: MA Experiment 108501 PARAMETER Experiment Name: At_ap2_floral_buds_cDNA_P Parameter: Tissue Value: Closed Flower
  misc_feature: MA Experiment ID: 108577 Result: Down-regulated in Transcription
  misc_feature: MA Experiment 108577 PARAMETER Experiment Name: At_42deg_Heat_cDNA_P Parameter: Temperature (deg C) Value: 42 vs. 22
  misc_feature: MA Experiment 108577 PARAMETER Experiment Name: At_42deg_Heat_cDNA_P Parameter: Timepoint (hr) Value: 6
  misc_feature: MA Experiment 108577 PARAMETER Experiment Name: At_42deg_Heat_cDNA_P Parameter: Tissue Value: Aerial
  misc_feature: MA Experiment ID: 108594 Result: Up-regulated in Transcription
  misc_feature: MA Experiment 108594 PARAMETER Experiment Name: At_Ler-rhl_Root_cDNA_P Parameter: Plant Line Value: null
  misc_feature: MA Experiment ID: 108595 Result: Down-regulated in Transcription
  misc_feature: MA Experiment 108595 PARAMETER Experiment Name: At_Ler-pi_Ovule_cDNA_P Parameter: Plant Line Value: null
  misc_feature: MA Experiment ID: 20000087 Result: Down-regulated in Transcription
  misc_feature: MA Experiment 20000087 PARAMETER Experiment Name: At_100uM_ABA_Mutants_cDNA_P Parameter: Plant Line Value: WS
  misc_feature: MA Experiment 20000087 PARAMETER Experiment Name: At_100uM_ABA_Mutants_cDNA_P Parameter: Timepoint (hr) Value: 6
  misc_feature: MA Experiment 20000087 PARAMETER Experiment Name: At_100uM_ABA_Mutants_cDNA_P Parameter: Tissue Value: Aerial
  misc_feature: MA Experiment 20000087 PARAMETER Experiment Name: At_100uM_ABA_Mutants_cDNA_P Parameter: Treatment Value: 100uM ABA vs. No Treatment
  misc_feature: MA Experiment ID: 20000111 Result: Down-regulated in Transcription
  misc_feature: MA Experiment 20000111 PARAMETER Experiment Name: At_42deg_Heat_cDNA_P Parameter: Temperature (deg C) Value: 42 vs. 22
  misc_feature: MA Experiment 20000111 PARAMETER Experiment Name: At_42deg_Heat_cDNA_P Parameter: Timepoint (hr) Value: 6
  misc_feature: MA Experiment 20000111 PARAMETER Experiment Name: At_42deg_Heat_cDNA_P Parameter: Tissue Value: Aerial
  misc_feature: MA Experiment ID: 20000113 Result: Down-regulated in Transcription
  misc_feature: MA Experiment 20000113 PARAMETER Experiment Name: At_42deg_Heat_cDNA_P Parameter: Temperature (deg C) Value: 42 vs. 22
  misc_feature: MA Experiment 20000113 PARAMETER Experiment Name: At_42deg_Heat_cDNA_P Parameter: Timepoint (hr) Value: 8
  misc_feature: MA Experiment 20000113 PARAMETER Experiment Name: At_42deg_Heat_cDNA_P Parameter: Tissue Value: Aerial
  misc_feature: MA Experiment ID: 20000173 Result: Down-regulated in Transcription
  misc_feature: MA Experiment 20000173 PARAMETER Experiment Name: At_42deg_Heat_P Parameter: Age (day) Value: 14
  misc_feature: MA Experiment 20000173 PARAMETER Experiment Name: At_42deg_Heat_P Parameter: Organism Value: A. thaliana
  misc_feature: MA Experiment 20000173 PARAMETER Experiment Name: At_42deg_Heat_P Parameter: Plant Line Value: WS
  misc_feature: MA Experiment 20000173 PARAMETER Experiment Name: At_42deg_Heat_P Parameter: Temperature (deg C) Value: 42 vs. 22
  misc_feature: MA Experiment 20000173 PARAMETER Experiment Name: At_42deg_Heat_P Parameter: Timepoint (hr) Value: 6
  misc_feature: MA Experiment 20000173 PARAMETER Experiment Name: At_42deg_Heat_P Parameter: Tissue Value: Aerial
  misc_feature: MA Experiment ID: 20000185 Result: Down-regulated in Transcription
  misc_feature: MA Experiment 20000185 PARAMETER Experiment Name: At_Roots__P Parameter: Age (day) Value: 7 vs. 21
  misc_feature: MA Experiment 20000185 PARAMETER Experiment Name: At_Roots__P Parameter: Organism Value: A. thaliana
  misc_feature: MA Experiment 20000185 PARAMETER Experiment Name: At_Roots__P Parameter: Tissue Value: Roots vs. Whole Plant
  misc_feature: MA Experiment ID: 20000437 Result: Down-regulated in Transcription
  misc_feature: MA Experiment 20000437 PARAMETER Experiment Name: At_Drought_P Parameter: Age (day) Value: 8
  misc_feature: MA Experiment 20000437 PARAMETER Experiment Name: At_Drought_P Parameter: Organism Value: A. thaliana
  misc_feature: MA Experiment 20000437 PARAMETER Experiment Name: At_Drought_P Parameter: Plant Line Value: WS
  misc_feature: MA Experiment 20000437 PARAMETER Experiment Name: At_Drought_P Parameter: Timepoint (hr) Value: 24
  misc_feature: MA Experiment 20000437 PARAMETER Experiment Name: At_Drought_P Parameter: Tissue Value: Whole Plant
  misc_feature: MA Experiment 20000437 PARAMETER Experiment Name: At_Drought_P Parameter: Treatment Value: Drought vs. No Drought
  misc_feature: MA Experiment ID: 20000439 Result: Down-regulated in Transcription
  misc_feature: MA Experiment 20000439 PARAMETER Experiment Name: At_Roots__P Parameter: Age (day) Value: 14 vs. 21
  misc_feature: MA Experiment 20000439 PARAMETER Experiment Name: At_Roots__P Parameter: Organism Value: A. thaliana
  misc_feature: MA Experiment 20000439 PARAMETER Experiment Name: At_Roots__P Parameter: Tissue Value: Roots vs. Whole Plant
  misc_feature: MA Experiment ID: 20001555 Result: Down-regulated in Transcription
  misc_feature: MA Experiment 20001555 PARAMETER Experiment Name: At_Drought_Soil_Dry_P Parameter: Age (day) Value: 24
  misc_feature: MA Experiment 20001555 PARAMETER Experiment Name: At_Drought_Soil_Dry_P Parameter: Organism Value: A. thaliana
  misc_feature: MA Experiment 20001555 PARAMETER Experiment Name: At_Drought_Soil_Dry_P Parameter: Plant Line Value: WS
  misc_feature: MA Experiment 20001555 PARAMETER Experiment Name: At_Drought_Soil_Dry_P Parameter: Post Timepoint (hr) Value: None
  misc_feature: MA Experiment 20001555 PARAMETER Experiment Name: At_Drought_Soil_Dry_P Parameter: Post-Treatment Value: None
  misc_feature: MA Experiment 20001555 PARAMETER Experiment Name: At_Drought_Soil_Dry_P Parameter: Timepoint (day) Value: 10
  misc_feature: MA Experiment 20001555 PARAMETER Experiment Name: At_Drought_Soil_Dry_P Parameter: Treatment Value: Drought vs. No Drought
  misc_feature: MA Experiment ID: 20001557 Result: Down-regulated in Transcription
  misc_feature: MA Experiment 20001557 PARAMETER Experiment Name: At_Drought_Soil_Dry_P Parameter: Age (day) Value: 27
  misc_feature: MA Experiment 20001557 PARAMETER Experiment Name: At_Drought_Soil_Dry_P Parameter: Organism Value: A. thaliana
  misc_feature: MA Experiment 20001557 PARAMETER Experiment Name: At_Drought_Soil_Dry_P Parameter: Plant Line Value: WS
  misc_feature: MA Experiment 20001557 PARAMETER Experiment Name: At_Drought_Soil_Dry_P Parameter: Post Timepoint (hr) Value: 3
  misc_feature: MA Experiment 20001557 PARAMETER Experiment Name: At_Drought_Soil_Dry_P Parameter: Post-Treatment Value: Re-Water vs. No Drought
  misc_feature: MA Experiment 20001557 PARAMETER Experiment Name: At_Drought_Soil_Dry_P Parameter: Timepoint (day) Value: 13
  misc_feature: MA Experiment 20001557 PARAMETER Experiment Name: At_Drought_Soil_Dry_P Parameter: Treatment Value: Drought vs. No Drought
  misc_feature: MA Experiment ID: 20001904 Result: Down-regulated in Transcription
  misc_feature: MA Experiment 20001904 PARAMETER Experiment Name: At_Drought_Reproduction_P Parameter: Age (day) Value: 37
  misc_feature: MA Experiment 20001904 PARAMETER Experiment Name: At_Drought_Reproduction_P Parameter: Organism Value: A. thaliana
  misc_feature: MA Experiment 20001904 PARAMETER Experiment Name: At_Drought_Reproduction_P Parameter: Plant Line Value: WS
  misc_feature: MA Experiment 20001904 PARAMETER Experiment Name: At_Drought_Reproduction_P Parameter: Timepoint (day) Value: 7
  misc_feature: MA Experiment 20001904 PARAMETER Experiment Name: At_Drought_Reproduction_P Parameter: Tissue Value: Rosettes
  misc_feature: MA Experiment 20001904 PARAMETER Experiment Name: At_Drought_Reproduction_P Parameter: Treatment Value: Drought vs. No Drought
  misc_feature: MA Experiment ID: 20001905 Result: Down-regulated in Transcription
  misc_feature: MA Experiment 20001905 PARAMETER Experiment Name: At_Drought_Reproduction_P Parameter: Age (day) Value: 40
  misc_feature: MA Experiment 20001905 PARAMETER Experiment Name: At_Drought_Reproduction_P Parameter: Organism Value: A. thaliana
  misc_feature: MA Experiment 20001905 PARAMETER Experiment Name: At_Drought_Reproduction_P Parameter: Plant Line Value: WS
  misc_feature: MA Experiment 20001905 PARAMETER Experiment Name: At_Drought_Reproduction_P Parameter: Timepoint (day) Value: 10
  misc_feature: MA Experiment 20001905 PARAMETER Experiment Name: At_Drought_Reproduction_P Parameter: Tissue Value: Rosettes
  misc_feature: MA Experiment 20001905 PARAMETER Experiment Name: At_Drought_Reproduction_P Parameter: Treatment Value: Drought vs. No Drought
aaaacgcatttggtaggctgagagaaagaaagaaaaagataaagatggatcacgcagcagatgctcaccgtacggatttgatgaccattacaagattcgtgttgaatgaacaatcaaagtatccagaatctcgtggtgatttcaccattttgcttagtcacatcgttttgggttgcaaattcgtttgcagtgctgttaataaggctggtttggctaagttaattggacttgcaggggaaacaaacattcagggtgaagagcaaaagaaacttgatgtgctctctaatgatgtctttgtcaacgctttggttagcagtggtagaacttctgttcttgtctcggaggaagatgaggaagctacgtttgtggagccatccaagcgtggaaagtactgtgttgtttttgatccgcttgatggatcttcaaacattgactgtggtgtttccattggcacaatgttctgaaacctgggaatgaaatggtggctgcaggttattgtatgtacggaagctcctgcatgcttgtgttgagcactggaaccggtgtccacggatttacactggacccatctctaggagagttcattctaactcacccggacattaagattccaaataagggaaacatttattcggtgaatgaaggcaatgcgcagaactgggatggtccaactacaaagtatgtagagaaatgcaagtttcctaaagatggttctcctgcaaagtctctgagatacgtaggaagtatggtagctgatgttcatcgtacactactttatggaggaatcttcttgtacccggctgacaagaaaagccccaatggaaaattgcgtgtcttgtatgaagttttcccgatgtcgtttttgatggagcaagccggaggtcaggcctttacgggaaagaaaagggcgctagaccttgtcccgagaagatccatgagcgttctccgatatttcttggtagctacgatgatgtagaagagattaaagctctctatgctgaggaggaaaagaagaactaagcttctcattcttcttttattctcttactgtctctgtctctcttatttctatatacagtatcttcttctgatgagaagaacaacataactcatttacaaaaggaagatctttctttatctttaaatgcacataaaaatcttctttctttc

SEQ ID NO: 40702 - protein, 165 aa, Arabidopsis thaliana
  peptide (1)..(165): Ceres Seq. ID no. 12330305
  misc_feature (1)..(151): Pfam Name: Fructose-1-6-bisphosphatase Pfam Description: Fructose-1-6-bisphosphatase
  misc_feature (1)..(151): Homolog of NCBI NO: 5305145 NR Description: fructose-1,6-bisphosphatase [Pisum sativum]
  misc_feature (1)..(151): Homolog of NCBI NO: 6684169 NR Description: fructose-1,6-bisphosphatase [Porteresia coarctata]
  misc_feature (1)..(151): Homolog of NCBI NO: 3913640 NR Description: FRUCTOSE-1,6-BISPHOSPHATASE, CYTOSOLIC
  misc_feature (1)..(151): Homolog of NCBI NO: 1169586 NR Description: FRUCTOSE-1,6-BISPHOSPHATASE, CYTOSOLIC
  misc_feature (1)..(151): Homolog of NCBI NO: 4741918 NR Description: cytosolic fructose-1,6-bisphosphatase [Musa
  misc_feature (1)..(151): Homolog of NCBI NO: 20278691 NR Description: cytoplasmic fructose-1,6-bisphosphatase [Pisum
  misc_feature (1)..(150): Homolog of NCBI NO: 11139718 NR Description: cytosolic fructose-1,6-bisphosphatase [Beta
  misc_feature (1)..(151): Homolog of NCBI NO: 119748 NR Description: FRUCTOSE-1,6-BISPHOSPHATASE, CYTOSOLIC
  misc_feature (1)..(151): Homolog of NCBI NO: 1169585 NR Description: FRUCTOSE-1,6-BISPHOSPHATASE, CYTOSOLIC
  misc_feature (1)..(151): Homolog of NCBI NO: 15218438 NR Description: fructose 1,6-bisphosphatase, putative; protein
MVAAGYCMYGSSCMLVLSTGTGVHGFTLDPSLGEFILTHPDIKIPNKGNIYSVNEGNAQNWDGPTTKYVEKCKFPKDGSPAKSLRYVGSMVADVHRTLLYGGIFLYPADKKSPNGKLRVLYEVFPMSFLMEQAGGQAFTGKKRALDLVPRRSMSVLRYFLVATMM

SEQ ID NO: 40703 - protein, 158 aa, Arabidopsis thaliana
  peptide (1)..(158): Ceres Seq. ID no. 12330306
  misc_feature (1)..(144): Pfam Name: Fructose-1-6-bisphosphatase Pfam Description: Fructose-1-6-bisphosphatase
  misc_feature (1)..(144): Homolog of NCBI NO: 5305145 NR Description: fructose-1,6-bisphosphatase [Pisum sativum]
  misc_feature (1)..(144): Homolog of NCBI NO: 6684169 NR Description: fructose-1,6-bisphosphatase [Porteresia coarctata]
  misc_feature (1)..(144): Homolog of NCBI NO: 3913640 NR Description: FRUCTOSE-1,6-BISPHOSPHATASE, CYTOSOLIC
  misc_feature (1)..(144): Homolog of NCBI NO: 1169586 NR Description: FRUCTOSE-1,6-BISPHOSPHATASE, CYTOSOLIC
  misc_feature (1)..(144): Homolog of NCBI NO: 4741918 NR Description: cytosolic fructose-1,6-bisphosphatase [Musa
  misc_feature (1)..(144): Homolog of NCBI NO: 20278691 NR Description: cytoplasmic fructose-1,6-bisphosphatase [Pisum
  misc_feature (1)..(143): Homolog of NCBI NO: 11139718 NR Description: cytosolic fructose-1,6-bisphosphatase [Beta
  misc_feature (1)..(144): Homolog of NCBI NO: 119748 NR Description: FRUCTOSE-1,6-BISPHOSPHATASE, CYTOSOLIC
  misc_feature (1)..(144): Homolog of NCBI NO: 1169585 NR Description: FRUCTOSE-1,6-BISPHOSPHATASE, CYTOSOLIC
  misc_feature (1)..(144): Homolog of NCBI NO: 15218438 NR Description: fructose 1,6-bisphosphatase, putative; protein
MYGSSCMLVLSTGTGVHGFTLDPSLGEFILTHPDIKIPNKGNIYSVNEGNAQNWDGPTTKYVEKCKFPKDGSPAKSLRYVGSMVADVHRTLLYGGIFLYPADKKSPNGKLRVLYEVFPMSFLMEQAGGQAFTGKKRALDLVPRRSMSVLRYFLVATMM

SEQ ID NO: 40704 - protein, 153 aa, Arabidopsis thaliana
  peptide (1)..(153): Ceres Seq. ID no. 12330307
  misc_feature (27)..(153): Pfam Name: Fructose-1-6-bisphosphatase Pfam Description: Fructose-1-6-bisphosphatase
  misc_feature (27)..(153): Homolog of NCBI NO: 5305145 NR Description: fructose-1,6-bisphosphatase [Pisum sativum]
  misc_feature (15)..(153): Homolog of NCBI NO: 6684169 NR Description: fructose-1,6-bisphosphatase [Porteresia coarctata]
  misc_feature (15)..(153): Homolog of NCBI NO: 3913640 NR Description: FRUCTOSE-1,6-BISPHOSPHATASE, CYTOSOLIC
  misc_feature (15)..(153): Homolog of NCBI NO: 1169586 NR Description: FRUCTOSE-1,6-BISPHOSPHATASE, CYTOSOLIC
  misc_feature (15)..(153): Homolog of NCBI NO: 4741918 NR Description: cytosolic fructose-1,6-bisphosphatase [Musa
  misc_feature (15)..(153): Homolog of NCBI NO: 20278691 NR Description: cytoplasmic fructose-1,6-bisphosphatase [Pisum
  misc_feature (15)..(153): Homolog of NCBI NO: 11139718 NR Description: cytosolic fructose-1,6-bisphosphatase [Beta
  misc_feature (15)..(153): Homolog of NCBI NO: 119748 NR Description: FRUCTOSE-1,6-BISPHOSPHATASE, CYTOSOLIC
  misc_feature (15)..(153): Homolog of NCBI NO: 1169585 NR Description: FRUCTOSE-1,6-BISPHOSPHATASE, CYTOSOLIC
  misc_feature (15)..(153): Homolog of NCBI NO: 15218438 NR Description: fructose 1,6-bisphosphatase, putative; protein
NAFGRLRERKKKIKMDHAADAHRTDLMTITRFVLNEQSKYPESRGDFTILLSHIVLGCKFVCSAVNKAGLAKLIGLAGETNIQGEEQKKLDVLSNDVFVNALVSSGRTSVLVSEEDEEATFVEPSKRGKYCVVFDPLDGSSNIDCGVSIGTMF

SEQ ID NO: 40705 - DNA, 1472 bp, Arabidopsis thaliana
  misc_feature (1)..(1472): Ceres Seq. ID no. 12328434
  misc_feature: MA Experiment ID: 108473 Result: Down-regulated in Transcription
  misc_feature: MA Experiment 108473 PARAMETER Experiment Name: At_Drought_Flowers_cDNA_P Parameter: Timepoint (hr) Value: 7 d
  misc_feature: MA Experiment 108473 PARAMETER Experiment Name: At_Drought_Flowers_cDNA_P Parameter: Tissue Value: Flower
  misc_feature: MA Experiment 108473 PARAMETER Experiment Name: At_Drought_Flowers_cDNA_P Parameter: Treatment Value: Drought vs. No Drought
  misc_feature: MA Experiment ID: 108474 Result: Up-regulated in Transcription
  misc_feature: MA Experiment 108474 PARAMETER Experiment Name: At_Drought_Flowers_cDNA_P Parameter: Timepoint (hr) Value: null
  misc_feature: MA Experiment 108474 PARAMETER Experiment Name: At_Drought_Flowers_cDNA_P Parameter: Treatment Value: Drought vs. No Drought
  misc_feature: MA Experiment ID: 108501 Result: Down-regulated in Transcription
  misc_feature: MA Experiment 108501 PARAMETER Experiment Name: At_ap2_floral_buds_cDNA_P Parameter: Plant Line Value: ap2 (Ler.)
  misc_feature: MA Experiment 108501 PARAMETER Experiment Name: At_ap2_floral_buds_cDNA_P Parameter: Tissue Value: Closed Flower
  misc_feature: MA Experiment ID: 108608 Result: Up-regulated in Transcription
  misc_feature: MA Experiment 108608 PARAMETER Experiment Name: At_100uM_ABA_cDNA_P Parameter: Timepoint (hr) Value: 1
  misc_feature: MA Experiment 108608 PARAMETER Experiment Name: At_100uM_ABA_cDNA_P Parameter: Tissue Value: Aerial
  misc_feature: MA Experiment 108608 PARAMETER Experiment Name: At_100uM_ABA_cDNA_P Parameter: Treatment Value: 100uM ABA vs. No Treatment
  misc_feature: MA Experiment ID: 20000265 Result: Up-regulated in Transcription
  misc_feature: MA Experiment 20000265 PARAMETER Experiment Name: At_Open_Flower_P Parameter: Age (day) Value: 21
  misc_feature: MA Experiment 20000265 PARAMETER Experiment Name: At_Open_Flower_P Parameter: Plant Line Value: WS
  misc_feature: MA Experiment 20000265 PARAMETER Experiment Name: At_Open_Flower_P Parameter: Tissue Value: Closed Flower vs. Whole Plant
  misc_feature: MA Experiment ID: 20000286 Result: Up-regulated in Transcription
  misc_feature: MA Experiment 20000286 PARAMETER Experiment Name: At_Open_Flower_P Parameter: Age (day) Value: 21
  misc_feature: MA Experiment 20000286 PARAMETER Experiment Name: At_Open_Flower_P Parameter: Plant Line Value: WS
  misc_feature: MA Experiment 20000286 PARAMETER Experiment Name: At_Open_Flower_P Parameter: Tissue Value: Half Open vs. Whole Plant
  misc_feature: MA Experiment ID: 20001910 Result: Down-regulated in Transcription
  misc_feature: MA Experiment 20001910 PARAMETER Experiment Name: At_Drought_Reproduction_P Parameter: Age (day) Value: 37
  misc_feature: MA Experiment 20001910 PARAMETER Experiment Name: At_Drought_Reproduction_P Parameter: Organism Value: A. thaliana
  misc_feature: MA Experiment 20001910 PARAMETER Experiment Name: At_Drought_Reproduction_P Parameter: Plant Line Value: WS
  misc_feature: MA Experiment 20001910 PARAMETER Experiment Name: At_Drought_Reproduction_P Parameter: Timepoint (day) Value: 7
  misc_feature: MA Experiment 20001910 PARAMETER Experiment Name: At_Drought_Reproduction_P Parameter: Tissue Value: Flowers
  misc_feature: MA Experiment 20001910 PARAMETER Experiment Name: At_Drought_Reproduction_P Parameter: Treatment Value: Drought vs. No Drought
aaggttttgatgcttagtgaaaatggaaaaagaggcaacaaagatggtgaatggtggagttaagtcaaagtcacctaagggcagtcctgatttcctcggatataatttgagatatgtcaagcttggatacatttaccttctctctctctcacgtaccttttgtttcttccttcctcctcttcttcttctcttcatctttgtttctcgatttctcccaatcttggctttccctttgtctaccttcttcatcctcctcatctatcattatcttactccttcctctgtttttcttctcgatttctcctgttaccgcccacccgatcatctcaagatcacaaaaagcgacttcatcgagctggcaatgaagtctggtaacttcaacgagactgccatcgagcttcaaagaaaagtgctggaccaatcagggataggagaggagagctacatgccgagagtggtcttcaagcctggtcacagggtcaatcttcgtgatggtcgtgaagaagcagcaatggtgatctttggagcaattgatgaacttcttgcagcgaccaaaatcaatgtgaagcatatcaagatcctggtgctaaactgcggagtcctcaacaccacgccatctctatcggccatggtgattaaccattataagctgaggcataacacagagagctacaatcttggtggtatggggtgtagcgccggagtcatagccattgatttagccaaagatcttttaaacgctcatcaaggctcttacgctttggtggtgagcactgagatagtaagcttcacttggtactcaggtaatgacgtcgcgttgcttccaccaaattgcttctttcgaatgggagcagctgcagttatgctatctagtcggcgtatcgacagatggcgagccaaataccaacttatgcagctagtaagaacccataaaggcatggaagacacaagttacaagagcatagagttaagagaagacagagatgggaaacaaggactatatgtatctagagatgtaatggaagttgggcgccatgcactgaaagcaaacattgcaacgcttggtcgtcttgagccttcctttgaacatatatgcgtattagcatcgagtaagaaagtacttgatgacattcataaggatctcaagttgacagaagagaatatggaggcatcaagacggacattggagcgtttcgggaacacatcaagcagcagtatatggtacgagctggcttacctagaacacaaggcgaagatgaaaagaggagatagggtttggcaaatcggtttcgggtcagggtttaaatgcaatagtgttgtatggaaagccctaaaaaacattgaccctccaagacataacaacccatggaatctctgaggattcatcaaagttaacaattgtatgataacatgaataaaataacccaccaatgcaaaatccacaatttattcaaatagtgtgattgcatttg

SEQ ID NO: 40706 - protein, 451 aa, Arabidopsis thaliana
  peptide (1)..(451): Ceres Seq. ID no. 12328435
  misc_feature (298)..(438): Pfam Name: Chalcone and stilbene synthases, C-terminal domain Pfam Description: Chalcone and stilbene synthases, C-terminal
  misc_feature (353)..(449): Homolog of NCBI NO: 15223556 NR Description: very-long-chain fatty acid condensing enzyme
  misc_feature (12)..(357): Homolog of NCBI NO: 15223556 NR Description: very-long-chain fatty acid condensing enzyme
  misc_feature (353)..(449): Homolog of NCBI NO: 28864534 NR Description: fiddlehead-like protein [Tropaeolum majus]
  misc_feature (66)..(362): Homolog of NCBI NO: 28864534 NR Description: fiddlehead-like protein [Tropaeolum majus]
  misc_feature (353)..(449): Homolog of NCBI NO: 19351907 NR Description: putative beta-ketoacyl-CoA synthase [Antirrhinum
  misc_feature (66)..(350): Homolog of NCBI NO: 19351907 NR Description: putative beta-ketoacyl-CoA synthase [Antirrhinum
  misc_feature (353)..(449): Homolog of NCBI NO: 18447765 NR Description: fiddlehead-like protein [Gossypium hirsutum]
  misc_feature (66)..(362): Homolog of NCBI NO: 18447765 NR Description: fiddlehead-like protein [Gossypium hirsutum]
  misc_feature (8)..(451): Homolog of NCBI NO: 21536946 NR Description: beta-ketoacyl-CoA synthase like protein
  misc_feature (1)..(451): Homolog of NCBI NO: 15231151 NR Description: beta-ketoacyl-CoA synthase like protein
MEKEATKMVNGGVKSKSPKGSPDFLGYNLRYVKLGYIYLLSLSRTFCFFLPPLLLLFIFVSRFLPILAFPLSTFFILLIYHYLTPSSVFLLDFSCYRPPDHLKITKSDFIELAMKSGNFNETAIELQRKVLDQSGIGEESYMPRVVFKPGHRVNLRDGREEAAMVIFGAIDELLAATKINVKHIKILVLNCGVLNTTPSLSAMVINHYKLRHNTESYNLGGMGCSAGVIAIDLAKDLLNAHQGSYALVVSTEIVSFTWYSGNDVALLPPNCFFRMGAAAVMLSSRRIDRWRAKYQLMQLVRTHKGMEDTSYKSIELREDRDGKQGLYVSRDVMEVGRHALKANIATLGRLEPSFEHICVLASSKKVLDDIHKDLKLTEENMEASRRTLERFGNTSSSSIWYELAYLEHKAKMKRGDRVWQIGFGSGFKCNSVVWKALKNIDPPRHNNPWNL

SEQ ID NO: 40707 - protein, 444 aa, Arabidopsis thaliana
  peptide (1)..(444): Ceres Seq. ID no. 12328436
  misc_feature (291)..(431): Pfam Name: Chalcone and stilbene synthases, C-terminal domain Pfam Description: Chalcone and stilbene synthases, C-terminal
  misc_feature (346)..(442): Homolog of NCBI NO: 15223556 NR Description: very-long-chain fatty acid condensing enzyme
  misc_feature (5)..(350): Homolog of NCBI NO: 15223556 NR Description: very-long-chain fatty acid condensing enzyme
  misc_feature (346)..(442): Homolog of NCBI NO: 28864534 NR Description: fiddlehead-like protein [Tropaeolum majus]
  misc_feature (59)..(355): Homolog of NCBI NO: 28864534 NR Description: fiddlehead-like protein [Tropaeolum majus]
  misc_feature (346)..(442): Homolog of NCBI NO: 19351907 NR Description: putative beta-ketoacyl-CoA synthase [Antirrhinum
  misc_feature (59)..(343): Homolog of NCBI NO: 19351907 NR Description: putative beta-ketoacyl-CoA synthase [Antirrhinum
  misc_feature (346)..(442): Homolog of NCBI NO: 18447765 NR Description: fiddlehead-like protein [Gossypium hirsutum]
  misc_feature (59)..(355): Homolog of NCBI NO: 18447765 NR Description: fiddlehead-like protein [Gossypium hirsutum]
  misc_feature (1)..(444): Homolog of NCBI NO: 21536946 NR Description: beta-ketoacyl-CoA synthase like protein
  misc_feature (1)..(444): Homolog of NCBI NO: 15231151 NR Description: beta-ketoacyl-CoA synthase like protein
MVNGGVKSKSPKGSPDFLGYNLRYVKLGYIYLLSLSRTFCFFLPPLLLLFIFVSRFLPILAFPLSTFFILLIYHYLTPSSVFLLDFSCYRPPDHLKITKSDFIELAMKSGNFNETAIELQRKVLDQSGIGEESYMPRVVFKPGHRVNLRDGREEAAMVIFGAIDELLAATKINVKHIKILVLNCGVLNTTPSLSAMVINHYKLRHNTESYNLGGMGCSAGVIAIDLAKDLLNAHQGSYALVVSTEIVSFTWYSGNDVALLPPNCFFRMGAAAVMLSSRRIDRWRAKYQLMQLVRTHKGMEDTSYKSIELREDRDGKQGLYVSRDVMEVGRHALKANIATLGRLEPSFEHICVLASSKKVLDDIHKDLKLTEENMEASRRTLERFGNTSSSSIWYELAYLEHKAKMKRGDRVWQIGFGSGFKCNSVVWKALKNIDPPRHNNPWNL

SEQ ID NO: 40708 - protein, 338 aa, Arabidopsis thaliana
  peptide (1)..(338): Ceres Seq. ID no. 12328437
  misc_feature (185)..(325): Pfam Name: Chalcone and stilbene synthases, C-terminal domain Pfam Description: Chalcone and stilbene synthases, C-terminal
  misc_feature (240)..(336): Homolog of NCBI NO: 15223556 NR Description: very-long-chain fatty acid condensing enzyme
  misc_feature (1)..(244): Homolog of NCBI NO: 15223556 NR Description: very-long-chain fatty acid condensing enzyme
  misc_feature (240)..(336): Homolog of NCBI NO: 28864534 NR Description: fiddlehead-like protein [Tropaeolum majus]
  misc_feature (1)..(249): Homolog of NCBI NO: 28864534 NR Description: fiddlehead-like protein [Tropaeolum majus]
  misc_feature (240)..(336): Homolog of NCBI NO: 19351907 NR Description: putative beta-ketoacyl-CoA synthase [Antirrhinum
  misc_feature (1)..(237): Homolog of NCBI NO: 19351907 NR Description: putative beta-ketoacyl-CoA synthase [Antirrhinum
  misc_feature (240)..(336): Homolog of NCBI NO: 18447765 NR Description: fiddlehead-like protein [Gossypium hirsutum]
  misc_feature (1)..(249): Homolog of NCBI NO: 18447765 NR Description: fiddlehead-like protein [Gossypium hirsutum]
  misc_feature (1)..(338): Homolog of NCBI NO: 21536946 NR Description: beta-ketoacyl-CoA synthase like protein
  misc_feature (1)..(338): Homolog of NCBI NO: 15231151 NR Description: beta-ketoacyl-CoA synthase like protein
MKSGNFNETAIELQRKVLDQSGIGEESYMPRVVFKPGHRVNLRDGREEAAMVIFGAIDELLAATKINVKHIKILVLNCGVLNTTPSLSAMVINHYKLRHNTESYNLGGMGCSAGVIAIDLAKDLLNAHQGSYALVVSTEIVSFTWYSGNDVALLPPNCFFRMGAAAVMLSSRRIDRWRAKYQLMQLVRTHKGMEDTSYKSIELREDRDGKQGLYVSRDVMEVGRHALKANIATLGRLEPSFEHICVLASSKKVLDDIHKDLKLTEENMEASRRTLERFGNTSSSSIWYELAYLEHKAKMKRGDRVWQIGFGSGFKCNSVVWKALKNIDPPRHNNPWNL

SEQ ID NO: 40709 - DNA, 1928 bp, Arabidopsis thaliana
  misc_feature (1)..(1928): Ceres Seq. ID no. 12371153
  misc_feature: MA Experiment ID: 108464 Result: Up-regulated in Transcription
  misc_feature: MA Experiment 108464 PARAMETER Experiment Name: At_Germinating_Seeds_cDNA_P Parameter: Age (day) Value: 4 vs. 0
  misc_feature: MA Experiment 108464 PARAMETER Experiment Name: At_Germinating_Seeds_cDNA_P Parameter: Tissue Value: Germinating Seeds
  misc_feature: MA Experiment ID: 108473 Result: Down-regulated in Transcription
  misc_feature: MA Experiment 108473 PARAMETER Experiment Name: At_Drought_Flowers_cDNA_P Parameter: Timepoint (hr) Value: 7 d
  misc_feature: MA Experiment 108473 PARAMETER Experiment Name: At_Drought_Flowers_cDNA_P Parameter: Tissue Value: Flower
  misc_feature: MA Experiment 108473 PARAMETER Experiment Name: At_Drought_Flowers_cDNA_P Parameter: Treatment Value: Drought vs. No Drought
  misc_feature: MA Experiment ID: 108501 Result: Down-regulated in Transcription
  misc_feature: MA Experiment 108501 PARAMETER Experiment Name: At_ap2_floral_buds_cDNA_P Parameter: Plant Line Value: ap2 (Ler.)
  misc_feature: MA Experiment 108501 PARAMETER Experiment Name: At_ap2_floral_buds_cDNA_P Parameter: Tissue Value: Closed Flower
  misc_feature: MA Experiment ID: 108574 Result: Down-regulated in Transcription
  misc_feature: MA Experiment 108574 PARAMETER Experiment Name: At_Wounding__cDNA_P Parameter: Timepoint (hr) Value: 1
  misc_feature: MA Experiment 108574 PARAMETER Experiment Name: At_Wounding__cDNA_P Parameter: Tissue Value: Aerial
  misc_feature: MA Experiment 108574 PARAMETER Experiment Name: At_Wounding__cDNA_P Parameter: Treatment Value: Wounding vs. No Wounding
  misc_feature: MA Experiment ID: 108576 Result: Down-regulated in Transcription
  misc_feature: MA Experiment 108576 PARAMETER Experiment Name: At_42deg_Heat_cDNA_P Parameter: Temperature (deg C) Value: 42 vs. 22
  misc_feature: MA Experiment 108576 PARAMETER Experiment Name: At_42deg_Heat_cDNA_P Parameter: Timepoint (hr) Value: 1
  misc_feature: MA Experiment 108576 PARAMETER Experiment Name: At_42deg_Heat_cDNA_P Parameter: Tissue Value: Aerial
  misc_feature: MA Experiment ID: 108579 Result: Down-regulated in Transcription
  misc_feature: MA Experiment 108579 PARAMETER Experiment Name: At_4deg_Cold_cDNA_P Parameter: Temperature (deg C) Value: 4 vs. 22
  misc_feature: MA Experiment 108579 PARAMETER Experiment Name: At_4deg_Cold_cDNA_P Parameter: Timepoint (hr) Value: 6
  misc_feature: MA Experiment 108579 PARAMETER Experiment Name: At_4deg_Cold_cDNA_P Parameter: Tissue Value: Aerial
  misc_feature: MA Experiment ID: 108585 Result: Down-regulated in Transcription
  misc_feature: MA Experiment 108585 PARAMETER Experiment Name: At_5mM_NaNP_cDNA_P Parameter: Timepoint (hr) Value: 6
  misc_feature: MA Experiment 108585 PARAMETER Experiment Name: At_5mM_NaNP_cDNA_P Parameter: Tissue Value: Aerial
  misc_feature: MA Experiment 108585 PARAMETER Experiment Name: At_5mM_NaNP_cDNA_P Parameter: Treatment Value: null
  misc_feature: MA Experiment ID: 108595 Result: Down-regulated in Transcription
  misc_feature: MA Experiment 108595 PARAMETER Experiment Name: At_Ler-pi_Ovule_cDNA_P Parameter: Plant Line Value: null
  misc_feature: MA Experiment ID: 108609 Result: Down-regulated in Transcription
  misc_feature: MA Experiment 108609 PARAMETER Experiment Name: At_100uM_ABA_cDNA_P Parameter: Timepoint (hr) Value: 24
  misc_feature: MA Experiment 108609 PARAMETER Experiment Name: At_100uM_ABA_cDNA_P Parameter: Tissue Value: Aerial
  misc_feature: MA Experiment 108609 PARAMETER Experiment Name: At_100uM_ABA_cDNA_P Parameter: Treatment Value: 100uM ABA vs. No Treatment
  misc_feature: MA Experiment ID: 20000087 Result: Down-regulated in Transcription
  misc_feature: MA Experiment 20000087 PARAMETER Experiment Name: At_100uM_ABA_Mutants_cDNA_P Parameter: Plant Line Value: WS
  misc_feature: MA Experiment 20000087 PARAMETER Experiment Name: At_100uM_ABA_Mutants_cDNA_P Parameter: Timepoint (hr) Value: 6
  misc_feature: MA Experiment 20000087 PARAMETER Experiment Name: At_100uM_ABA_Mutants_cDNA_P Parameter: Tissue Value: Aerial
  misc_feature: MA Experiment 20000087 PARAMETER Experiment Name: At_100uM_ABA_Mutants_cDNA_P Parameter: Treatment Value: 100uM ABA vs. No Treatment
  misc_feature: MA Experiment ID: 20000111 Result: Down-regulated in Transcription
  misc_feature: MA Experiment 20000111 PARAMETER Experiment Name: At_42deg_Heat_cDNA_P Parameter: Temperature (deg C) Value: 42 vs. 22
  misc_feature: MA Experiment 20000111 PARAMETER Experiment Name: At_42deg_Heat_cDNA_P Parameter: Timepoint (hr) Value: 6
  misc_feature: MA Experiment 20000111 PARAMETER Experiment Name: At_42deg_Heat_cDNA_P Parameter: Tissue Value: Aerial
  misc_feature: MA Experiment ID: 20000112 Result: Down-regulated in Transcription
  misc_feature: MA Experiment 20000112 PARAMETER Experiment Name: At_42deg_Heat_cDNA_P Parameter: Temperature (deg C) Value: 42 vs. 22
  misc_feature: MA Experiment 20000112 PARAMETER Experiment Name: At_42deg_Heat_cDNA_P Parameter: Timepoint (hr) Value: 2
  misc_feature: MA Experiment 20000112 PARAMETER Experiment Name: At_42deg_Heat_cDNA_P Parameter: Tissue Value: Aerial
  misc_feature: MA Experiment ID: 20000113 Result: Down-regulated in Transcription
  misc_feature: MA Experiment 20000113 PARAMETER Experiment Name: At_42deg_Heat_cDNA_P Parameter: Temperature (deg C) Value: 42 vs. 22
  misc_feature: MA Experiment 20000113 PARAMETER Experiment Name: At_42deg_Heat_cDNA_P Parameter: Timepoint (hr) Value: 8
  misc_feature: MA Experiment 20000113 PARAMETER Experiment Name: At_42deg_Heat_cDNA_P Parameter: Tissue Value: Aerial
  misc_feature: MA Experiment ID: 20000117 Result: Down-regulated in Transcription
  misc_feature: MA Experiment 20000117 PARAMETER Experiment Name: At_100uM_ABA_Mutants_cDNA_P Parameter: Plant Line Value: Columbia
  misc_feature: MA Experiment 20000117 PARAMETER Experiment Name: At_100uM_ABA_Mutants_cDNA_P Parameter: Timepoint (hr) Value: 6
  misc_feature: MA Experiment 20000117 PARAMETER Experiment Name: At_100uM_ABA_Mutants_cDNA_P Parameter: Tissue Value: Aerial
  misc_feature: MA Experiment 20000117 PARAMETER Experiment Name: At_100uM_ABA_Mutants_cDNA_P Parameter: Treatment Value: 100uM ABA vs. No Treatment
  misc_feature: MA Experiment ID: 20000144 Result: Down-regulated in Transcription
  misc_feature: MA Experiment 20000144 PARAMETER Experiment Name: At_42deg_Heat_cDNA_P Parameter: Temperature (deg C) Value: 42 vs. 22
  misc_feature: MA Experiment 20000144 PARAMETER Experiment Name: At_42deg_Heat_cDNA_P Parameter: Timepoint (hr) Value: 1
  misc_feature: MA Experiment 20000144 PARAMETER Experiment Name: At_42deg_Heat_cDNA_P Parameter: Tissue Value: Aerial
  misc_feature: MA Experiment ID: 20000171 Result: Down-regulated in Transcription
  misc_feature: MA Experiment 20000171 PARAMETER Experiment Name: At_42deg_Heat_P Parameter: Age (day) Value: 14
  misc_feature: MA Experiment 20000171 PARAMETER Experiment Name: At_42deg_Heat_P Parameter: Organism Value: A. thaliana
  misc_feature: MA Experiment 20000171 PARAMETER Experiment Name: At_42deg_Heat_P Parameter: Plant Line Value: WS
  misc_feature: MA Experiment 20000171 PARAMETER Experiment Name: At_42deg_Heat_P Parameter: Temperature (deg C) Value: 42 vs. 22
  misc_feature: MA Experiment 20000171 PARAMETER Experiment Name: At_42deg_Heat_P Parameter: Timepoint (hr) Value: 1
  misc_feature: MA Experiment 20000171 PARAMETER Experiment Name: At_42deg_Heat_P Parameter: Tissue Value: Aerial
  misc_feature: MA Experiment ID: 20000173 Result: Down-regulated in Transcription
  misc_feature: MA Experiment 20000173 PARAMETER Experiment Name: At_42deg_Heat_P Parameter: Age (day) Value: 14
  misc_feature: MA Experiment 20000173 PARAMETER Experiment Name: At_42deg_Heat_P Parameter: Organism Value: A. thaliana
  misc_feature: MA Experiment 20000173 PARAMETER Experiment Name: At_42deg_Heat_P Parameter: Plant Line Value: WS
  misc_feature: MA Experiment 20000173 PARAMETER Experiment Name: At_42deg_Heat_P Parameter: Temperature (deg C) Value: 42 vs. 22
  misc_feature: MA Experiment 20000173 PARAMETER Experiment Name: At_42deg_Heat_P Parameter: Timepoint (hr) Value: 6
  misc_feature: MA Experiment 20000173 PARAMETER Experiment Name: At_42deg_Heat_P Parameter: Tissue Value: Aerial
  misc_feature: MA Experiment ID: 20000184 Result: Down-regulated in Transcription
  misc_feature: MA Experiment 20000184 PARAMETER Experiment Name: At_Shoots__P Parameter: Age (day) Value: 7
  misc_feature: MA Experiment 20000184 PARAMETER Experiment Name: At_Shoots__P Parameter: Tissue Value: Shoots vs. Whole Plant
  misc_feature: MA Experiment ID: 20000211 Result: Down-regulated in Transcription
  misc_feature: MA Experiment 20000211 PARAMETER Experiment Name: At_0.001percent_MeJA__P Parameter: Age (day) Value: 14
  misc_feature: MA Experiment 20000211 PARAMETER Experiment Name: At_0.001percent_MeJA__P Parameter: Organism Value: A. thaliana
  misc_feature: MA Experiment 20000211 PARAMETER Experiment Name: At_0.001percent_MeJA__P Parameter: Plant Line Value: WS
  misc_feature: MA Experiment 20000211 PARAMETER Experiment Name: At_0.001percent_MeJA__P Parameter: Timepoint (hr) Value: 1
  misc_feature: MA Experiment 20000211 PARAMETER Experiment Name: At_0.001percent_MeJA__P Parameter: Tissue Value: Aerial
  misc_feature: MA Experiment 20000211 PARAMETER Experiment Name: At_0.001percent_MeJA__P Parameter: Treatment Value: 0.001percent MeJA vs. No Treatment
  misc_feature: MA Experiment ID: 20000214 Result: Down-regulated in Transcription
  misc_feature: MA Experiment 20000214 PARAMETER Experiment Name: At_4deg_Cold_P Parameter: Timepoint (hr) Value: 6
  misc_feature: MA Experiment ID: 20000234 Result: Down-regulated in Transcription
  misc_feature: MA Experiment 20000234 PARAMETER Experiment Name: At_Siliques_P Parameter: Age (day) Value: 21
  misc_feature: MA Experiment 20000234 PARAMETER Experiment Name: At_Siliques_P Parameter: Organism Value: A. thaliana
  misc_feature: MA Experiment 20000234 PARAMETER Experiment Name: At_Siliques_P Parameter: Plant Line Value: WS
  misc_feature: MA Experiment 20000234 PARAMETER Experiment Name: At_Siliques_P Parameter: Tissue Value: Less Than 5mm Siliques vs. Whole Plant
  misc_feature: MA Experiment ID: 20000267 Result: Down-regulated in Transcription
  misc_feature: MA Experiment 20000267 PARAMETER Experiment Name: At_Drought_P Parameter: Age (day) Value: 7
  misc_feature: MA Experiment 20000267 PARAMETER Experiment Name: At_Drought_P Parameter: Organism Value: A. thaliana
  misc_feature: MA Experiment 20000267 PARAMETER Experiment Name: At_Drought_P Parameter: Plant Line Value: WS
  misc_feature: MA Experiment 20000267 PARAMETER Experiment Name: At_Drought_P Parameter: Timepoint (hr) Value: 6
  misc_feature: MA Experiment 20000267 PARAMETER Experiment Name: At_Drought_P Parameter: Tissue Value: Whole Plant
  misc_feature: MA Experiment 20000267 PARAMETER Experiment Name: At_Drought_P Parameter: Treatment Value: Drought vs. No Drought
  misc_feature: MA Experiment ID: 20000436 Result: Down-regulated in Transcription
  misc_feature: MA Experiment 20000436 PARAMETER Experiment Name: At_Drought_P Parameter: Age (day) Value: 7
  misc_feature: MA Experiment 20000436 PARAMETER Experiment Name: At_Drought_P Parameter: Organism Value: A. thaliana
  misc_feature: MA Experiment 20000436 PARAMETER Experiment Name: At_Drought_P Parameter: Plant Line Value: WS
  misc_feature: MA Experiment 20000436 PARAMETER Experiment Name: At_Drought_P Parameter: Timepoint (hr) Value: 12
  misc_feature: MA Experiment 20000436 PARAMETER Experiment Name: At_Drought_P Parameter: Tissue Value: Whole Plant
  misc_feature: MA Experiment 20000436 PARAMETER Experiment Name: At_Drought_P Parameter: Treatment Value: Drought vs. No Drought
  misc_feature: MA Experiment ID: 20000438 Result: Down-regulated in Transcription
  misc_feature: MA Experiment 20000438 PARAMETER Experiment Name: At_Shoots__P Parameter: Age (day) Value: 14
  misc_feature: MA Experiment 20000438 PARAMETER Experiment Name: At_Shoots__P Parameter: Tissue Value: Shoots vs. Whole Plant
  misc_feature: MA Experiment ID: 20000439 Result: Down-regulated in Transcription
  misc_feature: MA Experiment 20000439 PARAMETER Experiment Name: At_Roots__P Parameter: Age (day) Value: 14 vs. 21
  misc_feature: MA Experiment 20000439 PARAMETER Experiment Name: At_Roots__P Parameter: Organism Value: A. thaliana
  misc_feature: MA Experiment 20000439 PARAMETER Experiment Name: At_Roots__P Parameter: Tissue Value: Roots vs. Whole Plant
  misc_feature: MA Experiment ID: 20000452 Result: Down-regulated in Transcription
  misc_feature: MA Experiment 20000452 PARAMETER Experiment Name: At_CS6879_Shoots-Roots_P Parameter: Age (day) Value: 14
  misc_feature: MA Experiment 20000452 PARAMETER Experiment Name: At_CS6879_Shoots-Roots_P Parameter: Organism Value: A. thaliana
  misc_feature: MA Experiment 20000452 PARAMETER Experiment Name: At_CS6879_Shoots-Roots_P Parameter: Plant Line Value: CS6879 vs. WS
  misc_feature: MA Experiment 20000452 PARAMETER Experiment Name: At_CS6879_Shoots-Roots_P Parameter: Tissue Value: Shoots
  misc_feature: MA Experiment ID: 20000453 Result: Down-regulated in Transcription
  misc_feature: MA Experiment 20000453 PARAMETER Experiment Name: At_100uM_ABA_P Parameter: Age (day) Value: 15
  misc_feature: MA Experiment 20000453 PARAMETER Experiment Name: At_100uM_ABA_P Parameter: Organism Value: A. thaliana
  misc_feature: MA Experiment 20000453 PARAMETER Experiment Name: At_100uM_ABA_P Parameter: Plant Line Value: WS
  misc_feature: MA Experiment 20000453 PARAMETER Experiment Name: At_100uM_ABA_P Parameter: Timepoint (hr) Value: 24
  misc_feature: MA Experiment 20000453 PARAMETER Experiment Name: At_100uM_ABA_P Parameter: Tissue Value: Aerial
  misc_feature: MA Experiment 20000453 PARAMETER Experiment Name: At_100uM_ABA_P Parameter: Treatment Value: 100uM ABA vs. No Treatment
  misc_feature: MA Experiment ID: 20001248 Result: Up-regulated in Transcription
  misc_feature: MA Experiment 20001248 PARAMETER Experiment Name: At_Far-red-induction_P Parameter: Age (day) Value: 7
  misc_feature: MA Experiment 20001248 PARAMETER Experiment Name: At_Far-red-induction_P Parameter: Light Value: Far-red vs. White
  misc_feature: MA Experiment 20001248 PARAMETER Experiment Name: At_Far-red-induction_P Parameter: Organism Value: A. thaliana
  misc_feature: MA Experiment 20001248 PARAMETER Experiment Name: At_Far-red-induction_P Parameter: Plant Line Value: Columbia
  misc_feature: MA Experiment 20001248 PARAMETER Experiment Name: At_Far-red-induction_P Parameter: Timepoint (hr) Value: 4
  misc_feature: MA Experiment 20001248 PARAMETER Experiment Name: At_Far-red-induction_P Parameter: Tissue Value: Whole Plant
  misc_feature: MA Experiment ID: 20001450 Result: Up-regulated in Transcription
  misc_feature: MA Experiment 20001450 PARAMETER Experiment Name: At_Far-red-induction_P Parameter: Age (day) Value: 7
  misc_feature: MA Experiment 20001450 PARAMETER Experiment Name: At_Far-red-induction_P Parameter: Light Value: Far-red vs. White
  misc_feature: MA Experiment 20001450 PARAMETER Experiment Name: At_Far-red-induction_P Parameter: Organism Value: A. thaliana
  misc_feature: MA Experiment 20001450 PARAMETER Experiment Name: At_Far-red-induction_P Parameter: Plant Line Value: Columbia
  misc_feature: MA Experiment 20001450 PARAMETER Experiment Name: At_Far-red-induction_P Parameter: Timepoint (hr) Value: 8
  misc_feature: MA Experiment 20001450 PARAMETER Experiment Name: At_Far-red-induction_P Parameter: Tissue Value: Whole Plant
  misc_feature: MA Experiment ID: 20001451 Result: Up-regulated in Transcription
  misc_feature: MA Experiment 20001451 PARAMETER Experiment Name: At_Far-red-induction_P Parameter: Age (day) Value: 7
  misc_feature: MA Experiment 20001451 PARAMETER Experiment Name: At_Far-red-induction_P Parameter: Light Value: Far-red vs. White
  misc_feature: MA Experiment 20001451 PARAMETER Experiment Name: At_Far-red-induction_P Parameter: Organism Value: A. thaliana
  misc_feature: MA Experiment 20001451 PARAMETER Experiment Name: At_Far-red-induction_P Parameter: Plant Line Value: Columbia
  misc_feature: MA Experiment 20001451 PARAMETER Experiment Name: At_Far-red-induction_P Parameter: Timepoint (hr) Value: 24
  misc_feature: MA Experiment 20001451 PARAMETER Experiment Name: At_Far-red-induction_P Parameter: Tissue Value: Whole Plant
  misc_feature: MA Experiment ID: 20001554 Result: Down-regulated in Transcription
  misc_feature: MA Experiment 20001554 PARAMETER Experiment Name: At_Drought_Soil_Dry_P Parameter: Age (day) Value: 21
  misc_feature: MA Experiment 20001554 PARAMETER Experiment Name: At_Drought_Soil_Dry_P Parameter: Organism Value: A. thaliana
  misc_feature: MA Experiment 20001554 PARAMETER Experiment Name: At_Drought_Soil_Dry_P Parameter: Plant Line Value: WS
  misc_feature: MA Experiment 20001554 PARAMETER Experiment Name: At_Drought_Soil_Dry_P Parameter: Post Timepoint (hr) Value: None
  misc_feature: MA Experiment 20001554 PARAMETER Experiment Name: At_Drought_Soil_Dry_P Parameter: Post-Treatment Value: None
  misc_feature: MA Experiment 20001554 PARAMETER Experiment Name: At_Drought_Soil_Dry_P Parameter: Timepoint (day) Value: 7
  misc_feature: MA Experiment 20001554 PARAMETER Experiment Name: At_Drought_Soil_Dry_P Parameter: Treatment Value: Drought vs. No Drought
  misc_feature: MA Experiment ID: 20001555 Result: Down-regulated in Transcription
  misc_feature: MA Experiment 20001555 PARAMETER Experiment Name: At_Drought_Soil_Dry_P Parameter: Age (day) Value: 24
  misc_feature: MA Experiment 20001555 PARAMETER Experiment Name: At_Drought_Soil_Dry_P Parameter: Organism Value: A. thaliana
  misc_feature: MA Experiment 20001555 PARAMETER Experiment Name: At_Drought_Soil_Dry_P Parameter: Plant Line Value: WS
  misc_feature: MA Experiment 20001555 PARAMETER Experiment Name: At_Drought_Soil_Dry_P Parameter: Post Timepoint (hr) Value: None
  misc_feature: MA Experiment 20001555 PARAMETER Experiment Name: At_Drought_Soil_Dry_P Parameter: Post-Treatment Value: None
  misc_feature: MA Experiment 20001555 PARAMETER Experiment Name: At_Drought_Soil_Dry_P Parameter: Timepoint (day) Value: 10
  misc_feature: MA Experiment 20001555 PARAMETER Experiment Name: At_Drought_Soil_Dry_P Parameter: Treatment Value: Drought vs. No Drought
  misc_feature: MA Experiment ID: 20001556 Result: Down-regulated in Transcription
  misc_feature: MA Experiment 20001556 PARAMETER Experiment Name: At_Drought_Soil_Dry_P Parameter: Age (day) Value: 26
  misc_feature: MA Experiment 20001556 PARAMETER Experiment Name: At_Drought_Soil_Dry_P Parameter: Organism Value: A. thaliana
  misc_feature: MA Experiment 20001556 PARAMETER Experiment Name: At_Drought_Soil_Dry_P Parameter: Plant Line Value: WS
  misc_feature: MA Experiment 20001556 PARAMETER Experiment Name: At_Drought_Soil_Dry_P Parameter: Post Timepoint (hr) Value: None
  misc_feature: MA Experiment 20001556 PARAMETER Experiment Name: At_Drought_Soil_Dry_P Parameter: Post-Treatment Value: None
  misc_feature: MA Experiment 20001556 PARAMETER Experiment Name: At_Drought_Soil_Dry_P Parameter: Timepoint (day) Value: 12
  misc_feature: MA Experiment 20001556 PARAMETER Experiment Name: At_Drought_Soil_Dry_P Parameter: Treatment Value: Drought vs. No Drought
  misc_feature: MA Experiment ID: 20001559 Result: Down-regulated in Transcription
  misc_feature: MA Experiment 20001559 PARAMETER Experiment Name: At_Drought_Soil_Dry_P Parameter: Age (day) Value: 28
  misc_feature: MA Experiment 20001559 PARAMETER Experiment Name: At_Drought_Soil_Dry_P Parameter: Organism Value: A. thaliana
  misc_feature: MA Experiment 20001559 PARAMETER Experiment Name: At_Drought_Soil_Dry_P Parameter: Plant Line Value: WS
  misc_feature: MA Experiment 20001559 PARAMETER Experiment Name: At_Drought_Soil_Dry_P Parameter: Post Timepoint (hr) Value: 29
  misc_feature: MA Experiment 20001559 PARAMETER Experiment Name: At_Drought_Soil_Dry_P Parameter: Post-Treatment Value: Re-Water vs. No Drought
  misc_feature: MA Experiment 20001559 PARAMETER Experiment Name: At_Drought_Soil_Dry_P Parameter: Timepoint (day) Value: 14
  misc_feature: MA Experiment 20001559 PARAMETER Experiment Name: At_Drought_Soil_Dry_P Parameter: Treatment Value: Drought vs. No Drought
  misc_feature: MA Experiment ID: 20001904 Result: Down-regulated in Transcription
  misc_feature: MA Experiment 20001904 PARAMETER Experiment Name: At_Drought_Reproduction_P Parameter: Age (day) Value: 37
  misc_feature: MA Experiment 20001904 PARAMETER Experiment Name: At_Drought_Reproduction_P Parameter: Organism Value: A. thaliana
  misc_feature: MA Experiment 20001904 PARAMETER Experiment Name: At_Drought_Reproduction_P Parameter: Plant Line Value: WS
  misc_feature: MA Experiment 20001904 PARAMETER Experiment Name: At_Drought_Reproduction_P Parameter: Timepoint (day) Value: 7
  misc_feature: MA Experiment 20001904 PARAMETER Experiment Name: At_Drought_Reproduction_P Parameter: Tissue Value: Rosettes
  misc_feature: MA Experiment 20001904 PARAMETER Experiment Name: At_Drought_Reproduction_P Parameter: Treatment Value: Drought vs. No Drought
  misc_feature: MA Experiment ID: 20001905 Result: Down-regulated in Transcription
  misc_feature: MA Experiment 20001905 PARAMETER Experiment Name: At_Drought_Reproduction_P Parameter: Age (day) Value: 40
  misc_feature: MA Experiment 20001905 PARAMETER Experiment Name: At_Drought_Reproduction_P Parameter: Organism Value: A. thaliana
  misc_feature: MA Experiment 20001905 PARAMETER Experiment Name: At_Drought_Reproduction_P Parameter: Plant Line Value: WS
  misc_feature: MA Experiment 20001905 PARAMETER Experiment Name: At_Drought_Reproduction_P Parameter: Timepoint (day) Value: 10
  misc_feature: MA Experiment 20001905 PARAMETER Experiment Name: At_Drought_Reproduction_P Parameter: Tissue Value: Rosettes
  misc_feature: MA Experiment 20001905 PARAMETER Experiment Name: At_Drought_Reproduction_P Parameter: Treatment Value: Drought vs. No Drought
  misc_feature: MA Experiment ID: 20001906 Result: Down-regulated in Transcription
  misc_feature: MA Experiment 20001906 PARAMETER Experiment Name: At_Drought_Reproduction_P Parameter: Age (day) Value: 35
  misc_feature: MA Experiment 20001906 PARAMETER Experiment Name: At_Drought_Reproduction_P Parameter: Organism Value: A. thaliana
  misc_feature: MA Experiment 20001906 PARAMETER Experiment Name: At_Drought_Reproduction_P Parameter: Plant Line Value: WS
  misc_feature: MA Experiment 20001906 PARAMETER Experiment Name: At_Drought_Reproduction_P Parameter: Timepoint (day) Value: 5
  misc_feature: MA Experiment 20001906 PARAMETER Experiment Name: At_Drought_Reproduction_P Parameter: Tissue Value: Siliques
  misc_feature: MA Experiment 20001906 PARAMETER Experiment Name: At_Drought_Reproduction_P Parameter: Treatment Value: Drought vs. No Drought
  misc_feature: MA Experiment ID: 20001908 Result: Down-regulated in Transcription
  misc_feature: MA Experiment 20001908 PARAMETER Experiment Name: At_Drought_Reproduction_P Parameter: Age (day) Value: 40
  misc_feature: MA Experiment 20001908 PARAMETER Experiment Name: At_Drought_Reproduction_P Parameter: Organism Value: A. thaliana
  misc_feature: MA Experiment 20001908 PARAMETER Experiment Name: At_Drought_Reproduction_P Parameter: Plant Line Value: WS
  misc_feature: MA Experiment 20001908 PARAMETER Experiment Name: At_Drought_Reproduction_P Parameter: Timepoint (day) Value: 10
  misc_feature: MA Experiment 20001908 PARAMETER Experiment Name: At_Drought_Reproduction_P Parameter: Tissue Value: Siliques
  misc_feature: MA Experiment 20001908 PARAMETER Experiment Name: At_Drought_Reproduction_P Parameter: Treatment Value: Drought vs. No Drought
  misc_feature: MA Experiment ID: 20001911 Result: Down-regulated in Transcription
  misc_feature: MA Experiment 20001911 PARAMETER Experiment Name: At_Drought_Reproduction_P Parameter: Age (day) Value: 40
  misc_feature: MA Experiment 20001911 PARAMETER Experiment Name: At_Drought_Reproduction_P Parameter: Organism Value: A. thaliana
  misc_feature: MA Experiment 20001911 PARAMETER Experiment Name: At_Drought_Reproduction_P Parameter: Plant Line Value: WS
  misc_feature: MA Experiment 20001911 PARAMETER Experiment Name: At_Drought_Reproduction_P Parameter: Timepoint (day) Value: 10
  misc_feature: MA Experiment 20001911 PARAMETER Experiment Name: At_Drought_Reproduction_P Parameter: Tissue Value: Flowers
  misc_feature: MA Experiment 20001911 PARAMETER Experiment Name: At_Drought_Reproduction_P Parameter: Treatment Value: Drought vs. No Drought
atgcatcttactcacttcatcatctcttcttaaaccccaaaacaaacaaacaaacaaacaaaaaataccaaaacaaagaagaaaaaaaaaataactatggatcttctctttctctttttctctcttctcctctcttacctctttttcaagatctggaaactcatagactcaaagcaagacaaagattgctacattttagactaccaatgtcataaaccaaccgacgatcgaatggtgagcactcaattcagtggagagatcatttatcgaaaccaaaaccttggtttaaccgaatacaagttccttctcaaagccatagtaagctcagggattggagaacaaacctacgctccaagacttgtctttgaaggtcgagaagagcgtccttcgttacaagatgggatctccgagatggaagagttctacgtggacagcatcggaaaactcctggagagaaatcaaatatctcctaaagacatagacatcctcgtagtcaacgtctccatgctctcttcaacgccatctttagcttcaagaatcattaaccattacaagatgagagacgacgtcaaagtcttcaacttgaccgggatgggatgcagcgcaagtctaatctccgtagacattgtcaagaacatttttaagagctacgcaaacaagttagctcttgttgccacctccgagtctttgagccctaattggtatagcggaaacaaccgttcaatgatcttagccaactgtttgttccggtccggtggatgtgctattctcttgactaacaaacgtagcttgagaaagaaagcaatgtttaaactcaagtgtatggtacggactcaccatggagctagagaggagtcttataattgttgcatccaagccgaagatgaacaaggccgtgtcgggttttacttggggaagaatctaccaaaagccgctactcgtgcttttgtagaaaacctcaaggttataacacccaagattcttcccgtaaccgagcttataaggttcatgttaaagcttcttatcaagaaaatcaagattcgtcaaaaccctagcaagggctccacgaatctcccaccggggactccattaaaggcaggaatcaacttcaagaccgggatcgaacatttttgcatacataccggaggaaaagctgtgattgatgggattggacatagcttggatttaaacgagtatgatattgaacctgcgaggatgactcttcaccggtttggcaatacttcggcgagtagtttgtggtatgtgttggcttacatggaggccaagaagagattgaagagaggagatagagtttttatgataagctttggagctggttttaagtgtaatagctgcgtttgggaagttgtgagagatcttactggtggtgaatcaaaaggaaatgtgtggaatcattgcattgatgattatccaccaaaatcgattctgaatccttatttggagaagtttggctggattcaagatgaagatcctgacactttcaaggtccctgacgctttcatgtaaaacgtttacgcacaaaaacgcaaacgcaaacgcaaaaacaacacaaggtgatacaatattctctctttcttaatttcttcttttttgcctttagttaaaatttttacgtttttttgtttaaatggattggaaaggagatatgaatgtaaaagaaactttaattagttttttttttaatatgattttttttgggtgttataatttgttaattacatactttgaaataagggttttaagggacatgcacttccaatacgatgagaatttactaatttgccatcatattggaatgctgccttctttttttcttgttaaatgttgtatcaattttatattttttgtaatgttcatttttcactctatgttgtacttgtttcgcattaactcaagcttgccactgg

SEQ ID NO: 40710 - protein, 476 aa, Arabidopsis thaliana
  peptide (1)..(476): Ceres Seq. ID no. 12371154
  misc_feature (287)..(426): Pfam Name: Chalcone and stilbene synthases, C-terminal domain Pfam Description: Chalcone and stilbene synthases, C-terminal
  misc_feature (1)..(448): Homolog of NCBI NO: 3551960 NR Description: senescence-associated protein 15 [Hemerocallis
  misc_feature (12)..(450): Homolog of NCBI NO: 22329274 NR Description: fatty acid elongase 3-ketoacyl-CoA synthase 1
  misc_feature (12)..(450): Homolog of NCBI NO: 4091810 NR Description: fatty acid elongase 3-ketoacyl-CoA synthase 1
  misc_feature (3)..(472): Homolog of NCBI NO: 40882682 NR Description: putative fatty acid elongase
  misc_feature (1)..(464): Homolog of NCBI NO: 15238194 NR Description: fatty acid elongase - like protein; protein id:
  misc_feature (1)..(463): Homolog of NCBI NO: 37535300 NR Description: putative fatty acid elongase 3-ketoacyl-CoA
  misc_feature (1)..(468): Homolog of NCBI NO: 40882703 NR Description: putative fatty acid elongase
  misc_feature (1)..(476): Homolog of NCBI NO: 15222994 NR Description: fatty acid elongase 3-ketoacyl-CoA synthase,
  misc_feature (1)..(476): Homolog of NCBI NO: 21536949 NR Description: putative fatty acid elongase [Arabidopsis
  misc_feature (1)..(476): Homolog of NCBI NO: 15226916 NR Description: putative fatty acid elongase
MDLLFLFFSLLLSYLFFKIWKLIDSKQDKDCYILDYQCHKPTDDRMVSTQFSGEIIYRNQNLGLTEYKFLLKAIVSSGIGEQTYAPRLVFEGREERPSLQDGISEMEEFYVDSIGKLLERNQISPKDIDILVVNVSMLSSTPSLASRIINHYKMRDDVKVFNLTGMGCSASLISVDIVKNIFKSYANKLALVATSESLSPNWYSGNNRSMILANCLFRSGGCAILLTNKRSLRKKAMFKLKCMVRTHHGAREESYNCCIQAEDEQGRVGFYLGKNLPKAATRAFVENLKVITPKILPVTELIRFMLKLLIKKIKIRQNPSKGSTNLPPGTPLKAGINFKTGIEHFCIHTGGKAVIDGIGHSLDLNEYDIEPARMTLHRFGNTSASSLWYVLAYMEAKKRLKRGDRVFMISFGAGFKCNSCVWEVVRDLTGGESKGNVWNHCIDDYPPKSILNPYLEKFGWIQDEDPDTFKVPDAFM

SEQ ID NO: 40711 - protein, 431 aa, Arabidopsis thaliana
  peptide (1)..(431): Ceres Seq. ID no. 12371155
  misc_feature (242)..(381): Pfam Name: Chalcone and stilbene synthases, C-terminal domain Pfam Description: Chalcone and stilbene synthases, C-terminal
  misc_feature (1)..(403): Homolog of NCBI NO: 3551960 NR Description: senescence-associated protein 15 [Hemerocallis
  misc_feature (1)..(405): Homolog of NCBI NO: 22329274 NR Description: fatty acid elongase 3-ketoacyl-CoA synthase 1
  misc_feature (1)..(405): Homolog of NCBI NO: 4091810 NR Description: fatty acid elongase 3-ketoacyl-CoA synthase 1
  misc_feature (1)..(427): Homolog of NCBI NO: 40882682 NR Description: putative fatty acid elongase
  misc_feature (1)..(419): Homolog of NCBI NO: 15238194 NR Description: fatty acid elongase - like protein; protein id:
  misc_feature (1)..(418): Homolog of NCBI NO: 37535300 NR Description: putative fatty acid elongase 3-ketoacyl-CoA
  misc_feature (1)..(423): Homolog of NCBI NO: 40882703 NR Description: putative fatty acid elongase
  misc_feature (1)..(431): Homolog of NCBI NO: 15222994 NR Description: fatty acid elongase 3-ketoacyl-CoA synthase,
  misc_feature (1)..(431): Homolog of NCBI NO: 21536949 NR Description: putative fatty acid elongase [Arabidopsis
  misc_feature (1)..(431): Homolog of NCBI NO: 15226916 NR Description: putative fatty acid elongase
MVSTQFSGEIIYRNQNLGLTEYKFLLKAIVSSGIGEQTYAPRLVFEGREERPSLQDGISEMEEFYVDSIGKLLERNQISPKDIDILVVNVSMLSSTPSLASRIINHYKMRDDVKVFNLTGMGCSASLISVDIVKNIFKSYANKLALVATSESLSPNWYSGNNRSMILANCLFRSGGCAILLTNKRSLRKKAMFKLKCMVRTHHGAREESYNCCIQAEDEQGRVGFYLGKNLPKAATRAFVENLKVITPKILPVTELIRFMLKLLIKKIKIRQNPSKGSTNLPPGTPLKAGINFKTGIEHFCIHTGGKAVIDGIGHSLDLNEYDIEPARMTLHRFGNTSASSLWYVLAYMEAKKRLKRGDRVFMISFGAGFKCNSCVWEVVRDLTGGESKGNVWNHCIDDYPPKSILNPYLEKFGWIQDEDPDTFKVPDAFM

SEQ ID NO: 40712 - protein, 371 aa, Arabidopsis thaliana
  peptide (1)..(371): Ceres Seq. ID no. 12371156
  misc_feature (182)..(321): Pfam Name: Chalcone and stilbene synthases, C-terminal domain Pfam Description: Chalcone and stilbene synthases, C-terminal
  misc_feature (1)..(343): Homolog of NCBI NO: 3551960 NR Description: senescence-associated protein 15 [Hemerocallis
  misc_feature (1)..(345): Homolog of NCBI NO: 22329274 NR Description: fatty acid elongase 3-ketoacyl-CoA synthase 1
  misc_feature (1)..(345): Homolog of NCBI NO: 4091810 NR Description: fatty acid elongase 3-ketoacyl-CoA synthase 1
  misc_feature (1)..(367): Homolog of NCBI NO: 40882682 NR Description: putative fatty acid elongase
  misc_feature (1)..(359): Homolog of NCBI NO: 15238194 NR Description: fatty acid elongase - like protein; protein id:
  misc_feature (1)..(358): Homolog of NCBI NO: 37535300 NR Description: putative fatty acid elongase 3-ketoacyl-CoA
  misc_feature (1)..(363): Homolog of NCBI NO: 40882703 NR Description: putative fatty acid elongase
  misc_feature (1)..(371): Homolog of NCBI NO: 15222994 NR Description: fatty acid elongase 3-ketoacyl-CoA synthase,
  misc_feature (1)..(371): Homolog of NCBI NO: 21536949 NR Description: putative fatty acid elongase [Arabidopsis
  misc_feature (1)..(371): Homolog of NCBI NO: 15226916 NR Description: putative fatty acid elongase
MEEFYVDSIGKLLERNQISPKDIDILVVNVSMLSSTPSLASRIINHYKMRDDVKVFNLTGMGCSASLISVDIVKNIFKSYANKLALVATSESLSPNWYSGNNRSMILANCLFRSGGCAILLTNKRSLRKKAMFKLKCMVRTHHGAREESYNCCIQAEDEQGRVGFYLGKNLPKAATRAFVENLKVITPKILPVTELIRFMLKLLIKKIKIRQNPSKGSTNLPPGTPLKAGINFKTGIEHFCIHTGGKAVIDGIGHSLDLNEYDIEPARMTLHRFGNTSASSLWYVLAYMEAKKRLKRGDRVFMISFGAGFKCNSCVWEVVRDLTGGESKGNVWNHCIDDYPPKSILNPYLEKFGWIQDEDPDTFKVPDAFM

SEQ ID NO: 40713 - DNA, 1136 bp, Arabidopsis thaliana; identical to SEQ ID NO: 29803
  misc_feature (1)..(1136): Ceres Seq. ID no. 12330223
  misc_feature: MA Experiment ID: 108434 Result: Up-regulated in Transcription
  misc_feature: MA Experiment 108434 PARAMETER Experiment Name: At_Root_Tips_cDNA_P Parameter: Tissue Value: Root Tips
  misc_feature: MA Experiment ID: 20000185 Result: Up-regulated in Transcription
  misc_feature: MA Experiment 20000185 PARAMETER Experiment Name: At_Roots__P Parameter: Age (day) Value: 7 vs. 21
  misc_feature: MA Experiment 20000185 PARAMETER Experiment Name: At_Roots__P Parameter: Organism Value: A. thaliana
  misc_feature: MA Experiment 20000185 PARAMETER Experiment Name: At_Roots__P Parameter: Tissue Value: Roots vs. Whole Plant
  misc_feature: MA Experiment ID: 20000227 Result: Up-regulated in Transcription
  misc_feature: MA Experiment 20000227 PARAMETER Experiment Name: At_Root-Tips-vs-Tops_P Parameter: Tissue Value: Root Tips vs. Root Tops
  misc_feature: MA Experiment ID: 20000436 Result: Up-regulated in Transcription
  misc_feature: MA Experiment 20000436 PARAMETER Experiment Name: At_Drought_P Parameter: Age (day) Value: 7
  misc_feature: MA Experiment 20000436 PARAMETER Experiment Name: At_Drought_P Parameter: Organism Value: A. thaliana
  misc_feature: MA Experiment 20000436 PARAMETER Experiment Name: At_Drought_P Parameter: Plant Line Value: WS
  misc_feature: MA Experiment 20000436 PARAMETER Experiment Name: At_Drought_P Parameter: Timepoint (hr) Value: 12
  misc_feature: MA Experiment 20000436 PARAMETER Experiment Name: At_Drought_P Parameter: Tissue Value: Whole Plant
  misc_feature: MA Experiment 20000436 PARAMETER Experiment Name: At_Drought_P Parameter: Treatment Value: Drought vs. No Drought
  misc_feature: MA Experiment ID: 20000437 Result: Up-regulated in Transcription
  misc_feature: MA Experiment 20000437 PARAMETER Experiment Name: At_Drought_P Parameter: Age (day) Value: 8
  misc_feature: MA Experiment 20000437 PARAMETER Experiment Name: At_Drought_P Parameter: Organism Value: A. thaliana
  misc_feature: MA Experiment 20000437 PARAMETER Experiment Name: At_Drought_P Parameter: Plant Line Value: WS
  misc_feature: MA Experiment 20000437 PARAMETER Experiment Name: At_Drought_P Parameter: Timepoint (hr) Value: 24
  misc_feature: MA Experiment 20000437 PARAMETER Experiment Name: At_Drought_P Parameter: Tissue Value: Whole Plant
  misc_feature: MA Experiment 20000437 PARAMETER Experiment Name: At_Drought_P Parameter: Treatment Value: Drought vs. No Drought
  misc_feature: MA Experiment ID: 20001557 Result: Up-regulated in Transcription
  misc_feature: MA Experiment 20001557 PARAMETER Experiment Name: At_Drought_Soil_Dry_P Parameter: Age (day) Value: 27
  misc_feature: MA Experiment 20001557 PARAMETER Experiment Name: At_Drought_Soil_Dry_P Parameter: Organism Value: A. thaliana
  misc_feature: MA Experiment 20001557 PARAMETER Experiment Name: At_Drought_Soil_Dry_P Parameter: Plant Line Value: WS
  misc_feature: MA Experiment 20001557 PARAMETER Experiment Name: At_Drought_Soil_Dry_P Parameter: Post Timepoint (hr) Value: 3
  misc_feature: MA Experiment 20001557 PARAMETER Experiment Name: At_Drought_Soil_Dry_P Parameter: Post-Treatment Value: Re-Water vs. No Drought
  misc_feature: MA Experiment 20001557 PARAMETER Experiment Name: At_Drought_Soil_Dry_P Parameter: Timepoint (day) Value: 13
  misc_feature: MA Experiment 20001557 PARAMETER Experiment Name: At_Drought_Soil_Dry_P Parameter: Treatment Value: Drought vs. No Drought
  misc_feature: MA Experiment ID: 20001558 Result: Up-regulated in Transcription
  misc_feature: MA Experiment 20001558 PARAMETER Experiment Name: At_Drought_Soil_Dry_P Parameter: Age (day) Value: 27
  misc_feature: MA Experiment 20001558 PARAMETER Experiment Name: At_Drought_Soil_Dry_P Parameter: Organism Value: A. thaliana
  misc_feature: MA Experiment 20001558 PARAMETER Experiment Name: At_Drought_Soil_Dry_P Parameter: Plant Line Value: WS
  misc_feature: MA Experiment 20001558 PARAMETER Experiment Name: At_Drought_Soil_Dry_P Parameter: Post Timepoint (hr) Value: 6
  misc_feature: MA Experiment 20001558 PARAMETER Experiment Name: At_Drought_Soil_Dry_P Parameter: Post-Treatment Value: Re-Water vs. No Drought
  misc_feature: MA Experiment 20001558 PARAMETER Experiment Name: At_Drought_Soil_Dry_P Parameter: Timepoint (day) Value: 13
  misc_feature: MA Experiment 20001558 PARAMETER Experiment Name: At_Drought_Soil_Dry_P Parameter: Treatment Value: Drought vs. No Drought

SEQ ID NO: 40714 - protein, 343 aa, Arabidopsis thaliana; identical to SEQ ID NO: 29804
  peptide (1)..(343): Ceres Seq. ID no. 12330224
  misc_feature (66)..(340): Homolog of NCBI NO: 34899190 NR Description: alcohol dehydrogenase-like protein
  misc_feature (61)..(336): Homolog of NCBI NO: 34899216 NR Description: alcohol dehydrogenase-like protein
  misc_feature (35)..(341): Homolog of NCBI NO: 34899188 NR Description: similar to alcohol dehydrogenase
  misc_feature (64)..(339): Homolog of NCBI NO: 33146507 NR Description: putative short-chain alcohol dehydrogenase
  misc_feature (74)..(339): Homolog of NCBI NO: 15529184 NR Description: AT3g26770/MDJ14_21 [Arabidopsis thaliana]
  misc_feature (74)..(339): Homolog of NCBI NO: 18405088 NR Description: putative short chain alcohol dehydrogenase
  misc_feature (55)..(338): Homolog of NCBI NO: 30688484 NR Description: short-chain dehydrogenase/reductase family
  misc_feature (177)..(343): Homolog of NCBI NO: 21618306 NR Description: unknown [Arabidopsis thaliana]
  misc_feature (76)..(343): Homolog of NCBI NO: 18412155 NR Description: putative alcohol dehydrogenase; protein id:
  misc_feature (76)..(343): Homolog of NCBI NO: 25283123 NR Description: probable alcohol dehydrogenase [imported] -
  misc_feature (66)..(340): Homolog of NCBI NO: 34899190 NR Description: alcohol dehydrogenase-like protein
  misc_feature (61)..(336): Homolog of NCBI NO: 34899216 NR Description: alcohol dehydrogenase-like protein
  misc_feature (35)..(341): Homolog of NCBI NO: 34899188 NR Description: similar to alcohol dehydrogenase
  misc_feature (64)..(339): Homolog of NCBI NO: 33146507 NR Description: putative short-chain alcohol dehydrogenase
  misc_feature (74)..(339): Homolog of NCBI NO: 15529184 NR Description: AT3g26770/MDJ14_21 [Arabidopsis thaliana]
  misc_feature (74)..(339): Homolog of NCBI NO: 18405088 NR Description: putative short chain alcohol dehydrogenase
  misc_feature (55)..(338): Homolog of NCBI NO: 30688484 NR Description: short-chain dehydrogenase/reductase family
  misc_feature (177)..(343): Homolog of NCBI NO: 21618306 NR Description: unknown [Arabidopsis thaliana]
  misc_feature (76)..(343): Homolog of NCBI NO: 18412155 NR Description: putative alcohol dehydrogenase; protein id:
  misc_feature (76)..(343): Homolog of NCBI NO: 25283123 NR Description: probable alcohol dehydrogenase [imported] -

SEQ ID NO: 40715 - protein, 300 aa, Arabidopsis thaliana; identical to SEQ ID NO: 29805
  peptide (1)..(300): Ceres Seq. ID no. 12330225
  misc_feature (23)..(297): Homolog of NCBI NO: 34899190 NR Description: alcohol dehydrogenase-like protein
  misc_feature (18)..(293): Homolog of NCBI NO: 34899216 NR Description: alcohol dehydrogenase-like protein
  misc_feature (1)..(298): Homolog of NCBI NO: 34899188 NR Description: similar to alcohol dehydrogenase
  misc_feature (21)..(296): Homolog of NCBI NO: 33146507 NR Description: putative short-chain alcohol dehydrogenase
  misc_feature (31)..(296): Homolog of NCBI NO: 15529184 NR Description: AT3g26770/MDJ14_21 [Arabidopsis thaliana]
  misc_feature (31)..(296): Homolog of NCBI NO: 18405088 NR Description: putative short chain alcohol dehydrogenase
  misc_feature (12)..(295): Homolog of NCBI NO: 30688484 NR Description: short-chain dehydrogenase/reductase family
  misc_feature (134)..(300): Homolog of NCBI NO: 21618306 NR Description: unknown [Arabidopsis thaliana]
  misc_feature (33)..(300): Homolog of NCBI NO: 18412155 NR Description: putative alcohol dehydrogenase; protein id:
  misc_feature (33)..(300): Homolog of NCBI NO: 25283123 NR Description: probable alcohol dehydrogenase [imported] -
  misc_feature (23)..(297): Homolog of NCBI NO: 34899190 NR Description: alcohol dehydrogenase-like protein
  misc_feature (18)..(293): Homolog of NCBI NO: 34899216 NR Description: alcohol dehydrogenase-like protein
  misc_feature (1)..(298): Homolog of NCBI NO: 34899188 NR Description: similar to alcohol dehydrogenase
  misc_feature (21)..(296): Homolog of NCBI NO: 33146507 NR Description: putative short-chain alcohol dehydrogenase
  misc_feature (31)..(296): Homolog of NCBI NO: 15529184 NR Description: AT3g26770/MDJ14_21 [Arabidopsis thaliana]
  misc_feature (31)..(296): Homolog of NCBI NO: 18405088 NR Description: putative short chain alcohol dehydrogenase
  misc_feature (12)..(295): Homolog of NCBI NO: 30688484 NR Description: short-chain dehydrogenase/reductase family
  misc_feature (134)..(300): Homolog of NCBI NO: 21618306 NR Description: unknown [Arabidopsis thaliana]
  misc_feature (33)..(300): Homolog of NCBI NO: 18412155 NR Description: putative alcohol dehydrogenase; protein id:
  misc_feature (33)..(300): Homolog of NCBI NO: 25283123 NR Description: probable alcohol dehydrogenase [imported] -

SEQ ID NO: 40716 - protein, 186 aa, Arabidopsis thaliana; identical to SEQ ID NO: 29806
  peptide (1)..(186): Ceres Seq. ID no. 12330226
  misc_feature (1)..(183): Homolog of NCBI NO: 34899190 NR Description: alcohol dehydrogenase-like protein
  misc_feature (1)..(179): Homolog of NCBI NO: 34899216 NR Description: alcohol dehydrogenase-like protein
  misc_feature (1)..(184): Homolog of NCBI NO: 34899188 NR Description: similar to alcohol dehydrogenase
  misc_feature (1)..(182): Homolog of NCBI NO: 33146507 NR Description: putative short-chain alcohol dehydrogenase
  misc_feature (1)..(182): Homolog of NCBI NO: 15529184 NR Description: AT3g26770/MDJ14_21 [Arabidopsis thaliana]
  misc_feature (1)..(182): Homolog of NCBI NO: 18405088 NR Description: putative short chain alcohol dehydrogenase
  misc_feature (1)..(181): Homolog of NCBI NO: 30688484 NR Description: short-chain dehydrogenase/reductase family
  misc_feature (20)..(186): Homolog of NCBI NO: 21618306 NR Description: unknown [Arabidopsis thaliana]
  misc_feature (1)..(186): Homolog of NCBI NO: 18412155 NR Description: putative alcohol dehydrogenase; protein id:
  misc_feature (1)..(186): Homolog of NCBI NO: 25283123 NR Description: probable alcohol dehydrogenase [imported] -
  misc_feature (1)..(183): Homolog of NCBI NO: 34899190 NR Description: alcohol dehydrogenase-like protein
  misc_feature (1)..(179): Homolog of NCBI NO: 34899216 NR Description: alcohol dehydrogenase-like protein
  misc_feature (1)..(184): Homolog of NCBI NO: 34899188 NR Description: similar to alcohol dehydrogenase
  misc_feature (1)..(182): Homolog of NCBI NO: 33146507 NR Description: putative short-chain alcohol dehydrogenase
  misc_feature (1)..(182): Homolog of NCBI NO: 15529184 NR Description: AT3g26770/MDJ14_21 [Arabidopsis thaliana]
  misc_feature (1)..(182): Homolog of NCBI NO: 18405088 NR Description: putative short chain alcohol dehydrogenase
  misc_feature (1)..(181): Homolog of NCBI NO: 30688484 NR Description: short-chain dehydrogenase/reductase family
  misc_feature (20)..(186): Homolog of NCBI NO: 21618306 NR Description: unknown [Arabidopsis thaliana]
  misc_feature (1)..(186): Homolog of NCBI NO: 18412155 NR Description: putative alcohol dehydrogenase; protein id:
  misc_feature (1)..(186): Homolog of NCBI NO: 25283123 NR Description: probable alcohol dehydrogenase [imported] -

SEQ ID NO: 40717 - DNA, 1152 bp, Arabidopsis thaliana
  misc_feature (1)..(1152): Ceres Seq. ID no. 12327583
  misc_feature: MA Experiment ID: 108434 Result: Down-regulated in Transcription
  misc_feature: MA Experiment 108434 PARAMETER Experiment Name: At_Root_Tips_cDNA_P Parameter: Tissue Value: Root Tips
  misc_feature: MA Experiment ID: 108461 Result: Down-regulated in Transcription
  misc_feature: MA Experiment 108461 PARAMETER Experiment Name: At_Germinating_Seeds_cDNA_P Parameter: Age (day) Value: 1 vs. 0
  misc_feature: MA Experiment 108461 PARAMETER Experiment Name: At_Germinating_Seeds_cDNA_P Parameter: Tissue Value: Germinating Seeds
  misc_feature: MA Experiment ID: 108462 Result: Down-regulated in Transcription
  misc_feature: MA Experiment 108462 PARAMETER Experiment Name: At_Germinating_Seeds_cDNA_P Parameter: Age (day) Value: 2 vs. 0
  misc_feature: MA Experiment 108462 PARAMETER Experiment Name: At_Germinating_Seeds_cDNA_P Parameter: Tissue Value: Germinating Seeds
  misc_feature: MA Experiment ID: 108463 Result: Down-regulated in Transcription
  misc_feature: MA Experiment 108463 PARAMETER Experiment Name: At_Germinating_Seeds_cDNA_P Parameter: Age (day) Value: 3 vs. 0
  misc_feature: MA Experiment 108463 PARAMETER Experiment Name: At_Germinating_Seeds_cDNA_P Parameter: Tissue Value: Germinating Seeds
  misc_feature: MA Experiment ID: 108464 Result: Down-regulated in Transcription
  misc_feature: MA Experiment 108464 PARAMETER Experiment Name: At_Germinating_Seeds_cDNA_P Parameter: Age (day) Value: 4 vs. 0
  misc_feature: MA Experiment 108464 PARAMETER Experiment Name: At_Germinating_Seeds_cDNA_P Parameter: Tissue Value: Germinating Seeds
  misc_feature: MA Experiment ID: 108577 Result: Down-regulated in Transcription
  misc_feature: MA Experiment 108577 PARAMETER Experiment Name: At_42deg_Heat_cDNA_P Parameter: Temperature (deg C) Value: 42 vs. 22
  misc_feature: MA Experiment 108577 PARAMETER Experiment Name: At_42deg_Heat_cDNA_P Parameter: Timepoint (hr) Value: 6
  misc_feature: MA Experiment 108577 PARAMETER Experiment Name: At_42deg_Heat_cDNA_P Parameter: Tissue Value: Aerial
  misc_feature: MA Experiment ID: 108594 Result: Down-regulated in Transcription
  misc_feature: MA Experiment 108594 PARAMETER Experiment Name: At_Ler-rhl_Root_cDNA_P Parameter: Plant Line Value: null
  misc_feature: MA Experiment ID: 20000227 Result: Down-regulated in Transcription
  misc_feature: MA Experiment 20000227 PARAMETER Experiment Name: At_Root-Tips-vs-Tops_P Parameter: Tissue Value: Root Tips vs. Root Tops
  misc_feature: MA Experiment ID: 20000265 Result: Up-regulated in Transcription
  misc_feature: MA Experiment 20000265 PARAMETER Experiment Name: At_Open_Flower_P Parameter: Age (day) Value: 21
  misc_feature: MA Experiment 20000265 PARAMETER Experiment Name: At_Open_Flower_P Parameter: Plant Line Value: WS
  misc_feature: MA Experiment 20000265 PARAMETER Experiment Name: At_Open_Flower_P Parameter: Tissue Value: Closed Flower vs. Whole Plant
  misc_feature: MA Experiment ID: 20000453 Result: Down-regulated in Transcription
  misc_feature: MA Experiment 20000453 PARAMETER Experiment Name: At_100uM_ABA_P Parameter: Age (day) Value: 15
  misc_feature: MA Experiment 20000453 PARAMETER Experiment Name: At_100uM_ABA_P Parameter: Organism Value: A. thaliana
  misc_feature: MA Experiment 20000453 PARAMETER Experiment Name: At_100uM_ABA_P Parameter: Plant Line Value: WS
  misc_feature: MA Experiment 20000453 PARAMETER Experiment Name: At_100uM_ABA_P Parameter: Timepoint (hr) Value: 24
  misc_feature: MA Experiment 20000453 PARAMETER Experiment Name: At_100uM_ABA_P Parameter: Tissue Value: Aerial
  misc_feature: MA Experiment 20000453 PARAMETER Experiment Name: At_100uM_ABA_P Parameter: Treatment Value: 100uM ABA vs. No Treatment
aacacaaagtcataacagtcgtttaaagtctgatcctttcttttttatttttctttagtgtgtaaaaagagaaatacagttatggcggagatctcgggaaacggtggtgatgctagagacggagctgtggtggtcaatctcaaggaagaagacgaacaacaacaacaacaacaagctattcataaacccttgaagaaacaagactctctcctctctatctctgtccctttcttacaaaagttgatggcggaggttttgggaacatacttcttgatattcgccggttgtgccgcggtggctgtaaacacacaacatgacaaagccgtgactcttccagggatcgccatcgtttggggacttaccgtcatggtccttgtttactctctcggtcacatctccggtgctcatttcaatccggccgtcacaatcgcattcgcttcttgcggccgtttccctcttaaacaggttccggcttatgtgatatcacaagtgatcggatcaacgctagcggcggcgactttacggctcttgttcggacttgatcaagatgtttgtagtgggaaacacgatgtgttcgtcggaacattaccatctggatcgaatttgcagtcgtttgtgatcgagtttatcattactttctacctaatgttcgttatttctggcgttgccaccgataatagagcgatcggagaacttgctggactagcagtaggatcaacagtgctacttaacgtgataattgccgggccggtatcgggagcatcgatgaatccaggacgaagtttaggacctgcaatggtctacagttgctacagaggactttggatctacatagtttctccaattgttggtgcagtttcgggtgcgtgggtttataacatggttcgatatactgataagccattacgagaaataactaaaagcggttcttttttaaagacagtgcgaaacggtagctctcgttaagaaaaagaaaaacatgactatgttgtactagtcatcggaggttaagttgtatcactaaagaagtaactggaatattttgtattaaagtgtttttaaatttggattaccgcaaatggataaacatttatggtatgtgacgaatatgtaactgatctataacgagtttggccatatctaattacgtgc

SEQ ID NO: 40718 - protein, 294 aa, Arabidopsis thaliana
  peptide (1)..(294): Ceres Seq. ID no. 12327584
  misc_feature (35)..(286): Homolog of NCBI NO: 541944 NR Description: nodulin-26 - soybean
  misc_feature (7)..(293): Homolog of NCBI NO: 1076748 NR Description: major intrinsic protein - rice
  misc_feature (46)..(291): Homolog of NCBI NO: 17025880 NR Description: multifunctional aquaporin [Medicago truncatula]
  misc_feature (37)..(286): Homolog of NCBI NO: 5139541 NR Description: nodulin26-like major intrinsic protein [Pisum
  misc_feature (53)..(293): Homolog of NCBI NO: 7449725 NR Description: nodulin-26-like protein F13C5.200 - Arabidopsis
  misc_feature (17)..(293): Homolog of NCBI NO: 2677614 NR Description: NLM1 protein (NodLikeMip1) [Arabidopsis thaliana]
  misc_feature (1)..(293): Homolog of NCBI NO: 25324917 NR Description: nodulin-26-like protein [imported] - Arabidopsis
  misc_feature (1)..(293): Homolog of NCBI NO: 18415224 NR Description: nodulin-26 - like protein
  misc_feature (1)..(294): Homolog of NCBI NO: 21536953 NR Description: major intrinsic protein (MIP)- like [Arabidopsis
  misc_feature (1)..(294): Homolog of NCBI NO: 15234059 NR Description: major intrinsic protein (MIP)- like
MAEISGNGGDARDGAVVVNLKEEDEQQQQQQAIHKPLKKQDSLLSISVPFLQKLMAEVLGTYFLIFAGCAAVAVNTQHDKAVTLPGIAIVWGLTVMVLVYSLGHISGAHFNPAVTIAFASCGRFPLKQVPAYVISQVIGSTLAAATLRLLFGLDQDVCSGKHDVFVGTLPSGSNLQSFVIEFIITFYLMFVISGVATDNRAIGELAGLAVGSTVLLNVIIAGPVSGASMNPGRSLGPAMVYSCYRGLWIYIVSPIVGAVSGAWVYNMVRYTDKPLREITKSGSFLKTVRNGSSR

SEQ ID NO: 40719 - protein, 240 aa, Arabidopsis thaliana
  peptide (1)..(240): Ceres Seq. ID no. 12327585
  misc_feature (1)..(232): Homolog of NCBI NO: 541944 NR Description: nodulin-26 - soybean
  misc_feature (1)..(239): Homolog of NCBI NO: 1076748 NR Description: major intrinsic protein - rice
  misc_feature (1)..(237): Homolog of NCBI NO: 17025880 NR Description: multifunctional aquaporin [Medicago truncatula]
  misc_feature (1)..(232): Homolog of NCBI NO: 5139541 NR Description: nodulin26-like major intrinsic protein [Pisum
  misc_feature (1)..(239): Homolog of NCBI NO: 7449725 NR Description: nodulin-26-like protein F13C5.200 - Arabidopsis
  misc_feature (1)..(239): Homolog of NCBI NO: 2677614 NR Description: NLM1 protein (NodLikeMip1) [Arabidopsis thaliana]
  misc_feature (1)..(239): Homolog of NCBI NO: 25324917 NR Description: nodulin-26-like protein [imported] - Arabidopsis
  misc_feature (1)..(239): Homolog of NCBI NO: 18415224 NR Description: nodulin-26 - like protein
  misc_feature (1)..(240): Homolog of NCBI NO: 21536953 NR Description: major intrinsic protein (MIP)- like [Arabidopsis
  misc_feature (1)..(240): Homolog of NCBI NO: 15234059 NR Description: major intrinsic protein (MIP)- like
MAEVLGTYFLIFAGCAAVAVNTQHDKAVTLPGIAIVWGLTVMVLVYSLGHISGAHFNPAVTIAFASCGRFPLKQVPAYVISQVIGSTLAAATLRLLFGLDQDVCSGKHDVFVGTLPSGSNLQSFVIEFIITFYLMFVISGVATDNRAIGELAGLAVGSTVLLNVIIAGPVSGASMNPGRSLGPAMVYSCYRGLWIYIVSPIVGAVSGAWVYNMVRYTDKPLREITKSGSFLKTVRNGSSR

SEQ ID NO: 40720 - protein, 199 aa, Arabidopsis thaliana
  peptide (1)..(199): Ceres Seq. ID no. 12327586
  misc_feature (1)..(191): Homolog of NCBI NO: 541944 NR Description: nodulin-26 - soybean
  misc_feature (1)..(198): Homolog of NCBI NO: 1076748 NR Description: major intrinsic protein - rice
  misc_feature (1)..(196): Homolog of NCBI NO: 17025880 NR Description: multifunctional aquaporin [Medicago truncatula]
  misc_feature (1)..(191): Homolog of NCBI NO: 5139541 NR Description: nodulin26-like major intrinsic protein [Pisum
  misc_feature (1)..(198): Homolog of NCBI NO: 7449725 NR Description: nodulin-26-like protein F13C5.200 - Arabidopsis
  misc_feature (1)..(198): Homolog of NCBI NO: 2677614 NR Description: NLM1 protein (NodLikeMip1) [Arabidopsis thaliana]
  misc_feature (1)..(198): Homolog of NCBI NO: 25324917 NR Description: nodulin-26-like protein [imported] - Arabidopsis
  misc_feature (1)..(198): Homolog of NCBI NO: 18415224 NR Description: nodulin-26 - like protein
  misc_feature (1)..(199): Homolog of NCBI NO: 21536953 NR Description: major intrinsic protein (MIP)- like [Arabidopsis
  misc_feature (1)..(199): Homolog of NCBI NO: 15234059 NR Description: major intrinsic protein (MIP)- like
MVLVYSLGHISGAHFNPAVTIAFASCGRFPLKQVPAYVISQVIGSTLAAATLRLLFGLDQDVCSGKHDVFVGTLPSGSNLQSFVIEFIITFYLMFVISGVATDNRAIGELAGLAVGSTVLLNVIIAGPVSGASMNPGRSLGPAMVYSCYRGLWIYIVSPIVGAVSGAWVYNMVRYTDKPLREITKSGSFLKTVRNGSSR

SEQ ID NO: 40721 - DNA, 1319 bp, Arabidopsis thaliana
  misc_feature (1)..(1319): Ceres Seq. ID no. 12329728
  misc_feature: MA Experiment ID: 108462 Result: Up-regulated in Transcription
  misc_feature: MA Experiment 108462 PARAMETER Experiment Name: At_Germinating_Seeds_cDNA_P Parameter: Age (day) Value: 2 vs. 0
  misc_feature: MA Experiment 108462 PARAMETER Experiment Name: At_Germinating_Seeds_cDNA_P Parameter: Tissue Value: Germinating Seeds
  misc_feature: MA Experiment ID: 108463 Result: Up-regulated in Transcription
  misc_feature: MA Experiment 108463 PARAMETER Experiment Name: At_Germinating_Seeds_cDNA_P Parameter: Age (day) Value: 3 vs. 0
  misc_feature: MA Experiment 108463 PARAMETER Experiment Name: At_Germinating_Seeds_cDNA_P Parameter: Tissue Value: Germinating Seeds
  misc_feature: MA Experiment ID: 108464 Result: Up-regulated in Transcription
  misc_feature: MA Experiment 108464 PARAMETER Experiment Name: At_Germinating_Seeds_cDNA_P Parameter: Age (day) Value: 4 vs. 0
  misc_feature: MA Experiment 108464 PARAMETER Experiment Name: At_Germinating_Seeds_cDNA_P Parameter: Tissue Value: Germinating Seeds
  misc_feature: MA Experiment ID: 108473 Result: Down-regulated in Transcription
  misc_feature: MA Experiment 108473 PARAMETER Experiment Name: At_Drought_Flowers_cDNA_P Parameter: Timepoint (hr) Value: 7 d
  misc_feature: MA Experiment 108473 PARAMETER Experiment Name: At_Drought_Flowers_cDNA_P Parameter: Tissue Value: Flower
  misc_feature: MA Experiment 108473 PARAMETER Experiment Name: At_Drought_Flowers_cDNA_P Parameter: Treatment Value: Drought vs. No Drought
  misc_feature: MA Experiment ID: 20000117 Result: Down-regulated in Transcription
  misc_feature: MA Experiment 20000117 PARAMETER Experiment Name: At_100uM_ABA_Mutants_cDNA_P Parameter: Plant Line Value: Columbia
  misc_feature: MA Experiment 20000117 PARAMETER Experiment Name: At_100uM_ABA_Mutants_cDNA_P Parameter: Timepoint (hr) Value: 6
  misc_feature: MA Experiment 20000117 PARAMETER Experiment Name: At_100uM_ABA_Mutants_cDNA_P Parameter: Tissue Value: Aerial
  misc_feature: MA Experiment 20000117 PARAMETER Experiment Name: At_100uM_ABA_Mutants_cDNA_P Parameter: Treatment Value: 100uM ABA vs. No Treatment
  misc_feature: MA Experiment ID: 20000144 Result: Down-regulated in Transcription
  misc_feature: MA Experiment 20000144 PARAMETER Experiment Name: At_42deg_Heat_cDNA_P Parameter: Temperature (deg C) Value: 42 vs. 22
  misc_feature: MA Experiment 20000144 PARAMETER Experiment Name: At_42deg_Heat_cDNA_P Parameter: Timepoint (hr) Value: 1
  misc_feature: MA Experiment 20000144 PARAMETER Experiment Name: At_42deg_Heat_cDNA_P Parameter: Tissue Value: Aerial
  misc_feature: MA Experiment ID: 20000185 Result: Down-regulated in Transcription
  misc_feature: MA Experiment 20000185 PARAMETER Experiment Name: At_Roots__P Parameter: Age (day) Value: 7 vs. 21
  misc_feature: MA Experiment 20000185 PARAMETER Experiment Name: At_Roots__P Parameter: Organism Value: A. thaliana
  misc_feature: MA Experiment 20000185 PARAMETER Experiment Name: At_Roots__P Parameter: Tissue Value: Roots vs. Whole Plant
  misc_feature: MA Experiment ID: 20000235 Result: Down-regulated in Transcription
  misc_feature: MA Experiment 20000235 PARAMETER Experiment Name: At_Siliques_P Parameter: Age (day) Value: 21
  misc_feature: MA Experiment 20000235 PARAMETER Experiment Name: At_Siliques_P Parameter: Organism Value: A. thaliana
  misc_feature: MA Experiment 20000235 PARAMETER Experiment Name: At_Siliques_P Parameter: Plant Line Value: WS
  misc_feature: MA Experiment 20000235 PARAMETER Experiment Name: At_Siliques_P Parameter: Tissue Value: 5-10mm Siliques vs. Whole Plant
  misc_feature: MA Experiment ID: 20000264 Result: Up-regulated in Transcription
  misc_feature: MA Experiment 20000264 PARAMETER Experiment Name: At_Open_Flower_P Parameter: Age (day) Value: 21
  misc_feature: MA Experiment 20000264 PARAMETER Experiment Name: At_Open_Flower_P Parameter: Plant Line Value: WS
  misc_feature: MA Experiment 20000264 PARAMETER Experiment Name: At_Open_Flower_P Parameter: Tissue Value: Open Flower vs. Whole Plant
  misc_feature: MA Experiment ID: 20000265 Result: Up-regulated in Transcription
  misc_feature: MA Experiment 20000265 PARAMETER Experiment Name: At_Open_Flower_P Parameter: Age (day) Value: 21
  misc_feature: MA Experiment 20000265 PARAMETER Experiment Name: At_Open_Flower_P Parameter: Plant Line Value: WS
  misc_feature: MA Experiment 20000265 PARAMETER Experiment Name: At_Open_Flower_P Parameter: Tissue Value: Closed Flower vs. Whole Plant
  misc_feature: MA Experiment ID: 20000286 Result: Up-regulated in Transcription
  misc_feature: MA Experiment 20000286 PARAMETER Experiment Name: At_Open_Flower_P Parameter: Age (day) Value: 21
  misc_feature: MA Experiment 20000286 PARAMETER Experiment Name: At_Open_Flower_P Parameter: Plant Line Value: WS
  misc_feature: MA Experiment 20000286 PARAMETER Experiment Name: At_Open_Flower_P Parameter: Tissue Value: Half Open vs. Whole Plant
  misc_feature: MA Experiment ID: 20000437 Result: Down-regulated in Transcription
  misc_feature: MA Experiment 20000437 PARAMETER Experiment Name: At_Drought_P Parameter: Age (day) Value: 8
  misc_feature: MA Experiment 20000437 PARAMETER Experiment Name: At_Drought_P Parameter: Organism Value: A. thaliana
  misc_feature: MA Experiment 20000437 PARAMETER Experiment Name: At_Drought_P Parameter: Plant Line Value: WS
  misc_feature: MA Experiment 20000437 PARAMETER Experiment Name: At_Drought_P Parameter: Timepoint (hr) Value: 24
  misc_feature: MA Experiment 20000437 PARAMETER Experiment Name: At_Drought_P Parameter: Tissue Value: Whole Plant
  misc_feature: MA Experiment 20000437 PARAMETER Experiment Name: At_Drought_P Parameter: Treatment Value: Drought vs. No Drought
  misc_feature: MA Experiment ID: 20000439 Result: Down-regulated in Transcription
  misc_feature: MA Experiment 20000439 PARAMETER Experiment Name: At_Roots__P Parameter: Age (day) Value: 14 vs. 21
  misc_feature: MA Experiment 20000439 PARAMETER Experiment Name: At_Roots__P Parameter: Organism Value: A. thaliana
  misc_feature: MA Experiment 20000439 PARAMETER Experiment Name: At_Roots__P Parameter: Tissue Value: Roots vs. Whole Plant
  misc_feature: MA Experiment ID: 20001560 Result: Up-regulated in Transcription
  misc_feature: MA Experiment 20001560 PARAMETER Experiment Name: At_Drought_Soil_Dry_P Parameter: Age (day) Value: 28
  misc_feature: MA Experiment 20001560 PARAMETER Experiment Name: At_Drought_Soil_Dry_P Parameter: Organism Value: A. thaliana
  misc_feature: MA Experiment 20001560 PARAMETER Experiment Name: At_Drought_Soil_Dry_P Parameter: Plant Line Value: WS
  misc_feature: MA Experiment 20001560 PARAMETER Experiment Name: At_Drought_Soil_Dry_P Parameter: Post Timepoint (hr) Value: None
  misc_feature: MA Experiment 20001560 PARAMETER Experiment Name: At_Drought_Soil_Dry_P Parameter: Post-Treatment Value: None
  misc_feature: MA Experiment 20001560 PARAMETER Experiment Name: At_Drought_Soil_Dry_P Parameter: Timepoint (day) Value: 14
  misc_feature: MA Experiment 20001560 PARAMETER Experiment Name: At_Drought_Soil_Dry_P Parameter: Treatment Value: Drought vs. No Drought
  misc_feature: MA Experiment ID: 20001910 Result: Down-regulated in Transcription
  misc_feature: MA Experiment 20001910 PARAMETER Experiment Name: At_Drought_Reproduction_P Parameter: Age (day) Value: 37
  misc_feature: MA Experiment 20001910 PARAMETER Experiment Name: At_Drought_Reproduction_P Parameter: Organism Value: A. thaliana
  misc_feature: MA Experiment 20001910 PARAMETER Experiment Name: At_Drought_Reproduction_P Parameter: Plant Line Value: WS
  misc_feature: MA Experiment 20001910 PARAMETER Experiment Name: At_Drought_Reproduction_P Parameter: Timepoint (day) Value: 7
  misc_feature: MA Experiment 20001910 PARAMETER Experiment Name: At_Drought_Reproduction_P Parameter: Tissue Value: Flowers
  misc_feature: MA Experiment 20001910 PARAMETER Experiment Name: At_Drought_Reproduction_P Parameter: Treatment Value: Drought vs. No Drought
cagactactcatttgtctccactccaaactttcacaacaatgagaagtcatcacagacattcttcttcatatgtttccttcatcctcttcctattcctgttcttcatctccttctcatcctcaacatcaaaactcgaacccgcaaagtctgaacctaaaagaaaacattcagtttcagctattctcgtgttcggagattcaacagtggatccgggcaataacaactacattgacacagtattcaagtgtaattttccgccctatggactcgatttcagaaacaaaactccgaccggtagattttgcaacggtcgactcgtcacagattttatcgcttcatacattggtgtgaaggagaatgtgccaccgtatttggacccaaatcttggaataaatgagttaataagtggagttagctttgcttcagctggctctggatatgatcctctcactccaaccataactaacgtgatagacattccgactcagctagagtatttcagagaatacaagagaaaattggagggtaaaatgggaaaacaagaaatggaaaaacacatagaagaagctatgttttgtgtaagtgcaggaaccaacgatttcgtcattaattatttcacaattcccatacgaaggaagacttttactatcgaagcttatcaacaattcgttatttccaatctcaagcaatttatccagggtttgtggaaagaaggagcaagaaagataacagtggcaggtttaccaccgattgggtgtttgccgattgttataacattattctccggcgaagcattgaccaaccgtcgttgcattgaccgtttctccactgtggccacaaactacaatttcctcttacaaaaacaattggccctcatgcaagtgggtttggcccatcttggatccaaaatcttttacctcgacgtctatgacccagtttatgaggtcattcgtgaccctcgaaaattcgggtttgaggaagtcttcagtggatgttgtggaagtggatacctagaggcatcgtttttgtgtaatccaaagtcatatgtgtgtcccaatacatctgcttatgtcttctttgactctatccatccaagtgagaagacttacttcagtctttttagatctctccgaccaatttatgattctattctcggttctttctgaaatttttaattaatattatgatcactattagctaattgataagttaatttcaatttacatacacctctttcttccattatgagtgacgaaatgtaatgatggtctatgtgttaatatttcagtttgaaatgcaaaataattagtgtacttgc

SEQ ID NO: 40722 - protein, 388 aa, Arabidopsis thaliana
  peptide (1)..(388): Ceres Seq. ID no. 12329729
  misc_feature (61)..(377): Pfam Name: GDSL-like Lipase/Acylhydrolase Pfam Description: GDSL-like Lipase/Acylhydrolase
  misc_feature (41)..(388): Homolog of NCBI NO: 21537117 NR Description: putative GDSL-motif lipase/hydrolase [Arabidopsis
  misc_feature (41)..(388): Homolog of NCBI NO: 15225096 NR Description: putative GDSL-motif lipase/hydrolase
  misc_feature (60)..(377): Homolog of NCBI NO: 21554186 NR Description: Contains similarity to proline-rich protein APG
  misc_feature (21)..(370): Homolog of NCBI NO: 21592974 NR Description: proline-rich protein, putative [Arabidopsis
  misc_feature (21)..(370): Homolog of NCBI NO: 25336283 NR Description: hypothetical protein RXF26 [imported] -
  misc_feature (21)..(370): Homolog of NCBI NO: 15217963 NR Description: proline-rich protein, putative; protein id:
  misc_feature (60)..(377): Homolog of NCBI NO: 25336267 NR Description: hypothetical protein [imported] - Arabidopsis
  misc_feature (60)..(377): Homolog of NCBI NO: 18390708 NR Description: expressed protein
  misc_feature (14)..(388): Homolog of NCBI NO: 15237351 NR Description: GDSL-motif lipase/hydrolase protein
  misc_feature (14)..(388): Homolog of NCBI NO: 21536954 NR Description: GDSL-motif lipase/hydrolase-like protein
QTTHLSPLQTFTTMRSHHRHSSSYVSFILFLFLFFISFSSSTSKLEPAKSEPKRKHSVSAILVFGDSTVDPGNNNYIDTVFKCNFPPYGLDFRNKTPTGRFCNGRLVTDFIASYIGVKENVPPYLDPNLGINELISGVSFASAGSGYDPLTPTITNVIDIPTQLEYFREYKRKLEGKMGKQEMEKHIEEAMFCVSAGTNDFVINYFTIPIRRKTFTIEAYQQFVISNLKQFIQGLWKEGARKITVAGLPPIGCLPIVITLFSGEALTNRRCIDRFSTVATNYNFLLQKQLALMQVGLAHLGSKIFYLDVYDPVYEVIRDPRKFGFEEVFSGCCGSGYLEASFLCNPKSYVCPNTSAYVFFDSIHPSEKTYFSLFRSLRPIYDSILGSF

SEQ ID NO: 40723 - protein, 375 aa, Arabidopsis thaliana
  peptide (1)..(375): Ceres Seq. ID no. 12329730
  misc_feature (48)..(364): Pfam Name: GDSL-like Lipase/Acylhydrolase Pfam Description: GDSL-like Lipase/Acylhydrolase
  misc_feature (28)..(375): Homolog of NCBI NO: 21537117 NR Description: putative GDSL-motif lipase/hydrolase [Arabidopsis
  misc_feature (28)..(375): Homolog of NCBI NO: 15225096 NR Description: putative GDSL-motif lipase/hydrolase
  misc_feature (47)..(364): Homolog of NCBI NO: 21554186 NR Description: Contains similarity to proline-rich protein APG
  misc_feature (8)..(357): Homolog of NCBI NO: 21592974 NR Description: proline-rich protein, putative [Arabidopsis
  misc_feature (8)..(357): Homolog of NCBI NO: 25336283 NR Description: hypothetical protein RXF26 [imported] -
  misc_feature (8)..(357): Homolog of NCBI NO: 15217963 NR Description: proline-rich protein, putative; protein id:
  misc_feature (47)..(364): Homolog of NCBI NO: 25336267 NR Description: hypothetical protein [imported] - Arabidopsis
  misc_feature (47)..(364): Homolog of NCBI NO: 18390708 NR Description: expressed protein
  misc_feature (1)..(375): Homolog of NCBI NO: 15237351 NR Description: GDSL-motif lipase/hydrolase protein
  misc_feature (1)..(375): Homolog of NCBI NO: 21536954 NR Description: GDSL-motif lipase/hydrolase-like protein
MRSHHRHSSSYVSFILFLFLFFISFSSSTSKLEPAKSEPKRKHSVSAILVFGDSTVDPGNNNYIDTVFKCNFPPYGLDFRNKTPTGRFCNGRLVTDFIASYIGVKENVPPYLDPNLGINELISGVSFASAGSGYDPLTPTITNVIDIPTQLEYFREYKRKLEGKMGKQEMEKHIEEAMFCVSAGTNDFVINYFTIPIRRKTFTIEAYQQFVISNLKQFIQGLWKEGARKITVAGLPPIGCLPIVITLFSGEALTNRRCIDRFSTVATNYNFLLQKQLALMQVGLAHLGSKIFYLDVYDPVYEVIRDPRKFGFEEVFSGCCGSGYLEASFLCNPKSYVCPNTSAYVFFDSIHPSEKTYFSLFRSLRPIYDSILGSF

SEQ ID NO: 40724 - protein, 211 aa, Arabidopsis thaliana
  peptide (1)..(211): Ceres Seq. ID no. 12329731
  misc_feature (1)..(200): Pfam Name: GDSL-like Lipase/Acylhydrolase Pfam Description: GDSL-like Lipase/Acylhydrolase
  misc_feature (1)..(211): Homolog of NCBI NO: 21537117 NR Description: putative GDSL-motif lipase/hydrolase [Arabidopsis
  misc_feature (1)..(211): Homolog of NCBI NO: 15225096 NR Description: putative GDSL-motif lipase/hydrolase
  misc_feature (1)..(200): Homolog of NCBI NO: 21554186 NR Description: Contains similarity to proline-rich protein APG
  misc_feature (1)..(193): Homolog of NCBI NO: 21592974 NR Description: proline-rich protein, putative [Arabidopsis
  misc_feature (1)..(193): Homolog of NCBI NO: 25336283 NR Description: hypothetical protein RXF26 [imported] -
  misc_feature (1)..(193): Homolog of NCBI NO: 15217963 NR Description: proline-rich protein, putative; protein id:
  misc_feature (1)..(200): Homolog of NCBI NO: 25336267 NR Description: hypothetical protein [imported] - Arabidopsis
  misc_feature (1)..(200): Homolog of NCBI NO: 18390708 NR Description: expressed protein
  misc_feature (1)..(211): Homolog of NCBI NO: 15237351 NR Description: GDSL-motif lipase/hydrolase protein
  misc_feature (1)..(211): Homolog of NCBI NO: 21536954 NR Description: GDSL-motif lipase/hydrolase-like protein
MGKQEMEKHIEEAMFCVSAGTNDFVINYFTIPIRRKTFTIEAYQQFVISNLKQFIQGLWKEGARKITVAGLPPIGCLPIVITLFSGEALTNRRCIDRFSTVATNYNFLLQKQLALMQVGLAHLGSKIFYLDVYDPVYEVIRDPRKFGFEEVFSGCCGSGYLEASFLCNPKSYVCPNTSAYVFFDSIHPSEKTYFSLFRSLRPIYDSILGSF

SEQ ID NO: 40725 - DNA, 1541 bp, Arabidopsis thaliana
  misc_feature (1)..(1541): Ceres Seq. ID no. 12600340
  misc_feature: MA Experiment ID: 108473 Result: Down-regulated in Transcription
  misc_feature: MA Experiment 108473 PARAMETER Experiment Name: At_Drought_Flowers_cDNA_P Parameter: Timepoint (hr) Value: 7 d
  misc_feature: MA Experiment 108473 PARAMETER Experiment Name: At_Drought_Flowers_cDNA_P Parameter: Tissue Value: Flower
  misc_feature: MA Experiment 108473 PARAMETER Experiment Name: At_Drought_Flowers_cDNA_P Parameter: Treatment Value: Drought vs. No Drought
  misc_feature: MA Experiment ID: 108577 Result: Down-regulated in Transcription
  misc_feature: MA Experiment 108577 PARAMETER Experiment Name: At_42deg_Heat_cDNA_P Parameter: Temperature (deg C) Value: 42 vs. 22
  misc_feature: MA Experiment 108577 PARAMETER Experiment Name: At_42deg_Heat_cDNA_P Parameter: Timepoint (hr) Value: 6
  misc_feature: MA Experiment 108577 PARAMETER Experiment Name: At_42deg_Heat_cDNA_P Parameter: Tissue Value: Aerial
  misc_feature: MA Experiment ID: 108585 Result: Down-regulated in Transcription
  misc_feature: MA Experiment 108585 PARAMETER Experiment Name: At_5mM_NaNP_cDNA_P Parameter: Timepoint (hr) Value: 6
  misc_feature: MA Experiment 108585 PARAMETER Experiment Name: At_5mM_NaNP_cDNA_P Parameter: Tissue Value: Aerial
  misc_feature: MA Experiment 108585 PARAMETER Experiment Name: At_5mM_NaNP_cDNA_P Parameter: Treatment Value: null
  misc_feature: MA Experiment ID: 108595 Result: Down-regulated in Transcription
  misc_feature: MA Experiment 108595 PARAMETER Experiment Name: At_Ler-pi_Ovule_cDNA_P Parameter: Plant Line Value: null
  misc_feature: MA Experiment ID: 108607 Result: Down-regulated in Transcription
  misc_feature: MA Experiment 108607 PARAMETER Experiment Name: At_100uM_ABA_cDNA_P Parameter: Timepoint (hr) Value: 4
  misc_feature: MA Experiment 108607 PARAMETER Experiment Name: At_100uM_ABA_cDNA_P Parameter: Tissue Value: Aerial
  misc_feature: MA Experiment 108607 PARAMETER Experiment Name: At_100uM_ABA_cDNA_P Parameter: Treatment Value: 100uM ABA vs. No Treatment
  misc_feature: MA Experiment ID: 108668 Result: Down-regulated in Transcription
  misc_feature: MA Experiment 108668 PARAMETER Experiment Name: At_2mM_SA_cDNA_P Parameter: Plant Line Value: WS
  misc_feature: MA Experiment 108668 PARAMETER Experiment Name: At_2mM_SA_cDNA_P Parameter: Timepoint (hr) Value: 6
  misc_feature: MA Experiment 108668 PARAMETER Experiment Name: At_2mM_SA_cDNA_P Parameter: Treatment Value: 2mM SA vs. No Treatment
  misc_feature: MA Experiment ID: 20000087 Result: Down-regulated in Transcription
  misc_feature: MA Experiment 20000087 PARAMETER Experiment Name: At_100uM_ABA_Mutants_cDNA_P Parameter: Plant Line Value: WS
  misc_feature: MA Experiment 20000087 PARAMETER Experiment Name: At_100uM_ABA_Mutants_cDNA_P Parameter: Timepoint (hr) Value: 6
  misc_feature: MA Experiment 20000087 PARAMETER Experiment Name: At_100uM_ABA_Mutants_cDNA_P Parameter: Tissue Value: Aerial
  misc_feature: MA Experiment 20000087 PARAMETER Experiment Name: At_100uM_ABA_Mutants_cDNA_P Parameter: Treatment Value: 100uM ABA vs. No Treatment
  misc_feature: MA Experiment ID: 20000111 Result: Down-regulated in Transcription
  misc_feature: MA Experiment 20000111 PARAMETER Experiment Name: At_42deg_Heat_cDNA_P Parameter: Temperature (deg C) Value: 42 vs. 22
  misc_feature: MA Experiment 20000111 PARAMETER Experiment Name: At_42deg_Heat_cDNA_P Parameter: Timepoint (hr) Value: 6
  misc_feature: MA Experiment 20000111 PARAMETER Experiment Name: At_42deg_Heat_cDNA_P Parameter: Tissue Value: Aerial
  misc_feature: MA Experiment ID: 20000113 Result: Down-regulated in Transcription
  misc_feature: MA Experiment 20000113 PARAMETER Experiment Name: At_42deg_Heat_cDNA_P Parameter: Temperature (deg C) Value: 42 vs. 22
  misc_feature: MA Experiment 20000113 PARAMETER Experiment Name: At_42deg_Heat_cDNA_P Parameter: Timepoint (hr) Value: 8
  misc_feature: MA Experiment 20000113 PARAMETER Experiment Name: At_42deg_Heat_cDNA_P Parameter: Tissue Value: Aerial
  misc_feature: MA Experiment ID: 20000314 Result: Down-regulated in Transcription
  misc_feature: MA Experiment 20000314 PARAMETER Experiment Name: At_14day_Shoots-Roots_Sub_P Parameter: Age (day) Value: 14
  misc_feature: MA Experiment 20000314 PARAMETER Experiment Name: At_14day_Shoots-Roots_Sub_P Parameter: Organism Value: A. thaliana
  misc_feature: MA Experiment 20000314 PARAMETER Experiment Name: At_14day_Shoots-Roots_Sub_P Parameter: Plant Line Value: WS
  misc_feature: MA Experiment 20000314 PARAMETER Experiment Name: At_14day_Shoots-Roots_Sub_P Parameter: Tissue Value: Roots vs. Whole Plant
  misc_feature: MA Experiment ID: 20000328 Result: Down-regulated in Transcription
  misc_feature: MA Experiment 20000328 PARAMETER Experiment Name: At_42deg_Heat_Sub_P Parameter: Age (day) Value: 14
  misc_feature: MA Experiment 20000328 PARAMETER Experiment Name: At_42deg_Heat_Sub_P Parameter: Organism Value: A. thaliana
  misc_feature: MA Experiment 20000328 PARAMETER Experiment Name: At_42deg_Heat_Sub_P Parameter: Plant Line Value: WS
  misc_feature: MA Experiment 20000328 PARAMETER Experiment Name: At_42deg_Heat_Sub_P Parameter: Temperature (deg C) Value: 42 vs. 22
  misc_feature: MA Experiment 20000328 PARAMETER Experiment Name: At_42deg_Heat_Sub_P Parameter: Timepoint (hr) Value: 6
  misc_feature: MA Experiment 20000328 PARAMETER Experiment Name: At_42deg_Heat_Sub_P Parameter: Tissue Value: Aerial
  misc_feature: MA Experiment ID: 20000346 Result: Down-regulated in Transcription
  misc_feature: MA Experiment 20000346 PARAMETER Experiment Name: At_2mM_SA_Sub_P Parameter: Age (day) Value: 14
  misc_feature: MA Experiment 20000346 PARAMETER Experiment Name: At_2mM_SA_Sub_P Parameter: Organism Value: A. thaliana
  misc_feature: MA Experiment 20000346 PARAMETER Experiment Name: At_2mM_SA_Sub_P Parameter: Plant Line Value: WS
  misc_feature: MA Experiment 20000346 PARAMETER Experiment Name: At_2mM_SA_Sub_P Parameter: Timepoint (hr) Value: 1
  misc_feature: MA Experiment 20000346 PARAMETER Experiment Name: At_2mM_SA_Sub_P Parameter: Tissue Value: Aerial
  misc_feature: MA Experiment 20000346 PARAMETER Experiment Name: At_2mM_SA_Sub_P Parameter: Treatment Value: 2mM SA vs. No Treatment
  misc_feature: MA Experiment ID: 20000347 Result: Down-regulated in Transcription
  misc_feature: MA Experiment 20000347 PARAMETER Experiment Name: At_2mM_SA_Sub_P Parameter: Age (day) Value: 14
  misc_feature: MA Experiment 20000347 PARAMETER Experiment Name: At_2mM_SA_Sub_P Parameter: Organism Value: A. thaliana
  misc_feature: MA Experiment 20000347 PARAMETER Experiment Name: At_2mM_SA_Sub_P Parameter: Plant Line Value: WS
  misc_feature: MA Experiment 20000347 PARAMETER Experiment Name: At_2mM_SA_Sub_P Parameter: Timepoint (hr) Value: 6
  misc_feature: MA Experiment 20000347 PARAMETER Experiment Name: At_2mM_SA_Sub_P Parameter: Tissue Value: Aerial
  misc_feature: MA Experiment 20000347 PARAMETER Experiment Name: At_2mM_SA_Sub_P Parameter: Treatment Value: 2mM SA vs. No Treatment
  misc_feature: MA Experiment ID: 20000352 Result: Down-regulated in Transcription
  misc_feature: MA Experiment 20000352 PARAMETER Experiment Name: At_Drought_Sub_P Parameter: Age (day) Value: 7
  misc_feature: MA Experiment 20000352 PARAMETER Experiment Name: At_Drought_Sub_P Parameter: Organism Value: A. thaliana
  misc_feature: MA Experiment 20000352 PARAMETER Experiment Name: At_Drought_Sub_P Parameter: Plant Line Value: WS
  misc_feature: MA Experiment 20000352 PARAMETER Experiment Name: At_Drought_Sub_P Parameter: Timepoint (hr) Value: 6
  misc_feature: MA Experiment 20000352 PARAMETER Experiment Name: At_Drought_Sub_P Parameter: Tissue Value: Whole Plant
  misc_feature: MA Experiment 20000352 PARAMETER Experiment Name: At_Drought_Sub_P Parameter: Treatment Value: Drought vs. No Drought
agattttactctcatcctaaataaacctctcttcatcgaaaatgtggagactctctgtgtcaattttcctcttctcatgtctcttcgtttcttcgtcttcgttgggcgattcggaggcgacgtgttccggtatagttccgttacggtaccggtacgataagatctcgataaccgactttggaggcgttggagatggtcgaacggtgaatactaaggcgtttagggcggcgatttatcggattcagcatctgaagaggagaggaggcacgcttttgtatatacctccgggagtgtatttgacggagagcttcaatctcactagccatatgactctttacttagctaaaggtgctgtgattagagctgttcaggatacctggaattggccattgattgatcctttgccgtcttatggaagagggagagagttaccagggggacggtatatgagctttattcatggtgatgggcttcgtgatgtagtcatcactggacaaaatgggacaatagacggtcaaggagaagtgtggtggaacatgtggcgtagtagaacgctaaagtacacaagaccgaacttaatcgagttcaaggactctaaggagatcataatctccaatgttattttccaaaattcacctttctggaacattcatcctgtgtattgcagcaacgttgtcatccatcacgttacgatcttagctccacaagattctcccaacaccgatggaatcgatccagattccagctacaacgtctgcatagaagactcctacatctcaacaggagacgacctagtggccatcaaaagcggttgggaccagtacggaatcgcctatggccgtccaagctcaaacataacaatccgccgcatcacaggatcttccccgttcgcaggtatcgcaataggaagcgaaacatcaggaggaatcaagaacattatagcagaacatatcactctctccaatatgggagttggagtcaacatcaagacaaacattggtcgtggaggatacattaaaaacatcaaaatatcagacgtctatgtagacaccgcaaagtatgggatcaagatcgccggcgacacgggagatcatccggacgagaattataacccgaacgctcttccagttgttaagggaatacatatcaagaacgtttggggagttaacgttcgaaacgctggctctattcaaggtcttaagggctcaccatttacgggtatatgtttgagtgagattaatctacatggaagcttgaattcgtataagacgtggaagtgttcggatgtcagtggaacttcactaaaggttagtccttggccgtgttcggagctgagaactaccggcgggtctaatttgtgttcttccacattctaaaaacttctgagcaagttcttacctctttggttcaatttttttttgaaataatttatctccagtttgcagttcctccatttatatatatgtttgtactttgtatgttttaaaaaaattatgtaatgaattgtaatttgaaaaatgaagaaagtttaacaaaataag

SEQ ID NO: 40726 - protein, 444 aa, Arabidopsis thaliana
  peptide (1)..(444): Ceres Seq. ID no. 12600341
  misc_feature (154)..(428): Pfam Name: Glycosyl hydrolases family 28 Pfam Description: Glycosyl hydrolases family 28
  misc_feature (154)..(428): Pfam Name: Glycosyl hydrolases family 28 Pfam Description: Glycosyl hydrolases family 28
  misc_feature (6)..(437): Homolog of NCBI NO: 21553827 NR Description: polygalacturonase, putative [Arabidopsis thaliana]
  misc_feature (6)..(437): Homolog of NCBI NO: 7939578 NR Description: polygalacturonase-like protein [Arabidopsis
  misc_feature (62)..(440): Homolog of NCBI NO: 34393209 NR Description: putative polygalacturonase
  misc_feature (4)..(432): Homolog of NCBI NO: 11263971 NR Description: hypothetical protein T17J13.70 - Arabidopsis
  misc_feature (4)..(432): Homolog of NCBI NO: 18412253 NR Description: polygalacturonase, putative
  misc_feature (6)..(437): Homolog of NCBI NO: 21553827 NR Description: polygalacturonase, putative [Arabidopsis thaliana]
  misc_feature (62)..(440): Homolog of NCBI NO: 34393209 NR Description: putative polygalacturonase
  misc_feature (4)..(432): Homolog of NCBI NO: 18412253 NR Description: polygalacturonase, putative
  misc_feature (1)..(444): Homolog of NCBI NO: 15236625 NR Description: polygalacturonase, putative
  misc_feature (8)..(437): Homolog of NCBI NO: 15238207 NR Description: polygalacturonase, putative; protein id:
  misc_feature (2)..(443): Homolog of NCBI NO: 34912726 NR Description: putative polygalacturonase
  misc_feature (4)..(437): Homolog of NCBI NO: 22329119 NR Description: polygalacturonase, putative; protein id:
  misc_feature (24)..(440): Homolog of NCBI NO: 40714685 NR Description: putative polygalacturonase
  misc_feature (4)..(432): Homolog of NCBI NO: 11263971 NR Description: hypothetical protein T17J13.70 - Arabidopsis
  misc_feature (6)..(437): Homolog of NCBI NO: 7939578 NR Description: polygalacturonase-like protein [Arabidopsis
  misc_feature (24)..(440): Homolog of NCBI NO: 40714685 NR Description: putative polygalacturonase
  misc_feature (4)..(437): Homolog of NCBI NO: 22329119 NR Description: polygalacturonase, putative; protein id:
  misc_feature (2)..(443): Homolog of NCBI NO: 34912726 NR Description: putative polygalacturonase
  misc_feature (8)..(437): Homolog of NCBI NO: 15238207 NR Description: polygalacturonase, putative; protein id:
  misc_feature (1)..(444): Homolog of NCBI NO: 15236625 NR Description: polygalacturonase, putative
MWRLSVSIFLFSCLFVSSSSLGDSEATCSGIVPLRYRYDKISITDFGGVGDGRTVNTKAFRAAIYRIQHLKRRGGTLLYIPPGVYLTESFNLTSHMTLYLAKGAVIRAVQDTWNWPLIDPLPSYGRGRELPGGRYMSFIHGDGLRDVVITGQNGTIDGQGEVWWNMWRSRTLKYTRPNLIEFKDSKEIIISNVIFQNSPFWNIHPVYCSNVVIHHVTILAPQDSPNTDGIDPDSSYNVCIEDSYISTGDDLVAIKSGWDQYGIAYGRPSSNITIRRITGSSPFAGIAIGSETSGGIKNIIAEHITLSNMGVGVNIKTNIGRGGYIKNIKISDVYVDTAKYGIKIAGDTGDHPDENYNPNALPVVKGIHIKNVWGVNVRNAGSIQGLKGSPFTGICLSEINLHGSLNSYKTWKCSDVSGTSLKVSPWPCSELRTTGGSNLCSSTF

SEQ ID NO: 40727 - protein, 349 aa, Arabidopsis thaliana
  peptide (1)..(349): Ceres Seq. ID no. 12600342
  misc_feature (59)..(333): Pfam Name: Glycosyl hydrolases family 28 Pfam Description: Glycosyl hydrolases family 28
  misc_feature (59)..(333): Pfam Name: Glycosyl hydrolases family 28 Pfam Description: Glycosyl hydrolases family 28
  misc_feature (1)..(342): Homolog of NCBI NO: 21553827 NR Description: polygalacturonase, putative [Arabidopsis thaliana]
  misc_feature (1)..(342): Homolog of NCBI NO: 7939578 NR Description: polygalacturonase-like protein [Arabidopsis
  misc_feature (1)..(345): Homolog of NCBI NO: 34393209 NR Description: putative polygalacturonase
  misc_feature (1)..(337): Homolog of NCBI NO: 11263971 NR Description: hypothetical protein T17J13.70 - Arabidopsis
  misc_feature (1)..(337): Homolog of NCBI NO: 18412253 NR Description: polygalacturonase, putative
  misc_feature (1)..(342): Homolog of NCBI NO: 21553827 NR Description: polygalacturonase, putative [Arabidopsis thaliana]
  misc_feature (1)..(345): Homolog of NCBI NO: 34393209 NR Description: putative polygalacturonase
  misc_feature (1)..(337): Homolog of NCBI NO: 18412253 NR Description: polygalacturonase, putative
  misc_feature (1)..(349): Homolog of NCBI NO: 15236625 NR Description: polygalacturonase, putative
  misc_feature (1)..(342): Homolog of NCBI NO: 15238207 NR Description: polygalacturonase, putative; protein id:
  misc_feature (1)..(348): Homolog of NCBI NO: 34912726 NR Description: putative polygalacturonase
  misc_feature (1)..(342): Homolog of NCBI NO: 22329119 NR Description: polygalacturonase, putative; protein id:
  misc_feature (1)..(345): Homolog of NCBI NO: 40714685 NR Description: putative polygalacturonase
  misc_feature (1)..(337): Homolog of NCBI NO: 11263971 NR Description: hypothetical protein T17J13.70 - Arabidopsis
  misc_feature (1)..(342): Homolog of NCBI NO: 7939578 NR Description: polygalacturonase-like protein [Arabidopsis
  misc_feature (1)..(345): Homolog of NCBI NO: 40714685 NR Description: putative polygalacturonase
  misc_feature (1)..(342): Homolog of NCBI NO: 22329119 NR Description: polygalacturonase, putative; protein id:
  misc_feature (1)..(348): Homolog of NCBI NO: 34912726 NR Description: putative polygalacturonase
  misc_feature (1)..(342): Homolog of NCBI NO: 15238207 NR Description: polygalacturonase, putative; protein id:
  misc_feature (1)..(349): Homolog of NCBI NO: 15236625 NR Description: polygalacturonase, putative
MTLYLAKGAVIRAVQDTWNWPLIDPLPSYGRGRELPGGRYMSFIHGDGLRDVVITGQNGTIDGQGEVWWNMWRSRTLKYTRPNLIEFKDSKEIIISNVIFQNSPFWNIHPVYCSNVVIHHVTILAPQDSPNTDGIDPDSSYNVCIEDSYISTGDDLVAIKSGWDQYGIAYGRPSSNITIRRITGSSPFAGIAIGSETSGGIKNIIAEHITLSNMGVGVNIKTNIGRGGYIKNIKISDVYVDTAKYGIKIAGDTGDHPDENYNPNALPVVKGIHIKNVWGVNVRNAGSIQGLKGSPFTGICLSEINLHGSLNSYKTWKCSDVSGTSLKVSPWPCSELRTTGGSNLCSSTF

SEQ ID NO: 40728 - protein, 309 aa, Arabidopsis thaliana
  peptide (1)..(309): Ceres Seq. ID no. 12600343
  misc_feature (19)..(293): Pfam Name: Glycosyl hydrolases family 28 Pfam Description: Glycosyl hydrolases family 28
  misc_feature (19)..(293): Pfam Name: Glycosyl hydrolases family 28 Pfam Description: Glycosyl hydrolases family 28
  misc_feature (1)..(302): Homolog of NCBI NO: 15228881 NR Description: polygalacturonase, putative
  misc_feature (1)..(302): Homolog of NCBI NO: 7939578 NR Description: polygalacturonase-like protein [Arabidopsis
  misc_feature (1)..(305): Homolog of NCBI NO: 34393209 NR Description: putative polygalacturonase
  misc_feature (1)..(297): Homolog of NCBI NO: 11263971 NR Description: hypothetical protein T17J13.70 - Arabidopsis
  misc_feature (1)..(297): Homolog of NCBI NO: 18412253 NR Description: polygalacturonase, putative
  misc_feature (1)..(302): Homolog of NCBI NO: 15228881 NR Description: polygalacturonase, putative
  misc_feature (1)..(305): Homolog of NCBI NO: 34393209 NR Description: putative polygalacturonase
  misc_feature (1)..(297): Homolog of NCBI NO: 18412253 NR Description: polygalacturonase, putative
  misc_feature (1)..(309): Homolog of NCBI NO: 15236625 NR Description: polygalacturonase, putative
  misc_feature (1)..(302): Homolog of NCBI NO: 15238207 NR Description: polygalacturonase, putative; protein id:
  misc_feature (1)..(308): Homolog of NCBI NO: 34912726 NR Description: putative polygalacturonase
  misc_feature (1)..(302): Homolog of NCBI NO: 22329119 NR Description: polygalacturonase, putative; protein id:
  misc_feature (1)..(305): Homolog of NCBI NO: 40714685 NR Description: putative polygalacturonase
  misc_feature (1)..(297): Homolog of NCBI NO: 11263971 NR Description: hypothetical protein T17J13.70 - Arabidopsis
  misc_feature (1)..(302): Homolog of NCBI NO: 7939578 NR Description: polygalacturonase-like protein [Arabidopsis
  misc_feature (1)..(305): Homolog of NCBI NO: 40714685 NR Description: putative polygalacturonase
  misc_feature (1)..(302): Homolog of NCBI NO: 22329119 NR Description: polygalacturonase, putative; protein id:
  misc_feature (1)..(308): Homolog of NCBI NO: 34912726 NR Description: putative polygalacturonase
  misc_feature (1)..(302): Homolog of NCBI NO: 15238207 NR Description: polygalacturonase, putative; protein id:
  misc_feature (1)..(309): Homolog of NCBI NO: 15236625 NR Description: polygalacturonase, putative
MSFIHGDGLRDVVITGQNGTIDGQGEVWWNMWRSRTLKYTRPNLIEFKDSKEIIISNVIFQNSPFWNIHPVYCSNVVIHHVTILAPQDSPNTDGIDPDSSYNVCIEDSYISTGDDLVAIKSGWDQYGIAYGRPSSNITIRRITGSSPFAGIAIGSETSGGIKNIIAEHITLSNMGVGVNIKTNIGRGGYIKNIKISDVYVDTAKYGIKIAGDTGDHPDENYNPNALPVVKGIHIKNVWGVNVRNAGSIQGLKGSPFTGICLSEINLHGSLNSYKTWKCSDVSGTSLKVSPWPCSELRTTGGSNLCSSTF

SEQ ID NO: 40729 - DNA, 1155 bp, Arabidopsis thaliana
  misc_feature (1)..(1155): Ceres Seq. ID no. 12330230
  misc_feature: MA Experiment ID: 108435 Result: Up-regulated in Transcription
  misc_feature: MA Experiment 108435 PARAMETER Experiment Name: At_stm_Mutants_cDNA_P Parameter: Plant Line Value: wt Landsburg vs stm
  misc_feature: MA Experiment 108435 PARAMETER Experiment Name: At_stm_Mutants_cDNA_P Parameter: Tissue Value: Shoot Apical Meristem Region
  misc_feature: MA Experiment ID: 108461 Result: Up-regulated in Transcription
  misc_feature: MA Experiment 108461 PARAMETER Experiment Name: At_Germinating_Seeds_cDNA_P Parameter: Age (day) Value: 1 vs. 0
  misc_feature: MA Experiment 108461 PARAMETER Experiment Name: At_Germinating_Seeds_cDNA_P Parameter: Tissue Value: Germinating Seeds
  misc_feature: MA Experiment ID: 108463 Result: Down-regulated in Transcription
  misc_feature: MA Experiment 108463 PARAMETER Experiment Name: At_Germinating_Seeds_cDNA_P Parameter: Age (day) Value: 3 vs. 0
  misc_feature: MA Experiment 108463 PARAMETER Experiment Name: At_Germinating_Seeds_cDNA_P Parameter: Tissue Value: Germinating Seeds
  misc_feature: MA Experiment ID: 108464 Result: Down-regulated in Transcription
  misc_feature: MA Experiment 108464 PARAMETER Experiment Name: At_Germinating_Seeds_cDNA_P Parameter: Age (day) Value: 4 vs. 0
  misc_feature: MA Experiment 108464 PARAMETER Experiment Name: At_Germinating_Seeds_cDNA_P Parameter: Tissue Value: Germinating Seeds
  misc_feature: MA Experiment ID: 20000093 Result: Down-regulated in Transcription
  misc_feature: MA Experiment 20000093 PARAMETER Experiment Name: At_42deg_Heat_cDNA_P Parameter: Temperature (deg C) Value: 42 vs. 22
  misc_feature: MA Experiment 20000093 PARAMETER Experiment Name: At_42deg_Heat_cDNA_P Parameter: Timepoint (hr) Value: 0.5
  misc_feature: MA Experiment 20000093 PARAMETER Experiment Name: At_42deg_Heat_cDNA_P Parameter: Tissue Value: Aerial
  misc_feature: MA Experiment ID: 20000179 Result: Up-regulated in Transcription
  misc_feature: MA Experiment 20000179 PARAMETER Experiment Name: At_Germinating_Seeds_P Parameter: Age (hr) Value: 6 vs. 0
  misc_feature: MA Experiment 20000179 PARAMETER Experiment Name: At_Germinating_Seeds_P Parameter: Tissue Value: Germinating Seeds
  misc_feature: MA Experiment ID: 20000180 Result: Up-regulated in Transcription
  misc_feature: MA Experiment 20000180 PARAMETER Experiment Name: At_Germinating_Seeds_P Parameter: Age (hr) Value: 24 vs. 0
  misc_feature: MA Experiment 20000180 PARAMETER Experiment Name: At_Germinating_Seeds_P Parameter: Tissue Value: Germinating Seeds
  misc_feature: MA Experiment ID: 20000443 Result: Down-regulated in Transcription
  misc_feature: MA Experiment 20000443 PARAMETER Experiment Name: At_1uM_BR-BRZ__P Parameter: Tissue Value: Shoot Apices
  misc_feature: MA Experiment 20000443 PARAMETER Experiment Name: At_1uM_BR-BRZ__P Parameter: Treatment Value: 1uM BRZ vs. No Treatment
acaaacaaagatctgagagatggatgaagaactcaagaacttgatcaaagtatgggtttctgcaataatctcgatatcttattgttactacataccacctagaatcaaatctggtgctcctcgattcctctctgtttcccctgttcttgctctgtttcttgttcttcctctgtttttctcctctctgcatttatctttaatcacagcgtttttcctcacatggcttgctaatttcaaactcatcctcttctccttcgataaaggtcctttaatcccaattccaacaaatttccctcgattcttctgcttcacttgcttccccatcaaggttcagcaaaaccctaaatctcaaaaccatttgcccaaattggttttcgccattaaacttgcaatctttgcagtgctattacatttgtatagctacagacaaaatctgtctccgactatactattaggtctctattttgtgcatctctacttagagattgagattatattaacgtttgttaaagttgttgtttttatctctcttggctgcgatcttgagccacagtccaataaaccgtacttagccacatctctacaagacttctggggtcgccggtggaatctcatggttccggcgattctccggccagccgtttacgcaccaatgcggcgagtctctgaacgcaaaatgagttccggttgggctctgtttccggggattttggcagcgtttatcgtctccggtttggttcacgaattgctcttcttctatttgatacgtgagatgcctacaggagaagttactctgttctttgtgttacatggcgtttgtactgctgtagaattggcggtgaagaagaaaacgacggtagcacagcggtggcggttgagtccgggggtgtcgcgggttctcacggtggggtttgtgtttgtgactggtggttggttgtttacacctcagcttaaaaggagcggggtgatggagagattcacatctgaagctgtgttgctcgttgagttcattaagcgataagttattttatttacgttgttggggatattttataacgagtgttaaatgagcacgagttaacgttattgagtccggttgagcatcaaagtccataatggtcaactacttatcttgaaatgaatcgaacttgtctt

SEQ ID NO: 40730 - protein, 333 aa, Arabidopsis thaliana
  peptide (1)..(333): Ceres Seq. ID no. 12330231
  misc_feature (50)..(313): Pfam Name: MBOAT family Pfam Description: MBOAT family
  misc_feature (1)..(321): Homolog of NCBI NO: 8778259 NR Description: F12K21.19 [Arabidopsis thaliana]
  misc_feature (1)..(333): Homolog of NCBI NO: 15240494 NR Description: wax synthase-like protein; protein id:
  misc_feature (16)..(333): Homolog of NCBI NO: 8778259 NR Description: F12K21.19 [Arabidopsis thaliana]
  misc_feature (1)..(333): Homolog of NCBI NO: 15218659 NR Description: hypothetical protein; protein id: At1g34490.1
  misc_feature (1)..(333): Homolog of NCBI NO: 15218662 NR Description: hypothetical protein; protein id: At1g34500.1
  misc_feature (1)..(333): Homolog of NCBI NO: 15240495 NR Description: wax synthase-like protein; protein id:
  misc_feature (1)..(333): Homolog of NCBI NO: 8778260 NR Description: F12K21.17 [Arabidopsis thaliana]
  misc_feature (1)..(333): Homolog of NCBI NO: 15240498 NR Description: wax synthase-like protein; protein id:
  misc_feature (1)..(332): Homolog of NCBI NO: 15240497 NR Description: wax synthase-like protein; protein id:
  misc_feature (1)..(333): Homolog of NCBI NO: 15240496 NR Description: putative protein
MDEELKNLIKVWVSAIISISYCYYIPPRIKSGAPRFLSVSPVLALFLVLPLFFSSLHLSLITAFFLTWLANFKLILFSFDKGPLIPIPTNFPRFFCFTCFPIKVQQNPKSQNHLPKLVFAIKLAIFAVLLHLYSYRQNLSPTILLGLYFVHLYLEIEIILTFVKVVVFISLGCDLEPQSNKPYLATSLQDFWGRRWNLMVPAILRPAVYAPMRRVSERKMSSGWALFPGILAAFIVSGLVHELLFFYLIREMPTGEVTLFFVLHGVCTAVELAVKKKTTVAQRWRLSPGVSRVLTVGFVFVTGGWLFTPQLKRSGVMERFTSEAVLLVEFIKR

SEQ ID NO: 40731 - DNA, 1233 bp, Arabidopsis thaliana
  misc_feature (1)..(1233): Ceres Seq. ID no. 12336230
  misc_feature: MA Experiment ID: 108434 Result: Up-regulated in Transcription
  misc_feature: MA Experiment 108434 PARAMETER Experiment Name: At_Root_Tips_cDNA_P Parameter: Tissue Value: Root Tips
  misc_feature: MA Experiment ID: 20000495 Result: Up-regulated in Transcription
  misc_feature: MA Experiment 20000495 PARAMETER Experiment Name: At_Guard_Cells_P Parameter: Harvest Date Value: 8/2/2002
  misc_feature: MA Experiment 20000495 PARAMETER Experiment Name: At_Guard_Cells_P Parameter: Organism Value: A. thaliana
  misc_feature: MA Experiment 20000495 PARAMETER Experiment Name: At_Guard_Cells_P Parameter: Tissue Value: Guard Cells vs. Leaves
attcgtcgatcgagcgataagaagaagactggaatttttttgaggaggactctgctccatcgccgcccgccctgtaacccaccggactcagtaaactagtctgtaacacaatatcttctatttcagataagatttagcttggagaagagcaagttccgaaaatggaggggcgtcgtgtatagatccaccacccacagccctgatggaagcagacaacggaggccccaattctagtcatgcatccaaacaacgtctgcgttggacgcatgagctacatgaacgcttcgttgatgccgttgctcaacttggtggccctgatagagctacacccaaaggcgttcttagagtgatgggtgtacaaggcttaactatatatcatgtcaagagtcacttacagaaatatcgacttgcaaagtatcttccagattcgtcttctgaagggaaaaaaactgataagaaagaatctggagatatgctctctgggttggacggctcgtcgggaatgcagataactgaagccctcaagttgcagatggaagttcagaaacgattacacgagcaactagaagtgcaaagacagctgcaactacggatagaagcacaaggaaagtacttgaagaagataattgaagagcaacaacgactcagtggagtactcggcgaaccctcagccccagtaacgggcgattcagatcctgcaacccctgccccaacatctgagtctcctcttcaagacaagtctggcaaggactgtggaccagacaaaagtctctcagttgacgagtctctctcatcttaccgggagcctttaacaccagactcagggtgtaacattgggtctccagatgagagcacaggagaggagagattatcaaagaagcctcgattggtgagaggtgcagctggttatacacctgatattgtagtgggtcacccaatactagaatcaggcttgaacacttcttaccatcagtcagaccatgtcctcgcctttgaccagccatctacatcactgcttggggccgaagaacagttggataaggtttcaggagataatctttgagttgttgagtgtaccacatgtagtgttgtttatcctaatccttattagttaggagtttcctctaataatgtgatcacaagtcgttaattctctaggcactatcacgagcatgaagaatgaatatgtctgtgttgtgctgtaatttggtaaacacaaaacaaaattactct

SEQ ID NO: 40732 - protein, 286 aa, Arabidopsis thaliana
  peptide (1)..(286): Ceres Seq. ID no. 12336231
  misc_feature (17)..(68): Pfam Name: Myb-like DNA-binding domain Pfam Description: Myb-like DNA-binding domain
  misc_feature (1)..(178): Homolog of NCBI NO: 22329004 NR Description: putative protein
  misc_feature (1)..(225): Homolog of NCBI NO: 21536970 NR Description: transfactor-like protein [Arabidopsis thaliana]
  misc_feature (8)..(180): Homolog of NCBI NO: 26452281 NR Description: putative transfactor [Arabidopsis thaliana]
  misc_feature (1)..(225): Homolog of NCBI NO: 18399836 NR Description: expressed protein
  misc_feature (1)..(225): Homolog of NCBI NO: 15795136 NR Description: transfactor-like protein [Arabidopsis thaliana]
  misc_feature (8)..(180): Homolog of NCBI NO: 15229298 NR Description: transfactor, putative; protein id: At3g04450.1
  misc_feature (9)..(189): Homolog of NCBI NO: 6942190 NR Description: CDPK substrate protein 1; CSP1 [Mesembryanthemum
  misc_feature (1)..(229): Homolog of NCBI NO: 4519671 NR Description: transfactor [Nicotiana tabacum]
  misc_feature (1)..(251): Homolog of NCBI NO: 29647445 NR Description: putative transfactor [Oryza sativa (japonica
  misc_feature (1)..(286): Homolog of NCBI NO: 15226170 NR Description: transfactor-like protein
MEADNGGPNSSHASKQRLRWTHELHERFVDAVAQLGGPDRATPKGVLRVMGVQGLTIYHVKSHLQKYRLAKYLPDSSSEGKKTDKKESGDMLSGLDGSSGMQITEALKLQMEVQKRLHEQLEVQRQLQLRIEAQGKYLKKIIEEQQRLSGVLGEPSAPVTGDSDPATPAPTSESPLQDKSGKDCGPDKSLSVDESLSSYREPLTPDSGCNIGSPDESTGEERLSKKPRLVRGAAGYTPDIVVGHPILESGLNTSYHQSDHVLAFDQPSTSLLGAEEQLDKVSGDNL

SEQ ID NO: 40733 - protein, 237 aa, Arabidopsis thaliana
  peptide (1)..(237): Ceres Seq. ID no. 12336232
  misc_feature (1)..(129): Homolog of NCBI NO: 22329004 NR Description: putative protein
  misc_feature (1)..(176): Homolog of NCBI NO: 21536970 NR Description: transfactor-like protein [Arabidopsis thaliana]
  misc_feature (1)..(131): Homolog of NCBI NO: 26452281 NR Description: putative transfactor [Arabidopsis thaliana]
  misc_feature (1)..(176): Homolog of NCBI NO: 18399836 NR Description: expressed protein
  misc_feature (1)..(176): Homolog of NCBI NO: 15795136 NR Description: transfactor-like protein [Arabidopsis thaliana]
  misc_feature (1)..(131): Homolog of NCBI NO: 15229298 NR Description: transfactor, putative; protein id: At3g04450.1
  misc_feature (1)..(140): Homolog of NCBI NO: 6942190 NR Description: CDPK substrate protein 1; CSP1 [Mesembryanthemum
  misc_feature (1)..(180): Homolog of NCBI NO: 4519671 NR Description: transfactor [Nicotiana tabacum]
  misc_feature (1)..(202): Homolog of NCBI NO: 29647445 NR Description: putative transfactor [Oryza sativa (japonica
  misc_feature (1)..(237): Homolog of NCBI NO: 15226170 NR Description: transfactor-like protein
MGVQGLTIYHVKSHLQKYRLAKYLPDSSSEGKKTDKKESGDMLSGLDGSSGMQITEALKLQMEVQKRLHEQLEVQRQLQLRIEAQGKYLKKIIEEQQRLSGVLGEPSAPVTGDSDPATPAPTSESPLQDKSGKDCGPDKSLSVDESLSSYREPLTPDSGCNIGSPDESTGEERLSKKPRLVRGAAGYTPDIVVGHPILESGLNTSYHQSDHVLAFDQPSTSLLGAEEQLDKVSGDNL

SEQ ID NO: 40734 - protein, 196 aa, Arabidopsis thaliana
  peptide (1)..(196): Ceres Seq. ID no. 12336233
  misc_feature (1)..(88): Homolog of NCBI NO: 22329004 NR Description: putative protein
  misc_feature (1)..(135): Homolog of NCBI NO: 21536970 NR Description: transfactor-like protein [Arabidopsis thaliana]
  misc_feature (1)..(90): Homolog of NCBI NO: 26452281 NR Description: putative transfactor [Arabidopsis thaliana]
  misc_feature (1)..(135): Homolog of NCBI NO: 18399836 NR Description: expressed protein
  misc_feature (1)..(135): Homolog of NCBI NO: 15795136 NR Description: transfactor-like protein [Arabidopsis thaliana]
  misc_feature (1)..(90): Homolog of NCBI NO: 15229298 NR Description: transfactor, putative; protein id: At3g04450.1
  misc_feature (1)..(99): Homolog of NCBI NO: 6942190 NR Description: CDPK substrate protein 1; CSP1 [Mesembryanthemum
  misc_feature (1)..(139): Homolog of NCBI NO: 4519671 NR Description: transfactor [Nicotiana tabacum]
  misc_feature (1)..(161): Homolog of NCBI NO: 29647445 NR Description: putative transfactor [Oryza sativa (japonica
  misc_feature (1)..(196): Homolog of NCBI NO: 15226170 NR Description: transfactor-like protein
MLSGLDGSSGMQITEALKLQMEVQKRLHEQLEVQRQLQLRIEAQGKYLKKIIEEQQRLSGVLGEPSAPVTGDSDPATPAPTSESPLQDKSGKDCGPDKSLSVDESLSSYREPLTPDSGCNIGSPDESTGEERLSKKPRLVRGAAGYTPDIVVGHPILESGLNTSYHQSDHVLAFDQPSTSLLGAEEQLDKVSGDNL

SEQ ID NO: 40735 - DNA, 908 bp, Arabidopsis thaliana
  misc_feature (1)..(908): Ceres Seq. ID no. 13497431
  misc_feature: MA Experiment ID: 108473 Result: Down-regulated in Transcription
  misc_feature: MA Experiment 108473 PARAMETER Experiment Name: At_Drought_Flowers_cDNA_P Parameter: Timepoint (hr) Value: 7 d
  misc_feature: MA Experiment 108473 PARAMETER Experiment Name: At_Drought_Flowers_cDNA_P Parameter: Tissue Value: Flower
  misc_feature: MA Experiment 108473 PARAMETER Experiment Name: At_Drought_Flowers_cDNA_P Parameter: Treatment Value: Drought vs. No Drought
  misc_feature: MA Experiment ID: 20000173 Result: Down-regulated in Transcription
  misc_feature: MA Experiment 20000173 PARAMETER Experiment Name: At_42deg_Heat_P Parameter: Age (day) Value: 14
  misc_feature: MA Experiment 20000173 PARAMETER Experiment Name: At_42deg_Heat_P Parameter: Organism Value: A. thaliana
  misc_feature: MA Experiment 20000173 PARAMETER Experiment Name: At_42deg_Heat_P Parameter: Plant Line Value: WS
  misc_feature: MA Experiment 20000173 PARAMETER Experiment Name: At_42deg_Heat_P Parameter: Temperature (deg C) Value: 42 vs. 22
  misc_feature: MA Experiment 20000173 PARAMETER Experiment Name: At_42deg_Heat_P Parameter: Timepoint (hr) Value: 6
  misc_feature: MA Experiment 20000173 PARAMETER Experiment Name: At_42deg_Heat_P Parameter: Tissue Value: Aerial
  misc_feature: MA Experiment ID: 20000265 Result: Up-regulated in Transcription
  misc_feature: MA Experiment 20000265 PARAMETER Experiment Name: At_Open_Flower_P Parameter: Age (day) Value: 21
  misc_feature: MA Experiment 20000265 PARAMETER Experiment Name: At_Open_Flower_P Parameter: Plant Line Value: WS
  misc_feature: MA Experiment 20000265 PARAMETER Experiment Name: At_Open_Flower_P Parameter: Tissue Value: Closed Flower vs. Whole Plant
  misc_feature: MA Experiment ID: 20000286 Result: Up-regulated in Transcription
  misc_feature: MA Experiment 20000286 PARAMETER Experiment Name: At_Open_Flower_P Parameter: Age (day) Value: 21
  misc_feature: MA Experiment 20000286 PARAMETER Experiment Name: At_Open_Flower_P Parameter: Plant Line Value: WS
  misc_feature: MA Experiment 20000286 PARAMETER Experiment Name: At_Open_Flower_P Parameter: Tissue Value: Half Open vs. Whole Plant
  misc_feature: MA Experiment ID: 20001560 Result: Up-regulated in Transcription
  misc_feature: MA Experiment 20001560 PARAMETER Experiment Name: At_Drought_Soil_Dry_P Parameter: Age (day) Value: 28
  misc_feature: MA Experiment 20001560 PARAMETER Experiment Name: At_Drought_Soil_Dry_P Parameter: Organism Value: A. thaliana
  misc_feature: MA Experiment 20001560 PARAMETER Experiment Name: At_Drought_Soil_Dry_P Parameter: Plant Line Value: WS
  misc_feature: MA Experiment 20001560 PARAMETER Experiment Name: At_Drought_Soil_Dry_P Parameter: Post Timepoint (hr) Value: None
  misc_feature: MA Experiment 20001560 PARAMETER Experiment Name: At_Drought_Soil_Dry_P Parameter: Post-Treatment Value: None
  misc_feature: MA Experiment 20001560 PARAMETER Experiment Name: At_Drought_Soil_Dry_P Parameter: Timepoint (day) Value: 14
  misc_feature: MA Experiment 20001560 PARAMETER Experiment Name: At_Drought_Soil_Dry_P Parameter: Treatment Value: Drought vs. No Drought
  misc_feature: MA Experiment ID: 20001910 Result: Down-regulated in Transcription
  misc_feature: MA Experiment 20001910 PARAMETER Experiment Name: At_Drought_Reproduction_P Parameter: Age (day) Value: 37
  misc_feature: MA Experiment 20001910 PARAMETER Experiment Name: At_Drought_Reproduction_P Parameter: Organism Value: A. thaliana
  misc_feature: MA Experiment 20001910 PARAMETER Experiment Name: At_Drought_Reproduction_P Parameter: Plant Line Value: WS
  misc_feature: MA Experiment 20001910 PARAMETER Experiment Name: At_Drought_Reproduction_P Parameter: Timepoint (day) Value: 7
  misc_feature: MA Experiment 20001910 PARAMETER Experiment Name: At_Drought_Reproduction_P Parameter: Tissue Value: Flowers
  misc_feature: MA Experiment 20001910 PARAMETER Experiment Name: At_Drought_Reproduction_P Parameter: Treatment Value: Drought vs. No Drought
ttcagcggttctcgagtcatcgctgtctggaacagcgatacccccaaagcccatccttcaacattgcttcctaaccagaaatccaccatcatcttcccacgaatacaacttaaagctttaccagaaaatggagggtcagagaacacaacgccggggttacttgaaagacaaggctacagtctccaaccttgttgaagaagaaatggagaatggcatggatggagaagaggaggatggaggagacgaagacaaaaggaagaaggtgatggaaagagttagaggtcctagcactgaccgtgttccatcgcgactgtgccaggtcgataggtgcactgttaatttgactgaggccaagcagtattaccgcagacacagagtatgtgaagtacatgcaaaggcatctgctgcgactgttgcaggggtcaggcaacgcttttgtcaacaatgcagcaggtttcatgagctaccagagtttgatgaagctaaaagaagctgcaggaggcgcttagctggacacaatgagaggaggaggaagatctctggtgacagttttggagaagggtcaggccggagagggtttagcggtcaactgatccagactcaagaaagaaacagggtagacaggaaacttcctatgaccaactcatcattcaagcgaccacagatcagataaaccctcccgctctctctcttctgtcatctacatatgctctatctacactcttattagacaaataatggcatctaacaatgtcaagaaaagttggtcatggtattaaatcctacacggatatataactataaacctctagtcccctctatgctgtcctgtaatgaatatctatccggaaatgtattcgcatagtcttgcgtctaataatgtttattgattttgtaggtttgattat

SEQ ID NO: 40736 - protein, 223 aa, Arabidopsis thaliana
  peptide (1)..(223): Ceres Seq. ID no. 13497432
  misc_feature (104)..(182): Pfam Name: SBP domain Pfam Description: SBP domain
  misc_feature (32)..(188): Homolog of NCBI NO: 15232241 NR Description: squamosa promoter binding protein-related 12
  misc_feature (68)..(188): Homolog of NCBI NO: 30577628 NR Description: squamosa promoter binding like-protein [Betula
  misc_feature (74)..(183): Homolog of NCBI NO: 6094239 NR Description: SQUAMOSA-PROMOTER BINDING PROTEIN 1
  misc_feature (50)..(182): Homolog of NCBI NO: 25408313 NR Description: probable squamosa-promoter binding protein
  misc_feature (48)..(182): Homolog of NCBI NO: 21618221 NR Description: putative squamosa-promoter binding protein
  misc_feature (48)..(182): Homolog of NCBI NO: 18403387 NR Description: squamosa-promoter binding protein -related
  misc_feature (51)..(223): Homolog of NCBI NO: 25456654 NR Description: squamosa promoter binding protein 4
  misc_feature (43)..(223): Homolog of NCBI NO: 15219210 NR Description: transcription factor -related [Arabidopsis
  misc_feature (43)..(180): Homolog of NCBI NO: 25456671 NR Description: squamosa promoter binding protein-like 5
  misc_feature (43)..(223): Homolog of NCBI NO: 15232541 NR Description: squamosa promoter binding protein-related 5
SAVLESSLSGTAIPPKPILQHCFLTRNPPSSSHEYNLKLYQKMEGQRTQRRGYLKDKATVSNLVEEEMENGMDGEEEDGGDEDKRKKVMERVRGPSTDRVPSRLCQVDRCTVNLTEAKQYYRRHRVCEVHAKASAATVAGVRQRFCQQCSRFHELPEFDEAKRSCRRRLAGHNERRRKISGDSFGEGSGRRGFSGQLIQTQERNRVDRKLPMTNSSFKRPQIR

SEQ ID NO: 40737 - protein, 181 aa, Arabidopsis thaliana
  peptide (1)..(181): Ceres Seq. ID no. 13497433
  misc_feature (62)..(140): Pfam Name: SBP domain Pfam Description: SBP domain
  misc_feature (1)..(146): Homolog of NCBI NO: 15232241 NR Description: squamosa promoter binding protein-related 12
  misc_feature (26)..(146): Homolog of NCBI NO: 30577628 NR Description: squamosa promoter binding like-protein [Betula
  misc_feature (32)..(141): Homolog of NCBI NO: 6094239 NR Description: SQUAMOSA-PROMOTER BINDING PROTEIN 1
  misc_feature (8)..(140): Homolog of NCBI NO: 25408313 NR Description: probable squamosa-promoter binding protein
  misc_feature (6)..(140): Homolog of NCBI NO: 21618221 NR Description: putative squamosa-promoter binding protein
  misc_feature (6)..(140): Homolog of NCBI NO: 18403387 NR Description: squamosa-promoter binding protein -related
  misc_feature (9)..(181): Homolog of NCBI NO: 25456654 NR Description: squamosa promoter binding protein 4
  misc_feature (1)..(181): Homolog of NCBI NO: 15219210 NR Description: transcription factor -related [Arabidopsis
  misc_feature (1)..(138): Homolog of NCBI NO: 25456671 NR Description: squamosa promoter binding protein-like 5
  misc_feature (1)..(181): Homolog of NCBI NO: 15232541 NR Description: squamosa promoter binding protein-related 5
MEGQRTQRRGYLKDKATVSNLVEEEMENGMDGEEEDGGDEDKRKKVMERVRGPSTDRVPSRLCQVDRCTVNLTEAKQYYRRHRVCEVHAKASAATVAGVRQRFCQQCSRFHELPEFDEAKRSCRRRLAGHNERRRKISGDSFGEGSGRRGFSGQLIQTQERNRVDRKLPMTNSSFKRPQIR

SEQ ID NO: 40738 - protein, 156 aa, Arabidopsis thaliana
  peptide (1)..(156): Ceres Seq. ID no. 13497434
  misc_feature (37)..(115): Pfam Name: SBP domain Pfam Description: SBP domain
  misc_feature (1)..(121): Homolog of NCBI NO: 15232241 NR Description: squamosa promoter binding protein-related 12
  misc_feature (1)..(121): Homolog of NCBI NO: 30577628 NR Description: squamosa promoter binding like-protein [Betula
  misc_feature (7)..(116): Homolog of NCBI NO: 6094239 NR Description: SQUAMOSA-PROMOTER BINDING PROTEIN 1
  misc_feature (1)..(115): Homolog of NCBI NO: 25408313 NR Description: probable squamosa-promoter binding protein
  misc_feature (1)..(115): Homolog of NCBI NO: 21618221 NR Description: putative squamosa-promoter binding protein
  misc_feature (1)..(115): Homolog of NCBI NO: 18403387 NR Description: squamosa-promoter binding protein -related
  misc_feature (1)..(156): Homolog of NCBI NO: 25456654 NR Description: squamosa promoter binding protein 4
  misc_feature (1)..(156): Homolog of NCBI NO: 15219210 NR Description: transcription factor -related [Arabidopsis
  misc_feature (1)..(113): Homolog of NCBI NO: 25456671 NR Description: squamosa promoter binding protein-like 5
  misc_feature (1)..(156): Homolog of NCBI NO: 15232541 NR Description: squamosa promoter binding protein-related 5
MENGMDGEEEDGGDEDKRKKVMERVRGPSTDRVPSRLCQVDRCTVNLTEAKQYYRRHRVCEVHAKASAATVAGVRQRFCQQCSRFHELPEFDEAKRSCRRRLAGHNERRRKISGDSFGEGSGRRGFSGQLIQTQERNRVDRKLPMTNSSFKRPQIR

SEQ ID NO: 40739 - DNA, 1999 bp, Arabidopsis thaliana
  misc_feature (1)..(1999): Ceres Seq. ID no. 12328234
  misc_feature: MA Experiment ID: 108461 Result: Down-regulated in Transcription
  misc_feature: MA Experiment 108461 PARAMETER Experiment Name: At_Germinating_Seeds_cDNA_P Parameter: Age (day) Value: 1 vs. 0
  misc_feature: MA Experiment 108461 PARAMETER Experiment Name: At_Germinating_Seeds_cDNA_P Parameter: Tissue Value: Germinating Seeds
  misc_feature: MA Experiment ID: 108462 Result: Down-regulated in Transcription
  misc_feature: MA Experiment 108462 PARAMETER Experiment Name: At_Germinating_Seeds_cDNA_P Parameter: Age (day) Value: 2 vs. 0
  misc_feature: MA Experiment 108462 PARAMETER Experiment Name: At_Germinating_Seeds_cDNA_P Parameter: Tissue Value: Germinating Seeds
  misc_feature: MA Experiment ID: 108463 Result: Down-regulated in Transcription
  misc_feature: MA Experiment 108463 PARAMETER Experiment Name: At_Germinating_Seeds_cDNA_P Parameter: Age (day) Value: 3 vs. 0
  misc_feature: MA Experiment 108463 PARAMETER Experiment Name: At_Germinating_Seeds_cDNA_P Parameter: Tissue Value: Germinating Seeds
  misc_feature: MA Experiment ID: 108464 Result: Down-regulated in Transcription
  misc_feature: MA Experiment 108464 PARAMETER Experiment Name: At_Germinating_Seeds_cDNA_P Parameter: Age (day) Value: 4 vs. 0
  misc_feature: MA Experiment 108464 PARAMETER Experiment Name: At_Germinating_Seeds_cDNA_P Parameter: Tissue Value: Germinating Seeds
  misc_feature: MA Experiment ID: 108594 Result: Up-regulated in Transcription
  misc_feature: MA Experiment 108594 PARAMETER Experiment Name: At_Ler-rhl_Root_cDNA_P Parameter: Plant Line Value: null
  misc_feature: MA Experiment ID: 20000111 Result: Up-regulated in Transcription
  misc_feature: MA Experiment 20000111 PARAMETER Experiment Name: At_42deg_Heat_cDNA_P Parameter: Temperature (deg C) Value: 42 vs. 22
  misc_feature: MA Experiment 20000111 PARAMETER Experiment Name: At_42deg_Heat_cDNA_P Parameter: Timepoint (hr) Value: 6
  misc_feature: MA Experiment 20000111 PARAMETER Experiment Name: At_42deg_Heat_cDNA_P Parameter: Tissue Value: Aerial
  misc_feature: MA Experiment ID: 20000227 Result: Up-regulated in Transcription
  misc_feature: MA Experiment 20000227 PARAMETER Experiment Name: At_Root-Tips-vs-Tops_P Parameter: Tissue Value: Root Tips vs. Root Tops
  misc_feature: MA Experiment ID: 20000495 Result: Up-regulated in Transcription
  misc_feature: MA Experiment 20000495 PARAMETER Experiment Name: At_Guard_Cells_P Parameter: Harvest Date Value: 8/2/2002
  misc_feature: MA Experiment 20000495 PARAMETER Experiment Name: At_Guard_Cells_P Parameter: Organism Value: A. thaliana
  misc_feature: MA Experiment 20000495 PARAMETER Experiment Name: At_Guard_Cells_P Parameter: Tissue Value: Guard Cells vs. Leaves
  misc_feature: MA Experiment ID: 20001451 Result: Up-regulated in Transcription
  misc_feature: MA Experiment 20001451 PARAMETER Experiment Name: At_Far-red-induction_P Parameter: Age (day) Value: 7
  misc_feature: MA Experiment 20001451 PARAMETER Experiment Name: At_Far-red-induction_P Parameter: Light Value: Far-red vs. White
  misc_feature: MA Experiment 20001451 PARAMETER Experiment Name: At_Far-red-induction_P Parameter: Organism Value: A. thaliana
  misc_feature: MA Experiment 20001451 PARAMETER Experiment Name: At_Far-red-induction_P Parameter: Plant Line Value: Columbia
  misc_feature: MA Experiment 20001451 PARAMETER Experiment Name: At_Far-red-induction_P Parameter: Timepoint (hr) Value: 24
  misc_feature: MA Experiment 20001451 PARAMETER Experiment Name: At_Far-red-induction_P Parameter: Tissue Value: Whole Plant
  misc_feature: Phenotype: INFLORESCENCE Branching-Reduced Apical Dominance
  misc_feature: Phenotype: INFLORESCENCE Internode Length-Short Internode
  misc_feature: Phenotype: ROSETTE LEAVES Shape-Oval
  misc_feature: Phenotype: WHOLE PLANT Color-Dark Green
  misc_feature: Phenotype: INFLORESCENCE Branching-Reduced Apical Dominance
  misc_feature: Phenotype: INFLORESCENCE Internode Length-Short Internode
  misc_feature: Phenotype: INFLORESCENCE Branching-Reduced Apical Dominance
  misc_feature: Phenotype: INFLORESCENCE Internode Length-Short Internode
  misc_feature: Phenotype: ROSETTE LEAVES Shape-Oval
  misc_feature: Phenotype: WHOLE PLANT Color-Dark Green
  misc_feature: Phenotype: INFLORESCENCE Branching-Reduced Apical Dominance
  misc_feature: Phenotype: INFLORESCENCE Internode Length-Short Internode
agcaaggttactgcaaggttaaagcgggaagtgagcaacgagaggcagcggcggccgtcatggattcatcggcgaacataaacaaagctctaacggagacgcgtttctccgacctcgaacctccactctccggagatatcattgaggctcttaatcagtctgatttcgagttctgcactccggttcaagccgcgacgatccctttactctgtagttacaaggatgttgccgtcgacgctgccactggttctggaaaaaccctagctttcgtcgttcccctcgtagaaatcctccgtcgatccacctcattccctccgaagcctcaccaggtcatgggggtgattatatcgccaacgagagagctatcaacgcagatatataatgtcgcacaaccatttgtttcgactttggcaaatgtgaactctgtgttgcttgttggaggccgagaggtgaaagctgacatgaagattattgaagaagaaggatgcaatgtcttgattggtacacctggaagactttctgatattatggaacgaatggagattctggattttcgaaatcttgagattcttattctagatgaggcagataggcttttggagatggggttccaaaggcaggtgaattacattatctcacgcttgccaaagcagaggaggactggcctcttttcagctacacaaacagagggcgttgaagagctcgccaaggctgggcttaggaaccctgtgagagttgaagttcgagctaagtcgaagtcggaatcatcccagcaattgacaaactcgaaaaccccttctggtcttcatcttgagtatatggaatgcgaagcagataaaaaatcatcacaactagttgatctcctcatcaagaacagtgataaaaagcttatagtattcttcatgacctgtgcttctgttgactactggggactcgtactttcaaaaattcctgccctgaagtccatatctttaattcctatccatggggatatgaagcagaatgcaagagacaaggcattagcttcgtttactaaagcatcaagtggtgcccttctgtgcacagacgttgctgcacgtggacttgatattccaggcattgattatgttgttcagtatgatcccccacaagacccaaatatgttcaaccacagggccggcagaactgcaagattaggaagacaagggagggccattgtgtttttactgcccaaggaagaagcctatgtagagtttatgcgcataagaagagtccctttggaagagagaaaatgctctgaggacgcatccgatgtcatcccgattatacgttcagctgccatgaaggaccgagcagtgatggagaagggattaaaggcatttgtttcctttgtccgtgcttataaggagcatcactgctctttcattttcagatggaaagaccttgagattggaaagttagccatgggatatggcctcttgtatcttccttcaatgtctgaagttaaacaacacagactttccagtgagggtttcacaccagttgaaggtgtcaagtttgaagaaataaaattcaaggacaaatatcgggagaaacaaagacagcaaaacttacaagtaaggaaagagaaacggcaagaagagaaaaaagagaaaggcaagagaaaaagggttgatgcttctgctagtaatgatcctaagaaagcgtcgagaaagttaacggggaaacaaagacaaactattcaaactgctgaagatgaagaagtgatggatcgagattataagttgatgataaaagtaaagaaagggttaattaaagaagatgaatatgaaagacttacaggagatgatgatttattctgatgagaagaaacaaaacctgcatgctgagattggactaagcttagtgtctttctactctcatatcatatgtgattctgttaattttttttttttttttgggtgagaattaatatcggatcatgttatgtcctttttcgttctacgagtctcacttttat

SEQ ID NO: 40740 - protein, 612 aa, Arabidopsis thaliana
  peptide (1)..(612): Ceres Seq. ID no. 12328235
  misc_feature (48)..(271): Pfam Name: DEAD/DEAH box helicase Pfam Description: DEAD/DEAH box helicase
  misc_feature (30)..(559): Homolog of NCBI NO: 12849752 NR Description: unnamed protein product [Mus musculus]
  misc_feature (30)..(604): Homolog of NCBI NO: 28175486 NR Description: similar to RIKEN cDNA 2810021H22 gene [Mus
  misc_feature (30)..(604): Homolog of NCBI NO: 37543870 NR Description: similar to CG9630-PA [Homo sapiens]
  misc_feature (30)..(604): Homolog of NCBI NO: 26329441 NR Description: unnamed protein product [Mus musculus]
  misc_feature (30)..(604): Homolog of NCBI NO: 20987604 NR Description: Similar to RIKEN cDNA 2810021H22 gene [Homo
  misc_feature (253)..(612): Homolog of NCBI NO: 11358800 NR Description: RNA helicase RH18 [imported] - Arabidopsis
  misc_feature (15)..(610): Homolog of NCBI NO: 34896098 NR Description: putative RNA helicase [Oryza sativa (japonica
  misc_feature (20)..(583): Homolog of NCBI NO: 26451630 NR Description: putative ATP-dependent RNA helicase [Arabidopsis
  misc_feature (20)..(583): Homolog of NCBI NO: 15217442 NR Description: DEAD/DEAH box RNA helicase protein, putative
  misc_feature (20)..(612): Homolog of NCBI NO: 15239115 NR Description: DEAD/DEAH box RNA helicase protein, putative
QGYCKVKAGSEQREAAAAVMDSSANINKALTETRFSDLEPPLSGDIIEALNQSDFEFCTPVQAATIPLLCSYKDVAVDAATGSGKTLAFVVPLVEILRRSTSFPPKPHQVMGVIISPTRELSTQIYNVAQPFVSTLANVNSVLLVGGREVKADMKIIEEEGCNVLIGTPGRLSDIMERMEILDFRNLEILILDEADRLLEMGFQRQVNYIISRLPKQRRTGLFSATQTEGVEELAKAGLRNPVRVEVRAKSKSESSQQLTNSKTPSGLHLEYMECEADKKSSQLVDLLIKNSDKKLIVFFMTCASVDYWGLVLSKIPALKSISLIPIHGDMKQNARDKALASFTKASSGALLCTDVAARGLDIPGIDYVVQYDPPQDPNMFNHRAGRTARLGRQGRAIVFLLPKEEAYVEFMRIRRVPLEERKCSEDASDVIPIIRSAAMKDRAVMEKGLKAFVSFVRAYKEHHCSFIFRWKDLEIGKLAMGYGLLYLPSMSEVKQHRLSSEGFTPVEGVKFEEIKFKDKYREKQRQQNLQVRKEKRQEEKKEKGKRKRVDASASNDPKKASRKLTGKQRQTIQTAEDEEVMDRDYKLMIKVKKGLIKEDEYERLTGDDDLF

SEQ ID NO: 40741 - protein, 593 aa, Arabidopsis thaliana
  peptide (1)..(593): Ceres Seq. ID no. 12328236
  misc_feature (29)..(252): Pfam Name: DEAD/DEAH box helicase Pfam Description: DEAD/DEAH box helicase
  misc_feature (11)..(540): Homolog of NCBI NO: 12849752 NR Description: unnamed protein product [Mus musculus]
  misc_feature (11)..(585): Homolog of NCBI NO: 28175486 NR Description: similar to RIKEN cDNA 2810021H22 gene [Mus
  misc_feature (11)..(585): Homolog of NCBI NO: 37543870 NR Description: similar to CG9630-PA [Homo sapiens]
  misc_feature (11)..(585): Homolog of NCBI NO: 26329441 NR Description: unnamed protein product [Mus musculus]
  misc_feature (11)..(585): Homolog of NCBI NO: 20987604 NR Description: Similar to RIKEN cDNA 2810021H22 gene [Homo
  misc_feature (234)..(593): Homolog of NCBI NO: 11358800 NR Description: RNA helicase RH18 [imported] - Arabidopsis
  misc_feature (1)..(591): Homolog of NCBI NO: 34896098 NR Description: putative RNA helicase [Oryza sativa (japonica
  misc_feature (1)..(564): Homolog of NCBI NO: 26451630 NR Description: putative ATP-dependent RNA helicase [Arabidopsis
  misc_feature (1)..(564): Homolog of NCBI NO: 15217442 NR Description: DEAD/DEAH box RNA helicase protein, putative
  misc_feature (1)..(593): Homolog of NCBI NO: 15239115 NR Description: DEAD/DEAH box RNA helicase protein, putative
MDSSANINKALTETRFSDLEPPLSGDIIEALNQSDFEFCTPVQAATIPLLCSYKDVAVDAATGSGKTLAFVVPLVEILRRSTSFPPKPHQVMGVIISPTRELSTQIYNVAQPFVSTLANVNSVLLVGGREVKADMKIIEEEGCNVLIGTPGRLSDIMERMEILDFRNLEILILDEADRLLEMGFQRQVNYIISRLPKQRRTGLFSATQTEGVEELAKAGLRNPVRVEVRAKSKSESSQQLTNSKTPSGLHLEYMECEADKKSSQLVDLLIKNSDKKLIVFFMTCASVDYWGLVLSKIPALKSISLIPIHGDMKQNARDKALASFTKASSGALLCTDVAARGLDIPGIDYVVQYDPPQDPNMFNHRAGRTARLGRQGRAIVFLLPKEEAYVEFMRIRRVPLEERKCSEDASDVIPIIRSAAMKDRAVMEKGLKAFVSFVRAYKEHHCSFIFRWKDLEIGKLAMGYGLLYLPSMSEVKQHRLSSEGFTPVEGVKFEEIKFKDKYREKQRQQNLQVRKEKRQEEKKEKGKRKRVDASASNDPKKASRKLTGKQRQTIQTAEDEEVMDRDYKLMIKVKKGLIKEDEYERLTGDDDLF

SEQ ID NO: 40742 - protein, 502 aa, Arabidopsis thaliana
  peptide (1)..(502): Ceres Seq. ID no. 12328237
  misc_feature (1)..(161): Pfam Name: DEAD/DEAH box helicase Pfam Description: DEAD/DEAH box helicase
  misc_feature (1)..(449): Homolog of NCBI NO: 12849752 NR Description: unnamed protein product [Mus musculus]
  misc_feature (1)..(494): Homolog of NCBI NO: 28175486 NR Description: similar to RIKEN cDNA 2810021H22 gene [Mus
  misc_feature (1)..(494): Homolog of NCBI NO: 37543870 NR Description: similar to CG9630-PA [Homo sapiens]
  misc_feature (1)..(494): Homolog of NCBI NO: 26329441 NR Description: unnamed protein product [Mus musculus]
  misc_feature (1)..(494): Homolog of NCBI NO: 20987604 NR Description: Similar to RIKEN cDNA 2810021H22 gene [Homo
  misc_feature (143)..(502): Homolog of NCBI NO: 11358800 NR Description: RNA helicase RH18 [imported] - Arabidopsis
  misc_feature (1)..(500): Homolog of NCBI NO: 34896098 NR Description: putative RNA helicase [Oryza sativa (japonica
  misc_feature (1)..(473): Homolog of NCBI NO: 26451630 NR Description: putative ATP-dependent RNA helicase [Arabidopsis
  misc_feature (1)..(473): Homolog of NCBI NO: 15217442 NR Description: DEAD/DEAH box RNA helicase protein, putative
  misc_feature (1)..(502): Homolog of NCBI NO: 15239115 NR Description: DEAD/DEAH box RNA helicase protein, putative
MGVIISPTRELSTQIYNVAQPFVSTLANVNSVLLVGGREVKADMKIIEEEGCNVLIGTPGRLSDIMERMEILDFRNLEILILDEADRLLEMGFQRQVNYIISRLPKQRRTGLFSATQTEGVEELAKAGLRNPVRVEVRAKSKSESSQQLTNSKTPSGLHLEYMECEADKKSSQLVDLLIKNSDKKLIVFFMTCASVDYWGLVLSKIPALKSISLIPIHGDMKQNARDKALASFTKASSGALLCTDVAARGLDIPGIDYVVQYDPPQDPNMFNHRAGRTARLGRQGRAIVFLLPKEEAYVEFMRIRRVPLEERKCSEDASDVIPIIRSAAMKDRAVMEKGLKAFVSFVRAYKEHHCSFIFRWKDLEIGKLAMGYGLLYLPSMSEVKQHRLSSEGFTPVEGVKFEEIKFKDKYREKQRQQNLQVRKEKRQEEKKEKGKRKRVDASASNDPKKASRKLTGKQRQTIQTAEDEEVMDRDYKLMIKVKKGLIKEDEYERLTGDDDLF

SEQ ID NO: 40743 - DNA, 1278 bp, Arabidopsis thaliana
  misc_feature (1)..(1278): Ceres Seq. ID no. 13491338
  misc_feature: MA Experiment ID: 108435 Result: Down-regulated in Transcription
  misc_feature: MA Experiment 108435 PARAMETER Experiment Name: At_stm_Mutants_cDNA_P Parameter: Plant Line Value: wt Landsburg vs stm
  misc_feature: MA Experiment 108435 PARAMETER Experiment Name: At_stm_Mutants_cDNA_P Parameter: Tissue Value: Shoot Apical Meristem Region
  misc_feature: MA Experiment ID: 108462 Result: Down-regulated in Transcription
  misc_feature: MA Experiment 108462 PARAMETER Experiment Name: At_Germinating_Seeds_cDNA_P Parameter: Age (day) Value: 2 vs. 0
  misc_feature: MA Experiment 108462 PARAMETER Experiment Name: At_Germinating_Seeds_cDNA_P Parameter: Tissue Value: Germinating Seeds
  misc_feature: MA Experiment ID: 108463 Result: Down-regulated in Transcription
  misc_feature: MA Experiment 108463 PARAMETER Experiment Name: At_Germinating_Seeds_cDNA_P Parameter: Age (day) Value: 3 vs. 0
  misc_feature: MA Experiment 108463 PARAMETER Experiment Name: At_Germinating_Seeds_cDNA_P Parameter: Tissue Value: Germinating Seeds
  misc_feature: MA Experiment ID: 108464 Result: Down-regulated in Transcription
  misc_feature: MA Experiment 108464 PARAMETER Experiment Name: At_Germinating_Seeds_cDNA_P Parameter: Age (day) Value: 4 vs. 0
  misc_feature: MA Experiment 108464 PARAMETER Experiment Name: At_Germinating_Seeds_cDNA_P Parameter: Tissue Value: Germinating Seeds
  misc_feature: MA Experiment ID: 108561 Result: Down-regulated in Transcription
  misc_feature: MA Experiment 108561 PARAMETER Experiment Name: At_100uM_ABA_cDNA_P Parameter: Timepoint (hr) Value: 6
  misc_feature: MA Experiment 108561 PARAMETER Experiment Name: At_100uM_ABA_cDNA_P Parameter: Tissue Value: Aerial
  misc_feature: MA Experiment 108561 PARAMETER Experiment Name: At_100uM_ABA_cDNA_P Parameter: Treatment Value: 100uM ABA vs. No Treatment
  misc_feature: MA Experiment ID: 20000069 Result: Down-regulated in Transcription
  misc_feature: MA Experiment 20000069 PARAMETER Experiment Name: At_100uM_ABA_Mutants_cDNA_P Parameter: Plant Line Value: CS23
  misc_feature: MA Experiment 20000069 PARAMETER Experiment Name: At_100uM_ABA_Mutants_cDNA_P Parameter: Timepoint (hr) Value: 6
  misc_feature: MA Experiment 20000069 PARAMETER Experiment Name: At_100uM_ABA_Mutants_cDNA_P Parameter: Tissue Value: Aerial
  misc_feature: MA Experiment 20000069 PARAMETER Experiment Name: At_100uM_ABA_Mutants_cDNA_P Parameter: Treatment Value: 100uM ABA vs. No Treatment
  misc_feature: MA Experiment ID: 20000070 Result: Down-regulated in Transcription
  misc_feature: MA Experiment 20000070 PARAMETER Experiment Name: At_100uM_ABA_Mutants_cDNA_P Parameter: Plant Line Value: CS24
  misc_feature: MA Experiment 20000070 PARAMETER Experiment Name: At_100uM_ABA_Mutants_cDNA_P Parameter: Timepoint (hr) Value: 6
  misc_feature: MA Experiment 20000070 PARAMETER Experiment Name: At_100uM_ABA_Mutants_cDNA_P Parameter: Tissue Value: Aerial
  misc_feature: MA Experiment 20000070 PARAMETER Experiment Name: At_100uM_ABA_Mutants_cDNA_P Parameter: Treatment Value: 100uM ABA vs. No Treatment
  misc_feature: MA Experiment ID: 20000071 Result: Down-regulated in Transcription
  misc_feature: MA Experiment 20000071 PARAMETER Experiment Name: At_100uM_ABA_Mutants_cDNA_P Parameter: Plant Line Value: CS8104
  misc_feature: MA Experiment 20000071 PARAMETER Experiment Name: At_100uM_ABA_Mutants_cDNA_P Parameter: Timepoint (hr) Value: 6
  misc_feature: MA Experiment 20000071 PARAMETER Experiment Name: At_100uM_ABA_Mutants_cDNA_P Parameter: Tissue Value: Aerial
  misc_feature: MA Experiment 20000071 PARAMETER Experiment Name: At_100uM_ABA_Mutants_cDNA_P Parameter: Treatment Value: 100uM ABA vs. No Treatment
  misc_feature: MA Experiment ID: 20000072 Result: Down-regulated in Transcription
  misc_feature: MA Experiment 20000072 PARAMETER Experiment Name: At_100uM_ABA_Mutants_cDNA_P Parameter: Plant Line Value: CS8105
  misc_feature: MA Experiment 20000072 PARAMETER Experiment Name: At_100uM_ABA_Mutants_cDNA_P Parameter: Timepoint (hr) Value: 6
  misc_feature: MA Experiment 20000072 PARAMETER Experiment Name: At_100uM_ABA_Mutants_cDNA_P Parameter: Tissue Value: Aerial
  misc_feature: MA Experiment 20000072 PARAMETER Experiment Name: At_100uM_ABA_Mutants_cDNA_P Parameter: Treatment Value: 100uM ABA vs. No Treatment
  misc_feature: MA Experiment ID: 20000087 Result: Down-regulated in Transcription
  misc_feature: MA Experiment 20000087 PARAMETER Experiment Name: At_100uM_ABA_Mutants_cDNA_P Parameter: Plant Line Value: WS
  misc_feature: MA Experiment 20000087 PARAMETER Experiment Name: At_100uM_ABA_Mutants_cDNA_P Parameter: Timepoint (hr) Value: 6
  misc_feature: MA Experiment 20000087 PARAMETER Experiment Name: At_100uM_ABA_Mutants_cDNA_P Parameter: Tissue Value: Aerial
  misc_feature: MA Experiment 20000087 PARAMETER Experiment Name: At_100uM_ABA_Mutants_cDNA_P Parameter: Treatment Value: 100uM ABA vs. No Treatment
  misc_feature: MA Experiment ID: 20000088 Result: Down-regulated in Transcription
  misc_feature: MA Experiment 20000088 PARAMETER Experiment Name: At_100uM_ABA_Mutants_cDNA_P Parameter: Plant Line Value: Landsberg
  misc_feature: MA Experiment 20000088 PARAMETER Experiment Name: At_100uM_ABA_Mutants_cDNA_P Parameter: Timepoint (hr) Value: 6
  misc_feature: MA Experiment 20000088 PARAMETER Experiment Name: At_100uM_ABA_Mutants_cDNA_P Parameter: Tissue Value: Aerial
  misc_feature: MA Experiment 20000088 PARAMETER Experiment Name: At_100uM_ABA_Mutants_cDNA_P Parameter: Treatment Value: 100uM ABA vs. No Treatment
  misc_feature: MA Experiment ID: 20000117 Result: Down-regulated in Transcription
  misc_feature: MA Experiment 20000117 PARAMETER Experiment Name: At_100uM_ABA_Mutants_cDNA_P Parameter: Plant Line Value: Columbia
  misc_feature: MA Experiment 20000117 PARAMETER Experiment Name: At_100uM_ABA_Mutants_cDNA_P Parameter: Timepoint (hr) Value: 6
  misc_feature: MA Experiment 20000117 PARAMETER Experiment Name: At_100uM_ABA_Mutants_cDNA_P Parameter: Tissue Value: Aerial
  misc_feature: MA Experiment 20000117 PARAMETER Experiment Name: At_100uM_ABA_Mutants_cDNA_P Parameter: Treatment Value: 100uM ABA vs. No Treatment
  misc_feature: MA Experiment ID: 20000180 Result: Up-regulated in Transcription
  misc_feature: MA Experiment 20000180 PARAMETER Experiment Name: At_Germinating_Seeds_P Parameter: Age (hr) Value: 24 vs. 0
  misc_feature: MA Experiment 20000180 PARAMETER Experiment Name: At_Germinating_Seeds_P Parameter: Tissue Value: Germinating Seeds
  misc_feature: MA Experiment ID: 20000184 Result: Up-regulated in Transcription
  misc_feature: MA Experiment 20000184 PARAMETER Experiment Name: At_Shoots__P Parameter: Age (day) Value: 7
  misc_feature: MA Experiment 20000184 PARAMETER Experiment Name: At_Shoots__P Parameter: Tissue Value: Shoots vs. Whole Plant
  misc_feature: MA Experiment ID: 20000185 Result: Down-regulated in Transcription
  misc_feature: MA Experiment 20000185 PARAMETER Experiment Name: At_Roots__P Parameter: Age (day) Value: 7 vs. 21
  misc_feature: MA Experiment 20000185 PARAMETER Experiment Name: At_Roots__P Parameter: Organism Value: A. thaliana
  misc_feature: MA Experiment 20000185 PARAMETER Experiment Name: At_Roots__P Parameter: Tissue Value: Roots vs. Whole Plant
  misc_feature: MA Experiment ID: 20000211 Result: Down-regulated in Transcription
  misc_feature: MA Experiment 20000211 PARAMETER Experiment Name: At_0.001percent_MeJA__P Parameter: Age (day) Value: 14
  misc_feature: MA Experiment 20000211 PARAMETER Experiment Name: At_0.001percent_MeJA__P Parameter: Organism Value: A. thaliana
  misc_feature: MA Experiment 20000211 PARAMETER Experiment Name: At_0.001percent_MeJA__P Parameter: Plant Line Value: WS
  misc_feature: MA Experiment 20000211 PARAMETER Experiment Name: At_0.001percent_MeJA__P Parameter: Timepoint (hr) Value: 1
  misc_feature: MA Experiment 20000211 PARAMETER Experiment Name: At_0.001percent_MeJA__P Parameter: Tissue Value: Aerial
  misc_feature: MA Experiment 20000211 PARAMETER Experiment Name: At_0.001percent_MeJA__P Parameter: Treatment Value: 0.001percent MeJA vs. No Treatment
  misc_feature: MA Experiment ID: 20000224 Result: Down-regulated in Transcription
  misc_feature: MA Experiment ID: 20000234 Result: Up-regulated in Transcription
  misc_feature: MA Experiment 20000234 PARAMETER Experiment Name: At_Siliques_P Parameter: Age (day) Value: 21
  misc_feature: MA Experiment 20000234 PARAMETER Experiment Name: At_Siliques_P Parameter: Organism Value: A. thaliana
  misc_feature: MA Experiment 20000234 PARAMETER Experiment Name: At_Siliques_P Parameter: Plant Line Value: WS
  misc_feature: MA Experiment 20000234 PARAMETER Experiment Name: At_Siliques_P Parameter: Tissue Value: Less Than 5mm Siliques vs. Whole Plant
  misc_feature: MA Experiment ID: 20000235 Result: Up-regulated in Transcription
  misc_feature: MA Experiment 20000235 PARAMETER Experiment Name: At_Siliques_P Parameter: Age (day) Value: 21
  misc_feature: MA Experiment 20000235 PARAMETER Experiment Name: At_Siliques_P Parameter: Organism Value: A. thaliana
  misc_feature: MA Experiment 20000235 PARAMETER Experiment Name: At_Siliques_P Parameter: Plant Line Value: WS
  misc_feature: MA Experiment 20000235 PARAMETER Experiment Name: At_Siliques_P Parameter: Tissue Value: 5-10mm Siliques vs. Whole Plant
  misc_feature: MA Experiment ID: 20000264 Result: Up-regulated in Transcription
  misc_feature: MA Experiment 20000264 PARAMETER Experiment Name: At_Open_Flower_P Parameter: Age (day) Value: 21
  misc_feature: MA Experiment 20000264 PARAMETER Experiment Name: At_Open_Flower_P Parameter: Plant Line Value: WS
  misc_feature: MA Experiment 20000264 PARAMETER Experiment Name: At_Open_Flower_P Parameter: Tissue Value: Open Flower vs. Whole Plant
  misc_feature: MA Experiment ID: 20000265 Result: Up-regulated in Transcription
  misc_feature: MA Experiment 20000265 PARAMETER Experiment Name: At_Open_Flower_P Parameter: Age (day) Value: 21
  misc_feature: MA Experiment 20000265 PARAMETER Experiment Name: At_Open_Flower_P Parameter: Plant Line Value: WS
  misc_feature: MA Experiment 20000265 PARAMETER Experiment Name: At_Open_Flower_P Parameter: Tissue Value: Closed Flower vs. Whole Plant
  misc_feature: MA Experiment ID: 20000286 Result: Up-regulated in Transcription
  misc_feature: MA Experiment 20000286 PARAMETER Experiment Name: At_Open_Flower_P Parameter: Age (day) Value: 21
  misc_feature: MA Experiment 20000286 PARAMETER Experiment Name: At_Open_Flower_P Parameter: Plant Line Value: WS
  misc_feature: MA Experiment 20000286 PARAMETER Experiment Name: At_Open_Flower_P Parameter: Tissue Value: Half Open vs. Whole Plant
  misc_feature: MA Experiment ID: 20000308 Result: Down-regulated in Transcription
  misc_feature: MA Experiment 20000308 PARAMETER Experiment Name: At_100mM_NaCl__P Parameter: Age (day) Value: 17
  misc_feature: MA Experiment 20000308 PARAMETER Experiment Name: At_100mM_NaCl__P Parameter: Organism Value: A. thaliana
  misc_feature: MA Experiment 20000308 PARAMETER Experiment Name: At_100mM_NaCl__P Parameter: Plant Line Value: WS
  misc_feature: MA Experiment 20000308 PARAMETER Experiment Name: At_100mM_NaCl__P Parameter: Timepoint (hr) Value: 72
  misc_feature: MA Experiment 20000308 PARAMETER Experiment Name: At_100mM_NaCl__P Parameter: Tissue Value: Whole Plant
  misc_feature: MA Experiment 20000308 PARAMETER Experiment Name: At_100mM_NaCl__P Parameter: Treatment Value: 100mM NaCl vs. No Treatment
  misc_feature: MA Experiment ID: 20000437 Result: Down-regulated in Transcription
  misc_feature: MA Experiment 20000437 PARAMETER Experiment Name: At_Drought_P Parameter: Age (day) Value: 8
  misc_feature: MA Experiment 20000437 PARAMETER Experiment Name: At_Drought_P Parameter: Organism Value: A. thaliana
  misc_feature: MA Experiment 20000437 PARAMETER Experiment Name: At_Drought_P Parameter: Plant Line Value: WS
  misc_feature: MA Experiment 20000437 PARAMETER Experiment Name: At_Drought_P Parameter: Timepoint (hr) Value: 24
  misc_feature: MA Experiment 20000437 PARAMETER Experiment Name: At_Drought_P Parameter: Tissue Value: Whole Plant
  misc_feature: MA Experiment 20000437 PARAMETER Experiment Name: At_Drought_P Parameter: Treatment Value: Drought vs. No Drought
  misc_feature: MA Experiment ID: 20000438 Result: Up-regulated in Transcription
  misc_feature: MA Experiment 20000438 PARAMETER Experiment Name: At_Shoots__P Parameter: Age (day) Value: 14
  misc_feature: MA Experiment 20000438 PARAMETER Experiment Name: At_Shoots__P Parameter: Tissue Value: Shoots vs. Whole Plant
  misc_feature: MA Experiment ID: 20000439 Result: Down-regulated in Transcription
  misc_feature: MA Experiment 20000439 PARAMETER Experiment Name: At_Roots__P Parameter: Age (day) Value: 14 vs. 21
  misc_feature: MA Experiment 20000439 PARAMETER Experiment Name: At_Roots__P Parameter: Organism Value: A. thaliana
  misc_feature: MA Experiment 20000439 PARAMETER Experiment Name: At_Roots__P Parameter: Tissue Value: Roots vs. Whole Plant
  misc_feature: MA Experiment ID: 20001247 Result: Up-regulated in Transcription
  misc_feature: MA Experiment 20001247 PARAMETER Experiment Name: At_Far-red-induction_P Parameter: Age (day) Value: 7
  misc_feature: MA Experiment 20001247 PARAMETER Experiment Name: At_Far-red-induction_P Parameter: Light Value: Far-red vs. White
  misc_feature: MA Experiment 20001247 PARAMETER Experiment Name: At_Far-red-induction_P Parameter: Organism Value: A. thaliana
  misc_feature: MA Experiment 20001247 PARAMETER Experiment Name: At_Far-red-induction_P Parameter: Plant Line Value: Columbia
  misc_feature: MA Experiment 20001247 PARAMETER Experiment Name: At_Far-red-induction_P Parameter: Timepoint (hr) Value: 1
  misc_feature: MA Experiment 20001247 PARAMETER Experiment Name: At_Far-red-induction_P Parameter: Tissue Value: Whole Plant
  misc_feature: MA Experiment ID: 20001248 Result: Up-regulated in Transcription
  misc_feature: MA Experiment 20001248 PARAMETER Experiment Name: At_Far-red-induction_P Parameter: Age (day) Value: 7
  misc_feature: MA Experiment 20001248 PARAMETER Experiment Name: At_Far-red-induction_P Parameter: Light Value: Far-red vs. White
  misc_feature: MA Experiment 20001248 PARAMETER Experiment Name: At_Far-red-induction_P Parameter: Organism Value: A. thaliana
  misc_feature: MA Experiment 20001248 PARAMETER Experiment Name: At_Far-red-induction_P Parameter: Plant Line Value: Columbia
  misc_feature: MA Experiment 20001248 PARAMETER Experiment Name: At_Far-red-induction_P Parameter: Timepoint (hr) Value: 4
  misc_feature: MA Experiment 20001248 PARAMETER Experiment Name: At_Far-red-induction_P Parameter: Tissue Value: Whole Plant
  misc_feature: MA Experiment ID: 20001450 Result: Up-regulated in Transcription
  misc_feature: MA Experiment 20001450 PARAMETER Experiment Name: At_Far-red-induction_P Parameter: Age (day) Value: 7
  misc_feature: MA Experiment 20001450 PARAMETER Experiment Name: At_Far-red-induction_P Parameter: Light Value: Far-red vs. White
  misc_feature: MA Experiment 20001450 PARAMETER Experiment Name: At_Far-red-induction_P Parameter: Organism Value: A. thaliana
  misc_feature: MA Experiment 20001450 PARAMETER Experiment Name: At_Far-red-induction_P Parameter: Plant Line Value: Columbia
  misc_feature: MA Experiment 20001450 PARAMETER Experiment Name: At_Far-red-induction_P Parameter: Timepoint (hr) Value: 8
  misc_feature: MA Experiment 20001450 PARAMETER Experiment Name: At_Far-red-induction_P Parameter: Tissue Value: Whole Plant
  misc_feature: MA Experiment ID: 20001554 Result: Down-regulated in Transcription
  misc_feature: MA Experiment 20001554 PARAMETER Experiment Name: At_Drought_Soil_Dry_P Parameter: Age (day) Value: 21
  misc_feature: MA Experiment 20001554 PARAMETER Experiment Name: At_Drought_Soil_Dry_P Parameter: Organism Value: A. thaliana
  misc_feature: MA Experiment 20001554 PARAMETER Experiment Name: At_Drought_Soil_Dry_P Parameter: Plant Line Value: WS
  misc_feature: MA Experiment 20001554 PARAMETER Experiment Name: At_Drought_Soil_Dry_P Parameter: Post Timepoint (hr) Value: None
  misc_feature: MA Experiment 20001554 PARAMETER Experiment Name: At_Drought_Soil_Dry_P Parameter: Post-Treatment Value: None
  misc_feature: MA Experiment 20001554 PARAMETER Experiment Name: At_Drought_Soil_Dry_P Parameter: Timepoint (day) Value: 7
  misc_feature: MA Experiment 20001554 PARAMETER Experiment Name: At_Drought_Soil_Dry_P Parameter: Treatment Value: Drought vs. No Drought
  misc_feature: MA Experiment ID: 20001555 Result: Down-regulated in Transcription
  misc_feature: MA Experiment 20001555 PARAMETER Experiment Name: At_Drought_Soil_Dry_P Parameter: Age (day) Value: 24
  misc_feature: MA Experiment 20001555 PARAMETER Experiment Name: At_Drought_Soil_Dry_P Parameter: Organism Value: A. thaliana
  misc_feature: MA Experiment 20001555 PARAMETER Experiment Name: At_Drought_Soil_Dry_P Parameter: Plant Line Value: WS
  misc_feature: MA Experiment 20001555 PARAMETER Experiment Name: At_Drought_Soil_Dry_P Parameter: Post Timepoint (hr) Value: None
  misc_feature: MA Experiment 20001555 PARAMETER Experiment Name: At_Drought_Soil_Dry_P Parameter: Post-Treatment Value: None
  misc_feature: MA Experiment 20001555 PARAMETER Experiment Name: At_Drought_Soil_Dry_P Parameter: Timepoint (day) Value: 10
  misc_feature: MA Experiment 20001555 PARAMETER Experiment Name: At_Drought_Soil_Dry_P Parameter: Treatment Value: Drought vs. No Drought
  misc_feature: MA Experiment ID: 20001769 Result: Up-regulated in Transcription
  misc_feature: MA Experiment 20001769 PARAMETER Experiment Name: At_Far-red-enriched-adult_P Parameter: Age (day) Value: 28
  misc_feature: MA Experiment 20001769 PARAMETER Experiment Name: At_Far-red-enriched-adult_P Parameter: Light Value: Far-red enriched vs. White
  misc_feature: MA Experiment 20001769 PARAMETER Experiment Name: At_Far-red-enriched-adult_P Parameter: Organism Value: A. thaliana
  misc_feature: MA Experiment 20001769 PARAMETER Experiment Name: At_Far-red-enriched-adult_P Parameter: Plant Line Value: Columbia
  misc_feature: MA Experiment 20001769 PARAMETER Experiment Name: At_Far-red-enriched-adult_P Parameter: Timepoint (hr) Value: 4
  misc_feature: MA Experiment 20001769 PARAMETER Experiment Name: At_Far-red-enriched-adult_P Parameter: Tissue Value: Aerial
  misc_feature: MA Experiment ID: 20001770 Result: Up-regulated in Transcription
  misc_feature: MA Experiment 20001770 PARAMETER Experiment Name: At_Far-red-enriched-adult_P Parameter: Age (day) Value: 28
  misc_feature: MA Experiment 20001770 PARAMETER Experiment Name: At_Far-red-enriched-adult_P Parameter: Light Value: Far-red enriched vs. White
  misc_feature: MA Experiment 20001770 PARAMETER Experiment Name: At_Far-red-enriched-adult_P Parameter: Organism Value: A. thaliana
  misc_feature: MA Experiment 20001770 PARAMETER Experiment Name: At_Far-red-enriched-adult_P Parameter: Plant Line Value: Columbia
  misc_feature: MA Experiment 20001770 PARAMETER Experiment Name: At_Far-red-enriched-adult_P Parameter: Timepoint (hr) Value: 8
  misc_feature: MA Experiment 20001770 PARAMETER Experiment Name: At_Far-red-enriched-adult_P Parameter: Tissue Value: Aerial
  misc_feature: MA Experiment ID: 20001906 Result: Down-regulated in Transcription
  misc_feature: MA Experiment 20001906 PARAMETER Experiment Name: At_Drought_Reproduction_P Parameter: Age (day) Value: 35
  misc_feature: MA Experiment 20001906 PARAMETER Experiment Name: At_Drought_Reproduction_P Parameter: Organism Value: A. thaliana
  misc_feature: MA Experiment 20001906 PARAMETER Experiment Name: At_Drought_Reproduction_P Parameter: Plant Line Value: WS
  misc_feature: MA Experiment 20001906 PARAMETER Experiment Name: At_Drought_Reproduction_P Parameter: Timepoint (day) Value: 5
  misc_feature: MA Experiment 20001906 PARAMETER Experiment Name: At_Drought_Reproduction_P Parameter: Tissue Value: Siliques
  misc_feature: MA Experiment 20001906 PARAMETER Experiment Name: At_Drought_Reproduction_P Parameter: Treatment Value: Drought vs. No Drought
  misc_feature: MA Experiment ID: 20001911 Result: Down-regulated in Transcription
  misc_feature: MA Experiment 20001911 PARAMETER Experiment Name: At_Drought_Reproduction_P Parameter: Age (day) Value: 40
  misc_feature: MA Experiment 20001911 PARAMETER Experiment Name: At_Drought_Reproduction_P Parameter: Organism Value: A. thaliana
  misc_feature: MA Experiment 20001911 PARAMETER Experiment Name: At_Drought_Reproduction_P Parameter: Plant Line Value: WS
  misc_feature: MA Experiment 20001911 PARAMETER Experiment Name: At_Drought_Reproduction_P Parameter: Timepoint (day) Value: 10
  misc_feature: MA Experiment 20001911 PARAMETER Experiment Name: At_Drought_Reproduction_P Parameter: Tissue Value: Flowers
  misc_feature: MA Experiment 20001911 PARAMETER Experiment Name: At_Drought_Reproduction_P Parameter: Treatment Value: Drought vs. No Drought
  misc_feature: Phenotype: FERTILITY Fertility-Reduced
  misc_feature: Phenotype: WHOLE PLANT Color-Dark Green
  misc_feature: Phenotype: WHOLE PLANT Size-Small
  misc_feature: Phenotype: ROSETTE LEAVES Curled-Curled 2
  misc_feature: Phenotype: ROSETTE LEAVES Disorganized Rosette-Disorganized Rosette
  misc_feature: Phenotype: WHOLE PLANT Color-Dark Green
  misc_feature: Phenotype: WHOLE PLANT Size-Small
  misc_feature: Phenotype: FERTILITY Fertility-Reduced
ctcccaaacctatcttcttcttcctctcttgtctctctcgctctctctcttctacattgtttcttgaggtcaatctattaaaaatgggattatattcactaatcacaggaagaagaggaccaagtggacttggttcagcttcaacagctgaagaggttactcaagggattgatgcaactaatctcactgcaattatcacaggagggacaggaggaatagggatggagacagcgagagtgctgtcgaagagaggtgctcatgtggtgatcggtgcccgaaacatgggagctgcagaaaacgccaaaacagagattctcagacaaaacgcaaacgcacgtgtcactcttcttcaattagatctctcttccatcaaatccatcaaagcctttgttcgtgaatttcatgccctccatcttcctctcaatctcctcataaacaatgcaggagtaatgttctgtccataccaactctctgaagatggaatcgaattgcagtttgctacaaatcacattggtcactttctgttgacaaacttgctcttggacacaatgaagaacacagctaaaaccagtggtgttgaaggaagaattttgaatgtatcatctgtagctcatatctatacttaccaagaaggaatccaattcgacagcatcaatgacatttgcagttactcggataagcgagcttacggacaatcgaaactagccaatatattgcatgctaatgagctctcccgtcagcttcaggaagaaggagtaaacataacagcaaattcagttcaccctggtcttattctcaccaatctcttccaacacactgctcttttaatgaggttcctgaagttcttcagcttctacttgtggaaaaatatacctcagggagcagcaacaacatgttatgttgctctgcatccaagtgtgaagggagtaacaggaaagtactttgctgattgcaacgaagtcactccaagcaaacttgctagagatgagactttggcacagaaactctgggatttcagtgttaagctcattaactcggtttctaaaaagaactacctcggtttcgatgacaccacttgaatctctacggtgttcttgttgaatgttacctaaagagtgaaaaaaaagtaagaacaagtagagattgtgatgtttctttccacattatcgtatggtaactcatgagatgcattgttgtatgcttaaatattttatcgagtgaatatgtaaccgcgtcaatcttttcatagtatggacaataaaaagaagggttgttcat

SEQ ID NO: 40744 - protein, 358 aa, Arabidopsis thaliana
  peptide (1)..(358): Ceres Seq. ID no. 13491339
  misc_feature (36)..(347): Homolog of NCBI NO: 18416145 NR Description: short-chain dehydrogenase/reductase family
  misc_feature (36)..(347): Homolog of NCBI NO: 30686197 NR Description: short-chain dehydrogenase/reductase family
  misc_feature (36)..(345): Homolog of NCBI NO: 23297050 NR Description: unknown protein [Arabidopsis thaliana]
  misc_feature (28)..(348): Homolog of NCBI NO: 34895876 NR Description: P0009G03.18 [Oryza sativa (japonica
  misc_feature (30)..(358): Homolog of NCBI NO: 11250521 NR Description: hypothetical protein T22P11.130 - Arabidopsis
  misc_feature (28)..(348): Homolog of NCBI NO: 15224306 NR Description: short-chain dehydrogenase/reductase family
  misc_feature (28)..(346): Homolog of NCBI NO: 629592 NR Description: hypothetical protein - rape
  misc_feature (28)..(358): Homolog of NCBI NO: 21554820 NR Description: putativepod-specific dehydrogenase SAC25
  misc_feature (28)..(358): Homolog of NCBI NO: 18413950 NR Description: short-chain dehydrogenase/reductase family
  misc_feature (28)..(358): Homolog of NCBI NO: 20260302 NR Description: putative protein [Arabidopsis thaliana]
PKPIFFFLSCLSRSLSSTLFLEVNLLKMGLYSLITGRRGPSGLGSASTAEEVTQGIDATNLTAIITGGTGGIGMETARVLSKRGAHVVIGARNMGAAENAKTEILRQNANARVTLLQLDLSSIKSIKAFVREFHALHLPLNLLINNAGVMFCPYQLSEDGIELQFATNHIGHFLLTNLLLDTMKNTAKTSGVEGRILNVSSVAHIYTYQEGIQFDSINDICSYSDKRAYGQSKLANILHANELSRQLQEEGVNITANSVHPGLILTNLFQHTALLMRFLKFFSFYLWKNIPQGAATTCYVALHPSVKGVTGKYFADCNEVTPSKLARDETLAQKLWDFSVKLINSVSKKNYLGFDDTT

SEQ ID NO: 40745 - protein, 331 aa, Arabidopsis thaliana
  peptide (1)..(331): Ceres Seq. ID no. 13491340
  misc_feature (9)..(320): Homolog of NCBI NO: 18416145 NR Description: short-chain dehydrogenase/reductase family
  misc_feature (9)..(320): Homolog of NCBI NO: 30686197 NR Description: short-chain dehydrogenase/reductase family
  misc_feature (9)..(318): Homolog of NCBI NO: 23297050 NR Description: unknown protein [Arabidopsis thaliana]
  misc_feature (1)..(321): Homolog of NCBI NO: 34895876 NR Description: P0009G03.18 [Oryza sativa (japonica
  misc_feature (3)..(331): Homolog of NCBI NO: 11250521 NR Description: hypothetical protein T22P11.130 - Arabidopsis
  misc_feature (1)..(321): Homolog of NCBI NO: 15224306 NR Description: short-chain dehydrogenase/reductase family
  misc_feature (1)..(319): Homolog of NCBI NO: 629592 NR Description: hypothetical protein - rape
  misc_feature (1)..(331): Homolog of NCBI NO: 21554820 NR Description: putativepod-specific dehydrogenase SAC25
  misc_feature (1)..(331): Homolog of NCBI NO: 18413950 NR Description: short-chain dehydrogenase/reductase family
  misc_feature (1)..(331): Homolog of NCBI NO: 20260302 NR Description: putative protein [Arabidopsis thaliana]
MGLYSLITGRRGPSGLGSASTAEEVTQGIDATNLTAIITGGTGGIGMETARVLSKRGAHVVIGARNMGAAENAKTEILRQNANARVTLLQLDLSSIKSIKAFVREFHALHLPLNLLINNAGVMFCPYQLSEDGIELQFATNHIGHFLLTNLLLDTMKNTAKTSGVEGRILNVSSVAHIYTYQEGIQFDSINDICSYSDKRAYGQSKLANILHANELSRQLQEEGVNITANSVHPGLILTNLFQHTALLMRFLKFFSFYLWKNIPQGAATTCYVALHPSVKGVTGKYFADCNEVTPSKLARDETLAQKLWDFSVKLINSVSKKNYLGFDDTT

SEQ ID NO: 40746 - protein, 285 aa, Arabidopsis thaliana; identical to SEQ ID NO: 36159
  peptide (1)..(285): Ceres Seq. ID no. 13491341
  misc_feature (1)..(274): Homolog of NCBI NO: 18416145 NR Description: short-chain dehydrogenase/reductase family
  misc_feature (1)..(274): Homolog of NCBI NO: 30686197 NR Description: short-chain dehydrogenase/reductase family
  misc_feature (1)..(272): Homolog of NCBI NO: 23297050 NR Description: unknown protein [Arabidopsis thaliana]
  misc_feature (1)..(275): Homolog of NCBI NO: 34895876 NR Description: P0009G03.18 [Oryza sativa (japonica
  misc_feature (1)..(285): Homolog of NCBI NO: 11250521 NR Description: hypothetical protein T22P11.130 - Arabidopsis
  misc_feature (1)..(275): Homolog of NCBI NO: 15224306 NR Description: short-chain dehydrogenase/reductase family
  misc_feature (1)..(273): Homolog of NCBI NO: 629592 NR Description: hypothetical protein - rape
  misc_feature (1)..(285): Homolog of NCBI NO: 21554820 NR Description: putativepod-specific dehydrogenase SAC25
  misc_feature (1)..(285): Homolog of NCBI NO: 18413950 NR Description: short-chain dehydrogenase/reductase family
  misc_feature (1)..(285): Homolog of NCBI NO: 20260302 NR Description: putative protein [Arabidopsis thaliana]

SEQ ID NO: 40747 - DNA, 1833 bp, Arabidopsis thaliana
  misc_feature (1)..(1833): Ceres Seq. ID no. 13490965
  misc_feature: MA Experiment ID: 108434 Result: Down-regulated in Transcription
  misc_feature: MA Experiment 108434 PARAMETER Experiment Name: At_Root_Tips_cDNA_P Parameter: Tissue Value: Root Tips
  misc_feature: MA Experiment ID: 108576 Result: Down-regulated in Transcription
  misc_feature: MA Experiment 108576 PARAMETER Experiment Name: At_42deg_Heat_cDNA_P Parameter: Temperature (deg C) Value: 42 vs. 22
  misc_feature: MA Experiment 108576 PARAMETER Experiment Name: At_42deg_Heat_cDNA_P Parameter: Timepoint (hr) Value: 1
  misc_feature: MA Experiment 108576 PARAMETER Experiment Name: At_42deg_Heat_cDNA_P Parameter: Tissue Value: Aerial
  misc_feature: MA Experiment ID: 108577 Result: Down-regulated in Transcription
  misc_feature: MA Experiment 108577 PARAMETER Experiment Name: At_42deg_Heat_cDNA_P Parameter: Temperature (deg C) Value: 42 vs. 22
  misc_feature: MA Experiment 108577 PARAMETER Experiment Name: At_42deg_Heat_cDNA_P Parameter: Timepoint (hr) Value: 6
  misc_feature: MA Experiment 108577 PARAMETER Experiment Name: At_42deg_Heat_cDNA_P Parameter: Tissue Value: Aerial
  misc_feature: MA Experiment ID: 108579 Result: Up-regulated in Transcription
  misc_feature: MA Experiment 108579 PARAMETER Experiment Name: At_4deg_Cold_cDNA_P Parameter: Temperature (deg C) Value: 4 vs. 22
  misc_feature: MA Experiment 108579 PARAMETER Experiment Name: At_4deg_Cold_cDNA_P Parameter: Timepoint (hr) Value: 6
  misc_feature: MA Experiment 108579 PARAMETER Experiment Name: At_4deg_Cold_cDNA_P Parameter: Tissue Value: Aerial
  misc_feature: MA Experiment ID: 108595 Result: Down-regulated in Transcription
  misc_feature: MA Experiment 108595 PARAMETER Experiment Name: At_Ler-pi_Ovule_cDNA_P Parameter: Plant Line Value: null
  misc_feature: MA Experiment ID: 108607 Result: Down-regulated in Transcription
  misc_feature: MA Experiment 108607 PARAMETER Experiment Name: At_100uM_ABA_cDNA_P Parameter: Timepoint (hr) Value: 4
  misc_feature: MA Experiment 108607 PARAMETER Experiment Name: At_100uM_ABA_cDNA_P Parameter: Tissue Value: Aerial
  misc_feature: MA Experiment 108607 PARAMETER Experiment Name: At_100uM_ABA_cDNA_P Parameter: Treatment Value: 100uM ABA vs. No Treatment
  misc_feature: MA Experiment ID: 108667 Result: Down-regulated in Transcription
  misc_feature: MA Experiment 108667 PARAMETER Experiment Name: At_2mM_SA_cDNA_P Parameter: Plant Line Value: WS
  misc_feature: MA Experiment 108667 PARAMETER Experiment Name: At_2mM_SA_cDNA_P Parameter: Timepoint (hr) Value: 1
  misc_feature: MA Experiment 108667 PARAMETER Experiment Name: At_2mM_SA_cDNA_P Parameter: Treatment Value: 2mM SA vs. No Treatment
  misc_feature: MA Experiment ID: 108668 Result: Down-regulated in Transcription
  misc_feature: MA Experiment 108668 PARAMETER Experiment Name: At_2mM_SA_cDNA_P Parameter: Plant Line Value: WS
  misc_feature: MA Experiment 108668 PARAMETER Experiment Name: At_2mM_SA_cDNA_P Parameter: Timepoint (hr) Value: 6
  misc_feature: MA Experiment 108668 PARAMETER Experiment Name: At_2mM_SA_cDNA_P Parameter: Treatment Value: 2mM SA vs. No Treatment
  misc_feature: MA Experiment ID: 20000093 Result: Down-regulated in Transcription
  misc_feature: MA Experiment 20000093 PARAMETER Experiment Name: At_42deg_Heat_cDNA_P Parameter: Temperature (deg C) Value: 42 vs. 22
  misc_feature: MA Experiment 20000093 PARAMETER Experiment Name: At_42deg_Heat_cDNA_P Parameter: Timepoint (hr) Value: 0.5
  misc_feature: MA Experiment 20000093 PARAMETER Experiment Name: At_42deg_Heat_cDNA_P Parameter: Tissue Value: Aerial
  misc_feature: MA Experiment ID: 20000112 Result: Down-regulated in Transcription
  misc_feature: MA Experiment 20000112 PARAMETER Experiment Name: At_42deg_Heat_cDNA_P Parameter: Temperature (deg C) Value: 42 vs. 22
  misc_feature: MA Experiment 20000112 PARAMETER Experiment Name: At_42deg_Heat_cDNA_P Parameter: Timepoint (hr) Value: 2
  misc_feature: MA Experiment 20000112 PARAMETER Experiment Name: At_42deg_Heat_cDNA_P Parameter: Tissue Value: Aerial
  misc_feature: MA Experiment ID: 20000113 Result: Down-regulated in Transcription
  misc_feature: MA Experiment 20000113 PARAMETER Experiment Name: At_42deg_Heat_cDNA_P Parameter: Temperature (deg C) Value: 42 vs. 22
  misc_feature: MA Experiment 20000113 PARAMETER Experiment Name: At_42deg_Heat_cDNA_P Parameter: Timepoint (hr) Value: 8
  misc_feature: MA Experiment 20000113 PARAMETER Experiment Name: At_42deg_Heat_cDNA_P Parameter: Tissue Value: Aerial
  misc_feature: MA Experiment ID: 20000144 Result: Down-regulated in Transcription
  misc_feature: MA Experiment 20000144 PARAMETER Experiment Name: At_42deg_Heat_cDNA_P Parameter: Temperature (deg C) Value: 42 vs. 22
  misc_feature: MA Experiment 20000144 PARAMETER Experiment Name: At_42deg_Heat_cDNA_P Parameter: Timepoint (hr) Value: 1
  misc_feature: MA Experiment 20000144 PARAMETER Experiment Name: At_42deg_Heat_cDNA_P Parameter: Tissue Value: Aerial
  misc_feature: MA Experiment ID: 20000169 Result: Down-regulated in Transcription
  misc_feature: MA Experiment 20000169 PARAMETER Experiment Name: At_100uM_ABA_P Parameter: Age (day) Value: 14
  misc_feature: MA Experiment 20000169 PARAMETER Experiment Name: At_100uM_ABA_P Parameter: Organism Value: A. thaliana
  misc_feature: MA Experiment 20000169 PARAMETER Experiment Name: At_100uM_ABA_P Parameter: Plant Line Value: WS
  misc_feature: MA Experiment 20000169 PARAMETER Experiment Name: At_100uM_ABA_P Parameter: Timepoint (hr) Value: 6
  misc_feature: MA Experiment 20000169 PARAMETER Experiment Name: At_100uM_ABA_P Parameter: Tissue Value: Aerial
  misc_feature: MA Experiment 20000169 PARAMETER Experiment Name: At_100uM_ABA_P Parameter: Treatment Value: 100uM ABA vs. No Treatment
  misc_feature: MA Experiment ID: 20000173 Result: Down-regulated in Transcription
  misc_feature: MA Experiment 20000173 PARAMETER Experiment Name: At_42deg_Heat_P Parameter: Age (day) Value: 14
  misc_feature: MA Experiment 20000173 PARAMETER Experiment Name: At_42deg_Heat_P Parameter: Organism Value: A. thaliana
  misc_feature: MA Experiment 20000173 PARAMETER Experiment Name: At_42deg_Heat_P Parameter: Plant Line Value: WS
  misc_feature: MA Experiment 20000173 PARAMETER Experiment Name: At_42deg_Heat_P Parameter: Temperature (deg C) Value: 42 vs. 22
  misc_feature: MA Experiment 20000173 PARAMETER Experiment Name: At_42deg_Heat_P Parameter: Timepoint (hr) Value: 6
  misc_feature: MA Experiment 20000173 PARAMETER Experiment Name: At_42deg_Heat_P Parameter: Tissue Value: Aerial
  misc_feature: MA Experiment ID: 20000182 Result: Down-regulated in Transcription
  misc_feature: MA Experiment 20000182 PARAMETER Experiment Name: At_2mM_SA_P Parameter: Age (day) Value: 14
  misc_feature: MA Experiment 20000182 PARAMETER Experiment Name: At_2mM_SA_P Parameter: Organism Value: A. thaliana
  misc_feature: MA Experiment 20000182 PARAMETER Experiment Name: At_2mM_SA_P Parameter: Plant Line Value: WS
  misc_feature: MA Experiment 20000182 PARAMETER Experiment Name: At_2mM_SA_P Parameter: Timepoint (hr) Value: 6
  misc_feature: MA Experiment 20000182 PARAMETER Experiment Name: At_2mM_SA_P Parameter: Tissue Value: Aerial
  misc_feature: MA Experiment 20000182 PARAMETER Experiment Name: At_2mM_SA_P Parameter: Treatment Value: 2mM SA vs. No Treatment
  misc_feature: MA Experiment ID: 20000185 Result: Up-regulated in Transcription
  misc_feature: MA Experiment 20000185 PARAMETER Experiment Name: At_Roots__P Parameter: Age (day) Value: 7 vs. 21
  misc_feature: MA Experiment 20000185 PARAMETER Experiment Name: At_Roots__P Parameter: Organism Value: A. thaliana
  misc_feature: MA Experiment 20000185 PARAMETER Experiment Name: At_Roots__P Parameter: Tissue Value: Roots vs. Whole Plant
  misc_feature: MA Experiment ID: 20000224 Result: Up-regulated in Transcription
  misc_feature: MA Experiment ID: 20000227 Result: Down-regulated in Transcription
  misc_feature: MA Experiment 20000227 PARAMETER Experiment Name: At_Root-Tips-vs-Tops_P Parameter: Tissue Value: Root Tips vs. Root Tops
  misc_feature: MA Experiment ID: 20000265 Result: Up-regulated in Transcription
  misc_feature: MA Experiment 20000265 PARAMETER Experiment Name: At_Open_Flower_P Parameter: Age (day) Value: 21
  misc_feature: MA Experiment 20000265 PARAMETER Experiment Name: At_Open_Flower_P Parameter: Plant Line Value: WS
  misc_feature: MA Experiment 20000265 PARAMETER Experiment Name: At_Open_Flower_P Parameter: Tissue Value: Closed Flower vs. Whole Plant
  misc_feature: MA Experiment ID: 20000286 Result: Up-regulated in Transcription
  misc_feature: MA Experiment 20000286 PARAMETER Experiment Name: At_Open_Flower_P Parameter: Age (day) Value: 21
  misc_feature: MA Experiment 20000286 PARAMETER Experiment Name: At_Open_Flower_P Parameter: Plant Line Value: WS
  misc_feature: MA Experiment 20000286 PARAMETER Experiment Name: At_Open_Flower_P Parameter: Tissue Value: Half Open vs. Whole Plant
  misc_feature: MA Experiment ID: 20000439 Result: Up-regulated in Transcription
  misc_feature: MA Experiment 20000439 PARAMETER Experiment Name: At_Roots__P Parameter: Age (day) Value: 14 vs. 21
  misc_feature: MA Experiment 20000439 PARAMETER Experiment Name: At_Roots__P Parameter: Organism Value: A. thaliana
  misc_feature: MA Experiment 20000439 PARAMETER Experiment Name: At_Roots__P Parameter: Tissue Value: Roots vs. Whole Plant
  misc_feature: MA Experiment ID: 20000453 Result: Down-regulated in Transcription
  misc_feature: MA Experiment 20000453 PARAMETER Experiment Name: At_100uM_ABA_P Parameter: Age (day) Value: 15
  misc_feature: MA Experiment 20000453 PARAMETER Experiment Name: At_100uM_ABA_P Parameter: Organism Value: A. thaliana
  misc_feature: MA Experiment 20000453 PARAMETER Experiment Name: At_100uM_ABA_P Parameter: Plant Line Value: WS
  misc_feature: MA Experiment 20000453 PARAMETER Experiment Name: At_100uM_ABA_P Parameter: Timepoint (hr) Value: 24
  misc_feature: MA Experiment 20000453 PARAMETER Experiment Name: At_100uM_ABA_P Parameter: Tissue Value: Aerial
  misc_feature: MA Experiment 20000453 PARAMETER Experiment Name: At_100uM_ABA_P Parameter: Treatment Value: 100uM ABA vs. No Treatment
  misc_feature: MA Experiment ID: 20001247 Result: Down-regulated in Transcription
  misc_feature: MA Experiment 20001247 PARAMETER Experiment Name: At_Far-red-induction_P Parameter: Age (day) Value: 7
  misc_feature: MA Experiment 20001247 PARAMETER Experiment Name: At_Far-red-induction_P Parameter: Light Value: Far-red vs. White
  misc_feature: MA Experiment 20001247 PARAMETER Experiment Name: At_Far-red-induction_P Parameter: Organism Value: A. thaliana
  misc_feature: MA Experiment 20001247 PARAMETER Experiment Name: At_Far-red-induction_P Parameter: Plant Line Value: Columbia
  misc_feature: MA Experiment 20001247 PARAMETER Experiment Name: At_Far-red-induction_P Parameter: Timepoint (hr) Value: 1
  misc_feature: MA Experiment 20001247 PARAMETER Experiment Name: At_Far-red-induction_P Parameter: Tissue Value: Whole Plant
  misc_feature: MA Experiment ID: 20001555 Result: Down-regulated in Transcription
  misc_feature: MA Experiment 20001555 PARAMETER Experiment Name: At_Drought_Soil_Dry_P Parameter: Age (day) Value: 24
  misc_feature: MA Experiment 20001555 PARAMETER Experiment Name: At_Drought_Soil_Dry_P Parameter: Organism Value: A. thaliana
  misc_feature: MA Experiment 20001555 PARAMETER Experiment Name: At_Drought_Soil_Dry_P Parameter: Plant Line Value: WS
  misc_feature: MA Experiment 20001555 PARAMETER Experiment Name: At_Drought_Soil_Dry_P Parameter: Post Timepoint (hr) Value: None
  misc_feature: MA Experiment 20001555 PARAMETER Experiment Name: At_Drought_Soil_Dry_P Parameter: Post-Treatment Value: None
  misc_feature: MA Experiment 20001555 PARAMETER Experiment Name: At_Drought_Soil_Dry_P Parameter: Timepoint (day) Value: 10
  misc_feature: MA Experiment 20001555 PARAMETER Experiment Name: At_Drought_Soil_Dry_P Parameter: Treatment Value: Drought vs. No Drought
  misc_feature: MA Experiment ID: 20001557 Result: Up-regulated in Transcription
  misc_feature: MA Experiment 20001557 PARAMETER Experiment Name: At_Drought_Soil_Dry_P Parameter: Age (day) Value: 27
  misc_feature: MA Experiment 20001557 PARAMETER Experiment Name: At_Drought_Soil_Dry_P Parameter: Organism Value: A. thaliana
  misc_feature: MA Experiment 20001557 PARAMETER Experiment Name: At_Drought_Soil_Dry_P Parameter: Plant Line Value: WS
  misc_feature: MA Experiment 20001557 PARAMETER Experiment Name: At_Drought_Soil_Dry_P Parameter: Post Timepoint (hr) Value: 3
  misc_feature: MA Experiment 20001557 PARAMETER Experiment Name: At_Drought_Soil_Dry_P Parameter: Post-Treatment Value: Re-Water vs. No Drought
  misc_feature: MA Experiment 20001557 PARAMETER Experiment Name: At_Drought_Soil_Dry_P Parameter: Timepoint (day) Value: 13
  misc_feature: MA Experiment 20001557 PARAMETER Experiment Name: At_Drought_Soil_Dry_P Parameter: Treatment Value: Drought vs. No Drought
  misc_feature: MA Experiment ID: 20001906 Result: Down-regulated in Transcription
  misc_feature: MA Experiment 20001906 PARAMETER Experiment Name: At_Drought_Reproduction_P Parameter: Age (day) Value: 35
  misc_feature: MA Experiment 20001906 PARAMETER Experiment Name: At_Drought_Reproduction_P Parameter: Organism Value: A. thaliana
  misc_feature: MA Experiment 20001906 PARAMETER Experiment Name: At_Drought_Reproduction_P Parameter: Plant Line Value: WS
  misc_feature: MA Experiment 20001906 PARAMETER Experiment Name: At_Drought_Reproduction_P Parameter: Timepoint (day) Value: 5
  misc_feature: MA Experiment 20001906 PARAMETER Experiment Name: At_Drought_Reproduction_P Parameter: Tissue Value: Siliques
  misc_feature: MA Experiment 20001906 PARAMETER Experiment Name: At_Drought_Reproduction_P Parameter: Treatment Value: Drought vs. No Drought
  misc_feature: MA Experiment ID: 20001911 Result: Down-regulated in Transcription
  misc_feature: MA Experiment 20001911 PARAMETER Experiment Name: At_Drought_Reproduction_P Parameter: Age (day) Value: 40
  misc_feature: MA Experiment 20001911 PARAMETER Experiment Name: At_Drought_Reproduction_P Parameter: Organism Value: A. thaliana
  misc_feature: MA Experiment 20001911 PARAMETER Experiment Name: At_Drought_Reproduction_P Parameter: Plant Line Value: WS
  misc_feature: MA Experiment 20001911 PARAMETER Experiment Name: At_Drought_Reproduction_P Parameter: Timepoint (day) Value: 10
  misc_feature: MA Experiment 20001911 PARAMETER Experiment Name: At_Drought_Reproduction_P Parameter: Tissue Value: Flowers
  misc_feature: MA Experiment 20001911 PARAMETER Experiment Name: At_Drought_Reproduction_P Parameter: Treatment Value: Drought vs. No Drought
atctctctccctctctatctctctccctctctatctctctcttaccaatttccatttctcgggggaaaataataatacgacttttgaaatctctcactaatatttcccaagaaaacctgatgaattaaaagttcatattttcttggtgttgattggtattagatgactatttcttagtattagtcaattctctgtttccatcttatatggatagtctagacacagagcaaagatccttctttggagaaaaagaagatgagagacgagagaggatcgtttcttcacgtattggtcgtagatagatcttaatcgataaccatctaggccttgatctaaccattcaatataaactttatttccttcttcttttcgatctcaattgttccgaccaaacaagatgaagagatcacgtggaagctccgattctttatccggtttcttaccaattcgccattctacaacagacaaacaaataagcccaagaccaacaactaccggctttctctattccggcgccggagactactcccagatgtttgacgcattagaagacgacggaagtctagaggacctcggcggcgttggacacgcgtcttctacggcggcggagaaaaaacggcggttgggtgtagagcaagtgaaagcgttagagaagaatttcgagattgataacaagttagagccagagaggaaagtgaagctggctcaagagcttgggttgcagccacgccaagtcgcgatctggtttcaaaaccgccgtgctcggtggaagacaaagcagcttgaacgtgattacggcgttcttaagtcaaactttgatgcactcaaacgcaaccgcgactcgcttcaacgcgataacgattcactccttggacagattaaagagctgaaagcaaaacttaacgtggaaggggttaaaggtatagaagagaacggcgctttaaaagcagtggaagcaaatcaatcggtgatggctaataatgaagtcttagagctaagccaccgttctccatcgccaccaccgcatattcctacggacgctccgacatcggagctcgcattcgaaatgtttagcatttttccacgcacggaaaacttcagagacgatcctgccgatagcagcgactcaagcgcggttttgaacgaagagtatagtcccaatacggttgaagcagctggcgcagtggcggccacgactgtagaaatgtcgacgatgggttgttttagccaattcgtgaaaatggaagagcatgaagatctgtttagtggagaggaagcttgcaagttgtttgcggacaatgagcaatggtattgctccgatcagtggaattcgtaaaatgtgggggcagaattaaaagcatagaaaagctgaagggggtatgtggaaatattactgaagtcatattgggtcggaaaatgcattactcaaaatattggggtttttcttgagaaaatggaatatgacgcgagagggtagtaaaaacgagcgtgtggtgttccatgcacgtgtggccgtaatcttttcaaggttgaatgagagaggacaaaaaagtctgaaatcatcgggaataaaaaaaatatgtgacgaagaaatcgttttttcgtcgtttataatattatttgaataattttacttaggtgaatgtaatcgtcaaaaatctttaaattccgaagggttaaagattctgagcacgactaactatctatcctcttttattgttctcgtcgtccattgacgactatgcacaattcataagattattccctatgtacaatgtgtctttttagagaaacctatctgaattttgaaaatgttatataatttaattttgg

SEQ ID NO: 40748 - protein, 312 aa, Arabidopsis thaliana
  peptide (1)..(312): Ceres Seq. ID no. 13490966
  misc_feature (72)..(126): Pfam Name: Homeobox domain Pfam Description: Homeobox domain
  misc_feature (1)..(310): Homolog of NCBI NO: 15450982 NR Description: homeodomain-like protein [Arabidopsis thaliana]
  misc_feature (1)..(296): Homolog of NCBI NO: 5305602 NR Description: homeobox protein ATHB6 [Arabidopsis thaliana]
  misc_feature (1)..(310): Homolog of NCBI NO: 7446295 NR Description: homeotic protein T5J17.230 - Arabidopsis thaliana
  misc_feature (1)..(311): Homolog of NCBI NO: 8133126 NR Description: hb-6-like protein [Brassica rapa subsp.
  misc_feature (1)..(310): Homolog of NCBI NO: 15236109 NR Description: homeodomain-leucine zipper protein ATHB-16
  misc_feature (70)..(311): Homolog of NCBI NO: 15148916 NR Description: homeodomain leucine zipper protein HDZ1
  misc_feature (1)..(311): Homolog of NCBI NO: 25386231 NR Description: homeodomain transcription factor (ATHB-6)
  misc_feature (1)..(311): Homolog of NCBI NO: 18399966 NR Description: homeobox-leucine zipper protein ATHB-6 (HD-Zip
  misc_feature (1)..(312): Homolog of NCBI NO: 15238405 NR Description: homeobox-leucine zipper protein ATHB-5 (HD-Zip
MKRSRGSSDSLSGFLPIRHSTTDKQISPRPTTTGFLYSGAGDYSQMFDALEDDGSLEDLGGVGHASSTAAEKKRRLGVEQVKALEKNFEIDNKLEPERKVKLAQELGLQPRQVAIWFQNRRARWKTKQLERDYGVLKSNFDALKRNRDSLQRDNDSLLGQIKELKAKLNVEGVKGIEENGALKAVEANQSVMANNEVLELSHRSPSPPPHIPTDAPTSELAFEMFSIFPRTENFRDDPADSSDSSAVLNEEYSPNTVEAAGAVAATTVEMSTMGCFSQFVKMEEHEDLFSGEEACKLFADNEQWYCSDQWNS

SEQ ID NO: 40749 - protein, 267 aa, Arabidopsis thaliana
  peptide (1)..(267): Ceres Seq. ID no. 13490967
  misc_feature (27)..(81): Pfam Name: Homeobox domain Pfam Description: Homeobox domain
  misc_feature (1)..(265): Homolog of NCBI NO: 15450982 NR Description: homeodomain-like protein [Arabidopsis thaliana]
  misc_feature (1)..(251): Homolog of NCBI NO: 5305602 NR Description: homeobox protein ATHB6 [Arabidopsis thaliana]
  misc_feature (1)..(265): Homolog of NCBI NO: 7446295 NR Description: homeotic protein T5J17.230 - Arabidopsis thaliana
  misc_feature (1)..(266): Homolog of NCBI NO: 8133126 NR Description: hb-6-like protein [Brassica rapa subsp.
  misc_feature (1)..(265): Homolog of NCBI NO: 15236109 NR Description: homeodomain-leucine zipper protein ATHB-16
  misc_feature (25)..(266): Homolog of NCBI NO: 15148916 NR Description: homeodomain leucine zipper protein HDZ1
  misc_feature (1)..(266): Homolog of NCBI NO: 25386231 NR Description: homeodomain transcription factor (ATHB-6)
  misc_feature (1)..(266): Homolog of NCBI NO: 18399966 NR Description: homeobox-leucine zipper protein ATHB-6 (HD-Zip
  misc_feature (1)..(267): Homolog of NCBI NO: 15238405 NR Description: homeobox-leucine zipper protein ATHB-5 (HD-Zip
MFDALEDDGSLEDLGGVGHASSTAAEKKRRLGVEQVKALEKNFEIDNKLEPERKVKLAQELGLQPRQVAIWFQNRRARWKTKQLERDYGVLKSNFDALKRNRDSLQRDNDSLLGQIKELKAKLNVEGVKGIEENGALKAVEANQSVMANNEVLELSHRSPSPPPHIPTDAPTSELAFEMFSIFPRTENFRDDPADSSDSSAVLNEEYSPNTVEAAGAVAATTVEMSTMGCFSQFVKMEEHEDLFSGEEACKLFADNEQWYCSDQWNS

SEQ ID NO: 40750 - DNA, 972 bp, Arabidopsis thaliana
  misc_feature (1)..(972): Ceres Seq. ID no. 12325866
  misc_feature: MA Experiment ID: 108488 Result: Down-regulated in Transcription
  misc_feature: MA Experiment ID: 108668 Result: Up-regulated in Transcription
  misc_feature: MA Experiment 108668 PARAMETER Experiment Name: At_2mM_SA_cDNA_P Parameter: Plant Line Value: WS
  misc_feature: MA Experiment 108668 PARAMETER Experiment Name: At_2mM_SA_cDNA_P Parameter: Timepoint (hr) Value: 6
  misc_feature: MA Experiment 108668 PARAMETER Experiment Name: At_2mM_SA_cDNA_P Parameter: Treatment Value: 2mM SA vs. No Treatment
  misc_feature: MA Experiment ID: 20000224 Result: Down-regulated in Transcription
aaaactagtcgtgactcgtcgtcgtctgatattaccagattcctgagaatttgagcctaatccttcatcaccaagctaagtctcaaggtttcacgagtacaataatgagtcaaaagggtttgatatatagctttgttgctaaaggaacagttgttctagcagagcatactccttattcaggaaactttagcaccattgctgttcaatgtctgcagaagctacccacaaatagcagcaagtatacttactcttgcgatggtcatactttcaatttccttgttgacaatggctttgtgtttctagtggttgctgatgagtccaccggaagaagtgttcctttcgtgtttctcgaacgggtcaaggaagactttaagaagcggtatgaagcgagtataaagaatgatgagcgacatcctcttgcggatgaggacgaagatgatgatttgtttggagatcggtttagcgttgcatacaatcttgacagggagttcgggcccatactaaaggagcatatgcagtattgtatgagccatccagaagagatgagcaaactttctaagttgaaggcccaaataactgaggtcaaggggatcatgatggacaacattgagaaggttctggacagaggagagaagatcgaacttctggttgacaaaaccgaaaacctacagttccaggcagatagcttccagagacaaggaaggcagttaagaaggaagatgtggctacagagtctgcagatgaagctgatggtggctggtgctgttttctcttttattctcatcgtttgggttgttgcttgtggaggtttcaaatgctcatcatgatgtttcgcttcgtttgtatctgttttaacacttaaattgcatgctcatgtttgtacatggaagaacttataataacatatcatcatatcatcatcatctcccacatgctgtgatgctatatatataaaaaaatgtttttgttttc

SEQ ID NO: 40751 - protein, 240 aa, Arabidopsis thaliana; identical to SEQ ID NO: 21608
  peptide (1)..(240): Ceres Seq. ID no. 12325867
  misc_feature (146)..(234): Pfam Name: Synaptobrevin Pfam Description: Synaptobrevin
  misc_feature (122)..(238): Homolog of NCBI NO: 15220943 NR Description: synaptobrevin 7B, putative; protein id:
  misc_feature (1)..(93): Homolog of NCBI NO: 29150380 NR Description: synaptobrevin-like protein
  misc_feature (104)..(238): Homolog of NCBI NO: 29150380 NR Description: synaptobrevin-like protein
  misc_feature (1)..(93): Homolog of NCBI NO: 15220315 NR Description: synaptobrevin 7B, putative; protein id:
  misc_feature (122)..(239): Homolog of NCBI NO: 15220315 NR Description: synaptobrevin 7B, putative; protein id:
  misc_feature (1)..(93): Homolog of NCBI NO: 30685375 NR Description: synaptobrevin -related [Arabidopsis thaliana]
  misc_feature (1)..(93): Homolog of NCBI NO: 27805753 NR Description: Vesicle-associated membrane protein 725
  misc_feature (122)..(239): Homolog of NCBI NO: 30685375 NR Description: synaptobrevin -related [Arabidopsis thaliana]
  misc_feature (122)..(239): Homolog of NCBI NO: 27805753 NR Description: Vesicle-associated membrane protein 725
  misc_feature (1)..(240): Homolog of NCBI NO: 15232475 NR Description: synaptobrevin -like protein; protein id:

SEQ ID NO: 40752 - DNA, 1945 bp, Arabidopsis thaliana
  misc_feature (1)..(1945): Ceres Seq. ID no. 12377546
  misc_feature: MA Experiment ID: 108434 Result: Up-regulated in Transcription
  misc_feature: MA Experiment 108434 PARAMETER Experiment Name: At_Root_Tips_cDNA_P Parameter: Tissue Value: Root Tips
  misc_feature: MA Experiment ID: 108461 Result: Up-regulated in Transcription
  misc_feature: MA Experiment 108461 PARAMETER Experiment Name: At_Germinating_Seeds_cDNA_P Parameter: Age (day) Value: 1 vs. 0
  misc_feature: MA Experiment 108461 PARAMETER Experiment Name: At_Germinating_Seeds_cDNA_P Parameter: Tissue Value: Germinating Seeds
  misc_feature: MA Experiment ID: 108569 Result: Up-regulated in Transcription
  misc_feature: MA Experiment 108569 PARAMETER Experiment Name: At_0.001%_MeJA__cDNA_P Parameter: Timepoint (hr) Value: 6
  misc_feature: MA Experiment 108569 PARAMETER Experiment Name: At_0.001%_MeJA__cDNA_P Parameter: Tissue Value: Aerial
  misc_feature: MA Experiment 108569 PARAMETER Experiment Name: At_0.001%_MeJA__cDNA_P Parameter: Treatment Value: 0.001% MeJA vs. No Treatment
  misc_feature: MA Experiment ID: 108573 Result: Up-regulated in Transcription
  misc_feature: MA Experiment 108573 PARAMETER Experiment Name: At_Drought_cDNA_P Parameter: Timepoint (hr) Value: 6
  misc_feature: MA Experiment 108573 PARAMETER Experiment Name: At_Drought_cDNA_P Parameter: Tissue Value: Aerial
  misc_feature: MA Experiment 108573 PARAMETER Experiment Name: At_Drought_cDNA_P Parameter: Treatment Value: Drought vs. No Drought
  misc_feature: MA Experiment ID: 20000314 Result: Down-regulated in Transcription
  misc_feature: MA Experiment 20000314 PARAMETER Experiment Name: At_14day_Shoots-Roots_Sub_P Parameter: Age (day) Value: 14
  misc_feature: MA Experiment 20000314 PARAMETER Experiment Name: At_14day_Shoots-Roots_Sub_P Parameter: Organism Value: A. thaliana
  misc_feature: MA Experiment 20000314 PARAMETER Experiment Name: At_14day_Shoots-Roots_Sub_P Parameter: Plant Line Value: WS
  misc_feature: MA Experiment 20000314 PARAMETER Experiment Name: At_14day_Shoots-Roots_Sub_P Parameter: Tissue Value: Roots vs. Whole Plant
  misc_feature: MA Experiment ID: 20000315 Result: Down-regulated in Transcription
  misc_feature: MA Experiment 20000315 PARAMETER Experiment Name: At_14day_Shoots-Roots_Sub_P Parameter: Age (day) Value: 14
  misc_feature: MA Experiment 20000315 PARAMETER Experiment Name: At_14day_Shoots-Roots_Sub_P Parameter: Organism Value: A. thaliana
  misc_feature: MA Experiment 20000315 PARAMETER Experiment Name: At_14day_Shoots-Roots_Sub_P Parameter: Plant Line Value: WS
  misc_feature: MA Experiment 20000315 PARAMETER Experiment Name: At_14day_Shoots-Roots_Sub_P Parameter: Tissue Value: Shoots vs. Whole Plant
  misc_feature: MA Experiment ID: 20000355 Result: Up-regulated in Transcription
  misc_feature: MA Experiment 20000355 PARAMETER Experiment Name: At_Siliques_Sub_P Parameter: Age (day) Value: 21
  misc_feature: MA Experiment 20000355 PARAMETER Experiment Name: At_Siliques_Sub_P Parameter: Organism Value: A. thaliana
  misc_feature: MA Experiment 20000355 PARAMETER Experiment Name: At_Siliques_Sub_P Parameter: Plant Line Value: WS
  misc_feature: MA Experiment 20000355 PARAMETER Experiment Name: At_Siliques_Sub_P Parameter: Tissue Value: Less Than 5mm Siliques vs. Whole Plant
  misc_feature: MA Experiment ID: 20000440 Result: Up-regulated in Transcription
  misc_feature: MA Experiment 20000440 PARAMETER Experiment Name: At_Closed-Flower__Sub_P Parameter: Tissue Value: Closed Flower vs. Whole Plant
aatctctcatttgttcttctgcataatctctcacacacttctatttctccctctccttgtcacaaggaaagggcgtagaagaaaccaaaacctaaacaaaagagcaataataactcattaaaaaaccaaaaccaaaaaaaaacaaaatgggtgtcaaaatgttattaatctttggtctcttgatcttagctatggtagctaaatccgtcaatgcaacctaccctttaaccaaatcttgcatcaacgggcaaggttgcatcggggaagacgatgagctcgaatctctaatggattcagagacaaaccgtcgtcaactcgcaagaggacgtcgttacattggctacgatgctctcaaaaagaacaatgtgccttgcagtagacgtggccgatcctactacgattgcaagaagagaagaaggaataatccttacaggcgtggatgcagtgccatcacgcattgctataggtacgctcgctaaatgatagagaggaagagatttgattcaacaacgtacgttcgtatcttcattggtgaaaaaggattgttatttgttgataaaaatttgatctttaaacaatgtttggttttgcataaaggtagaagaaaatggctgatggtgaagacattcaacctcttgtttgcgacaatggaactggaatggttaaggctggttttgctggggatgatgcacctagagctgtgtttcctagtattgtgggtcgtcctcgtcacaccggtgtgatggttgggatggggcaaaaggatgcttatgttggcgatgaagctcaatccaaacgaggtattttaactctcaagtaccctattgagcatggaattgtcaacaattgggatgacatggagaagatttggcatcacactttctacaatgagctccgtgttgctcctgaggaacatcctattctacttaccgaggcaccgcttaacccgaaagctaatcgtgagaagatgactcaaatcatgtttgagactttcaatgcccctgctatgtatgtggctattcaggctgttctttctctttatgccagtggtcgtactaccggtattgtgctcgactctggagatggtgtgagccacactgttcctatctatgaggggtatgcacttccacatgctatcctacgtcttgatcttgctggtcgtgacctcacggatgcgctgatgaagatcctaaccgagcgtggttactctttcaccaccacagcagagcgtgaaattgtcagagacataaaggagaagctttgctacattgctcttgactacgagcaggaactcgagacagccaaaaccagctcatctgttgagaagaactacgagctacctgatgggcaagtgatcaccattggatcagagcgattccgttgtcctgaggttctttaccagccatctatgattggtatggagaatgctggtatccatgaaaccacctataactccataatgaagtgtgatgtcgacatcaggaaggacttgtacggtaacattgtgctcagtggtggaaccacaatgttccctggaatcgccgacagaatgagcaaagagatcactgctttggctccaagcagcatgaagatcaaagtcgttgcccctccagagaggaaatactctgtctggattggagggtccatcttggcctccctcagtaccttccagcagatgtggatcgcaaaggcagagtatgacgagtcaggtccatcgattgttcacaggaagtgcttctgagttcaaagttgatcatttttcagagaagaagcaccgccagggtttttccgaccatctctcaagccgggtttttaatcttccgttattctgctctttgtttttgttctcttatgttttgaaattcatgccaaatacattttcatggatttatggtaatctgtttgtagtatggtttaaaatctaatgcaactgtgtttttgagtg

SEQ ID NO: 40753 - protein, 377 aa, Arabidopsis thaliana; identical to SEQ ID NO: 36003
  peptide (1)..(377): Ceres Seq. ID no. 12377547
  misc_feature (1)..(377): Pfam Name: Actin Pfam Description: Actin
  misc_feature (1)..(362): Homolog of NCBI NO: 11276980 NR Description: actin (ACT3) - Arabidopsis thaliana
  misc_feature (1)..(377): Homolog of NCBI NO: 11276968 NR Description: actin [imported] - Picea rubens
  misc_feature (1)..(377): Homolog of NCBI NO: 15231447 NR Description: actin 12; protein id: At3g46520.1 [Arabidopsis
  misc_feature (1)..(377): Homolog of NCBI NO: 23092520 NR Description: actin [Phalaenopsis hybrid cultivar]
  misc_feature (1)..(377): Homolog of NCBI NO: 11276978 NR Description: actin ACT2 [imported] - Striga asiatica
  misc_feature (1)..(377): Homolog of NCBI NO: 231503 NR Description: ACTIN 97
  misc_feature (1)..(377): Homolog of NCBI NO: 11276977 NR Description: actin [imported] - Striga asiatica
  misc_feature (1)..(377): Homolog of NCBI NO: 11276975 NR Description: actin [imported] - upland cotton
  misc_feature (1)..(377): Homolog of NCBI NO: 71633 NR Description: actin - Arabidopsis thaliana
  misc_feature (1)..(377): Homolog of NCBI NO: 18409908 NR Description: actin (ACT3)

SEQ ID NO: 40754 - protein, 360 aa, Arabidopsis thaliana; identical to SEQ ID NO: 36004
  peptide (1)..(360): Ceres Seq. ID no. 12377548
  misc_feature (1)..(360): Pfam Name: Actin Pfam Description: Actin
  misc_feature (1)..(345): Homolog of NCBI NO: 11276980 NR Description: actin (ACT3) - Arabidopsis thaliana
  misc_feature (1)..(360): Homolog of NCBI NO: 11276968 NR Description: actin [imported] - Picea rubens
  misc_feature (1)..(360): Homolog of NCBI NO: 15231447 NR Description: actin 12; protein id: At3g46520.1 [Arabidopsis
  misc_feature (1)..(360): Homolog of NCBI NO: 23092520 NR Description: actin [Phalaenopsis hybrid cultivar]
  misc_feature (1)..(360): Homolog of NCBI NO: 11276978 NR Description: actin ACT2 [imported] - Striga asiatica
  misc_feature (1)..(360): Homolog of NCBI NO: 231503 NR Description: ACTIN 97
  misc_feature (1)..(360): Homolog of NCBI NO: 11276977 NR Description: actin [imported] - Striga asiatica
  misc_feature (1)..(360): Homolog of NCBI NO: 11276975 NR Description: actin [imported] - upland cotton
  misc_feature (1)..(360): Homolog of NCBI NO: 71633 NR Description: actin - Arabidopsis thaliana
  misc_feature (1)..(360): Homolog of NCBI NO: 18409908 NR Description: actin (ACT3)

SEQ ID NO: 40755 - protein, 332 aa, Arabidopsis thaliana; identical to SEQ ID NO: 36005
  peptide (1)..(332): Ceres Seq. ID no. 12377549
  misc_feature (1)..(332): Pfam Name: Actin Pfam Description: Actin
  misc_feature (1)..(317): Homolog of NCBI NO: 11276980 NR Description: actin (ACT3) - Arabidopsis thaliana
  misc_feature (1)..(332): Homolog of NCBI NO: 11276968 NR Description: actin [imported] - Picea rubens
  misc_feature (1)..(332): Homolog of NCBI NO: 15231447 NR Description: actin 12; protein id: At3g46520.1 [Arabidopsis
  misc_feature (1)..(332): Homolog of NCBI NO: 23092520 NR Description: actin [Phalaenopsis hybrid cultivar]
  misc_feature (1)..(332): Homolog of NCBI NO: 11276978 NR Description: actin ACT2 [imported] - Striga asiatica
  misc_feature (1)..(332): Homolog of NCBI NO: 231503 NR Description: ACTIN 97
  misc_feature (1)..(332): Homolog of NCBI NO: 11276977 NR Description: actin [imported] - Striga asiatica
  misc_feature (1)..(332): Homolog of NCBI NO: 11276975 NR Description: actin [imported] - upland cotton
  misc_feature (1)..(332): Homolog of NCBI NO: 71633 NR Description: actin - Arabidopsis thaliana
  misc_feature (1)..(332): Homolog of NCBI NO: 18409908 NR Description: actin (ACT3)

SEQ ID NO: 40756 - DNA, 834 bp, Arabidopsis thaliana; identical to SEQ ID NO: 24929
  misc_feature (1)..(834): Ceres Seq. ID no. 12488276
  misc_feature: MA Experiment ID: 108434 Result: Up-regulated in Transcription
  misc_feature: MA Experiment 108434 PARAMETER Experiment Name: At_Root_Tips_cDNA_P Parameter: Tissue Value: Root Tips
  misc_feature: MA Experiment ID: 108462 Result: Down-regulated in Transcription
  misc_feature: MA Experiment 108462 PARAMETER Experiment Name: At_Germinating_Seeds_cDNA_P Parameter: Age (day) Value: 2 vs. 0
  misc_feature: MA Experiment 108462 PARAMETER Experiment Name: At_Germinating_Seeds_cDNA_P Parameter: Tissue Value: Germinating Seeds
  misc_feature: MA Experiment ID: 108463 Result: Down-regulated in Transcription
  misc_feature: MA Experiment 108463 PARAMETER Experiment Name: At_Germinating_Seeds_cDNA_P Parameter: Age (day) Value: 3 vs. 0
  misc_feature: MA Experiment 108463 PARAMETER Experiment Name: At_Germinating_Seeds_cDNA_P Parameter: Tissue Value: Germinating Seeds
  misc_feature: MA Experiment ID: 108464 Result: Down-regulated in Transcription
  misc_feature: MA Experiment 108464 PARAMETER Experiment Name: At_Germinating_Seeds_cDNA_P Parameter: Age (day) Value: 4 vs. 0
  misc_feature: MA Experiment 108464 PARAMETER Experiment Name: At_Germinating_Seeds_cDNA_P Parameter: Tissue Value: Germinating Seeds
  misc_feature: MA Experiment ID: 20000111 Result: Up-regulated in Transcription
  misc_feature: MA Experiment 20000111 PARAMETER Experiment Name: At_42deg_Heat_cDNA_P Parameter: Temperature (deg C) Value: 42 vs. 22
  misc_feature: MA Experiment 20000111 PARAMETER Experiment Name: At_42deg_Heat_cDNA_P Parameter: Timepoint (hr) Value: 6
  misc_feature: MA Experiment 20000111 PARAMETER Experiment Name: At_42deg_Heat_cDNA_P Parameter: Tissue Value: Aerial
  misc_feature: MA Experiment ID: 20000117 Result: Down-regulated in Transcription
  misc_feature: MA Experiment 20000117 PARAMETER Experiment Name: At_100uM_ABA_Mutants_cDNA_P Parameter: Plant Line Value: Columbia
  misc_feature: MA Experiment 20000117 PARAMETER Experiment Name: At_100uM_ABA_Mutants_cDNA_P Parameter: Timepoint (hr) Value: 6
  misc_feature: MA Experiment 20000117 PARAMETER Experiment Name: At_100uM_ABA_Mutants_cDNA_P Parameter: Tissue Value: Aerial
  misc_feature: MA Experiment 20000117 PARAMETER Experiment Name: At_100uM_ABA_Mutants_cDNA_P Parameter: Treatment Value: 100uM ABA vs. No Treatment
  misc_feature: MA Experiment ID: 20000224 Result: Down-regulated in Transcription
  misc_feature: MA Experiment ID: 20000234 Result: Up-regulated in Transcription
  misc_feature: MA Experiment 20000234 PARAMETER Experiment Name: At_Siliques_P Parameter: Age (day) Value: 21
  misc_feature: MA Experiment 20000234 PARAMETER Experiment Name: At_Siliques_P Parameter: Organism Value: A. thaliana
  misc_feature: MA Experiment 20000234 PARAMETER Experiment Name: At_Siliques_P Parameter: Plant Line Value: WS
  misc_feature: MA Experiment 20000234 PARAMETER Experiment Name: At_Siliques_P Parameter: Tissue Value: Less Than 5mm Siliques vs. Whole Plant
  misc_feature: MA Experiment ID: 20000437 Result: Down-regulated in Transcription
  misc_feature: MA Experiment 20000437 PARAMETER Experiment Name: At_Drought_P Parameter: Age (day) Value: 8
  misc_feature: MA Experiment 20000437 PARAMETER Experiment Name: At_Drought_P Parameter: Organism Value: A. thaliana
  misc_feature: MA Experiment 20000437 PARAMETER Experiment Name: At_Drought_P Parameter: Plant Line Value: WS
  misc_feature: MA Experiment 20000437 PARAMETER Experiment Name: At_Drought_P Parameter: Timepoint (hr) Value: 24
  misc_feature: MA Experiment 20000437 PARAMETER Experiment Name: At_Drought_P Parameter: Tissue Value: Whole Plant
  misc_feature: MA Experiment 20000437 PARAMETER Experiment Name: At_Drought_P Parameter: Treatment Value: Drought vs. No Drought
  misc_feature: MA Experiment ID: 20000794 Result: Down-regulated in Transcription
  misc_feature: MA Experiment 20000794 PARAMETER Experiment Name: At_Petals_P Parameter: Age (day) Value: 23-25 days
  misc_feature: MA Experiment 20000794 PARAMETER Experiment Name: At_Petals_P Parameter: Plant Line Value: WS
  misc_feature: MA Experiment 20000794 PARAMETER Experiment Name: At_Petals_P Parameter: Tissue Value: Petals vs. Whole plant
  misc_feature: MA Experiment ID: 20001558 Result: Up-regulated in Transcription
  misc_feature: MA Experiment 20001558 PARAMETER Experiment Name: At_Drought_Soil_Dry_P Parameter: Age (day) Value: 27
  misc_feature: MA Experiment 20001558 PARAMETER Experiment Name: At_Drought_Soil_Dry_P Parameter: Organism Value: A. thaliana
  misc_feature: MA Experiment 20001558 PARAMETER Experiment Name: At_Drought_Soil_Dry_P Parameter: Plant Line Value: WS
  misc_feature: MA Experiment 20001558 PARAMETER Experiment Name: At_Drought_Soil_Dry_P Parameter: Post Timepoint (hr) Value: 6
  misc_feature: MA Experiment 20001558 PARAMETER Experiment Name: At_Drought_Soil_Dry_P Parameter: Post-Treatment Value: Re-Water vs. No Drought
  misc_feature: MA Experiment 20001558 PARAMETER Experiment Name: At_Drought_Soil_Dry_P Parameter: Timepoint (day) Value: 13
  misc_feature: MA Experiment 20001558 PARAMETER Experiment Name: At_Drought_Soil_Dry_P Parameter: Treatment Value: Drought vs. No Drought
  misc_feature: MA Experiment ID: 20001560 Result: Up-regulated in Transcription
  misc_feature: MA Experiment 20001560 PARAMETER Experiment Name: At_Drought_Soil_Dry_P Parameter: Age (day) Value: 28
  misc_feature: MA Experiment 20001560 PARAMETER Experiment Name: At_Drought_Soil_Dry_P Parameter: Organism Value: A. thaliana
  misc_feature: MA Experiment 20001560 PARAMETER Experiment Name: At_Drought_Soil_Dry_P Parameter: Plant Line Value: WS
  misc_feature: MA Experiment 20001560 PARAMETER Experiment Name: At_Drought_Soil_Dry_P Parameter: Post Timepoint (hr) Value: None
  misc_feature: MA Experiment 20001560 PARAMETER Experiment Name: At_Drought_Soil_Dry_P Parameter: Post-Treatment Value: None
  misc_feature: MA Experiment 20001560 PARAMETER Experiment Name: At_Drought_Soil_Dry_P Parameter: Timepoint (day) Value: 14
  misc_feature: MA Experiment 20001560 PARAMETER Experiment Name: At_Drought_Soil_Dry_P Parameter: Treatment Value: Drought vs. No Drought
  misc_feature: MA Experiment ID: 20001757 Result: Up-regulated in Transcription
  misc_feature: MA Experiment 20001757 PARAMETER Experiment Name: At_50mM_NH4NO3_L-to-H_P Parameter: Timepoint (hr) Value: 6
  misc_feature: MA Experiment 20001757 PARAMETER Experiment Name: At_50mM_NH4NO3_L-to-H_P Parameter: Tissue Value: Leaf
  misc_feature: MA Experiment 20001757 PARAMETER Experiment Name: At_50mM_NH4NO3_L-to-H_P Parameter: Treatment Value: 50mM NH4NO3 vs 100mM Mannitol

SEQ ID NO: 40757 - protein, 198 aa, Arabidopsis thaliana; identical to SEQ ID NO: 24930
  peptide (1)..(198): Ceres Seq. ID no. 12488277
  misc_feature (6)..(108): Pfam Name: Ribosomal protein S4/S9 N-terminal domain Pfam Description: Ribosomal protein S4/S9 N-terminal domain
  misc_feature (6)..(108): Pfam Name: Ribosomal protein S4/S9 N-terminal domain Pfam Description: Ribosomal protein S4/S9 N-terminal domain
  misc_feature (6)..(108): Pfam Name: Ribosomal protein S4/S9 N-terminal domain Pfam Description: Ribosomal protein S4/S9 N-terminal domain
  misc_feature (12)..(196): Homolog of NCBI NO: 15294029 NR Description: 40S ribosomal protein S9 [Ictalurus punctatus]
  misc_feature (10)..(198): Homolog of NCBI NO: 24661707 NR Description: Ribosomal protein S9 CG3395-PA
  misc_feature (12)..(198): Homolog of NCBI NO: 27735416 NR Description: Similar to ribosomal protein S9 [Xenopus laevis]
  misc_feature (12)..(198): Homolog of NCBI NO: 13592067 NR Description: ribosomal protein S9 [Rattus norvegicus]
  misc_feature (12)..(198): Homolog of NCBI NO: 14141193 NR Description: ribosomal protein S9; 40S ribosomal protein S9
  misc_feature (12)..(196): Homolog of NCBI NO: 15294029 NR Description: 40S ribosomal protein S9 [Ictalurus punctatus]
  misc_feature (12)..(198): Homolog of NCBI NO: 27735416 NR Description: Similar to ribosomal protein S9 [Xenopus laevis]
  misc_feature (12)..(198): Homolog of NCBI NO: 14141193 NR Description: ribosomal protein S9; 40S ribosomal protein S9
  misc_feature (12)..(198): Homolog of NCBI NO: 13592067 NR Description: ribosomal protein S9 [Rattus norvegicus]
  misc_feature (12)..(198): Homolog of NCBI NO: 27735416 NR Description: Similar to ribosomal protein S9 [Xenopus laevis]
  misc_feature (10)..(198): Homolog of NCBI NO: 24661707 NR Description: Ribosomal protein S9 CG3395-PA
  misc_feature (12)..(196): Homolog of NCBI NO: 15294029 NR Description: 40S ribosomal protein S9 [Ictalurus punctatus]
  misc_feature (1)..(198): Homolog of NCBI NO: 15242241 NR Description: 40S ribosomal protein - like; protein id:
  misc_feature (1)..(198): Homolog of NCBI NO: 15242498 NR Description: 40S ribosomal protein S9-like
  misc_feature (1)..(198): Homolog of NCBI NO: 6440857 NR Description: 40S ribosomal protein S9 [Chlamydomonas sp. HS-5]
  misc_feature (8)..(198): Homolog of NCBI NO: 40741183 NR Description: RS9_PODAN 40S ribosomal protein S9 (S7)
  misc_feature (8)..(197): Homolog of NCBI NO: 1710780 NR Description: 40S ribosomal protein S9 (S7)
  misc_feature (1)..(198): Homolog of NCBI NO: 15242241 NR Description: 40S ribosomal protein - like; protein id:
  misc_feature (1)..(198): Homolog of NCBI NO: 15242498 NR Description: 40S ribosomal protein S9-like
  misc_feature (1)..(198): Homolog of NCBI NO: 6440857 NR Description: 40S ribosomal protein S9 [Chlamydomonas sp. HS-5]
  misc_feature (8)..(198): Homolog of NCBI NO: 40741183 NR Description: RS9_PODAN 40S ribosomal protein S9 (S7)
  misc_feature (8)..(197): Homolog of NCBI NO: 1710780 NR Description: 40S ribosomal protein S9 (S7)
  misc_feature (12)..(198): Homolog of NCBI NO: 14141193 NR Description: ribosomal protein S9; 40S ribosomal protein S9
  misc_feature (12)..(198): Homolog of NCBI NO: 13592067 NR Description: ribosomal protein S9 [Rattus norvegicus]
  misc_feature (10)..(198): Homolog of NCBI NO: 24661707 NR Description: Ribosomal protein S9 CG3395-PA
  misc_feature (8)..(197): Homolog of NCBI NO: 1710780 NR Description: 40S ribosomal protein S9 (S7)
  misc_feature (8)..(198): Homolog of NCBI NO: 40741183 NR Description: RS9_PODAN 40S ribosomal protein S9 (S7)
  misc_feature (1)..(198): Homolog of NCBI NO: 6440857 NR Description: 40S ribosomal protein S9 [Chlamydomonas sp. HS-5]
  misc_feature (1)..(198): Homolog of NCBI NO: 15242498 NR Description: 40S ribosomal protein S9-like
  misc_feature (1)..(198): Homolog of NCBI NO: 15242241 NR Description: 40S ribosomal protein - like; protein id:

SEQ ID NO: 40758 - protein, 117 aa, Arabidopsis thaliana; identical to SEQ ID NO: 24931
  peptide (1)..(117): Ceres Seq. ID no. 12488278
  misc_feature (28)..(75): Pfam Name: S4 domain Pfam Description: S4 domain
  misc_feature (28)..(75): Pfam Name: S4 domain Pfam Description: S4 domain
  misc_feature (28)..(75): Pfam Name: S4 domain Pfam Description: S4 domain
  misc_feature (1)..(115): Homolog of NCBI NO: 15294029 NR Description: 40S ribosomal protein S9 [Ictalurus punctatus]
  misc_feature (1)..(117): Homolog of NCBI NO: 24661707 NR Description: Ribosomal protein S9 CG3395-PA
  misc_feature (1)..(117): Homolog of NCBI NO: 27735416 NR Description: Similar to ribosomal protein S9 [Xenopus laevis]
  misc_feature (1)..(117): Homolog of NCBI NO: 13592067 NR Description: ribosomal protein S9 [Rattus norvegicus]
  misc_feature (1)..(117): Homolog of NCBI NO: 14141193 NR Description: ribosomal protein S9; 40S ribosomal protein S9
  misc_feature (1)..(115): Homolog of NCBI NO: 15294029 NR Description: 40S ribosomal protein S9 [Ictalurus punctatus]
  misc_feature (1)..(117): Homolog of NCBI NO: 27735416 NR Description: Similar to ribosomal protein S9 [Xenopus laevis]
  misc_feature (1)..(117): Homolog of NCBI NO: 14141193 NR Description: ribosomal protein S9; 40S ribosomal protein S9
  misc_feature (1)..(117): Homolog of NCBI NO: 13592067 NR Description: ribosomal protein S9 [Rattus norvegicus]
  misc_feature (1)..(117): Homolog of NCBI NO: 27735416 NR Description: Similar to ribosomal protein S9 [Xenopus laevis]
  misc_feature (1)..(117): Homolog of NCBI NO: 24661707 NR Description: Ribosomal protein S9 CG3395-PA
  misc_feature (1)..(115): Homolog of NCBI NO: 15294029 NR Description: 40S ribosomal protein S9 [Ictalurus punctatus]
  misc_feature (1)..(117): Homolog of NCBI NO: 15242241 NR Description: 40S ribosomal protein - like; protein id:
  misc_feature (1)..(117): Homolog of NCBI NO: 15242498 NR Description: 40S ribosomal protein S9-like
  misc_feature (1)..(117): Homolog of NCBI NO: 6440857 NR Description: 40S ribosomal protein S9 [Chlamydomonas sp. HS-5]
  misc_feature (1)..(117): Homolog of NCBI NO: 40741183 NR Description: RS9_PODAN 40S ribosomal protein S9 (S7)
  misc_feature (1)..(116): Homolog of NCBI NO: 1710780 NR Description: 40S ribosomal protein S9 (S7)
  misc_feature (1)..(117): Homolog of NCBI NO: 15242241 NR Description: 40S ribosomal protein - like; protein id:
  misc_feature (1)..(117): Homolog of NCBI NO: 15242498 NR Description: 40S ribosomal protein S9-like
  misc_feature (1)..(117): Homolog of NCBI NO: 6440857 NR Description: 40S ribosomal protein S9 [Chlamydomonas sp. HS-5]
  misc_feature (1)..(117): Homolog of NCBI NO: 40741183 NR Description: RS9_PODAN 40S ribosomal protein S9 (S7)
  misc_feature (1)..(116): Homolog of NCBI NO: 1710780 NR Description: 40S ribosomal protein S9 (S7)
  misc_feature (1)..(117): Homolog of NCBI NO: 14141193 NR Description: ribosomal protein S9; 40S ribosomal protein S9
  misc_feature (1)..(117): Homolog of NCBI NO: 13592067 NR Description: ribosomal protein S9 [Rattus norvegicus]
  misc_feature (1)..(117): Homolog of NCBI NO: 24661707 NR Description: Ribosomal protein S9 CG3395-PA
  misc_feature (1)..(116): Homolog of NCBI NO: 1710780 NR Description: 40S ribosomal protein S9 (S7)
  misc_feature (1)..(117): Homolog of NCBI NO: 40741183 NR Description: RS9_PODAN 40S ribosomal protein S9 (S7)
  misc_feature (1)..(117): Homolog of NCBI NO: 6440857 NR Description: 40S ribosomal protein S9 [Chlamydomonas sp. HS-5]
  misc_feature (1)..(117): Homolog of NCBI NO: 15242498 NR Description: 40S ribosomal protein S9-like
  misc_feature (1)..(117): Homolog of NCBI NO: 15242241 NR Description: 40S ribosomal protein - like; protein id:

SEQ ID NO: 40759 - DNA, 1571 bp, Arabidopsis thaliana
  misc_feature (1)..(1571): Ceres Seq. ID no. 12327953
  misc_feature: MA Experiment ID: 20000227 Result: Down-regulated in Transcription
  misc_feature: MA Experiment 20000227 PARAMETER Experiment Name: At_Root-Tips-vs-Tops_P Parameter: Tissue Value: Root Tips vs. Root Tops
accaatttctccagtttcccactccacatccaaaaaaacagtgtaataataatcataatcacctgatcaatctcttacataaaagctacagatctggttttatacaatcatcaccgcaccaagttcctaaaggtttcgactttactgtttctattttcggaaagagagtgcaagattgaaatcgaagatgaaggcggcaacaaggccgatccacgccgtgacgacatgggttcgtcggcaaccaccaaaggttaaagcttttctcggtgttgtctccgccatgactgccctcgttttattgagagtgattgttcatgaccacgacaatctttttgtcgctgctgaagctgttcattcccttggaatctccgtccttatctataaactcaccaaggagaagacttgtgctggtatattcgatttcttgattttgaagtttctagatttaggttttgattagtggattagtgattattgaatttgattttcccctgatctgtttcgatttcgaattagggtttgtttgatgctattgaattcgtacaaagttgcaatctttgaatgatatgttttgacaggattatctctcaagtcacaagagctaacagctctgtttttggcggtgagactgtattgtagttttgtgatggagtttgatattcacacgttacttgactcggctacattggtgactacactttttgttatctatatgatccgttttaagctcaaagctagttatatggacgacaaagacaattttgctatctactacgtcgttattccatgtgttgttctatcagtactcattcacccatcaacacatcatcatataatcaataagatttcttgggccttctgtgtttaccttgaagctgtttcagtccttcctcaacttagagtcatgcaaaacactaaggtacttttaaaaagcttgaaactagtccctgtcctttaccctttttaaattagtaacgcatgtgtcgtcttagatcgtggagccatttacagcacattacgtattcgctttggggatcgctaggttcttgagttgtgcacactgggtccttcaggttttggacactcgagggcggttattgactgctttaggatatggtttctggcctataatggttcttctctctgaaatcgtccaaaccttcattctagccgacttctgctactactatgtcaagaggtaaatcattaatgctttcagtcatcgtcatgtttgttgatacaatggttgtagttatgtgatgattgctgatcttaaagacattgtgaagggtgttgtaagtattttatgtttttggtgtgtggcagtttaatgggtggtcagcttgttcttcgtctcccgtcaggtgttgtgtgaaatttggtgtataagaagaagatacggtgttgctttgagcttatggtgtggtgtaatgatccatgtcttgcaggctaatcgttttgagtcttctctaatctcttttttttttttttttttttttccctttatgttttttcttttcttagaggacttgtaaagaaaaaaagggaattaattagagattttgagtttt

SEQ ID NO: 40760 - protein, 106 aa, Arabidopsis thaliana
  peptide (1)..(106): Ceres Seq. ID no. 12327954
  misc_feature (1)..(91): Pfam Name: ER lumen protein retaining receptor Pfam Description: ER lumen protein retaining receptor
  misc_feature (1)..(93): Homolog of NCBI NO: 9294172 NR Description: ER lumen protein retaining receptor-like protein
  misc_feature (1)..(93): Homolog of NCBI NO: 25412019 NR Description: probable ER lumen protein retaining receptor
  misc_feature (1)..(93): Homolog of NCBI NO: 21537286 NR Description: putative ER lumen protein retaining receptor
  misc_feature (1)..(93): Homolog of NCBI NO: 18399619 NR Description: putative ER lumen protein retaining receptor
  misc_feature (1)..(93): Homolog of NCBI NO: 13430654 NR Description: putative ER lumen protein retaining receptor
  misc_feature (1)..(93): Homolog of NCBI NO: 18420309 NR Description: expressed protein
  misc_feature (1)..(93): Homolog of NCBI NO: 25518365 NR Description: hypothetical protein T20H2.24 - Arabidopsis
  misc_feature (1)..(93): Homolog of NCBI NO: 15223724 NR Description: ER lumen protein-retaining receptor; protein id:
  misc_feature (1)..(91): Homolog of NCBI NO: 9369358 NR Description: F10A5.5 [Arabidopsis thaliana]
  misc_feature (1)..(93): Homolog of NCBI NO: 15222871 NR Description: ER lumen protein retaining receptor, putative
MEFDIHTLLDSATLVTTLFVIYMIRFKLKASYMDDKDNFAIYYVVIPCVVLSVLIHPSTHHHIINKISWAFCVYLEAVSVLPQLRVMQNTKVLLKSLKLVPVLYPF

SEQ ID NO: 40761 - protein, 90 aa, Arabidopsis thaliana
  peptide (1)..(90): Ceres Seq. ID no. 12327955
  misc_feature (8)..(76): Homolog of NCBI NO: 9294172 NR Description: ER lumen protein retaining receptor-like protein
  misc_feature (7)..(76): Homolog of NCBI NO: 25412019 NR Description: probable ER lumen protein retaining receptor
  misc_feature (7)..(76): Homolog of NCBI NO: 21537286 NR Description: putative ER lumen protein retaining receptor
  misc_feature (7)..(76): Homolog of NCBI NO: 18399619 NR Description: putative ER lumen protein retaining receptor
  misc_feature (7)..(76): Homolog of NCBI NO: 13430654 NR Description: putative ER lumen protein retaining receptor
  misc_feature (1)..(76): Homolog of NCBI NO: 18420309 NR Description: expressed protein
  misc_feature (1)..(76): Homolog of NCBI NO: 25518365 NR Description: hypothetical protein T20H2.24 - Arabidopsis
  misc_feature (1)..(76): Homolog of NCBI NO: 15223724 NR Description: ER lumen protein-retaining receptor; protein id:
  misc_feature (1)..(76): Homolog of NCBI NO: 9369358 NR Description: F10A5.5 [Arabidopsis thaliana]
  misc_feature (1)..(76): Homolog of NCBI NO: 15222871 NR Description: ER lumen protein retaining receptor, putative
MKAATRPIHAVTTWVRRQPPKVKAFLGVVSAMTALVLLRVIVHDHDNLFVAAEAVHSLGISVLIYKLTKEKTCAGIFDFLILKFLDLGFD

SEQ ID NO: 40762 - protein, 84 aa, Arabidopsis thaliana
  peptide (1)..(84): Ceres Seq. ID no. 12327956
  misc_feature (1)..(69): Pfam Name: ER lumen protein retaining receptor Pfam Description: ER lumen protein retaining receptor
  misc_feature (1)..(71): Homolog of NCBI NO: 9294172 NR Description: ER lumen protein retaining receptor-like protein
  misc_feature (1)..(71): Homolog of NCBI NO: 25412019 NR Description: probable ER lumen protein retaining receptor
  misc_feature (1)..(71): Homolog of NCBI NO: 21537286 NR Description: putative ER lumen protein retaining receptor
  misc_feature (1)..(71): Homolog of NCBI NO: 18399619 NR Description: putative ER lumen protein retaining receptor
  misc_feature (1)..(71): Homolog of NCBI NO: 13430654 NR Description: putative ER lumen protein retaining receptor
  misc_feature (1)..(71): Homolog of NCBI NO: 18420309 NR Description: expressed protein
  misc_feature (1)..(71): Homolog of NCBI NO: 25518365 NR Description: hypothetical protein T20H2.24 - Arabidopsis
  misc_feature (1)..(71): Homolog of NCBI NO: 15223724 NR Description: ER lumen protein-retaining receptor; protein id:
  misc_feature (1)..(69): Homolog of NCBI NO: 9369358 NR Description: F10A5.5 [Arabidopsis thaliana]
  misc_feature (1)..(71): Homolog of NCBI NO: 15222871 NR Description: ER lumen protein retaining receptor, putative
MIRFKLKASYMDDKDNFAIYYVVIPCVVLSVLIHPSTHHHIINKISWAFCVYLEAVSVLPQLRVMQNTKVLLKSLKLVPVLYPF

SEQ ID NO: 40763 - DNA, 1241 bp, Arabidopsis thaliana
  misc_feature (1)..(1241): Ceres Seq. ID no. 12323894
  misc_feature: MA Experiment ID: 20000171 Result: Down-regulated in Transcription
  misc_feature: MA Experiment 20000171 PARAMETER Experiment Name: At_42deg_Heat_P Parameter: Age (day) Value: 14
  misc_feature: MA Experiment 20000171 PARAMETER Experiment Name: At_42deg_Heat_P Parameter: Organism Value: A. thaliana
  misc_feature: MA Experiment 20000171 PARAMETER Experiment Name: At_42deg_Heat_P Parameter: Plant Line Value: WS
  misc_feature: MA Experiment 20000171 PARAMETER Experiment Name: At_42deg_Heat_P Parameter: Temperature (deg C) Value: 42 vs. 22
  misc_feature: MA Experiment 20000171 PARAMETER Experiment Name: At_42deg_Heat_P Parameter: Timepoint (hr) Value: 1
  misc_feature: MA Experiment 20000171 PARAMETER Experiment Name: At_42deg_Heat_P Parameter: Tissue Value: Aerial
  misc_feature: MA Experiment ID: 20000173 Result: Down-regulated in Transcription
  misc_feature: MA Experiment 20000173 PARAMETER Experiment Name: At_42deg_Heat_P Parameter: Age (day) Value: 14
  misc_feature: MA Experiment 20000173 PARAMETER Experiment Name: At_42deg_Heat_P Parameter: Organism Value: A. thaliana
  misc_feature: MA Experiment 20000173 PARAMETER Experiment Name: At_42deg_Heat_P Parameter: Plant Line Value: WS
  misc_feature: MA Experiment 20000173 PARAMETER Experiment Name: At_42deg_Heat_P Parameter: Temperature (deg C) Value: 42 vs. 22
  misc_feature: MA Experiment 20000173 PARAMETER Experiment Name: At_42deg_Heat_P Parameter: Timepoint (hr) Value: 6
  misc_feature: MA Experiment 20000173 PARAMETER Experiment Name: At_42deg_Heat_P Parameter: Tissue Value: Aerial
  misc_feature: MA Experiment ID: 20000180 Result: Up-regulated in Transcription
  misc_feature: MA Experiment 20000180 PARAMETER Experiment Name: At_Germinating_Seeds_P Parameter: Age (hr) Value: 24 vs. 0
  misc_feature: MA Experiment 20000180 PARAMETER Experiment Name: At_Germinating_Seeds_P Parameter: Tissue Value: Germinating Seeds
  misc_feature: MA Experiment ID: 20000184 Result: Down-regulated in Transcription
  misc_feature: MA Experiment 20000184 PARAMETER Experiment Name: At_Shoots__P Parameter: Age (day) Value: 7
  misc_feature: MA Experiment 20000184 PARAMETER Experiment Name: At_Shoots__P Parameter: Tissue Value: Shoots vs. Whole Plant
  misc_feature: MA Experiment ID: 20000211 Result: Up-regulated in Transcription
  misc_feature: MA Experiment 20000211 PARAMETER Experiment Name: At_0.001percent_MeJA__P Parameter: Age (day) Value: 14
  misc_feature: MA Experiment 20000211 PARAMETER Experiment Name: At_0.001percent_MeJA__P Parameter: Organism Value: A. thaliana
  misc_feature: MA Experiment 20000211 PARAMETER Experiment Name: At_0.001percent_MeJA__P Parameter: Plant Line Value: WS
  misc_feature: MA Experiment 20000211 PARAMETER Experiment Name: At_0.001percent_MeJA__P Parameter: Timepoint (hr) Value: 1
  misc_feature: MA Experiment 20000211 PARAMETER Experiment Name: At_0.001percent_MeJA__P Parameter: Tissue Value: Aerial
  misc_feature: MA Experiment 20000211 PARAMETER Experiment Name: At_0.001percent_MeJA__P Parameter: Treatment Value: 0.001percent MeJA vs. No Treatment
  misc_feature: MA Experiment ID: 20000227 Result: Down-regulated in Transcription
  misc_feature: MA Experiment 20000227 PARAMETER Experiment Name: At_Root-Tips-vs-Tops_P Parameter: Tissue Value: Root Tips vs. Root Tops
  misc_feature: MA Experiment ID: 20000234 Result: Down-regulated in Transcription
  misc_feature: MA Experiment 20000234 PARAMETER Experiment Name: At_Siliques_P Parameter: Age (day) Value: 21
  misc_feature: MA Experiment 20000234 PARAMETER Experiment Name: At_Siliques_P Parameter: Organism Value: A. thaliana
  misc_feature: MA Experiment 20000234 PARAMETER Experiment Name: At_Siliques_P Parameter: Plant Line Value: WS
  misc_feature: MA Experiment 20000234 PARAMETER Experiment Name: At_Siliques_P Parameter: Tissue Value: Less Than 5mm Siliques vs. Whole Plant
  misc_feature: MA Experiment ID: 20000264 Result: Down-regulated in Transcription
  misc_feature: MA Experiment 20000264 PARAMETER Experiment Name: At_Open_Flower_P Parameter: Age (day) Value: 21
  misc_feature: MA Experiment 20000264 PARAMETER Experiment Name: At_Open_Flower_P Parameter: Plant Line Value: WS
  misc_feature: MA Experiment 20000264 PARAMETER Experiment Name: At_Open_Flower_P Parameter: Tissue Value: Open Flower vs. Whole Plant
  misc_feature: MA Experiment ID: 20000265 Result: Down-regulated in Transcription
  misc_feature: MA Experiment 20000265 PARAMETER Experiment Name: At_Open_Flower_P Parameter: Age (day) Value: 21
  misc_feature: MA Experiment 20000265 PARAMETER Experiment Name: At_Open_Flower_P Parameter: Plant Line Value: WS
  misc_feature: MA Experiment 20000265 PARAMETER Experiment Name: At_Open_Flower_P Parameter: Tissue Value: Closed Flower vs. Whole Plant
  misc_feature: MA Experiment ID: 20000286 Result: Down-regulated in Transcription
  misc_feature: MA Experiment 20000286 PARAMETER Experiment Name: At_Open_Flower_P Parameter: Age (day) Value: 21
  misc_feature: MA Experiment 20000286 PARAMETER Experiment Name: At_Open_Flower_P Parameter: Plant Line Value: WS
  misc_feature: MA Experiment 20000286 PARAMETER Experiment Name: At_Open_Flower_P Parameter: Tissue Value: Half Open vs. Whole Plant
  misc_feature: MA Experiment ID: 20000437 Result: Down-regulated in Transcription
  misc_feature: MA Experiment 20000437 PARAMETER Experiment Name: At_Drought_P Parameter: Age (day) Value: 8
  misc_feature: MA Experiment 20000437 PARAMETER Experiment Name: At_Drought_P Parameter: Organism Value: A. thaliana
  misc_feature: MA Experiment 20000437 PARAMETER Experiment Name: At_Drought_P Parameter: Plant Line Value: WS
  misc_feature: MA Experiment 20000437 PARAMETER Experiment Name: At_Drought_P Parameter: Timepoint (hr) Value: 24
  misc_feature: MA Experiment 20000437 PARAMETER Experiment Name: At_Drought_P Parameter: Tissue Value: Whole Plant
  misc_feature: MA Experiment 20000437 PARAMETER Experiment Name: At_Drought_P Parameter: Treatment Value: Drought vs. No Drought
  misc_feature: MA Experiment ID: 20000496 Result: Down-regulated in Transcription
  misc_feature: MA Experiment 20000496 PARAMETER Experiment Name: At_Guard_Cells_P Parameter: Harvest Date Value: 7/19/2002
  misc_feature: MA Experiment 20000496 PARAMETER Experiment Name: At_Guard_Cells_P Parameter: Organism Value: Canola
  misc_feature: MA Experiment 20000496 PARAMETER Experiment Name: At_Guard_Cells_P Parameter: Tissue Value: Guard Cells vs. Leaves
  misc_feature: MA Experiment ID: 20000794 Result: Down-regulated in Transcription
  misc_feature: MA Experiment 20000794 PARAMETER Experiment Name: At_Petals_P Parameter: Age (day) Value: 23-25 days
  misc_feature: MA Experiment 20000794 PARAMETER Experiment Name: At_Petals_P Parameter: Plant Line Value: WS
  misc_feature: MA Experiment 20000794 PARAMETER Experiment Name: At_Petals_P Parameter: Tissue Value: Petals vs. Whole plant
  misc_feature: MA Experiment ID: 20001247 Result: Down-regulated in Transcription
  misc_feature: MA Experiment 20001247 PARAMETER Experiment Name: At_Far-red-induction_P Parameter: Age (day) Value: 7
  misc_feature: MA Experiment 20001247 PARAMETER Experiment Name: At_Far-red-induction_P Parameter: Light Value: Far-red vs. White
  misc_feature: MA Experiment 20001247 PARAMETER Experiment Name: At_Far-red-induction_P Parameter: Organism Value: A. thaliana
  misc_feature: MA Experiment 20001247 PARAMETER Experiment Name: At_Far-red-induction_P Parameter: Plant Line Value: Columbia
  misc_feature: MA Experiment 20001247 PARAMETER Experiment Name: At_Far-red-induction_P Parameter: Timepoint (hr) Value: 1
  misc_feature: MA Experiment 20001247 PARAMETER Experiment Name: At_Far-red-induction_P Parameter: Tissue Value: Whole Plant
  misc_feature: MA Experiment ID: 20001248 Result: Down-regulated in Transcription
  misc_feature: MA Experiment 20001248 PARAMETER Experiment Name: At_Far-red-induction_P Parameter: Age (day) Value: 7
  misc_feature: MA Experiment 20001248 PARAMETER Experiment Name: At_Far-red-induction_P Parameter: Light Value: Far-red vs. White
  misc_feature: MA Experiment 20001248 PARAMETER Experiment Name: At_Far-red-induction_P Parameter: Organism Value: A. thaliana
  misc_feature: MA Experiment 20001248 PARAMETER Experiment Name: At_Far-red-induction_P Parameter: Plant Line Value: Columbia
  misc_feature: MA Experiment 20001248 PARAMETER Experiment Name: At_Far-red-induction_P Parameter: Timepoint (hr) Value: 4
  misc_feature: MA Experiment 20001248 PARAMETER Experiment Name: At_Far-red-induction_P Parameter: Tissue Value: Whole Plant
  misc_feature: MA Experiment ID: 20001450 Result: Down-regulated in Transcription
  misc_feature: MA Experiment 20001450 PARAMETER Experiment Name: At_Far-red-induction_P Parameter: Age (day) Value: 7
  misc_feature: MA Experiment 20001450 PARAMETER Experiment Name: At_Far-red-induction_P Parameter: Light Value: Far-red vs. White
  misc_feature: MA Experiment 20001450 PARAMETER Experiment Name: At_Far-red-induction_P Parameter: Organism Value: A. thaliana
  misc_feature: MA Experiment 20001450 PARAMETER Experiment Name: At_Far-red-induction_P Parameter: Plant Line Value: Columbia
  misc_feature: MA Experiment 20001450 PARAMETER Experiment Name: At_Far-red-induction_P Parameter: Timepoint (hr) Value: 8
  misc_feature: MA Experiment 20001450 PARAMETER Experiment Name: At_Far-red-induction_P Parameter: Tissue Value: Whole Plant
  misc_feature: MA Experiment ID: 20001451 Result: Down-regulated in Transcription
  misc_feature: MA Experiment 20001451 PARAMETER Experiment Name: At_Far-red-induction_P Parameter: Age (day) Value: 7
  misc_feature: MA Experiment 20001451 PARAMETER Experiment Name: At_Far-red-induction_P Parameter: Light Value: Far-red vs. White
  misc_feature: MA Experiment 20001451 PARAMETER Experiment Name: At_Far-red-induction_P Parameter: Organism Value: A. thaliana
  misc_feature: MA Experiment 20001451 PARAMETER Experiment Name: At_Far-red-induction_P Parameter: Plant Line Value: Columbia
  misc_feature: MA Experiment 20001451 PARAMETER Experiment Name: At_Far-red-induction_P Parameter: Timepoint (hr) Value: 24
  misc_feature: MA Experiment 20001451 PARAMETER Experiment Name: At_Far-red-induction_P Parameter: Tissue Value: Whole Plant
  misc_feature: MA Experiment ID: 20001756 Result: Up-regulated in Transcription
  misc_feature: MA Experiment 20001756 PARAMETER Experiment Name: At_50mM_NH4NO3_L-to-H_P Parameter: Timepoint (hr) Value: 4
  misc_feature: MA Experiment 20001756 PARAMETER Experiment Name: At_50mM_NH4NO3_L-to-H_P Parameter: Tissue Value: Leaf
  misc_feature: MA Experiment 20001756 PARAMETER Experiment Name: At_50mM_NH4NO3_L-to-H_P Parameter: Treatment Value: 50mM NH4NO3 vs 100mM Mannitol
  misc_feature: MA Experiment ID: 20001757 Result: Up-regulated in Transcription
  misc_feature: MA Experiment 20001757 PARAMETER Experiment Name: At_50mM_NH4NO3_L-to-H_P Parameter: Timepoint (hr) Value: 6
  misc_feature: MA Experiment 20001757 PARAMETER Experiment Name: At_50mM_NH4NO3_L-to-H_P Parameter: Tissue Value: Leaf
  misc_feature: MA Experiment 20001757 PARAMETER Experiment Name: At_50mM_NH4NO3_L-to-H_P Parameter: Treatment Value: 50mM NH4NO3 vs 100mM Mannitol
  misc_feature: MA Experiment ID: 20001905 Result: Down-regulated in Transcription
  misc_feature: MA Experiment 20001905 PARAMETER Experiment Name: At_Drought_Reproduction_P Parameter: Age (day) Value: 40
  misc_feature: MA Experiment 20001905 PARAMETER Experiment Name: At_Drought_Reproduction_P Parameter: Organism Value: A. thaliana
  misc_feature: MA Experiment 20001905 PARAMETER Experiment Name: At_Drought_Reproduction_P Parameter: Plant Line Value: WS
  misc_feature: MA Experiment 20001905 PARAMETER Experiment Name: At_Drought_Reproduction_P Parameter: Timepoint (day) Value: 10
  misc_feature: MA Experiment 20001905 PARAMETER Experiment Name: At_Drought_Reproduction_P Parameter: Tissue Value: Rosettes
  misc_feature: MA Experiment 20001905 PARAMETER Experiment Name: At_Drought_Reproduction_P Parameter: Treatment Value: Drought vs. No Drought
  misc_feature: MA Experiment ID: 20001910 Result: Down-regulated in Transcription
  misc_feature: MA Experiment 20001910 PARAMETER Experiment Name: At_Drought_Reproduction_P Parameter: Age (day) Value: 37
  misc_feature: MA Experiment 20001910 PARAMETER Experiment Name: At_Drought_Reproduction_P Parameter: Organism Value: A. thaliana
  misc_feature: MA Experiment 20001910 PARAMETER Experiment Name: At_Drought_Reproduction_P Parameter: Plant Line Value: WS
  misc_feature: MA Experiment 20001910 PARAMETER Experiment Name: At_Drought_Reproduction_P Parameter: Timepoint (day) Value: 7
  misc_feature: MA Experiment 20001910 PARAMETER Experiment Name: At_Drought_Reproduction_P Parameter: Tissue Value: Flowers
  misc_feature: MA Experiment 20001910 PARAMETER Experiment Name: At_Drought_Reproduction_P Parameter: Treatment Value: Drought vs. No Drought
cataaacttattttgtacgatcacataaaactgtaaacccccacacagttattggccgtcggattcaatggaaggattagctatcagagcatctcgaccgtcggttttctgttctattccaggtctcggcggcgattcccaccgaaaacctccaagtgacggtttcctcaagctgcctgcgtcgtctattccggcggacagccgaaaattagtagcgaattctacttcctttcatccaatctcagccgttaacgtctctgctcaagcttccctcaccgctgattttcccgccctttcagaaactatactgaaagagggaagaaataacggaaaagagaaagcagagaacatcgtgtggcacgagagttcgatatgcagatgcgacagacaacaacttcttcaacaaaagggttgtgtcgtttggatcactggtctcagtggttcagggaaaagcactgttgcttgtgcactaagtaaagcattgtttgaaagaggcaaacttacttacacactcgacggcgacaatgtccgtcacggccttaaccgtgacctcactttcaaagcagagcaccgcaccgaaaacattagaagaattggtgaggtggctaagttgtttgctgacgtcggagtcatttgtatagcaagtttgatttctccgtaccggagagacagagacgcgtgccggtccttgttacctgacggcgatttcgtcgaggtcttcatggacgttcctcttcatgtgtgcgagtcgagagatccaaaggggttgtacaagcttgcacgtgcaggcaaaatcaaaggcttcactggaatcgacgacccttacgaggcaccagtgaattgcgaggtagtgctgaaacacacaggagacgacgagtcgtgttcgccacgtcagatggctgagaacatcatctcttacctgcaaaacaaaggttatcttgagggctaagtcaaagtcggaaaaatcaacccaatttgtcgattctatatatggctaaaggattgttctccctgattcggtcagaagcttgagacctggaaacgatgtcgtctcgcttcgtcacactatcatttgttcttgaattgtgttgaagtcaaaagccaaagggaatatatctatatttgttctaatcatcatttagttagtttataaagagtttttgctccaatgatatcgactgtgttgtataatgtgaattaataaagtggatttcgttgtatttaagtttgtcttaccagcc

SEQ ID NO: 40764 - protein, 293 aa, Arabidopsis thaliana
  peptide (1)..(293): Ceres Seq. ID no. 12323895
  misc_feature (114)..(270): Pfam Name: Adenylylsulphate kinase Pfam Description: Adenylylsulphate kinase
  misc_feature (91)..(291): Homolog of NCBI NO: 6563285 NR Description: adenosine-5'-phosphosulfate kinase [Zea mays]
  misc_feature (94)..(292): Homolog of NCBI NO: 15228666 NR Description: putative adenylylsulfate kinase; protein id:
  misc_feature (91)..(291): Homolog of NCBI NO: 34393551 NR Description: putative adenosine-5'-phosphosulfate kinase
  misc_feature (94)..(292): Homolog of NCBI NO: 7387809 NR Description: Adenylylsulfate kinase, chloroplast precursor kinase) (Adenosine-5'phosphosulfate kinase) (ATP
  misc_feature (15)..(292): Homolog of NCBI NO: 21537248 NR Description: adenylylsulfate kinase-like protein [Arabidopsis
  misc_feature (15)..(292): Homolog of NCBI NO: 18425199 NR Description: adenylylsulfate kinase-like protein
  misc_feature (15)..(292): Homolog of NCBI NO: 9757873 NR Description: adenylylsulfate kinase-like protein [Arabidopsis
  misc_feature (82)..(292): Homolog of NCBI NO: 21553403 NR Description: putative adenosine phosphosulfate kinase
  misc_feature (82)..(292): Homolog of NCBI NO: 15225999 NR Description: putative adenosine phosphosulfate kinase
  misc_feature (1)..(293): Homolog of NCBI NO: 15236087 NR Description: adenosine-5-phosphosulfate-kinase
MEGLAIRASRPSVFCSIPGLGGDSHRKPPSDGFLKLPASSIPADSRKLVANSTSFHPISAVNVSAQASLTADFPALSETILKEGRNNGKEKAENIVWHESSICRCDRQQLLQQKGCVVWITGLSGSGKSTVACALSKALFERGKLTYTLDGDNVRHGLNRDLTFKAEHRTENIRRIGEVAKLFADVGVICIASLISPYRRDRDACRSLLPDGDFVEVFMDVPLHVCESRDPKGLYKLARAGKIKGFTGIDDPYEAPVNCEVVLKHTGDDESCSPRQMAENIISYLQNKGYLEG

SEQ ID NO: 40765 - DNA, 1534 bp, Arabidopsis thaliana
  misc_feature (1)..(1534): Ceres Seq. ID no. 13488676
  misc_feature: MA Experiment ID: 108434 Result: Down-regulated in Transcription
  misc_feature: MA Experiment 108434 PARAMETER Experiment Name: At_Root_Tips_cDNA_P Parameter: Tissue Value: Root Tips
  misc_feature: MA Experiment ID: 108488 Result: Down-regulated in Transcription
  misc_feature: MA Experiment ID: 108573 Result: Up-regulated in Transcription
  misc_feature: MA Experiment 108573 PARAMETER Experiment Name: At_Drought_cDNA_P Parameter: Timepoint (hr) Value: 6
  misc_feature: MA Experiment 108573 PARAMETER Experiment Name: At_Drought_cDNA_P Parameter: Tissue Value: Aerial
  misc_feature: MA Experiment 108573 PARAMETER Experiment Name: At_Drought_cDNA_P Parameter: Treatment Value: Drought vs. No Drought
  misc_feature: MA Experiment ID: 108577 Result: Up-regulated in Transcription
  misc_feature: MA Experiment 108577 PARAMETER Experiment Name: At_42deg_Heat_cDNA_P Parameter: Temperature (deg C) Value: 42 vs. 22
  misc_feature: MA Experiment 108577 PARAMETER Experiment Name: At_42deg_Heat_cDNA_P Parameter: Timepoint (hr) Value: 6
  misc_feature: MA Experiment 108577 PARAMETER Experiment Name: At_42deg_Heat_cDNA_P Parameter: Tissue Value: Aerial
  misc_feature: MA Experiment ID: 108585 Result: Up-regulated in Transcription
  misc_feature: MA Experiment 108585 PARAMETER Experiment Name: At_5mM_NaNP_cDNA_P Parameter: Timepoint (hr) Value: 6
  misc_feature: MA Experiment 108585 PARAMETER Experiment Name: At_5mM_NaNP_cDNA_P Parameter: Tissue Value: Aerial
  misc_feature: MA Experiment 108585 PARAMETER Experiment Name: At_5mM_NaNP_cDNA_P Parameter: Treatment Value: null
  misc_feature: MA Experiment ID: 20000111 Result: Up-regulated in Transcription
  misc_feature: MA Experiment 20000111 PARAMETER Experiment Name: At_42deg_Heat_cDNA_P Parameter: Temperature (deg C) Value: 42 vs. 22
  misc_feature: MA Experiment 20000111 PARAMETER Experiment Name: At_42deg_Heat_cDNA_P Parameter: Timepoint (hr) Value: 6
  misc_feature: MA Experiment 20000111 PARAMETER Experiment Name: At_42deg_Heat_cDNA_P Parameter: Tissue Value: Aerial
  misc_feature: MA Experiment ID: 20000112 Result: Up-regulated in Transcription
  misc_feature: MA Experiment 20000112 PARAMETER Experiment Name: At_42deg_Heat_cDNA_P Parameter: Temperature (deg C) Value: 42 vs. 22
  misc_feature: MA Experiment 20000112 PARAMETER Experiment Name: At_42deg_Heat_cDNA_P Parameter: Timepoint (hr) Value: 2
  misc_feature: MA Experiment 20000112 PARAMETER Experiment Name: At_42deg_Heat_cDNA_P Parameter: Tissue Value: Aerial
  misc_feature: MA Experiment ID: 20000173 Result: Up-regulated in Transcription
  misc_feature: MA Experiment 20000173 PARAMETER Experiment Name: At_42deg_Heat_P Parameter: Age (day) Value: 14
  misc_feature: MA Experiment 20000173 PARAMETER Experiment Name: At_42deg_Heat_P Parameter: Organism Value: A. thaliana
  misc_feature: MA Experiment 20000173 PARAMETER Experiment Name: At_42deg_Heat_P Parameter: Plant Line Value: WS
  misc_feature: MA Experiment 20000173 PARAMETER Experiment Name: At_42deg_Heat_P Parameter: Temperature (deg C) Value: 42 vs. 22
  misc_feature: MA Experiment 20000173 PARAMETER Experiment Name: At_42deg_Heat_P Parameter: Timepoint (hr) Value: 6
  misc_feature: MA Experiment 20000173 PARAMETER Experiment Name: At_42deg_Heat_P Parameter: Tissue Value: Aerial
  misc_feature: MA Experiment ID: 20000234 Result: Down-regulated in Transcription
  misc_feature: MA Experiment 20000234 PARAMETER Experiment Name: At_Siliques_P Parameter: Age (day) Value: 21
  misc_feature: MA Experiment 20000234 PARAMETER Experiment Name: At_Siliques_P Parameter: Organism Value: A. thaliana
  misc_feature: MA Experiment 20000234 PARAMETER Experiment Name: At_Siliques_P Parameter: Plant Line Value: WS
  misc_feature: MA Experiment 20000234 PARAMETER Experiment Name: At_Siliques_P Parameter: Tissue Value: Less Than 5mm Siliques vs. Whole Plant
  misc_feature: MA Experiment ID: 20000265 Result: Down-regulated in Transcription
  misc_feature: MA Experiment 20000265 PARAMETER Experiment Name: At_Open_Flower_P Parameter: Age (day) Value: 21
  misc_feature: MA Experiment 20000265 PARAMETER Experiment Name: At_Open_Flower_P Parameter: Plant Line Value: WS
  misc_feature: MA Experiment 20000265 PARAMETER Experiment Name: At_Open_Flower_P Parameter: Tissue Value: Closed Flower vs. Whole Plant
  misc_feature: MA Experiment ID: 20001560 Result: Down-regulated in Transcription
  misc_feature: MA Experiment 20001560 PARAMETER Experiment Name: At_Drought_Soil_Dry_P Parameter: Age (day) Value: 28
  misc_feature: MA Experiment 20001560 PARAMETER Experiment Name: At_Drought_Soil_Dry_P Parameter: Organism Value: A. thaliana
  misc_feature: MA Experiment 20001560 PARAMETER Experiment Name: At_Drought_Soil_Dry_P Parameter: Plant Line Value: WS
  misc_feature: MA Experiment 20001560 PARAMETER Experiment Name: At_Drought_Soil_Dry_P Parameter: Post Timepoint (hr) Value: None
  misc_feature: MA Experiment 20001560 PARAMETER Experiment Name: At_Drought_Soil_Dry_P Parameter: Post-Treatment Value: None
  misc_feature: MA Experiment 20001560 PARAMETER Experiment Name: At_Drought_Soil_Dry_P Parameter: Timepoint (day) Value: 14
  misc_feature: MA Experiment 20001560 PARAMETER Experiment Name: At_Drought_Soil_Dry_P Parameter: Treatment Value: Drought vs. No Drought
  misc_feature: MA Experiment ID: 20001905 Result: Up-regulated in Transcription
  misc_feature: MA Experiment 20001905 PARAMETER Experiment Name: At_Drought_Reproduction_P Parameter: Age (day) Value: 40
  misc_feature: MA Experiment 20001905 PARAMETER Experiment Name: At_Drought_Reproduction_P Parameter: Organism Value: A. thaliana
  misc_feature: MA Experiment 20001905 PARAMETER Experiment Name: At_Drought_Reproduction_P Parameter: Plant Line Value: WS
  misc_feature: MA Experiment 20001905 PARAMETER Experiment Name: At_Drought_Reproduction_P Parameter: Timepoint (day) Value: 10
  misc_feature: MA Experiment 20001905 PARAMETER Experiment Name: At_Drought_Reproduction_P Parameter: Tissue Value: Rosettes
  misc_feature: MA Experiment 20001905 PARAMETER Experiment Name: At_Drought_Reproduction_P Parameter: Treatment Value: Drought vs. No Drought
ataataattatatctttaaaaaaaaaacagaaaaattctttgctttgcaacaaaggcagacagacaaaaggctaattcggagctctcctccacatcttcttccaaaacacaaacaaacccccaaatttccagaaaaatcagatcattctttcatcaatctcgtcttctttaatcataggtgggaattcatcagctcaaaaacgctgtacccgatcgttttacgactcaaaccagagaagctgattcttttccgatcattccaatttccatttcttccttgggaggtgatcgatcggttttacaccaaattagccgtcgaaaggggtgcttctttgatctaatttcgatggcgggattagagaaaaacgctgatttctcagggaagacgacgaaatcggctacaacgacgtcgtttttcaacaggtcgcttacaattcacggaagaacagtggtggattcgggccccaaatcccacaatctcaatccttctctcaatcgtaccacctccattaccaaattctacacccccgtagaatcgatgggaacttctcttaaaggcaaagtcaaaaacctttgtagattattcgagacttccaaacccgttaaacctgccttagctgagattcctcagaagcagaaatccggtaaatcccttttacccgaatcgcggatatcgcctttttcgagcttaaacaactcggtcatccgtcttcccgggacagaggacaggattgtggtgtattttactagcttgagagggattagacggacgtatgaggattgctatgctgtcagaatgatatttagagggtttcgggtttggatcgatgagcgcgacgtctccatggatatcgcttataggaaagagttgcagattgcaatgggagagaagtctgtgtctttgcctcaagttttcattatgggcaagtatgttggtggtgctgatgtgatcaagagtttgtttgagattggtgagcttgctaagattcttaaagagtttccaatgagacaaccagggtttgtttgccattgctgtggggacattagatttgttccgtgttccaattgtagtggcagcaagaaactgtttgatgaggatgaagatagggtcaagagatgtcctgaatgcaatgagaatggattgatacgttgtcctgattgctcttcttgagatatatcatcaatgaacctgaaaaaaccattaaagaaaagaagaaaaaagaggtatttatttctcttttgatgtttccattgttgtgtagaacagtgaatgatgctgccacaagtatccgaaaatctcttttggatcagcagcatttcactttgggttttttaaggtttgcgatcaacggtaatgggaatgccggtgatcgtggatttagtttatgtatgtgtttgctactaagggctaaatgtaattgtgtaatcaaaatgtctgaaacgggtagtaagcattttgactcttgtgtgtcaatgttgtgaaagacaactgtgttcttatgctatatatttgattgtaaatatttcgtgtgtt

SEQ ID NO: 40766 - protein, 274 aa, Arabidopsis thaliana
  peptide (1)..(274): Ceres Seq. ID no. 13488677
  misc_feature (128)..(215): Pfam Name: Glutaredoxin Pfam Description: Glutaredoxin
  misc_feature (123)..(273): Homolog of NCBI NO: 38346321 NR Description: OJ000126_13.3 [Oryza sativa (japonica
  misc_feature (124)..(273): Homolog of NCBI NO: 15223291 NR Description: expressed protein [Arabidopsis thaliana]
  misc_feature (15)..(273): Homolog of NCBI NO: 15237686 NR Description: expressed protein [Arabidopsis thaliana]
  misc_feature (120)..(270): Homolog of NCBI NO: 10241626 NR Description: Contains similarity to F1N 19.7
  misc_feature (120)..(272): Homolog of NCBI NO: 32490043 NR Description: OSJNBa0063C18.3 [Oryza sativa (japonica
  misc_feature (129)..(274): Homolog of NCBI NO: 34899098 NR Description: hypothetical protein~similar to Arabidopsis
  misc_feature (126)..(272): Homolog of NCBI NO: 15227326 NR Description: expressed protein [Arabidopsis thaliana]
  misc_feature (62)..(272): Homolog of NCBI NO: 30694571 NR Description: expressed protein [Arabidopsis thaliana]
  misc_feature (62)..(272): Homolog of NCBI NO: 15451042 NR Description: putative protein [Arabidopsis thaliana]
  misc_feature (1)..(274): Homolog of NCBI NO: 15240723 NR Description: expressed protein [Arabidopsis thaliana]
MAGLEKNADFSGKTTKSATTTSFFNRSLTIHGRTVVDSGPKSHNLNPSLNRTTSITKFYTPVESMGTSLKGKVKNLCRLFETSKPVKPALAEIPQKQKSGKSLLPESRISPFSSLNNSVIRLPGTEDRIVVYFTSLRGIRRTYEDCYAVRMIFRGFRVWIDERDVSMDIAYRKELQIAMGEKSVSLPQVFIMGKYVGGADVIKSLFEIGELAKILKEFPMRQPGFVCHCCGDIRFVPCSNCSGSKKLFDEDEDRVKRCPECNENGLIRCPDCSS

SEQ ID NO: 40767 - protein, 210 aa, Arabidopsis thaliana
  peptide (1)..(210): Ceres Seq. ID no. 13488678
  misc_feature (64)..(151): Pfam Name: Glutaredoxin Pfam Description: Glutaredoxin
  misc_feature (59)..(209): Homolog of NCBI NO: 38346321 NR Description: OJ000126_13.3 [Oryza sativa (japonica
  misc_feature (60)..(209): Homolog of NCBI NO: 15223291 NR Description: expressed protein [Arabidopsis thaliana]
  misc_feature (1)..(209): Homolog of NCBI NO: 15237686 NR Description: expressed protein [Arabidopsis thaliana]
  misc_feature (56)..(206): Homolog of NCBI NO: 10241626 NR Description: Contains similarity to F1N 19.7
  misc_feature (56)..(208): Homolog of NCBI NO: 32490043 NR Description: OSJNBa0063C18.3 [Oryza sativa (japonica
  misc_feature (65)..(210): Homolog of NCBI NO: 34899098 NR Description: hypothetical protein~similar to Arabidopsis
  misc_feature (62)..(208): Homolog of NCBI NO: 15227326 NR Description: expressed protein [Arabidopsis thaliana]
  misc_feature (1)..(208): Homolog of NCBI NO: 30694571 NR Description: expressed protein [Arabidopsis thaliana]
  misc_feature (1)..(208): Homolog of NCBI NO: 15451042 NR Description: putative protein [Arabidopsis thaliana]
  misc_feature (1)..(210): Homolog of NCBI NO: 15240723 NR Description: expressed protein [Arabidopsis thaliana]
MGTSLKGKVKNLCRLFETSKPVKPALAEIPQKQKSGKSLLPESRISPFSSLNNSVIRLPGTEDRIVVYFTSLRGIRRTYEDCYAVRMIFRGFRVWIDERDVSMDIAYRKELQIAMGEKSVSLPQVFIMGKYVGGADVIKSLFEIGELAKILKEFPMRQPGFVCHCCGDIRFVPCSNCSGSKKLFDEDEDRVKRCPECNENGLIRCPDCSS

SEQ ID NO: 40768 - DNA, 1280 bp, Arabidopsis thaliana
  misc_feature (1)..(1280): Ceres Seq. ID no. 12482816
  misc_feature: MA Experiment ID: 20000307 Result: Up-regulated in Transcription
  misc_feature: MA Experiment 20000307 PARAMETER Experiment Name: At_Germinating_Seeds_Sub_P Parameter: Age (hr) Value: 24 vs. 0
  misc_feature: MA Experiment 20000307 PARAMETER Experiment Name: At_Germinating_Seeds_Sub_P Parameter: Organism Value: A. thaliana
  misc_feature: MA Experiment 20000307 PARAMETER Experiment Name: At_Germinating_Seeds_Sub_P Parameter: Plant Line Value: WS
  misc_feature: MA Experiment 20000307 PARAMETER Experiment Name: At_Germinating_Seeds_Sub_P Parameter: Tissue Value: Germinating Seeds
  misc_feature: MA Experiment ID: 20000315 Result: Down-regulated in Transcription
  misc_feature: MA Experiment 20000315 PARAMETER Experiment Name: At_14day_Shoots-Roots_Sub_P Parameter: Age (day) Value: 14
  misc_feature: MA Experiment 20000315 PARAMETER Experiment Name: At_14day_Shoots-Roots_Sub_P Parameter: Organism Value: A. thaliana
  misc_feature: MA Experiment 20000315 PARAMETER Experiment Name: At_14day_Shoots-Roots_Sub_P Parameter: Plant Line Value: WS
  misc_feature: MA Experiment 20000315 PARAMETER Experiment Name: At_14day_Shoots-Roots_Sub_P Parameter: Tissue Value: Shoots vs. Whole Plant
  misc_feature: MA Experiment ID: 20000328 Result: Down-regulated in Transcription
  misc_feature: MA Experiment 20000328 PARAMETER Experiment Name: At_42deg_Heat_Sub_P Parameter: Age (day) Value: 14
  misc_feature: MA Experiment 20000328 PARAMETER Experiment Name: At_42deg_Heat_Sub_P Parameter: Organism Value: A. thaliana
  misc_feature: MA Experiment 20000328 PARAMETER Experiment Name: At_42deg_Heat_Sub_P Parameter: Plant Line Value: WS
  misc_feature: MA Experiment 20000328 PARAMETER Experiment Name: At_42deg_Heat_Sub_P Parameter: Temperature (deg C) Value: 42 vs. 22
  misc_feature: MA Experiment 20000328 PARAMETER Experiment Name: At_42deg_Heat_Sub_P Parameter: Timepoint (hr) Value: 6
  misc_feature: MA Experiment 20000328 PARAMETER Experiment Name: At_42deg_Heat_Sub_P Parameter: Tissue Value: Aerial
atcctcccttccgcaacattgattttgtttgatgatcgttgggttttgaaagaagagcaatgagcaattatgcagccggactcggtaagcctggctcaggtaaaaggagaatcagagatcttttaaatcaacctgataaccgagtctgcgctgattgtggcgcttctgatcctaaatgggcatcagcaaatatcggagtattcatttgcttaaaatgttgcggtgtgcacaggagcctcggcactcatatttcaaaggttttgtctgtgacactagatgaatggtcagatgaggaagtcgattccatgattgaaattggaggaaatgcgtctgctaattcaatttatgaagcttttttacctgacacgtgctctaagcctggacctgatgttaatcatgaccagcgtatgagattcattagggcaaaatatgaactgcaagagtttctgaaaccaagcttgcggattacatccgggaaaggctcaacaaagagttcagcttttcttacatcaagtctttctagaaagatcatggatagttttcgcacaaattcatcatcgcagacgatgtttcaggaaggaatggtagagtttattggattgttgaaggtgactattaagaagggaactaacttagcaatcagagacatgatgtcaagtgatccatatgttgtgttgaatctagggaagcaaaaacttcagacaactgttatgaatagtaatttgaacccggtatggaatcaagaactcatgctgtctgttcctgagagctatggccctgtgaaattgcaagtgtatgattatgatacattttctgctgatgacataatgggagaagcagatattgatatacaacctttgataacatctgcaatggcttttggggatccagaaatgtttggggatatgcagattgggaaatggctaaaatcgcatgataacccattaatagatgacagtatcattaacattgttgatgggaaagtgaaacaggaggttcagatcaagcttcagaatgtagagtctggagaattagagctagaaatggaatggctgccacttgaccaataagtgtcatataggtctcataacctttataaatgtactgattgatttaattctttgtttttttttttctctccatttgttggaaattttcaaaaatctctttgcatttttttcctcatttcagaggtaaatgtattttgatgtttgtataaaccaatggattactatatgatgttttgattgatggaaaaagggtgaaatatccacttatgt

SEQ ID NO: 40769 - protein, 336 aa, Arabidopsis thaliana
  peptide (1)..(336): Ceres Seq. ID no. 12482817
  misc_feature (15)..(137): Pfam Name: Putative GTPase activating protein for Arf Pfam Description: Putative GTPase activating protein for Arf
  misc_feature (17)..(132): Homolog of NCBI NO: 6648206 NR Description: putative GTPase activating protein [Arabidopsis
  misc_feature (132)..(336): Homolog of NCBI NO: 30680493 NR Description: zinc finger and C2 domain protein, putative
  misc_feature (132)..(336): Homolog of NCBI NO: 6648206 NR Description: putative GTPase activating protein [Arabidopsis
  misc_feature (9)..(336): Homolog of NCBI NO: 19386828 NR Description: putative zinc finger and C2 domain protein
  misc_feature (1)..(41): Homolog of NCBI NO: 7486586 NR Description: hypothetical protein F7J7.100 - Arabidopsis
  misc_feature (40)..(336): Homolog of NCBI NO: 7486586 NR Description: hypothetical protein F7J7.100 - Arabidopsis
  misc_feature (1)..(336): Homolog of NCBI NO: 21594052 NR Description: putative GTPase activating protein [Arabidopsis
  misc_feature (1)..(336): Homolog of NCBI NO: 18415638 NR Description: putative protein
  misc_feature (1)..(336): Homolog of NCBI NO: 25407332 NR Description: hypothetical protein AT4g05330 [imported] -
  misc_feature (1)..(336): Homolog of NCBI NO: 18412932 NR Description: putative protein
MSNYAAGLGKPGSGKRRIRDLLNQPDNRVCADCGASDPKWASANIGVFICLKCCGVHRSLGTHISKVLSVTLDEWSDEEVDSMIEIGGNASANSIYEAFLPDTCSKPGPDVNHDQRMRFIRAKYELQEFLKPSLRITSGKGSTKSSAFLTSSLSRKIMDSFRTNSSSQTMFQEGMVEFIGLLKVTIKKGTNLAIRDMMSSDPYVVLNLGKQKLQTTVMNSNLNPVWNQELMLSVPESYGPVKLQVYDYDTFSADDIMGEADIDIQPLITSAMAFGDPEMFGDMQIGKWLKSHDNPLIDDSIINIVDGKVKQEVQIKLQNVESGELELEMEWLPLDQ

SEQ ID NO: 40770 - protein, 254 aa, Arabidopsis thaliana
  peptide (1)..(254): Ceres Seq. ID no. 12482818
  misc_feature (1)..(55): Pfam Name: Putative GTPase activating protein for Arf Pfam Description: Putative GTPase activating protein for Arf
  misc_feature (1)..(50): Homolog of NCBI NO: 30680493 NR Description: zinc finger and C2 domain protein, putative
  misc_feature (1)..(50): Homolog of NCBI NO: 6648206 NR Description: putative GTPase activating protein [Arabidopsis
  misc_feature (50)..(254): Homolog of NCBI NO: 30680493 NR Description: zinc finger and C2 domain protein, putative
  misc_feature (50)..(254): Homolog of NCBI NO: 6648206 NR Description: putative GTPase activating protein [Arabidopsis
  misc_feature (1)..(254): Homolog of NCBI NO: 19386828 NR Description: putative zinc finger and C2 domain protein
  misc_feature (1)..(254): Homolog of NCBI NO: 7486586 NR Description: hypothetical protein F7J7.100 - Arabidopsis
  misc_feature (1)..(254): Homolog of NCBI NO: 21594052 NR Description: putative GTPase activating protein [Arabidopsis
  misc_feature (1)..(254): Homolog of NCBI NO: 18415638 NR Description: putative protein
  misc_feature (1)..(254): Homolog of NCBI NO: 25407332 NR Description: hypothetical protein AT4g05330 [imported] -
  misc_feature (1)..(254): Homolog of NCBI NO: 18412932 NR Description: putative protein
MIEIGGNASANSIYEAFLPDTCSKPGPDVNHDQRMRFIRAKYELQEFLKPSLRITSGKGSTKSSAFLTSSLSRKIMDSFRTNSSSQTMFQEGMVEFIGLLKVTIKKGTNLAIRDMMSSDPYVVLNLGKQKLQTTVMNSNLNPVWNQELMLSVPESYGPVKLQVYDYDTFSADDIMGEADIDIQPLITSAMAFGDPEMFGDMQIGKWLKSHDNPLIDDSIINIVDGKVKQEVQIKLQNVESGELELEMEWLPLDQ

SEQ ID NO: 40771 - protein, 220 aa, Arabidopsis thaliana
  peptide (1)..(220): Ceres Seq. ID no. 12482819
  misc_feature (66)..(145): Pfam Name: C2 domain Pfam Description: C2 domain
  misc_feature (1)..(16): Homolog of NCBI NO: 30680493 NR Description: zinc finger and C2 domain protein, putative
  misc_feature (1)..(16): Homolog of NCBI NO: 6648206 NR Description: putative GTPase activating protein [Arabidopsis
  misc_feature (16)..(220): Homolog of NCBI NO: 30680493 NR Description: zinc finger and C2 domain protein, putative
  misc_feature (16)..(220): Homolog of NCBI NO: 6648206 NR Description: putative GTPase activating protein [Arabidopsis
  misc_feature (1)..(220): Homolog of NCBI NO: 19386828 NR Description: putative zinc finger and C2 domain protein
  misc_feature (1)..(220): Homolog of NCBI NO: 7486586 NR Description: hypothetical protein F7J7.100 - Arabidopsis
  misc_feature (1)..(220): Homolog of NCBI NO: 21594052 NR Description: putative GTPase activating protein [Arabidopsis
  misc_feature (1)..(220): Homolog of NCBI NO: 18415638 NR Description: putative protein
  misc_feature (1)..(220): Homolog of NCBI NO: 25407332 NR Description: hypothetical protein AT4g05330 [imported] -
  misc_feature (1)..(220): Homolog of NCBI NO: 18412932 NR Description: putative protein
MRFIRAKYELQEFLKPSLRITSGKGSTKSSAFLTSSLSRKIMDSFRTNSSSQTMFQEGMVEFIGLLKVTIKKGTNLAIRDMMSSDPYVVLNLGKQKLQTTVMNSNLNPVWNQELMLSVPESYGPVKLQVYDYDTFSADDIMGEADIDIQPLITSAMAFGDPEMFGDMQIGKWLKSHDNPLIDDSIINIVDGKVKQEVQIKLQNVESGELELEMEWLPLDQ

SEQ ID NO: 40772 - DNA, 1252 bp, Arabidopsis thaliana
  misc_feature (1)..(1252): Ceres Seq. ID no. 12330722
  misc_feature: MA Experiment ID: 108463 Result: Up-regulated in Transcription
  misc_feature: MA Experiment 108463 PARAMETER Experiment Name: At_Germinating_Seeds_cDNA_P Parameter: Age (day) Value: 3 vs. 0
  misc_feature: MA Experiment 108463 PARAMETER Experiment Name: At_Germinating_Seeds_cDNA_P Parameter: Tissue Value: Germinating Seeds
  misc_feature: MA Experiment ID: 108464 Result: Up-regulated in Transcription
  misc_feature: MA Experiment 108464 PARAMETER Experiment Name: At_Germinating_Seeds_cDNA_P Parameter: Age (day) Value: 4 vs. 0
  misc_feature: MA Experiment 108464 PARAMETER Experiment Name: At_Germinating_Seeds_cDNA_P Parameter: Tissue Value: Germinating Seeds
  misc_feature: MA Experiment ID: 20000234 Result: Up-regulated in Transcription
  misc_feature: MA Experiment 20000234 PARAMETER Experiment Name: At_Siliques_P Parameter: Age (day) Value: 21
  misc_feature: MA Experiment 20000234 PARAMETER Experiment Name: At_Siliques_P Parameter: Organism Value: A. thaliana
  misc_feature: MA Experiment 20000234 PARAMETER Experiment Name: At_Siliques_P Parameter: Plant Line Value: WS
  misc_feature: MA Experiment 20000234 PARAMETER Experiment Name: At_Siliques_P Parameter: Tissue Value: Less Than 5mm Siliques vs. Whole Plant
  misc_feature: MA Experiment ID: 20000264 Result: Up-regulated in Transcription
  misc_feature: MA Experiment 20000264 PARAMETER Experiment Name: At_Open_Flower_P Parameter: Age (day) Value: 21
  misc_feature: MA Experiment 20000264 PARAMETER Experiment Name: At_Open_Flower_P Parameter: Plant Line Value: WS
  misc_feature: MA Experiment 20000264 PARAMETER Experiment Name: At_Open_Flower_P Parameter: Tissue Value: Open Flower vs. Whole Plant
  misc_feature: MA Experiment ID: 20000265 Result: Up-regulated in Transcription
  misc_feature: MA Experiment 20000265 PARAMETER Experiment Name: At_Open_Flower_P Parameter: Age (day) Value: 21
  misc_feature: MA Experiment 20000265 PARAMETER Experiment Name: At_Open_Flower_P Parameter: Plant Line Value: WS
  misc_feature: MA Experiment 20000265 PARAMETER Experiment Name: At_Open_Flower_P Parameter: Tissue Value: Closed Flower vs. Whole Plant
  misc_feature: MA Experiment ID: 20000269 Result: Up-regulated in Transcription
  misc_feature: MA Experiment 20000269 PARAMETER Experiment Name: At_1mM_KNO3_L-vs-H_Roots_P Parameter: Age (day) Value: 7,10,12
  misc_feature: MA Experiment 20000269 PARAMETER Experiment Name: At_1mM_KNO3_L-vs-H_Roots_P Parameter: Organism Value: A. thaliana
  misc_feature: MA Experiment 20000269 PARAMETER Experiment Name: At_1mM_KNO3_L-vs-H_Roots_P Parameter: Plant Line Value: WS
  misc_feature: MA Experiment 20000269 PARAMETER Experiment Name: At_1mM_KNO3_L-vs-H_Roots_P Parameter: Timepoint (day) Value: 7,10,12
  misc_feature: MA Experiment 20000269 PARAMETER Experiment Name: At_1mM_KNO3_L-vs-H_Roots_P Parameter: Tissue Value: Roots
  misc_feature: MA Experiment 20000269 PARAMETER Experiment Name: At_1mM_KNO3_L-vs-H_Roots_P Parameter: Treatment Value: 1mM KNO3 vs. 50mM KNO3
  misc_feature: MA Experiment ID: 20000286 Result: Up-regulated in Transcription
  misc_feature: MA Experiment 20000286 PARAMETER Experiment Name: At_Open_Flower_P Parameter: Age (day) Value: 21
  misc_feature: MA Experiment 20000286 PARAMETER Experiment Name: At_Open_Flower_P Parameter: Plant Line Value: WS
  misc_feature: MA Experiment 20000286 PARAMETER Experiment Name: At_Open_Flower_P Parameter: Tissue Value: Half Open vs. Whole Plant
  misc_feature: MA Experiment ID: 20000441 Result: Down-regulated in Transcription
  misc_feature: MA Experiment 20000441 PARAMETER Experiment Name: At_1uM_BR-BRZ__P Parameter: Tissue Value: Shoot Apices
  misc_feature: MA Experiment 20000441 PARAMETER Experiment Name: At_1uM_BR-BRZ__P Parameter: Treatment Value: 1uM BR vs. No Treatment
  misc_feature: MA Experiment ID: 20000443 Result: Down-regulated in Transcription
  misc_feature: MA Experiment 20000443 PARAMETER Experiment Name: At_1uM_BR-BRZ__P Parameter: Tissue Value: Shoot Apices
  misc_feature: MA Experiment 20000443 PARAMETER Experiment Name: At_1uM_BR-BRZ__P Parameter: Treatment Value: 1uM BRZ vs. No Treatment
  misc_feature: MA Experiment ID: 20000527 Result: Down-regulated in Transcription
  misc_feature: MA Experiment 20000527 PARAMETER Experiment Name: At_10percent_PEG_P Parameter: Age (day) Value: 20
  misc_feature: MA Experiment 20000527 PARAMETER Experiment Name: At_10percent_PEG_P Parameter: Organism Value: A. thaliana
  misc_feature: MA Experiment 20000527 PARAMETER Experiment Name: At_10percent_PEG_P Parameter: Plant Line Value: WS
  misc_feature: MA Experiment 20000527 PARAMETER Experiment Name: At_10percent_PEG_P Parameter: Timepoint (day) Value: 20
  misc_feature: MA Experiment 20000527 PARAMETER Experiment Name: At_10percent_PEG_P Parameter: Tissue Value: Whole Plant
  misc_feature: MA Experiment 20000527 PARAMETER Experiment Name: At_10percent_PEG_P Parameter: Treatment Value: 10percent PEG vs. No Treatment
  misc_feature: MA Experiment ID: 20001911 Result: Down-regulated in Transcription
  misc_feature: MA Experiment 20001911 PARAMETER Experiment Name: At_Drought_Reproduction_P Parameter: Age (day) Value: 40
  misc_feature: MA Experiment 20001911 PARAMETER Experiment Name: At_Drought_Reproduction_P Parameter: Organism Value: A. thaliana
  misc_feature: MA Experiment 20001911 PARAMETER Experiment Name: At_Drought_Reproduction_P Parameter: Plant Line Value: WS
  misc_feature: MA Experiment 20001911 PARAMETER Experiment Name: At_Drought_Reproduction_P Parameter: Timepoint (day) Value: 10
  misc_feature: MA Experiment 20001911 PARAMETER Experiment Name: At_Drought_Reproduction_P Parameter: Tissue Value: Flowers
  misc_feature: MA Experiment 20001911 PARAMETER Experiment Name: At_Drought_Reproduction_P Parameter: Treatment Value: Drought vs. No Drought
aggtaattatcatcttcgtccctatcaaaattttcagcagcgtaaatggcgaacatcggcgtagtgacgacagcgactaacaaccaggtgattctccgtaactacgtgagtggattccctaaagaatccgacctctacatcgccgcaaccaccgttgacttacgtgtacctcccggatccatggcggttctagtcaagaatctctacttatcttgcgatcctttcagccgcattcgcatggaaaaacccgacccttcgtcacctgcttccctcgctcgcgcttactctataggcaagccaatctctgggtatggagtggctaaagcaatagattcaggtcatccaaattacaaaacaggagatttactttggggaagagttggttgggaagagtatagtgttattaatccaactccttcttcacatttcaagattcatcacgccgatgttccattatctttctacactggacttcttggtattccgggtctcactgcgtatgttgggttttacgaaatatgctctccgaagaaaggtgagactgtatttgtatcagctgcatctggtgcagtaggtcaacttgtaggacagtttgcgaagatggcgggatgctatgtcgttggaagtgccagtagtaaagagaaggttgatcttctcaagactaagttcgggtatgacgatgctttcaattacaaggaagagcatgatcttagtgctgccctaaagaggtgtttcccagaaggaatagacatatactttgagaacgtgggaggtaaaatgttagaggcagtgctcgaaaacatgaggacacatggccgaatcgctgcgtgtggaatgatctcacaatacaatctaaaggagccagaaggtgtacataacttagccagcattgtttacaaacggattcgggttcaaggttttgcagctgtggaattctttgataaatactccaagtttttggacttcatacttccatatgtaagagaaggaaagataacatatgtcgaggatatagctcaaggacttgagaatggaccttctgctttgattggactcttccacggtaagaacgtcgggaaacaacttgttgcggttgctcgtgagtgatattgaattaataaatgtggttattatgacaaagctttgtttgtaggtcagaaataattggactattgttaattgtttactatatcgtaatagtccgctggtttaattatgttgtttgtgtgatattatatgcataaaggttctc

SEQ ID NO: 40773 - protein, 353 aa, Arabidopsis thaliana
  peptide (1)..(353): Ceres Seq. ID no. 12330723
  misc_feature (134)..(350): Pfam Name: Zinc-binding dehydrogenase Pfam Description: Zinc-binding dehydrogenase
  misc_feature (1)..(353): Homolog of NCBI NO: 15228456 NR Description: putative NADP-dependent oxidoreductase; protein
  misc_feature (9)..(353): Homolog of NCBI NO: 21539447 NR Description: quinone oxidoreductase-like protein [Arabidopsis
  misc_feature (9)..(353): Homolog of NCBI NO: 15237888 NR Description: quinone oxidoreductase -like protein; protein id:
  misc_feature (9)..(353): Homolog of NCBI NO: 17529140 NR Description: putative quinone oxidoreductase [Arabidopsis
  misc_feature (9)..(353): Homolog of NCBI NO: 22326861 NR Description: quinone oxidoreductase - like protein
  misc_feature (1)..(353): Homolog of NCBI NO: 21537356 NR Description: quinone oxidoreductase-like protein [Arabidopsis
  misc_feature (1)..(353): Homolog of NCBI NO: 15240806 NR Description: quinone oxidoreductase -like protein
  misc_feature (1)..(352): Homolog of NCBI NO: 15240812 NR Description: oxidoreductase-like protein; protein id:
  misc_feature (1)..(353): Homolog of NCBI NO: 15240810 NR Description: quinone oxidoreductase -like protein
  misc_feature (1)..(353): Homolog of NCBI NO: 21536967 NR Description: quinone oxidoreductase-like protein [Arabidopsis
MANIGVVTTATNNQVILRNYVSGFPKESDLYIAATTVDLRVPPGSMAVLVKNLYLSCDPFSRIRMEKPDPSSPASLARAYSIGKPISGYGVAKAIDSGHPNYKTGDLLWGRVGWEEYSVINPTPSSHFKIHHADVPLSFYTGLLGIPGLTAYVGFYEICSPKKGETVFVSAASGAVGQLVGQFAKMAGCYVVGSASSKEKVDLLKTKFGYDDAFNYKEEHDLSAALKRCFPEGIDIYFENVGGKMLEAVLENMRTHGRIAACGMISQYNLKEPEGVHNLASIVYKRIRVQGFAAVEFFDKYSKFLDFILPYVREGKITYVEDIAQGLENGPSALIGLFHGKNVGKQLVAVARE

SEQ ID NO: 40774 - protein, 308 aa, Arabidopsis thaliana
  peptide (1)..(308): Ceres Seq. ID no. 12330724
  misc_feature (89)..(305): Pfam Name: Zinc-binding dehydrogenase Pfam Description: Zinc-binding dehydrogenase
  misc_feature (1)..(308): Homolog of NCBI NO: 15228456 NR Description: putative NADP-dependent oxidoreductase; protein
  misc_feature (1)..(308): Homolog of NCBI NO: 21539447 NR Description: quinone oxidoreductase-like protein [Arabidopsis
  misc_feature (1)..(308): Homolog of NCBI NO: 15237888 NR Description: quinone oxidoreductase -like protein; protein id:
  misc_feature (1)..(308): Homolog of NCBI NO: 17529140 NR Description: putative quinone oxidoreductase [Arabidopsis
  misc_feature (1)..(308): Homolog of NCBI NO: 22326861 NR Description: quinone oxidoreductase - like protein
  misc_feature (1)..(308): Homolog of NCBI NO: 21537356 NR Description: quinone oxidoreductase-like protein [Arabidopsis
  misc_feature (1)..(308): Homolog of NCBI NO: 15240806 NR Description: quinone oxidoreductase -like protein
  misc_feature (1)..(307): Homolog of NCBI NO: 15240812 NR Description: oxidoreductase-like protein; protein id:
  misc_feature (1)..(308): Homolog of NCBI NO: 15240810 NR Description: quinone oxidoreductase -like protein
  misc_feature (1)..(308): Homolog of NCBI NO: 21536967 NR Description: quinone oxidoreductase-like protein [Arabidopsis
MAVLVKNLYLSCDPFSRIRMEKPDPSSPASLARAYSIGKPISGYGVAKAIDSGHPNYKTGDLLWGRVGWEEYSVINPTPSSHFKIHHADVPLSFYTGLLGIPGLTAYVGFYEICSPKKGETVFVSAASGAVGQLVGQFAKMAGCYVVGSASSKEKVDLLKTKFGYDDAFNYKEEHDLSAALKRCFPEGIDIYFENVGGKMLEAVLENMRTHGRIAACGMISQYNLKEPEGVHNLASIVYKRIRVQGFAAVEFFDKYSKFLDFILPYVREGKITYVEDIAQGLENGPSALIGLFHGKNVGKQLVAVARE

SEQ ID NO: 40775 - protein, 289 aa, Arabidopsis thaliana
  peptide (1)..(289): Ceres Seq. ID no. 12330725
  misc_feature (70)..(286): Pfam Name: Zinc-binding dehydrogenase Pfam Description: Zinc-binding dehydrogenase
  misc_feature (1)..(289): Homolog of NCBI NO: 15228456 NR Description: putative NADP-dependent oxidoreductase; protein
  misc_feature (1)..(289): Homolog of NCBI NO: 21539447 NR Description: quinone oxidoreductase-like protein [Arabidopsis
  misc_feature (1)..(289): Homolog of NCBI NO: 15237888 NR Description: quinone oxidoreductase -like protein; protein id:
  misc_feature (1)..(289): Homolog of NCBI NO: 17529140 NR Description: putative quinone oxidoreductase [Arabidopsis
  misc_feature (1)..(289): Homolog of NCBI NO: 22326861 NR Description: quinone oxidoreductase - like protein
  misc_feature (1)..(289): Homolog of NCBI NO: 21537356 NR Description: quinone oxidoreductase-like protein [Arabidopsis
  misc_feature (1)..(289): Homolog of NCBI NO: 15240806 NR Description: quinone oxidoreductase -like protein
  misc_feature (1)..(288): Homolog of NCBI NO: 15240812 NR Description: oxidoreductase-like protein; protein id:
  misc_feature (1)..(289): Homolog of NCBI NO: 15240810 NR Description: quinone oxidoreductase -like protein
  misc_feature (1)..(289): Homolog of NCBI NO: 21536967 NR Description: quinone oxidoreductase-like protein [Arabidopsis
MEKPDPSSPASLARAYSIGKPISGYGVAKAIDSGHPNYKTGDLLWGRVGWEEYSVINPTPSSHFKIHHADVPLSFYTGLLGIPGLTAYVGFYEICSPKKGETVFVSAASGAVGQLVGQFAKMAGCYVVGSASSKEKVDLLKTKFGYDDAFNYKEEHDLSAALKRCFPEGIDIYFENVGGKMLEAVLENMRTHGRIAACGMISQYNLKEPEGVHNLASIVYKRIRVQGFAAVEFFDKYSKFLDFILPYVREGKITYVEDIAQGLENGPSALIGLFHGKNVGKQLVAVARE

SEQ ID NO: 40776 - DNA, 1147 bp, Arabidopsis thaliana
  misc_feature (1)..(1147): Ceres Seq. ID no. 13497119
  misc_feature: MA Experiment ID: 108434 Result: Down-regulated in Transcription
  misc_feature: MA Experiment 108434 PARAMETER Experiment Name: At_Root_Tips_cDNA_P Parameter: Tissue Value: Root Tips
  misc_feature: MA Experiment ID: 108577 Result: Down-regulated in Transcription
  misc_feature: MA Experiment 108577 PARAMETER Experiment Name: At_42deg_Heat_cDNA_P Parameter: Temperature (deg C) Value: 42 vs. 22
  misc_feature: MA Experiment 108577 PARAMETER Experiment Name: At_42deg_Heat_cDNA_P Parameter: Timepoint (hr) Value: 6
  misc_feature: MA Experiment 108577 PARAMETER Experiment Name: At_42deg_Heat_cDNA_P Parameter: Tissue Value: Aerial
  misc_feature: MA Experiment ID: 108668 Result: Up-regulated in Transcription
  misc_feature: MA Experiment 108668 PARAMETER Experiment Name: At_2mM_SA_cDNA_P Parameter: Plant Line Value: WS
  misc_feature: MA Experiment 108668 PARAMETER Experiment Name: At_2mM_SA_cDNA_P Parameter: Timepoint (hr) Value: 6
  misc_feature: MA Experiment 108668 PARAMETER Experiment Name: At_2mM_SA_cDNA_P Parameter: Treatment Value: 2mM SA vs. No Treatment
  misc_feature: MA Experiment ID: 20000087 Result: Up-regulated in Transcription
  misc_feature: MA Experiment 20000087 PARAMETER Experiment Name: At_100uM_ABA_Mutants_cDNA_P Parameter: Plant Line Value: WS
  misc_feature: MA Experiment 20000087 PARAMETER Experiment Name: At_100uM_ABA_Mutants_cDNA_P Parameter: Timepoint (hr) Value: 6
  misc_feature: MA Experiment 20000087 PARAMETER Experiment Name: At_100uM_ABA_Mutants_cDNA_P Parameter: Tissue Value: Aerial
  misc_feature: MA Experiment 20000087 PARAMETER Experiment Name: At_100uM_ABA_Mutants_cDNA_P Parameter: Treatment Value: 100uM ABA vs. No Treatment
  misc_feature: MA Experiment ID: 20000111 Result: Down-regulated in Transcription
  misc_feature: MA Experiment 20000111 PARAMETER Experiment Name: At_42deg_Heat_cDNA_P Parameter: Temperature (deg C) Value: 42 vs. 22
  misc_feature: MA Experiment 20000111 PARAMETER Experiment Name: At_42deg_Heat_cDNA_P Parameter: Timepoint (hr) Value: 6
  misc_feature: MA Experiment 20000111 PARAMETER Experiment Name: At_42deg_Heat_cDNA_P Parameter: Tissue Value: Aerial
  misc_feature: MA Experiment ID: 20000113 Result: Down-regulated in Transcription
  misc_feature: MA Experiment 20000113 PARAMETER Experiment Name: At_42deg_Heat_cDNA_P Parameter: Temperature (deg C) Value: 42 vs. 22
  misc_feature: MA Experiment 20000113 PARAMETER Experiment Name: At_42deg_Heat_cDNA_P Parameter: Timepoint (hr) Value: 8
  misc_feature: MA Experiment 20000113 PARAMETER Experiment Name: At_42deg_Heat_cDNA_P Parameter: Tissue Value: Aerial
  misc_feature: MA Experiment ID: 20000173 Result: Down-regulated in Transcription
  misc_feature: MA Experiment 20000173 PARAMETER Experiment Name: At_42deg_Heat_P Parameter: Age (day) Value: 14
  misc_feature: MA Experiment 20000173 PARAMETER Experiment Name: At_42deg_Heat_P Parameter: Organism Value: A. thaliana
  misc_feature: MA Experiment 20000173 PARAMETER Experiment Name: At_42deg_Heat_P Parameter: Plant Line Value: WS
  misc_feature: MA Experiment 20000173 PARAMETER Experiment Name: At_42deg_Heat_P Parameter: Temperature (deg C) Value: 42 vs. 22
  misc_feature: MA Experiment 20000173 PARAMETER Experiment Name: At_42deg_Heat_P Parameter: Timepoint (hr) Value: 6
  misc_feature: MA Experiment 20000173 PARAMETER Experiment Name: At_42deg_Heat_P Parameter: Tissue Value: Aerial
  misc_feature: MA Experiment ID: 20000184 Result: Down-regulated in Transcription
  misc_feature: MA Experiment 20000184 PARAMETER Experiment Name: At_Shoots__P Parameter: Age (day) Value: 7
  misc_feature: MA Experiment 20000184 PARAMETER Experiment Name: At_Shoots__P Parameter: Tissue Value: Shoots vs. Whole Plant
  misc_feature: MA Experiment ID: 20000438 Result: Down-regulated in Transcription
  misc_feature: MA Experiment 20000438 PARAMETER Experiment Name: At_Shoots__P Parameter: Age (day) Value: 14
  misc_feature: MA Experiment 20000438 PARAMETER Experiment Name: At_Shoots__P Parameter: Tissue Value: Shoots vs. Whole Plant
  misc_feature: MA Experiment ID: 20000495 Result: Down-regulated in Transcription
  misc_feature: MA Experiment 20000495 PARAMETER Experiment Name: At_Guard_Cells_P Parameter: Harvest Date Value: 8/2/2002
  misc_feature: MA Experiment 20000495 PARAMETER Experiment Name: At_Guard_Cells_P Parameter: Organism Value: A. thaliana
  misc_feature: MA Experiment 20000495 PARAMETER Experiment Name: At_Guard_Cells_P Parameter: Tissue Value: Guard Cells vs. Leaves
aatcttcatttcttgagagatccaaaaaaagaatcagaaagaagaagaagaagactccaaaaacgatgccgtattacaccaacgacgacaatgacgtcgacgatttcaccgaatacgatccgatgccttatagtggaggctacgacatcaccgtgacatacggccgttcaattccaccgtccgacgagacttgttaccctctctcctctctctccggcgacgcctttgagtatcagcgacctaatttctcttctaaccacgattcttctgcttatgacgaccaagctcttaaaaccgagtacagtagctatgcacgacccggacccgttggatctggatctgattttggccggaaacctaattctggatatggagggagaacggaggttgagtatggccggaaaactgaatcggagcatggatctggctatggtggaagaattgagagcgattacgtgaagcctagctatggcggtcacgaggatgatggtgacgatggtcacaaaaaacatagtggtaaggattatgatgatggagatgagaagagtaagaagaaggagaaggagaagaagaaggataagaagaaagatggtaataactctgaagatgatgagtttaagaagaagaagaagaaagagcagtacaaggagcatcatgatgatgatgattatgatgagaagaagaagaagaagaaagactataatgatgatgatgagaagaagaagaagaagcattataatgatgatgatgatgagaagaagaagaagcataattacaatgatgatgatgatgagaagaagaagaagaaggagtatcatgatgatgaggataagaagaagaagaagcactatgataatgatgatgatgagaagaagaagaagaaggatcatcgtgatgatgatgatgagaagaagaagaagaaggataaccaccacaagggacatgactaaaaaaggtttatgatttgggatttgcattcttatgactaaataagtaacaacaacttaagcacacttctgctctctacgtttatgtcaattgttgttttgtttttgcttcgtgtttttgctgctaacttcaatgagatcttcataagtcatatgtaatatgtttagtgtacgtgttttctagtgatgtcgtttggtct

SEQ ID NO: 40777 - protein, 315 aa, Arabidopsis thaliana
  peptide (1)..(315): Ceres Seq. ID no. 13497120
  misc_feature (176)..(310): Pfam Name: Chromadorea ALT protein Pfam Description: Chromadorea ALT protein
  misc_feature (160)..(308): Homolog of NCBI NO: 39594465 NR Description: Hypothetical protein CBG19125 [Caenorhabditis
  misc_feature (148)..(315): Homolog of NCBI NO: 17558378 NR Description: Putative protein, with 4 coiled coil-4 domains,
  misc_feature (131)..(315): Homolog of NCBI NO: 17558378 NR Description: Putative protein, with 4 coiled coil-4 domains,
  misc_feature (111)..(308): Homolog of NCBI NO: 39594465 NR Description: Hypothetical protein CBG19125 [Caenorhabditis
  misc_feature (160)..(315): Homolog of NCBI NO: 17558378 NR Description: Putative protein, with 4 coiled coil-4 domains,
  misc_feature (159)..(315): Homolog of NCBI NO: 17558378 NR Description: Putative protein, with 4 coiled coil-4 domains,
  misc_feature (22)..(315): Homolog of NCBI NO: 24417262 NR Description: unknown [Arabidopsis thaliana]
  misc_feature (22)..(315): Homolog of NCBI NO: 9758332 NR Description: gene_id:MIJ24.6~ref|NP_013897.1~similar to
  misc_feature (22)..(263): Homolog of NCBI NO: 21928162 NR Description: AT3g29075/MXE2_1 [Arabidopsis thaliana]
  misc_feature (22)..(315): Homolog of NCBI NO: 15228587 NR Description: glycine-rich protein [Arabidopsis thaliana]
SSFLERSKKRIRKKKKKTPKTMPYYTNDDNDVDDFTEYDPMPYSGGYDITVTYGRSIPPSDETCYPLSSLSGDAFEYQRPNFSSNHDSSAYDDQALKTEYSSYARPGPVGSGSDFGRKPNSGYGGRTEVEYGRKTESEHGSGYGGRIESDYVKPSYGGHEDDGDDGHKKHSGKDYDDGDEKSKKKEKEKKKDKKKDGNNSEDDEFKKKKKKEQYKEHHDDDDYDEKKKKKKDYNDDDEKKKKKHYNDDDDEKKKKHNYNDDDDEKKKKKEYHDDEDKKKKKHYDNDDDEKKKKKDHRDDDDEKKKKKDNHHKGHD

SEQ ID NO: 40778 - protein, 294 aa, Arabidopsis thaliana
  peptide (1)..(294): Ceres Seq. ID no. 13497121
  misc_feature (155)..(289): Pfam Name: Chromadorea ALT protein Pfam Description: Chromadorea ALT protein
  misc_feature (139)..(287): Homolog of NCBI NO: 39594465 NR Description: Hypothetical protein CBG19125 [Caenorhabditis
  misc_feature (127)..(294): Homolog of NCBI NO: 17558378 NR Description: Putative protein, with 4 coiled coil-4 domains,
  misc_feature (110)..(294): Homolog of NCBI NO: 17558378 NR Description: Putative protein, with 4 coiled coil-4 domains,
  misc_feature (90)..(287): Homolog of NCBI NO: 39594465 NR Description: Hypothetical protein CBG19125 [Caenorhabditis
  misc_feature (139)..(294): Homolog of NCBI NO: 17558378 NR Description: Putative protein, with 4 coiled coil-4 domains,
  misc_feature (138)..(294): Homolog of NCBI NO: 17558378 NR Description: Putative protein, with 4 coiled coil-4 domains,
  misc_feature (1)..(294): Homolog of NCBI NO: 24417262 NR Description: unknown [Arabidopsis thaliana]
  misc_feature (1)..(294): Homolog of NCBI NO: 9758332 NR Description: gene_id:MIJ24.6~ref|NP_013897.1~similar to
  misc_feature (1)..(242): Homolog of NCBI NO: 21928162 NR Description: AT3g29075/MXE2_1 [Arabidopsis thaliana]
  misc_feature (1)..(294): Homolog of NCBI NO: 15228587 NR Description: glycine-rich protein [Arabidopsis thaliana]
MPYYTNDDNDVDDFTEYDPMPYSGGYDITVTYGRSIPPSDETCYPLSSLSGDAFEYQRPNFSSNHDSSAYDDQALKTEYSSYARPGPVGSGSDFGRKPNSGYGGRTEVEYGRKTESEHGSGYGGRIESDYVKPSYGGHEDDGDDGHKKHSGKDYDDGDEKSKKKEKEKKKDKKKDGNNSEDDEFKKKKKKEQYKEHHDDDDYDEKKKKKKDYNDDDEKKKKKHYNDDDDEKKKKHNYNDDDDEKKKKKEYHDDEDKKKKKHYDNDDDEKKKKKDHRDDDDEKKKKKDNHHKGHD

SEQ ID NO: 40779 - protein, 275 aa, Arabidopsis thaliana
  peptide (1)..(275): Ceres Seq. ID no. 13497122
  misc_feature (136)..(270): Pfam Name: Chromadorea ALT protein Pfam Description: Chromadorea ALT protein
  misc_feature (120)..(268): Homolog of NCBI NO: 39594465 NR Description: Hypothetical protein CBG19125 [Caenorhabditis
  misc_feature (108)..(275): Homolog of NCBI NO: 17558378 NR Description: Putative protein, with 4 coiled coil-4 domains,
  misc_feature (91)..(275): Homolog of NCBI NO: 17558378 NR Description: Putative protein, with 4 coiled coil-4 domains,
  misc_feature (71)..(268): Homolog of NCBI NO: 39594465 NR Description: Hypothetical protein CBG19125 [Caenorhabditis
  misc_feature (120)..(275): Homolog of NCBI NO: 17558378 NR Description: Putative protein, with 4 coiled coil-4 domains,
  misc_feature (119)..(275): Homolog of NCBI NO: 17558378 NR Description: Putative protein, with 4 coiled coil-4 domains,
  misc_feature (1)..(275): Homolog of NCBI NO: 24417262 NR Description: unknown [Arabidopsis thaliana]
  misc_feature (1)..(275): Homolog of NCBI NO: 9758332 NR Description: gene_id:MIJ24.6~ref|NP_013897.1~similar to
  misc_feature (1)..(223): Homolog of NCBI NO: 21928162 NR Description: AT3g29075/MXE2_1 [Arabidopsis thaliana]
  misc_feature (1)..(275): Homolog of NCBI NO: 15228587 NR Description: glycine-rich protein [Arabidopsis thaliana]
MPYSGGYDITVTYGRSIPPSDETCYPLSSLSGDAFEYQRPNFSSNHDSSAYDDQALKTEYSSYARPGPVGSGSDFGRKPNSGYGGRTEVEYGRKTESEHGSGYGGRIESDYVKPSYGGHEDDGDDGHKKHSGKDYDDGDEKSKKKEKEKKKDKKKDGNNSEDDEFKKKKKKEQYKEHHDDDDYDEKKKKKKDYNDDDEKKKKKHYNDDDDEKKKKHNYNDDDDEKKKKKEYHDDEDKKKKKHYDNDDDEKKKKKDHRDDDDEKKKKKDNHHKGHD

SEQ ID NO: 40780 - DNA, 1332 bp, Arabidopsis thaliana
  misc_feature (1)..(1332): Ceres Seq. ID no. 12562243
  misc_feature: MA Experiment ID: 108464 Result: Down-regulated in Transcription
  misc_feature: MA Experiment 108464 PARAMETER Experiment Name: At_Germinating_Seeds_cDNA_P Parameter: Age (day) Value: 4 vs. 0
  misc_feature: MA Experiment 108464 PARAMETER Experiment Name: At_Germinating_Seeds_cDNA_P Parameter: Tissue Value: Germinating Seeds
  misc_feature: MA Experiment ID: 108579 Result: Down-regulated in Transcription
  misc_feature: MA Experiment 108579 PARAMETER Experiment Name: At_4deg_Cold_cDNA_P Parameter: Temperature (deg C) Value: 4 vs. 22
  misc_feature: MA Experiment 108579 PARAMETER Experiment Name: At_4deg_Cold_cDNA_P Parameter: Timepoint (hr) Value: 6
  misc_feature: MA Experiment 108579 PARAMETER Experiment Name: At_4deg_Cold_cDNA_P Parameter: Tissue Value: Aerial
  misc_feature: MA Experiment ID: 108595 Result: Down-regulated in Transcription
  misc_feature: MA Experiment 108595 PARAMETER Experiment Name: At_Ler-pi_Ovule_cDNA_P Parameter: Plant Line Value: null
  misc_feature: MA Experiment ID: 20000184 Result: Down-regulated in Transcription
  misc_feature: MA Experiment 20000184 PARAMETER Experiment Name: At_Shoots__P Parameter: Age (day) Value: 7
  misc_feature: MA Experiment 20000184 PARAMETER Experiment Name: At_Shoots__P Parameter: Tissue Value: Shoots vs. Whole Plant
  misc_feature: MA Experiment ID: 20000227 Result: Down-regulated in Transcription
  misc_feature: MA Experiment 20000227 PARAMETER Experiment Name: At_Root-Tips-vs-Tops_P Parameter: Tissue Value: Root Tips vs. Root Tops
  misc_feature: MA Experiment ID: 20001450 Result: Up-regulated in Transcription
  misc_feature: MA Experiment 20001450 PARAMETER Experiment Name: At_Far-red-induction_P Parameter: Age (day) Value: 7
  misc_feature: MA Experiment 20001450 PARAMETER Experiment Name: At_Far-red-induction_P Parameter: Light Value: Far-red vs. White
  misc_feature: MA Experiment 20001450 PARAMETER Experiment Name: At_Far-red-induction_P Parameter: Organism Value: A. thaliana
  misc_feature: MA Experiment 20001450 PARAMETER Experiment Name: At_Far-red-induction_P Parameter: Plant Line Value: Columbia
  misc_feature: MA Experiment 20001450 PARAMETER Experiment Name: At_Far-red-induction_P Parameter: Timepoint (hr) Value: 8
  misc_feature: MA Experiment 20001450 PARAMETER Experiment Name: At_Far-red-induction_P Parameter: Tissue Value: Whole Plant
  misc_feature: MA Experiment ID: 20001451 Result: Up-regulated in Transcription
  misc_feature: MA Experiment 20001451 PARAMETER Experiment Name: At_Far-red-induction_P Parameter: Age (day) Value: 7
  misc_feature: MA Experiment 20001451 PARAMETER Experiment Name: At_Far-red-induction_P Parameter: Light Value: Far-red vs. White
  misc_feature: MA Experiment 20001451 PARAMETER Experiment Name: At_Far-red-induction_P Parameter: Organism Value: A. thaliana
  misc_feature: MA Experiment 20001451 PARAMETER Experiment Name: At_Far-red-induction_P Parameter: Plant Line Value: Columbia
  misc_feature: MA Experiment 20001451 PARAMETER Experiment Name: At_Far-red-induction_P Parameter: Timepoint (hr) Value: 24
  misc_feature: MA Experiment 20001451 PARAMETER Experiment Name: At_Far-red-induction_P Parameter: Tissue Value: Whole Plant
  misc_feature: MA Experiment ID: 20001911 Result: Up-regulated in Transcription
  misc_feature: MA Experiment 20001911 PARAMETER Experiment Name: At_Drought_Reproduction_P Parameter: Age (day) Value: 40
  misc_feature: MA Experiment 20001911 PARAMETER Experiment Name: At_Drought_Reproduction_P Parameter: Organism Value: A. thaliana
  misc_feature: MA Experiment 20001911 PARAMETER Experiment Name: At_Drought_Reproduction_P Parameter: Plant Line Value: WS
  misc_feature: MA Experiment 20001911 PARAMETER Experiment Name: At_Drought_Reproduction_P Parameter: Timepoint (day) Value: 10
  misc_feature: MA Experiment 20001911 PARAMETER Experiment Name: At_Drought_Reproduction_P Parameter: Tissue Value: Flowers
  misc_feature: MA Experiment 20001911 PARAMETER Experiment Name: At_Drought_Reproduction_P Parameter: Treatment Value: Drought vs. No Drought
gatacatctcctcgtcgccgttcttcggattttcactcttctgctcgaaaggtctctcactcttctcttttttaatctattgaaattgaaacttcccttctcttctcttctcttctctgtagcactcctgcttctagtttagctgctcttcttcttctacttgctgcaacaactccaaatcatcatttctcttgttccaggcagtgcttgagaatcattgaagaaggtgatcgctggtgctgttttgataactcaaagccgttttgctgaaagagggttaccaaagttagaagctcaagaacttggagctgtgtcttctttttgtatcatgccatattttattcagaggcttttcaatacttgcaagtcatctctctcacctaatggtcctgtgtctgaggaggccttagacaaggttcgcaatgtcttggagaaaatcaagccgtctgatgttggtctcgaacaggaagctcaattggtgcgtaattggcctggtcctgggaacgagcgtaatggaaacaatcattctctgccagcaataaaataccttcagttacatgagtgtgacagcttctcgattggaattttctgcatgccacctgggtctatcataccacttcataatcatccaggcatgacagtgctaagcaagcttgtttatggttcaatgcacgttaagtcatatgattgggctgagcctgaccaatcagagctagacgatccattacaagcaagacccgcgaagctggtcaaggatattgatatgacttcccctagcccagcaaccactctatatccaacaaccggtggcaacattcattgtttcaaagccattactcattgtgcaatctttgacatcttatctcctccatactcttctactcatggcagacactgcaactacttccgaaaatccccaatgctagacttacctggtgagattgaagtgatgaatggagaagtgatctcaaatgtgacatggcttgaagagtatcaacctccagataactttgtgatatggagagttccgtacagaggtccagtgattagaaaatgagaaatacaaaaaggattaaacatattaaaaaagagcagaaagagaaaggtgcttatgatcaggagaataattggtaaaccattcagaggctggctgcataatggtcgaggttcttacataattgtgaccacattaagttccagcctatgtcgttgtatgataatgattacttcactagtttaatattataatttttttcccctatttttatatgcagctacacaaaaaattgctcataaacagtgttatatttagttatcataaattttgtttcc

SEQ ID NO: 40781 - protein, 242 aa, Arabidopsis thaliana
  peptide (1)..(242): Ceres Seq. ID no. 12562244
  misc_feature (5)..(241): Homolog of NCBI NO: 18394617 NR Description: expressed protein
  misc_feature (5)..(242): Homolog of NCBI NO: 15242505 NR Description: putative protein
  misc_feature (5)..(242): Homolog of NCBI NO: 10176982 NR Description: contains similarity to unknown
  misc_feature (5)..(240): Homolog of NCBI NO: 34906308 NR Description: unnamed protein product [Oryza sativa (japonica
  misc_feature (5)..(240): Homolog of NCBI NO: 15242218 NR Description: putative protein; protein id: At5g15120.1
  misc_feature (1)..(242): Homolog of NCBI NO: 38345647 NR Description: OSJNBb0040D15.1 [Oryza sativa (japonica
  misc_feature (1)..(241): Homolog of NCBI NO: 21536850 NR Description: unknown [Arabidopsis thaliana]
  misc_feature (1)..(241): Homolog of NCBI NO: 25370572 NR Description: hypothetical protein At2g42670 [imported] -
  misc_feature (1)..(241): Homolog of NCBI NO: 18406030 NR Description: expressed protein
  misc_feature (1)..(242): Homolog of NCBI NO: 15231104 NR Description: putative protein
MPYFIQRLFNTCKSSLSPNGPVSEEALDKVRNVLEKIKPSDVGLEQEAQLVRNWPGPGNERNGNNHSLPAIKYLQLHECDSFSIGIFCMPPGSIIPLHNHPGMTVLSKLVYGSMHVKSYDWAEPDQSELDDPLQARPAKLVKDIDMTSPSPATTLYPTTGGNIHCFKAITHCAIFDILSPPYSSTHGRHCNYFRKSPMLDLPGEIEVMNGEVISNVTWLEEYQPPDNFVIWRVPYRGPVIRK

SEQ ID NO: 40782 - protein, 154 aa, Arabidopsis thaliana; identical to SEQ ID NO: 40455
  peptide (1)..(154): Ceres Seq. ID no. 12562245
  misc_feature (1)..(153): Homolog of NCBI NO: 18394617 NR Description: expressed protein
  misc_feature (1)..(154): Homolog of NCBI NO: 15242505 NR Description: putative protein
  misc_feature (1)..(154): Homolog of NCBI NO: 10176982 NR Description: contains similarity to unknown
  misc_feature (1)..(152): Homolog of NCBI NO: 34906308 NR Description: unnamed protein product [Oryza sativa (japonica
  misc_feature (1)..(152): Homolog of NCBI NO: 15242218 NR Description: putative protein; protein id: At5g15120.1
  misc_feature (1)..(154): Homolog of NCBI NO: 38345647 NR Description: OSJNBb0040D15.1 [Oryza sativa (japonica
  misc_feature (1)..(153): Homolog of NCBI NO: 21536850 NR Description: unknown [Arabidopsis thaliana]
  misc_feature (1)..(153): Homolog of NCBI NO: 25370572 NR Description: hypothetical protein At2g42670 [imported] -
  misc_feature (1)..(153): Homolog of NCBI NO: 18406030 NR Description: expressed protein
  misc_feature (1)..(154): Homolog of NCBI NO: 15231104 NR Description: putative protein

SEQ ID NO: 40783 - protein, 140 aa, Arabidopsis thaliana; identical to SEQ ID NO: 40456
  peptide (1)..(140): Ceres Seq. ID no. 12562246
  misc_feature (1)..(139): Homolog of NCBI NO: 18394617 NR Description: expressed protein
  misc_feature (1)..(140): Homolog of NCBI NO: 15242505 NR Description: putative protein
  misc_feature (1)..(140): Homolog of NCBI NO: 10176982 NR Description: contains similarity to unknown
  misc_feature (1)..(138): Homolog of NCBI NO: 34906308 NR Description: unnamed protein product [Oryza sativa (japonica
  misc_feature (1)..(138): Homolog of NCBI NO: 15242218 NR Description: putative protein; protein id: At5g15120.1
  misc_feature (1)..(140): Homolog of NCBI NO: 38345647 NR Description: OSJNBb0040D15.1 [Oryza sativa (japonica
  misc_feature (1)..(139): Homolog of NCBI NO: 21536850 NR Description: unknown [Arabidopsis thaliana]
  misc_feature (1)..(139): Homolog of NCBI NO: 25370572 NR Description: hypothetical protein At2g42670 [imported] -
  misc_feature (1)..(139): Homolog of NCBI NO: 18406030 NR Description: expressed protein
  misc_feature (1)..(140): Homolog of NCBI NO: 15231104 NR Description: putative protein

SEQ ID NO: 40784 - DNA, 1394 bp, Arabidopsis thaliana
  misc_feature (1)..(1394): Ceres Seq. ID no. 12348448
  misc_feature: MA Experiment ID: 108434 Result: Down-regulated in Transcription
  misc_feature: MA Experiment 108434 PARAMETER Experiment Name: At_Root_Tips_cDNA_P Parameter: Tissue Value: Root Tips
  misc_feature: MA Experiment ID: 108461 Result: Down-regulated in Transcription
  misc_feature: MA Experiment 108461 PARAMETER Experiment Name: At_Germinating_Seeds_cDNA_P Parameter: Age (day) Value: 1 vs. 0
  misc_feature: MA Experiment 108461 PARAMETER Experiment Name: At_Germinating_Seeds_cDNA_P Parameter: Tissue Value: Germinating Seeds
  misc_feature: MA Experiment ID: 108462 Result: Up-regulated in Transcription
  misc_feature: MA Experiment 108462 PARAMETER Experiment Name: At_Germinating_Seeds_cDNA_P Parameter: Age (day) Value: 2 vs. 0
  misc_feature: MA Experiment 108462 PARAMETER Experiment Name: At_Germinating_Seeds_cDNA_P Parameter: Tissue Value: Germinating Seeds
  misc_feature: MA Experiment ID: 108463 Result: Up-regulated in Transcription
  misc_feature: MA Experiment 108463 PARAMETER Experiment Name: At_Germinating_Seeds_cDNA_P Parameter: Age (day) Value: 3 vs. 0
  misc_feature: MA Experiment 108463 PARAMETER Experiment Name: At_Germinating_Seeds_cDNA_P Parameter: Tissue Value: Germinating Seeds
  misc_feature: MA Experiment ID: 108464 Result: Up-regulated in Transcription
  misc_feature: MA Experiment 108464 PARAMETER Experiment Name: At_Germinating_Seeds_cDNA_P Parameter: Age (day) Value: 4 vs. 0
  misc_feature: MA Experiment 108464 PARAMETER Experiment Name: At_Germinating_Seeds_cDNA_P Parameter: Tissue Value: Germinating Seeds
  misc_feature: MA Experiment ID: 108488 Result: Down-regulated in Transcription
  misc_feature: MA Experiment ID: 108501 Result: Down-regulated in Transcription
  misc_feature: MA Experiment 108501 PARAMETER Experiment Name: At_ap2_floral_buds_cDNA_P Parameter: Plant Line Value: ap2 (Ler.)
  misc_feature: MA Experiment 108501 PARAMETER Experiment Name: At_ap2_floral_buds_cDNA_P Parameter: Tissue Value: Closed Flower
  misc_feature: MA Experiment ID: 108569 Result: Up-regulated in Transcription
  misc_feature: MA Experiment 108569 PARAMETER Experiment Name: At_0.001%_MeJA__cDNA_P Parameter: Timepoint (hr) Value: 6
  misc_feature: MA Experiment 108569 PARAMETER Experiment Name: At_0.001%_MeJA__cDNA_P Parameter: Tissue Value: Aerial
  misc_feature: MA Experiment 108569 PARAMETER Experiment Name: At_0.001%_MeJA__cDNA_P Parameter: Treatment Value: 0.001% MeJA vs. No Treatment
  misc_feature: MA Experiment ID: 108573 Result: Up-regulated in Transcription
  misc_feature: MA Experiment 108573 PARAMETER Experiment Name: At_Drought_cDNA_P Parameter: Timepoint (hr) Value: 6
  misc_feature: MA Experiment 108573 PARAMETER Experiment Name: At_Drought_cDNA_P Parameter: Tissue Value: Aerial
  misc_feature: MA Experiment 108573 PARAMETER Experiment Name: At_Drought_cDNA_P Parameter: Treatment Value: Drought vs. No Drought
  misc_feature: MA Experiment ID: 108577 Result: Up-regulated in Transcription
  misc_feature: MA Experiment 108577 PARAMETER Experiment Name: At_42deg_Heat_cDNA_P Parameter: Temperature (deg C) Value: 42 vs. 22
  misc_feature: MA Experiment 108577 PARAMETER Experiment Name: At_42deg_Heat_cDNA_P Parameter: Timepoint (hr) Value: 6
  misc_feature: MA Experiment 108577 PARAMETER Experiment Name: At_42deg_Heat_cDNA_P Parameter: Tissue Value: Aerial
  misc_feature: MA Experiment ID: 108594 Result: Down-regulated in Transcription
  misc_feature: MA Experiment 108594 PARAMETER Experiment Name: At_Ler-rhl_Root_cDNA_P Parameter: Plant Line Value: null
  misc_feature: MA Experiment ID: 108595 Result: Up-regulated in Transcription
  misc_feature: MA Experiment 108595 PARAMETER Experiment Name: At_Ler-pi_Ovule_cDNA_P Parameter: Plant Line Value: null
  misc_feature: MA Experiment ID: 108609 Result: Up-regulated in Transcription
  misc_feature: MA Experiment 108609 PARAMETER Experiment Name: At_100uM_ABA_cDNA_P Parameter: Timepoint (hr) Value: 24
  misc_feature: MA Experiment 108609 PARAMETER Experiment Name: At_100uM_ABA_cDNA_P Parameter: Tissue Value: Aerial
  misc_feature: MA Experiment 108609 PARAMETER Experiment Name: At_100uM_ABA_cDNA_P Parameter: Treatment Value: 100uM ABA vs. No Treatment
  misc_feature: MA Experiment ID: 20000069 Result: Up-regulated in Transcription
  misc_feature: MA Experiment 20000069 PARAMETER Experiment Name: At_100uM_ABA_Mutants_cDNA_P Parameter: Plant Line Value: CS23
  misc_feature: MA Experiment 20000069 PARAMETER Experiment Name: At_100uM_ABA_Mutants_cDNA_P Parameter: Timepoint (hr) Value: 6
  misc_feature: MA Experiment 20000069 PARAMETER Experiment Name: At_100uM_ABA_Mutants_cDNA_P Parameter: Tissue Value: Aerial
  misc_feature: MA Experiment 20000069 PARAMETER Experiment Name: At_100uM_ABA_Mutants_cDNA_P Parameter: Treatment Value: 100uM ABA vs. No Treatment
  misc_feature: MA Experiment ID: 20000070 Result: Up-regulated in Transcription
  misc_feature: MA Experiment 20000070 PARAMETER Experiment Name: At_100uM_ABA_Mutants_cDNA_P Parameter: Plant Line Value: CS24
  misc_feature: MA Experiment 20000070 PARAMETER Experiment Name: At_100uM_ABA_Mutants_cDNA_P Parameter: Timepoint (hr) Value: 6
  misc_feature: MA Experiment 20000070 PARAMETER Experiment Name: At_100uM_ABA_Mutants_cDNA_P Parameter: Tissue Value: Aerial
  misc_feature: MA Experiment 20000070 PARAMETER Experiment Name: At_100uM_ABA_Mutants_cDNA_P Parameter: Treatment Value: 100uM ABA vs. No Treatment
  misc_feature: MA Experiment ID: 20000071 Result: Up-regulated in Transcription
  misc_feature: MA Experiment 20000071 PARAMETER Experiment Name: At_100uM_ABA_Mutants_cDNA_P Parameter: Plant Line Value: CS8104
  misc_feature: MA Experiment 20000071 PARAMETER Experiment Name: At_100uM_ABA_Mutants_cDNA_P Parameter: Timepoint (hr) Value: 6
  misc_feature: MA Experiment 20000071 PARAMETER Experiment Name: At_100uM_ABA_Mutants_cDNA_P Parameter: Tissue Value: Aerial
  misc_feature: MA Experiment 20000071 PARAMETER Experiment Name: At_100uM_ABA_Mutants_cDNA_P Parameter: Treatment Value: 100uM ABA vs. No Treatment
  misc_feature: MA Experiment ID: 20000072 Result: Up-regulated in Transcription
  misc_feature: MA Experiment 20000072 PARAMETER Experiment Name: At_100uM_ABA_Mutants_cDNA_P Parameter: Plant Line Value: CS8105
  misc_feature: MA Experiment 20000072 PARAMETER Experiment Name: At_100uM_ABA_Mutants_cDNA_P Parameter: Timepoint (hr) Value: 6
  misc_feature: MA Experiment 20000072 PARAMETER Experiment Name: At_100uM_ABA_Mutants_cDNA_P Parameter: Tissue Value: Aerial
  misc_feature: MA Experiment 20000072 PARAMETER Experiment Name: At_100uM_ABA_Mutants_cDNA_P Parameter: Treatment Value: 100uM ABA vs. No Treatment
  misc_feature: MA Experiment ID: 20000086 Result: Up-regulated in Transcription
  misc_feature: MA Experiment 20000086 PARAMETER Experiment Name: At_100uM_ABA_Mutants_cDNA_P Parameter: Plant Line Value: CS22
  misc_feature: MA Experiment 20000086 PARAMETER Experiment Name: At_100uM_ABA_Mutants_cDNA_P Parameter: Timepoint (hr) Value: 6
  misc_feature: MA Experiment 20000086 PARAMETER Experiment Name: At_100uM_ABA_Mutants_cDNA_P Parameter: Tissue Value: Aerial
  misc_feature: MA Experiment 20000086 PARAMETER Experiment Name: At_100uM_ABA_Mutants_cDNA_P Parameter: Treatment Value: 100uM ABA vs. No Treatment
  misc_feature: MA Experiment ID: 20000087 Result: Up-regulated in Transcription
  misc_feature: MA Experiment 20000087 PARAMETER Experiment Name: At_100uM_ABA_Mutants_cDNA_P Parameter: Plant Line Value: WS
  misc_feature: MA Experiment 20000087 PARAMETER Experiment Name: At_100uM_ABA_Mutants_cDNA_P Parameter: Timepoint (hr) Value: 6
  misc_feature: MA Experiment 20000087 PARAMETER Experiment Name: At_100uM_ABA_Mutants_cDNA_P Parameter: Tissue Value: Aerial
  misc_feature: MA Experiment 20000087 PARAMETER Experiment Name: At_100uM_ABA_Mutants_cDNA_P Parameter: Treatment Value: 100uM ABA vs. No Treatment
  misc_feature: MA Experiment ID: 20000088 Result: Up-regulated in Transcription
  misc_feature: MA Experiment 20000088 PARAMETER Experiment Name: At_100uM_ABA_Mutants_cDNA_P Parameter: Plant Line Value: Landsberg
  misc_feature: MA Experiment 20000088 PARAMETER Experiment Name: At_100uM_ABA_Mutants_cDNA_P Parameter: Timepoint (hr) Value: 6
  misc_feature: MA Experiment 20000088 PARAMETER Experiment Name: At_100uM_ABA_Mutants_cDNA_P Parameter: Tissue Value: Aerial
  misc_feature: MA Experiment 20000088 PARAMETER Experiment Name: At_100uM_ABA_Mutants_cDNA_P Parameter: Treatment Value: 100uM ABA vs. No Treatment
  misc_feature: MA Experiment ID: 20000112 Result: Up-regulated in Transcription
  misc_feature: MA Experiment 20000112 PARAMETER Experiment Name: At_42deg_Heat_cDNA_P Parameter: Temperature (deg C) Value: 42 vs. 22
  misc_feature: MA Experiment 20000112 PARAMETER Experiment Name: At_42deg_Heat_cDNA_P Parameter: Timepoint (hr) Value: 2
  misc_feature: MA Experiment 20000112 PARAMETER Experiment Name: At_42deg_Heat_cDNA_P Parameter: Tissue Value: Aerial
  misc_feature: MA Experiment ID: 20000113 Result: Up-regulated in Transcription
  misc_feature: MA Experiment 20000113 PARAMETER Experiment Name: At_42deg_Heat_cDNA_P Parameter: Temperature (deg C) Value: 42 vs. 22
  misc_feature: MA Experiment 20000113 PARAMETER Experiment Name: At_42deg_Heat_cDNA_P Parameter: Timepoint (hr) Value: 8
  misc_feature: MA Experiment 20000113 PARAMETER Experiment Name: At_42deg_Heat_cDNA_P Parameter: Tissue Value: Aerial
  misc_feature: MA Experiment ID: 20000117 Result: Up-regulated in Transcription
  misc_feature: MA Experiment 20000117 PARAMETER Experiment Name: At_100uM_ABA_Mutants_cDNA_P Parameter: Plant Line Value: Columbia
  misc_feature: MA Experiment 20000117 PARAMETER Experiment Name: At_100uM_ABA_Mutants_cDNA_P Parameter: Timepoint (hr) Value: 6
  misc_feature: MA Experiment 20000117 PARAMETER Experiment Name: At_100uM_ABA_Mutants_cDNA_P Parameter: Tissue Value: Aerial
  misc_feature: MA Experiment 20000117 PARAMETER Experiment Name: At_100uM_ABA_Mutants_cDNA_P Parameter: Treatment Value: 100uM ABA vs. No Treatment
  misc_feature: MA Experiment ID: 20000306 Result: Down-regulated in Transcription
  misc_feature: MA Experiment 20000306 PARAMETER Experiment Name: At_Germinating_Seeds_Sub_P Parameter: Age (hr) Value: 6 vs. 0
  misc_feature: MA Experiment 20000306 PARAMETER Experiment Name: At_Germinating_Seeds_Sub_P Parameter: Organism Value: A. thaliana
  misc_feature: MA Experiment 20000306 PARAMETER Experiment Name: At_Germinating_Seeds_Sub_P Parameter: Plant Line Value: WS
  misc_feature: MA Experiment 20000306 PARAMETER Experiment Name: At_Germinating_Seeds_Sub_P Parameter: Tissue Value: Germinating Seeds
  misc_feature: MA Experiment ID: 20000307 Result: Down-regulated in Transcription
  misc_feature: MA Experiment 20000307 PARAMETER Experiment Name: At_Germinating_Seeds_Sub_P Parameter: Age (hr) Value: 24 vs. 0
  misc_feature: MA Experiment 20000307 PARAMETER Experiment Name: At_Germinating_Seeds_Sub_P Parameter: Organism Value: A. thaliana
  misc_feature: MA Experiment 20000307 PARAMETER Experiment Name: At_Germinating_Seeds_Sub_P Parameter: Plant Line Value: WS
  misc_feature: MA Experiment 20000307 PARAMETER Experiment Name: At_Germinating_Seeds_Sub_P Parameter: Tissue Value: Germinating Seeds
  misc_feature: MA Experiment ID: 20000329 Result: Up-regulated in Transcription
  misc_feature: MA Experiment 20000329 PARAMETER Experiment Name: At_4deg_Cold_Sub_P Parameter: Age (day) Value: 14
  misc_feature: MA Experiment 20000329 PARAMETER Experiment Name: At_4deg_Cold_Sub_P Parameter: Organism Value: A. thaliana
  misc_feature: MA Experiment 20000329 PARAMETER Experiment Name: At_4deg_Cold_Sub_P Parameter: Plant Line Value: WS
  misc_feature: MA Experiment 20000329 PARAMETER Experiment Name: At_4deg_Cold_Sub_P Parameter: Temperature (deg C) Value: 4 vs. 22
  misc_feature: MA Experiment 20000329 PARAMETER Experiment Name: At_4deg_Cold_Sub_P Parameter: Timepoint (hr) Value: 6
  misc_feature: MA Experiment 20000329 PARAMETER Experiment Name: At_4deg_Cold_Sub_P Parameter: Tissue Value: Aerial
  misc_feature: MA Experiment ID: 20000332 Result: Up-regulated in Transcription
  misc_feature: MA Experiment 20000332 PARAMETER Experiment Name: At_4deg_Cold_Sub_P Parameter: Age (day) Value: 14
  misc_feature: MA Experiment 20000332 PARAMETER Experiment Name: At_4deg_Cold_Sub_P Parameter: Organism Value: A. thaliana
  misc_feature: MA Experiment 20000332 PARAMETER Experiment Name: At_4deg_Cold_Sub_P Parameter: Plant Line Value: WS
  misc_feature: MA Experiment 20000332 PARAMETER Experiment Name: At_4deg_Cold_Sub_P Parameter: Temperature (deg C) Value: 4 vs. 22
  misc_feature: MA Experiment 20000332 PARAMETER Experiment Name: At_4deg_Cold_Sub_P Parameter: Timepoint (hr) Value: 2
  misc_feature: MA Experiment 20000332 PARAMETER Experiment Name: At_4deg_Cold_Sub_P Parameter: Tissue Value: Aerial
  misc_feature: MA Experiment ID: 20000355 Result: Down-regulated in Transcription
  misc_feature: MA Experiment 20000355 PARAMETER Experiment Name: At_Siliques_Sub_P Parameter: Age (day) Value: 21
  misc_feature: MA Experiment 20000355 PARAMETER Experiment Name: At_Siliques_Sub_P Parameter: Organism Value: A. thaliana
  misc_feature: MA Experiment 20000355 PARAMETER Experiment Name: At_Siliques_Sub_P Parameter: Plant Line Value: WS
  misc_feature: MA Experiment 20000355 PARAMETER Experiment Name: At_Siliques_Sub_P Parameter: Tissue Value: Less Than 5mm Siliques vs. Whole Plant
  misc_feature: MA Experiment ID: 20000440 Result: Down-regulated in Transcription
  misc_feature: MA Experiment 20000440 PARAMETER Experiment Name: At_Closed-Flower__Sub_P Parameter: Tissue Value: Closed Flower vs. Whole Plant
  misc_feature: Phenotype: INFLORESCENCE Strength-Strong
  misc_feature: Phenotype: INFLORESCENCE Strength-Strong
  misc_feature: Phenotype: INFLORESCENCE Strength-Strong
  misc_feature: Phenotype: ROSETTE LEAVES Shape-Oval
  misc_feature: Phenotype: WHOLE PLANT Color-Dark Green
  misc_feature: Phenotype: INFLORESCENCE Flowering Time-Late Flowering
  misc_feature: Phenotype: INFLORESCENCE Strength-Strong
  misc_feature: Phenotype: FERTILITY Fertility-Reduced
agtataaagacgacaaagtaaaccaaaaaaaaaagagttctcctacaattttcctaaattcttggatttgagatttcactttttccgatttgaaacaatgatgataactcgcggtggagccaaggcggcgaaatcgctgttagtggcggctggaccacgtttgttctcgacggtccgtacggtttcgtctcacgaggctttatcagcaagccatattttgaagcctggtgttacatctgcttggatatggactagagctccgacgattggaggtatgagattcgctagcacgatcactctgggagagaaaactccgatgaaggaggaggacgcgaatcagaagaaaacagagaacgaatccaccggtggagacgccgccggaggtaataacaagggagataaaggaatcgcgagctattggggtgttgaacctaataagattactaaagaagatggttctgaatggaagtggaactgtttcaggccatgggaaacgtataaagctgatataacgatagatctgaagaagcatcatgttccaacgacgtttcttgatagaatagcttattggactgttaaatctcttcgttggcctaccgatttgttcttccagaggagatatggatgtcgagctatgatgcttgaaactgtagcagcagtacctggaatggttggaggaatgttactacactgcaaatcgcttcgacgttttgagcaaagtggaggatggattaaggctcttcttgaggaagcagagaatgagagaatgcatcttatgacattcatggaagtcgcgaaaccgaaatggtacgagagagcgctcgtgatcactgtgcaaggagtcttcttcaacgcttatttccttggttacttaatctctcccaagtttgctcatcgtatggttgggtaccttgaagaagaagcgatccattcttatactgagtttctcaaggaacttgacaaaggtaacattgagaatgttcctgctccggctattgctattgattactggaggcttcctgctgatgcgacacttcgtgatgttgtgatggttgttcgtgctgacgaggctcatcaccgtgatgtaaaccattttgcatctgatattcactaccaaggtcgtgaactaaaggaagctccagctccaattgggtatcattgattcgattaaaagaagagctttttctcaagtttaaaactttgttctaaagaatttaagttctttgacttgtatatacatcatcacctctgcttaagccatacttggattcggctttctttgaatgttgctacgaatgttctgatttcttctttacttttcctgtcaatgggcttttgggcttatcttttgctattgtatggccttgctatttagaatgagagtaatagtttgt

SEQ ID NO: 40785 - protein, 354 aa, Arabidopsis thaliana
  peptide (1)..(354): Ceres Seq. ID no. 12348449
  misc_feature (75)..(352): Pfam Name: Alternative oxidase Pfam Description: Alternative oxidase
  misc_feature (2)..(354): Homolog of NCBI NO: 29465622 NR Description: alternative oxidase 1a [Lycopersicon esculentum]
  misc_feature (50)..(354): Homolog of NCBI NO: 3913066 NR Description: Alternative oxidase 2, mitochondrial precursor
  misc_feature (30)..(354): Homolog of NCBI NO: 15232222 NR Description: alternative oxidase 1c precursor; protein id:
  misc_feature (2)..(354): Homolog of NCBI NO: 3023316 NR Description: Alternative oxidase 1, mitochondrial precursor
  misc_feature (34)..(354): Homolog of NCBI NO: 15228729 NR Description: alternative oxidase 1b precursor; protein id:
  misc_feature (1)..(354): Homolog of NCBI NO: 6634501 NR Description: alternative oxidase [Populus tremula x Populus
  misc_feature (68)..(354): Homolog of NCBI NO: 1872517 NR Description: alternative oxidase [Arabidopsis thaliana]
  misc_feature (52)..(354): Homolog of NCBI NO: 421824 NR Description: alternative respiratory pathway oxidase (EC
  misc_feature (1)..(354): Homolog of NCBI NO: 11278947 NR Description: alternative respiratory pathway oxidase (EC
  misc_feature (1)..(354): Homolog of NCBI NO: 15228734 NR Description: alternative oxidase 1a precursor
MMITRGGAKAAKSLLVAAGPRLFSTVRTVSSHEALSASHILKPGVTSAWIWTRAPTIGGMRFASTITLGEKTPMKEEDANQKKTENESTGGDAAGGNNKGDKGIASYWGVEPNKITKEDGSEWKWNCFRPWETYKADITIDLKKHHVPTTFLDRIAYWTVKSLRWPTDLFFQRRYGCRAMMLETVAAVPGMVGGMLLHCKSLRRFEQSGGWIKALLEEAENERMHLMTFMEVAKPKWYERALVITVQGVFFNAYFLGYLISPKFAHRMVGYLEEEAIHSYTEFLKELDKGNIENVPAPAIAIDYWRLPADATLRDVVMVVRADEAHHRDVNHFASDIHYQGRELKEAPAPIGYH

SEQ ID NO: 40786 - protein, 353 aa, Arabidopsis thaliana
  peptide (1)..(353): Ceres Seq. ID no. 12348450
  misc_feature (74)..(351): Pfam Name: Alternative oxidase Pfam Description: Alternative oxidase
  misc_feature (1)..(353): Homolog of NCBI NO: 29465622 NR Description: alternative oxidase 1a [Lycopersicon esculentum]
  misc_feature (49)..(353): Homolog of NCBI NO: 3913066 NR Description: Alternative oxidase 2, mitochondrial precursor
  misc_feature (29)..(353): Homolog of NCBI NO: 15232222 NR Description: alternative oxidase 1c precursor; protein id:
  misc_feature (1)..(353): Homolog of NCBI NO: 3023316 NR Description: Alternative oxidase 1, mitochondrial precursor
  misc_feature (33)..(353): Homolog of NCBI NO: 15228729 NR Description: alternative oxidase 1b precursor; protein id:
  misc_feature (1)..(353): Homolog of NCBI NO: 6634501 NR Description: alternative oxidase [Populus tremula x Populus
  misc_feature (67)..(353): Homolog of NCBI NO: 1872517 NR Description: alternative oxidase [Arabidopsis thaliana]
  misc_feature (51)..(353): Homolog of NCBI NO: 421824 NR Description: alternative respiratory pathway oxidase (EC
  misc_feature (1)..(353): Homolog of NCBI NO: 11278947 NR Description: alternative respiratory pathway oxidase (EC
  misc_feature (1)..(353): Homolog of NCBI NO: 15228734 NR Description: alternative oxidase 1a precursor
MITRGGAKAAKSLLVAAGPRLFSTVRTVSSHEALSASHILKPGVTSAWIWTRAPTIGGMRFASTITLGEKTPMKEEDANQKKTENESTGGDAAGGNNKGDKGIASYWGVEPNKITKEDGSEWKWNCFRPWETYKADITIDLKKHHVPTTFLDRIAYWTVKSLRWPTDLFFQRRYGCRAMMLETVAAVPGMVGGMLLHCKSLRRFEQSGGWIKALLEEAENERMHLMTFMEVAKPKWYERALVITVQGVFFNAYFLGYLISPKFAHRMVGYLEEEAIHSYTEFLKELDKGNIENVPAPAIAIDYWRLPADATLRDVVMVVRADEAHHRDVNHFASDIHYQGRELKEAPAPIGYH

SEQ ID NO: 40787 - protein, 295 aa, Arabidopsis thaliana
  peptide (1)..(295): Ceres Seq. ID no. 12348451
  misc_feature (16)..(293): Pfam Name: Alternative oxidase Pfam Description: Alternative oxidase
  misc_feature (1)..(295): Homolog of NCBI NO: 29465622 NR Description: alternative oxidase 1a [Lycopersicon esculentum]
  misc_feature (1)..(295): Homolog of NCBI NO: 3913066 NR Description: Alternative oxidase 2, mitochondrial precursor
  misc_feature (1)..(295): Homolog of NCBI NO: 15232222 NR Description: alternative oxidase 1c precursor; protein id:
  misc_feature (1)..(295): Homolog of NCBI NO: 3023316 NR Description: Alternative oxidase 1, mitochondrial precursor
  misc_feature (1)..(295): Homolog of NCBI NO: 15228729 NR Description: alternative oxidase 1b precursor; protein id:
  misc_feature (1)..(295): Homolog of NCBI NO: 6634501 NR Description: alternative oxidase [Populus tremula x Populus
  misc_feature (9)..(295): Homolog of NCBI NO: 1872517 NR Description: alternative oxidase [Arabidopsis thaliana]
  misc_feature (1)..(295): Homolog of NCBI NO: 421824 NR Description: alternative respiratory pathway oxidase (EC
  misc_feature (1)..(295): Homolog of NCBI NO: 11278947 NR Description: alternative respiratory pathway oxidase (EC
  misc_feature (1)..(295): Homolog of NCBI NO: 15228734 NR Description: alternative oxidase 1a precursor
MRFASTITLGEKTPMKEEDANQKKTENESTGGDAAGGNNKGDKGIASYWGVEPNKITKEDGSEWKWNCFRPWETYKADITIDLKKHHVPTTFLDRIAYWTVKSLRWPTDLFFQRRYGCRAMMLETVAAVPGMVGGMLLHCKSLRRFEQSGGWIKALLEEAENERMHLMTFMEVAKPKWYERALVITVQGVFFNAYFLGYLISPKFAHRMVGYLEEEAIHSYTEFLKELDKGNIENVPAPAIAIDYWRLPADATLRDVVMVVRADEAHHRDVNHFASDIHYQGRELKEAPAPIGYH

SEQ ID NO: 40788 - DNA, 1444 bp, Arabidopsis thaliana
  misc_feature (1)..(1444): Ceres Seq. ID no. 12466522
  misc_feature: MA Experiment ID: 108434 Result: Down-regulated in Transcription
  misc_feature: MA Experiment 108434 PARAMETER Experiment Name: At_Root_Tips_cDNA_P Parameter: Tissue Value: Root Tips
  misc_feature: MA Experiment ID: 108573 Result: Up-regulated in Transcription
  misc_feature: MA Experiment 108573 PARAMETER Experiment Name: At_Drought_cDNA_P Parameter: Timepoint (hr) Value: 6
  misc_feature: MA Experiment 108573 PARAMETER Experiment Name: At_Drought_cDNA_P Parameter: Tissue Value: Aerial
  misc_feature: MA Experiment 108573 PARAMETER Experiment Name: At_Drought_cDNA_P Parameter: Treatment Value: Drought vs. No Drought
  misc_feature: MA Experiment ID: 108585 Result: Up-regulated in Transcription
  misc_feature: MA Experiment 108585 PARAMETER Experiment Name: At_5mM_NaNP_cDNA_P Parameter: Timepoint (hr) Value: 6
  misc_feature: MA Experiment 108585 PARAMETER Experiment Name: At_5mM_NaNP_cDNA_P Parameter: Tissue Value: Aerial
  misc_feature: MA Experiment 108585 PARAMETER Experiment Name: At_5mM_NaNP_cDNA_P Parameter: Treatment Value: null
  misc_feature: MA Experiment ID: 20000111 Result: Up-regulated in Transcription
  misc_feature: MA Experiment 20000111 PARAMETER Experiment Name: At_42deg_Heat_cDNA_P Parameter: Temperature (deg C) Value: 42 vs. 22
  misc_feature: MA Experiment 20000111 PARAMETER Experiment Name: At_42deg_Heat_cDNA_P Parameter: Timepoint (hr) Value: 6
  misc_feature: MA Experiment 20000111 PARAMETER Experiment Name: At_42deg_Heat_cDNA_P Parameter: Tissue Value: Aerial
  misc_feature: MA Experiment ID: 20000214 Result: Down-regulated in Transcription
  misc_feature: MA Experiment 20000214 PARAMETER Experiment Name: At_4deg_Cold_P Parameter: Timepoint (hr) Value: 6
  misc_feature: MA Experiment ID: 20000224 Result: Down-regulated in Transcription
  misc_feature: MA Experiment ID: 20001247 Result: Up-regulated in Transcription
  misc_feature: MA Experiment 20001247 PARAMETER Experiment Name: At_Far-red-induction_P Parameter: Age (day) Value: 7
  misc_feature: MA Experiment 20001247 PARAMETER Experiment Name: At_Far-red-induction_P Parameter: Light Value: Far-red vs. White
  misc_feature: MA Experiment 20001247 PARAMETER Experiment Name: At_Far-red-induction_P Parameter: Organism Value: A. thaliana
  misc_feature: MA Experiment 20001247 PARAMETER Experiment Name: At_Far-red-induction_P Parameter: Plant Line Value: Columbia
  misc_feature: MA Experiment 20001247 PARAMETER Experiment Name: At_Far-red-induction_P Parameter: Timepoint (hr) Value: 1
  misc_feature: MA Experiment 20001247 PARAMETER Experiment Name: At_Far-red-induction_P Parameter: Tissue Value: Whole Plant
  misc_feature: MA Experiment ID: 20001905 Result: Up-regulated in Transcription
  misc_feature: MA Experiment 20001905 PARAMETER Experiment Name: At_Drought_Reproduction_P Parameter: Age (day) Value: 40
  misc_feature: MA Experiment 20001905 PARAMETER Experiment Name: At_Drought_Reproduction_P Parameter: Organism Value: A. thaliana
  misc_feature: MA Experiment 20001905 PARAMETER Experiment Name: At_Drought_Reproduction_P Parameter: Plant Line Value: WS
  misc_feature: MA Experiment 20001905 PARAMETER Experiment Name: At_Drought_Reproduction_P Parameter: Timepoint (day) Value: 10
  misc_feature: MA Experiment 20001905 PARAMETER Experiment Name: At_Drought_Reproduction_P Parameter: Tissue Value: Rosettes
  misc_feature: MA Experiment 20001905 PARAMETER Experiment Name: At_Drought_Reproduction_P Parameter: Treatment Value: Drought vs. No Drought
atcttcaatttggacttccaacgccgacaccgtttaactccgatggttcccccgccgtctaatccgcagcaggttcagcagttcctctcctctgccctctcccagcgcggcccatcttcagtcccctacgaagagtccaacaagaggttgatccggcaacatctacttaacctaatctcttcttacccttccttagagcccgctccgtcaacctccttcaagcagatggtacgattccgatgccttttcatggagtcacctataacatacctgtgattatctggctcctcgagtcatatcctcgtcatcctccttgcgtctatgtgaatcccaccgctgatatgatcatcaagcgacctcacgcacatgtcactccttctggtctcgtttctcttccgtaccttcagaattgggtctaccctagctccaatctcgtagatctcgtctccgatctcagcgctgcttttgctcgtgatccgcctctttattctcgacgccgtcctcagccaccgccaccgtctcctcctacggtatacgattcgtctctgtcacgacctccttcggctgatcagtcattgcctagaccgttcccgccatcaccttacggcggaggagtaagtagggtgcaagtgcagcatgttcaccaccagcagcaatctgatgatgcggcggaggttttcaagagaaatgcgattaataagatggtggagatggttcatagcgatttggtttcgatgaggagagccagagaagctgaagcagaggagctgctgagcttgcaagctgggctgaagagaagagaggatgagcttaatatagggttgaaagagatggttgaggagaaagaaacacttgaacaacaattacagattatctccatgaacactgatattctagactcgtgggttagagagaaccaaggcaaaaccaagaatttagttgatttggatgtggataatgcttttgaatgtggtgacacactctctaagcagatgttagagtgtactgctttggatttagccattgaagatgctatttattccttggataagtcgtttcaagatggtgttgttccctttgatcagtatttgaggaatgtgaggttgttgtcgagagaacagttcttccaccgagccacgggttctaaagtcagggcggcacaaatggaggttcaggttgcagccatcgcaggtaggttacattcatgaatgaaattcagtgtttttgtttgcgggatactgtgtcacacaatgctggtttatatagtctgagattagcatctttgaggagtatttctgtggctatgcgtgtgatgatggttcctctttaagattgaattaaatgtctatagactatatatacacgtacactgttgtgcacatacatatttgaatggatcagggcctgagaatcgtctccttttgtgatctatgactactttttt

SEQ ID NO: 40789 - protein, 322 aa, Arabidopsis thaliana
  peptide (1)..(322): Ceres Seq. ID no. 12466523
  misc_feature (1)..(309): Pfam Name: Tumour susceptibility gene 101 protein (TSG101) Pfam Description: Tumour susceptibility gene 101 protein (TSG101)
  misc_feature (1)..(124): Homolog of NCBI NO: 39795834 NR Description: Unknown (protein for MGC:76193) [Silurana
  misc_feature (1)..(219): Homolog of NCBI NO: 11230780 NR Description: tumor susceptibility gene 101 protein [Mus
  misc_feature (1)..(219): Homolog of NCBI NO: 9454364 NR Description: tumor susceptibility protein 101 [Chelonia mydas]
  misc_feature (1)..(118): Homolog of NCBI NO: 33285220 NR Description: Hypothetical protein C09G12.9 [Caenorhabditis
  misc_feature (92)..(305): Homolog of NCBI NO: 33285220 NR Description: Hypothetical protein C09G12.9 [Caenorhabditis
  misc_feature (1)..(305): Homolog of NCBI NO: 12803337 NR Description: tumor susceptibility gene 101 [Homo sapiens]
  misc_feature (1)..(305): Homolog of NCBI NO: 5454140 NR Description: tumor susceptibility gene 101 [Homo sapiens]
  misc_feature (1)..(106): Homolog of NCBI NO: 15240732 NR Description: putative protein; protein id: At5g13860.1
  misc_feature (101)..(322): Homolog of NCBI NO: 15240732 NR Description: putative protein; protein id: At5g13860.1
  misc_feature (1)..(322): Homolog of NCBI NO: 18399596 NR Description: expressed protein; protein id: At3g12400.1
MPFHGVTYNIPVIIWLLESYPRHPPCVYVNPTADMIIKRPHAHVTPSGLVSLPYLQNWVYPSSNLVDLVSDLSAAFARDPPLYSRRRPQPPPPSPPTVYDSSLSRPPSADQSLPRPFPPSPYGGGVSRVQVQHVHHQQQSDDAAEVFKRNAINKMVEMVHSDLVSMRRAREAEAEELLSLQAGLKRREDELNIGLKEMVEEKETLEQQLQIISMNTDILDSWVRENQGKTKNLVDLDVDNAFECGDTLSKQMLECTALDLAIEDAIYSLDKSFQDGVVPFDQYLRNVRLLSREQFFHRATGSKVRAAQMEVQVAAIAGRLHS

SEQ ID NO: 40790 - protein, 288 aa, Arabidopsis thaliana
  peptide (1)..(288): Ceres Seq. ID no. 12466524
  misc_feature (1)..(275): Pfam Name: Tumour susceptibility gene 101 protein (TSG101) Pfam Description: Tumour susceptibility gene 101 protein (TSG101)
  misc_feature (1)..(90): Homolog of NCBI NO: 39795834 NR Description: Unknown (protein for MGC:76193) [Silurana
  misc_feature (1)..(185): Homolog of NCBI NO: 11230780 NR Description: tumor susceptibility gene 101 protein [Mus
  misc_feature (1)..(185): Homolog of NCBI NO: 9454364 NR Description: tumor susceptibility protein 101 [Chelonia mydas]
  misc_feature (1)..(84): Homolog of NCBI NO: 33285220 NR Description: Hypothetical protein C09G12.9 [Caenorhabditis
  misc_feature (58)..(271): Homolog of NCBI NO: 33285220 NR Description: Hypothetical protein C09G12.9 [Caenorhabditis
  misc_feature (1)..(271): Homolog of NCBI NO: 12803337 NR Description: tumor susceptibility gene 101 [Homo sapiens]
  misc_feature (1)..(271): Homolog of NCBI NO: 5454140 NR Description: tumor susceptibility gene 101 [Homo sapiens]
  misc_feature (1)..(72): Homolog of NCBI NO: 15240732 NR Description: putative protein; protein id: At5g13860.1
  misc_feature (67)..(288): Homolog of NCBI NO: 15240732 NR Description: putative protein; protein id: At5g13860.1
  misc_feature (1)..(288): Homolog of NCBI NO: 18399596 NR Description: expressed protein; protein id: At3g12400.1
MIIKRPHAHVTPSGLVSLPYLQNWVYPSSNLVDLVSDLSAAFARDPPLYSRRRPQPPPPSPPTVYDSSLSRPPSADQSLPRPFPPSPYGGGVSRVQVQHVHHQQQSDDAAEVFKRNAINKMVEMVHSDLVSMRRAREAEAEELLSLQAGLKRREDELNIGLKEMVEEKETLEQQLQIISMNTDILDSWVRENQGKTKNLVDLDVDNAFECGDTLSKQMLECTALDLAIEDAIYSLDKSFQDGVVPFDQYLRNVRLLSREQFFHRATGSKVRAAQMEVQVAAIAGRLHS

SEQ ID NO: 40791 - protein, 168 aa, Arabidopsis thaliana
  peptide (1)..(168): Ceres Seq. ID no. 12466525
  misc_feature (1)..(155): Pfam Name: Tumour susceptibility gene 101 protein (TSG101) Pfam Description: Tumour susceptibility gene 101 protein (TSG101)
  misc_feature (1)..(151): Homolog of NCBI NO: 39598335 NR Description: Hypothetical protein CBG15030 [Caenorhabditis
  misc_feature (1)..(151): Homolog of NCBI NO: 9454364 NR Description: tumor susceptibility protein 101 [Chelonia mydas]
  misc_feature (1)..(151): Homolog of NCBI NO: 11230780 NR Description: tumor susceptibility gene 101 protein [Mus
  misc_feature (1)..(65): Homolog of NCBI NO: 11230780 NR Description: tumor susceptibility gene 101 protein [Mus
  misc_feature (1)..(65): Homolog of NCBI NO: 9454364 NR Description: tumor susceptibility protein 101 [Chelonia mydas]
  misc_feature (1)..(151): Homolog of NCBI NO: 33285220 NR Description: Hypothetical protein C09G12.9 [Caenorhabditis
  misc_feature (1)..(151): Homolog of NCBI NO: 12803337 NR Description: tumor susceptibility gene 101 [Homo sapiens]
  misc_feature (1)..(151): Homolog of NCBI NO: 5454140 NR Description: tumor susceptibility gene 101 [Homo sapiens]
  misc_feature (1)..(168): Homolog of NCBI NO: 15240732 NR Description: putative protein; protein id: At5g13860.1
  misc_feature (1)..(168): Homolog of NCBI NO: 18399596 NR Description: expressed protein; protein id: At3g12400.1
MVEMVHSDLVSMRRAREAEAEELLSLQAGLKRREDELNIGLKEMVEEKETLEQQLQIISMNTDILDSWVRENQGKTKNLVDLDVDNAFECGDTLSKQMLECTALDLAIEDAIYSLDKSFQDGVVPFDQYLRNVRLLSREQFFHRATGSKVRAAQMEVQVAAIAGRLHS

SEQ ID NO: 40792 - DNA, 1745 bp, Arabidopsis thaliana
  misc_feature (1)..(1745): Ceres Seq. ID no. 13488918
  misc_feature: MA Experiment ID: 108434 Result: Up-regulated in Transcription
  misc_feature: MA Experiment 108434 PARAMETER Experiment Name: At_Root_Tips_cDNA_P Parameter: Tissue Value: Root Tips
  misc_feature: MA Experiment ID: 108577 Result: Down-regulated in Transcription
  misc_feature: MA Experiment 108577 PARAMETER Experiment Name: At_42deg_Heat_cDNA_P Parameter: Temperature (deg C) Value: 42 vs. 22
  misc_feature: MA Experiment 108577 PARAMETER Experiment Name: At_42deg_Heat_cDNA_P Parameter: Timepoint (hr) Value: 6
  misc_feature: MA Experiment 108577 PARAMETER Experiment Name: At_42deg_Heat_cDNA_P Parameter: Tissue Value: Aerial
  misc_feature: MA Experiment ID: 108579 Result: Down-regulated in Transcription
  misc_feature: MA Experiment 108579 PARAMETER Experiment Name: At_4deg_Cold_cDNA_P Parameter: Temperature (deg C) Value: 4 vs. 22
  misc_feature: MA Experiment 108579 PARAMETER Experiment Name: At_4deg_Cold_cDNA_P Parameter: Timepoint (hr) Value: 6
  misc_feature: MA Experiment 108579 PARAMETER Experiment Name: At_4deg_Cold_cDNA_P Parameter: Tissue Value: Aerial
  misc_feature: MA Experiment ID: 108609 Result: Down-regulated in Transcription
  misc_feature: MA Experiment 108609 PARAMETER Experiment Name: At_100uM_ABA_cDNA_P Parameter: Timepoint (hr) Value: 24
  misc_feature: MA Experiment 108609 PARAMETER Experiment Name: At_100uM_ABA_cDNA_P Parameter: Tissue Value: Aerial
  misc_feature: MA Experiment 108609 PARAMETER Experiment Name: At_100uM_ABA_cDNA_P Parameter: Treatment Value: 100uM ABA vs. No Treatment
  misc_feature: MA Experiment ID: 20000069 Result: Down-regulated in Transcription
  misc_feature: MA Experiment 20000069 PARAMETER Experiment Name: At_100uM_ABA_Mutants_cDNA_P Parameter: Plant Line Value: CS23
  misc_feature: MA Experiment 20000069 PARAMETER Experiment Name: At_100uM_ABA_Mutants_cDNA_P Parameter: Timepoint (hr) Value: 6
  misc_feature: MA Experiment 20000069 PARAMETER Experiment Name: At_100uM_ABA_Mutants_cDNA_P Parameter: Tissue Value: Aerial
  misc_feature: MA Experiment 20000069 PARAMETER Experiment Name: At_100uM_ABA_Mutants_cDNA_P Parameter: Treatment Value: 100uM ABA vs. No Treatment
  misc_feature: MA Experiment ID: 20000071 Result: Down-regulated in Transcription
  misc_feature: MA Experiment 20000071 PARAMETER Experiment Name: At_100uM_ABA_Mutants_cDNA_P Parameter: Plant Line Value: CS8104
  misc_feature: MA Experiment 20000071 PARAMETER Experiment Name: At_100uM_ABA_Mutants_cDNA_P Parameter: Timepoint (hr) Value: 6
  misc_feature: MA Experiment 20000071 PARAMETER Experiment Name: At_100uM_ABA_Mutants_cDNA_P Parameter: Tissue Value: Aerial
  misc_feature: MA Experiment 20000071 PARAMETER Experiment Name: At_100uM_ABA_Mutants_cDNA_P Parameter: Treatment Value: 100uM ABA vs. No Treatment
  misc_feature: MA Experiment ID: 20000072 Result: Down-regulated in Transcription
  misc_feature: MA Experiment 20000072 PARAMETER Experiment Name: At_100uM_ABA_Mutants_cDNA_P Parameter: Plant Line Value: CS8105
  misc_feature: MA Experiment 20000072 PARAMETER Experiment Name: At_100uM_ABA_Mutants_cDNA_P Parameter: Timepoint (hr) Value: 6
  misc_feature: MA Experiment 20000072 PARAMETER Experiment Name: At_100uM_ABA_Mutants_cDNA_P Parameter: Tissue Value: Aerial
  misc_feature: MA Experiment 20000072 PARAMETER Experiment Name: At_100uM_ABA_Mutants_cDNA_P Parameter: Treatment Value: 100uM ABA vs. No Treatment
  misc_feature: MA Experiment ID: 20000086 Result: Down-regulated in Transcription
  misc_feature: MA Experiment 20000086 PARAMETER Experiment Name: At_100uM_ABA_Mutants_cDNA_P Parameter: Plant Line Value: CS22
  misc_feature: MA Experiment 20000086 PARAMETER Experiment Name: At_100uM_ABA_Mutants_cDNA_P Parameter: Timepoint (hr) Value: 6
  misc_feature: MA Experiment 20000086 PARAMETER Experiment Name: At_100uM_ABA_Mutants_cDNA_P Parameter: Tissue Value: Aerial
  misc_feature: MA Experiment 20000086 PARAMETER Experiment Name: At_100uM_ABA_Mutants_cDNA_P Parameter: Treatment Value: 100uM ABA vs. No Treatment
  misc_feature: MA Experiment ID: 20000111 Result: Down-regulated in Transcription
  misc_feature: MA Experiment 20000111 PARAMETER Experiment Name: At_42deg_Heat_cDNA_P Parameter: Temperature (deg C) Value: 42 vs. 22
  misc_feature: MA Experiment 20000111 PARAMETER Experiment Name: At_42deg_Heat_cDNA_P Parameter: Timepoint (hr) Value: 6
  misc_feature: MA Experiment 20000111 PARAMETER Experiment Name: At_42deg_Heat_cDNA_P Parameter: Tissue Value: Aerial
  misc_feature: MA Experiment ID: 20000113 Result: Down-regulated in Transcription
  misc_feature: MA Experiment 20000113 PARAMETER Experiment Name: At_42deg_Heat_cDNA_P Parameter: Temperature (deg C) Value: 42 vs. 22
  misc_feature: MA Experiment 20000113 PARAMETER Experiment Name: At_42deg_Heat_cDNA_P Parameter: Timepoint (hr) Value: 8
  misc_feature: MA Experiment 20000113 PARAMETER Experiment Name: At_42deg_Heat_cDNA_P Parameter: Tissue Value: Aerial
  misc_feature: MA Experiment ID: 20000117 Result: Down-regulated in Transcription
  misc_feature: MA Experiment 20000117 PARAMETER Experiment Name: At_100uM_ABA_Mutants_cDNA_P Parameter: Plant Line Value: Columbia
  misc_feature: MA Experiment 20000117 PARAMETER Experiment Name: At_100uM_ABA_Mutants_cDNA_P Parameter: Timepoint (hr) Value: 6
  misc_feature: MA Experiment 20000117 PARAMETER Experiment Name: At_100uM_ABA_Mutants_cDNA_P Parameter: Tissue Value: Aerial
  misc_feature: MA Experiment 20000117 PARAMETER Experiment Name: At_100uM_ABA_Mutants_cDNA_P Parameter: Treatment Value: 100uM ABA vs. No Treatment
  misc_feature: MA Experiment ID: 20000144 Result: Down-regulated in Transcription
  misc_feature: MA Experiment 20000144 PARAMETER Experiment Name: At_42deg_Heat_cDNA_P Parameter: Temperature (deg C) Value: 42 vs. 22
  misc_feature: MA Experiment 20000144 PARAMETER Experiment Name: At_42deg_Heat_cDNA_P Parameter: Timepoint (hr) Value: 1
  misc_feature: MA Experiment 20000144 PARAMETER Experiment Name: At_42deg_Heat_cDNA_P Parameter: Tissue Value: Aerial
  misc_feature: MA Experiment ID: 20000173 Result: Down-regulated in Transcription
  misc_feature: MA Experiment 20000173 PARAMETER Experiment Name: At_42deg_Heat_P Parameter: Age (day) Value: 14
  misc_feature: MA Experiment 20000173 PARAMETER Experiment Name: At_42deg_Heat_P Parameter: Organism Value: A. thaliana
  misc_feature: MA Experiment 20000173 PARAMETER Experiment Name: At_42deg_Heat_P Parameter: Plant Line Value: WS
  misc_feature: MA Experiment 20000173 PARAMETER Experiment Name: At_42deg_Heat_P Parameter: Temperature (deg C) Value: 42 vs. 22
  misc_feature: MA Experiment 20000173 PARAMETER Experiment Name: At_42deg_Heat_P Parameter: Timepoint (hr) Value: 6
  misc_feature: MA Experiment 20000173 PARAMETER Experiment Name: At_42deg_Heat_P Parameter: Tissue Value: Aerial
  misc_feature: MA Experiment ID: 20000184 Result: Up-regulated in Transcription
  misc_feature: MA Experiment 20000184 PARAMETER Experiment Name: At_Shoots__P Parameter: Age (day) Value: 7
  misc_feature: MA Experiment 20000184 PARAMETER Experiment Name: At_Shoots__P Parameter: Tissue Value: Shoots vs. Whole Plant
  misc_feature: MA Experiment ID: 20000265 Result: Up-regulated in Transcription
  misc_feature: MA Experiment 20000265 PARAMETER Experiment Name: At_Open_Flower_P Parameter: Age (day) Value: 21
  misc_feature: MA Experiment 20000265 PARAMETER Experiment Name: At_Open_Flower_P Parameter: Plant Line Value: WS
  misc_feature: MA Experiment 20000265 PARAMETER Experiment Name: At_Open_Flower_P Parameter: Tissue Value: Closed Flower vs. Whole Plant
  misc_feature: MA Experiment ID: 20000573 Result: Down-regulated in Transcription
  misc_feature: MA Experiment 20000573 PARAMETER Experiment Name: At_100uM_ABA_Mutants__P Parameter: Organism Value: A. thaliana
  misc_feature: MA Experiment 20000573 PARAMETER Experiment Name: At_100uM_ABA_Mutants__P Parameter: Plant Line Value: CS22 vs. Ler wt
  misc_feature: MA Experiment 20000573 PARAMETER Experiment Name: At_100uM_ABA_Mutants__P Parameter: Timepoint (hr) Value: N/A
  misc_feature: MA Experiment 20000573 PARAMETER Experiment Name: At_100uM_ABA_Mutants__P Parameter: Tissue Value: Whole Plant
  misc_feature: MA Experiment 20000573 PARAMETER Experiment Name: At_100uM_ABA_Mutants__P Parameter: Treatment Value: None
  misc_feature: MA Experiment ID: 20001757 Result: Up-regulated in Transcription
  misc_feature: MA Experiment 20001757 PARAMETER Experiment Name: At_50mM_NH4NO3_L-to-H_P Parameter: Timepoint (hr) Value: 6
  misc_feature: MA Experiment 20001757 PARAMETER Experiment Name: At_50mM_NH4NO3_L-to-H_P Parameter: Tissue Value: Leaf
  misc_feature: MA Experiment 20001757 PARAMETER Experiment Name: At_50mM_NH4NO3_L-to-H_P Parameter: Treatment Value: 50mM NH4NO3 vs 100mM Mannitol
agagaagaaatagagagagaggccacaaggcacacacaagtcagtatcccacgtgcatctgggaactcgacccctctcctctgccacaacccactcttcatttctctctttctccaccaatctctctttctctctctcaaaagaagagaaactaataattctcaaaagctcacacacagaaacagaggaatctataaggaagttttggtttttggttatcaacaatggtggaagcaaaagatcaagatatgggtgatggtatgcaatgtataaaccatccatttactaaaaacccaggtgggatctgtgctttttgtcttcaagaaaagcttggaaagcttgtaacttcatctttcccacttcctaaacacctcacttcctcttcaacttcttcttctccttccttcagatctgactctgttggtagcacaaccactgcctctgccgcaaatctctcagcgtctctttctctctctgtctccggagcaacaaacaacaacaacagcaagcttccgtttttgttagctaagaagaagaagaagatgcttactgcttcttcttcttcttcgaccacggctaatattgtctacaagagaagtcaatctacaaggactacgaagacaacgtacggagattcagatttgagcccgagaaagagaaatgggttttggtccttttttcatctctactcttcgaaacaacatggtagcagtaagaaagttggaaactttcatcaacccataagccagactgagacaaaaacagagttggcagagactacaacagtgggatcttcgtcttcttcgtcagcttcttcttcaatgtcaaagagagttgttggtggtggtgggagtagtagtaacagaaacggtattgatgtgattgttgaagaagatggaagtcctaacattgaagtcacaccaagtgagaggaaagtgtcgagatctagatctgttgggtgtggaagtagaagcttctctggtgatttctttgagaggatcacaaatgggtttggagattgtactttgagaagagttgagtcacagagagaaggtaataataacaaaggtaacaaggtcagtagtaaccctagtaatggtgttagagagatggtgagatgtggtgggatctttggtgggtttatgataatgacgtcatcgtcttcttcttcatcttcatcatcatgggtatcatcatcatcagctgaacatcatcatcatcataatcataacatgggtcatggtggtggaggaaggaacagaagctggggatggtcatttgcaagtccaatgagagcttttacttcttcttcttactctggtaaaagaggccgtacaatttcagattctactacaagcaagaacacaactccaaacttgggtgcaattccttctttgttgtctgtcagaagctgaattaataataaactttgatctatgtgtttctaataagttcttaaacgagaaaatacatttaattagtttttatcattttcatcaatgtgtttatcttttttttaggtgttcttcaaatatttgttgatgctctttttgataatcttattagtattgtaatgtcacaccactcttctatgttcattatcatcttttgtcaaacaaggaacttaggatactttgagctactttttctgtttatttgtctttttctcttttgtttattttgatctttggattgattcctatgtctctttgaatgatctaatggtaaataaattggttttatct

SEQ ID NO: 40793 - protein, 396 aa, Arabidopsis thaliana
  peptide (1)..(396): Ceres Seq. ID no. 13488919
  misc_feature (39)..(382): Homolog of NCBI NO: 28828184 NR Description: similar to Leishmania major. Ppg3 [Dictyostelium
  misc_feature (70)..(384): Homolog of NCBI NO: 28828184 NR Description: similar to Leishmania major. Ppg3 [Dictyostelium
  misc_feature (66)..(386): Homolog of NCBI NO: 28828184 NR Description: similar to Leishmania major. Ppg3 [Dictyostelium
  misc_feature (30)..(396): Homolog of NCBI NO: 32477034 NR Description: hypothetical protein-signal peptide prediction
  misc_feature (51)..(345): Homolog of NCBI NO: 28828184 NR Description: similar to Leishmania major. Ppg3 [Dictyostelium
  misc_feature (35)..(367): Homolog of NCBI NO: 28828184 NR Description: similar to Leishmania major. Ppg3 [Dictyostelium
  misc_feature (78)..(365): Homolog of NCBI NO: 32487915 NR Description: OJ000315_02.19 [Oryza sativa (japonica
  misc_feature (78)..(365): Homolog of NCBI NO: 32490296 NR Description: OSJNBa0042I15.1 [Oryza sativa (japonica
  misc_feature (9)..(396): Homolog of NCBI NO: 21536969 NR Description: unknown [Arabidopsis thaliana]
  misc_feature (1)..(396): Homolog of NCBI NO: 18422990 NR Description: expressed protein [Arabidopsis thaliana]
MVEAKDQDMGDGMQCINHPFTKNPGGICAFCLQEKLGKLVTSSFPLPKHLTSSSTSSSPSFRSDSVGSTTTASAANLSASLSLSVSGATNNNNSKLPFLLAKKKKKMLTASSSSSTTANIVYKRSQSTRTTKTTYGDSDLSPRKRNGFWSFFHLYSSKQHGSSKKVGNFHQPISQTETKTELAETTTVGSSSSSSASSSMSKRVVGGGGSSSNRNGIDVIVEEDGSPNIEVTPSERKVSRSRSVGCGSRSFSGDFFERITNGFGDCTLRRVESQREGNNNKGNKVSSNPSNGVREMVRCGGIFGGFMIMTSSSSSSSSSSWVSSSSAEHHHHHNHNMGHGGGGRNRSWGWSFASPMRAFTSSSYSGKRGRTISDSTTSKNTTPNLGAIPSLLSVRS

SEQ ID NO: 40794 - protein, 388 aa, Arabidopsis thaliana
  peptide (1)..(388): Ceres Seq. ID no. 13488920
  misc_feature (31)..(374): Homolog of NCBI NO: 28828184 NR Description: similar to Leishmania major. Ppg3 [Dictyostelium
  misc_feature (62)..(376): Homolog of NCBI NO: 28828184 NR Description: similar to Leishmania major. Ppg3 [Dictyostelium
  misc_feature (58)..(378): Homolog of NCBI NO: 28828184 NR Description: similar to Leishmania major. Ppg3 [Dictyostelium
  misc_feature (22)..(388): Homolog of NCBI NO: 32477034 NR Description: hypothetical protein-signal peptide prediction
  misc_feature (43)..(337): Homolog of NCBI NO: 28828184 NR Description: similar to Leishmania major. Ppg3 [Dictyostelium
  misc_feature (27)..(359): Homolog of NCBI NO: 28828184 NR Description: similar to Leishmania major. Ppg3 [Dictyostelium
  misc_feature (70)..(357): Homolog of NCBI NO: 32487915 NR Description: OJ000315_02.19 [Oryza sativa (japonica
  misc_feature (70)..(357): Homolog of NCBI NO: 32490296 NR Description: OSJNBa0042I15.1 [Oryza sativa (japonica
  misc_feature (1)..(388): Homolog of NCBI NO: 21536969 NR Description: unknown [Arabidopsis thaliana]
  misc_feature (1)..(388): Homolog of NCBI NO: 18422990 NR Description: expressed protein [Arabidopsis thaliana]
MGDGMQCINHPFTKNPGGICAFCLQEKLGKLVTSSFPLPKHLTSSSTSSSPSFRSDSVGSTTTASAANLSASLSLSVSGATNNNNSKLPFLLAKKKKKMLTASSSSSTTANIVYKRSQSTRTTKTTYGDSDLSPRKRNGFWSFFHLYSSKQHGSSKKVGNFHQPISQTETKTELAETTTVGSSSSSSASSSMSKRVVGGGGSSSNRNGIDVIVEEDGSPNIEVTPSERKVSRSRSVGCGSRSFSGDFFERITNGFGDCTLRRVESQREGNNNKGNKVSSNPSNGVREMVRCGGIFGGFMIMTSSSSSSSSSSWVSSSSAEHHHHHNHNMGHGGGGRNRSWGWSFASPMRAFTSSSYSGKRGRTISDSTTSKNTTPNLGAIPSLLSVRS

SEQ ID NO: 40795 - protein, 384 aa, Arabidopsis thaliana
  peptide (1)..(384): Ceres Seq. ID no. 13488921
  misc_feature (27)..(370): Homolog of NCBI NO: 28828184 NR Description: similar to Leishmania major. Ppg3 [Dictyostelium
  misc_feature (58)..(372): Homolog of NCBI NO: 28828184 NR Description: similar to Leishmania major. Ppg3 [Dictyostelium
  misc_feature (54)..(374): Homolog of NCBI NO: 28828184 NR Description: similar to Leishmania major. Ppg3 [Dictyostelium
  misc_feature (18)..(384): Homolog of NCBI NO: 32477034 NR Description: hypothetical protein-signal peptide prediction
  misc_feature (39)..(333): Homolog of NCBI NO: 28828184 NR Description: similar to Leishmania major. Ppg3 [Dictyostelium
  misc_feature (23)..(355): Homolog of NCBI NO: 28828184 NR Description: similar to Leishmania major. Ppg3 [Dictyostelium
  misc_feature (66)..(353): Homolog of NCBI NO: 32487915 NR Description: OJ000315_02.19 [Oryza sativa (japonica
  misc_feature (66)..(353): Homolog of NCBI NO: 32490296 NR Description: OSJNBa0042I15.1 [Oryza sativa (japonica
  misc_feature (1)..(384): Homolog of NCBI NO: 21536969 NR Description: unknown [Arabidopsis thaliana]
  misc_feature (1)..(384): Homolog of NCBI NO: 18422990 NR Description: expressed protein [Arabidopsis thaliana]
MQCINHPFTKNPGGICAFCLQEKLGKLVTSSFPLPKHLTSSSTSSSPSFRSDSVGSTTTASAANLSASLSLSVSGATNNNNSKLPFLLAKKKKKMLTASSSSSTTANIVYKRSQSTRTTKTTYGDSDLSPRKRNGFWSFFHLYSSKQHGSSKKVGNFHQPISQTETKTELAETTTVGSSSSSSASSSMSKRVVGGGGSSSNRNGIDVIVEEDGSPNIEVTPSERKVSRSRSVGCGSRSFSGDFFERITNGFGDCTLRRVESQREGNNNKGNKVSSNPSNGVREMVRCGGIFGGFMIMTSSSSSSSSSSWVSSSSAEHHHHHNHNMGHGGGGRNRSWGWSFASPMRAFTSSSYSGKRGRTISDSTTSKNTTPNLGAIPSLLSVRS

SEQ ID NO: 40796 - DNA, 1237 bp, Arabidopsis thaliana
  misc_feature (1)..(1237): Ceres Seq. ID no. 12580434
  misc_feature: MA Experiment ID: 108433 Result: Up-regulated in Transcription
  misc_feature: MA Experiment 108433 PARAMETER Experiment Name: At_rhl_Mutant2_cDNA_P Parameter: Age (day) Value: 7
  misc_feature: MA Experiment 108433 PARAMETER Experiment Name: At_rhl_Mutant2_cDNA_P Parameter: Organism Value: A. thaliana
  misc_feature: MA Experiment 108433 PARAMETER Experiment Name: At_rhl_Mutant2_cDNA_P Parameter: Plant Line Value: rhl Mutant vs. wt landsburg
  misc_feature: MA Experiment 108433 PARAMETER Experiment Name: At_rhl_Mutant2_cDNA_P Parameter: Tissue Value: Roots
  misc_feature: MA Experiment ID: 108434 Result: Down-regulated in Transcription
  misc_feature: MA Experiment 108434 PARAMETER Experiment Name: At_Root_Tips_cDNA_P Parameter: Tissue Value: Root Tips
  misc_feature: MA Experiment ID: 108461 Result: Up-regulated in Transcription
  misc_feature: MA Experiment 108461 PARAMETER Experiment Name: At_Germinating_Seeds_cDNA_P Parameter: Age (day) Value: 1 vs. 0
  misc_feature: MA Experiment 108461 PARAMETER Experiment Name: At_Germinating_Seeds_cDNA_P Parameter: Tissue Value: Germinating Seeds
  misc_feature: MA Experiment ID: 108463 Result: Up-regulated in Transcription
  misc_feature: MA Experiment 108463 PARAMETER Experiment Name: At_Germinating_Seeds_cDNA_P Parameter: Age (day) Value: 3 vs. 0
  misc_feature: MA Experiment 108463 PARAMETER Experiment Name: At_Germinating_Seeds_cDNA_P Parameter: Tissue Value: Germinating Seeds
  misc_feature: MA Experiment ID: 108473 Result: Up-regulated in Transcription
  misc_feature: MA Experiment 108473 PARAMETER Experiment Name: At_Drought_Flowers_cDNA_P Parameter: Timepoint (hr) Value: 7 d
  misc_feature: MA Experiment 108473 PARAMETER Experiment Name: At_Drought_Flowers_cDNA_P Parameter: Tissue Value: Flower
  misc_feature: MA Experiment 108473 PARAMETER Experiment Name: At_Drought_Flowers_cDNA_P Parameter: Treatment Value: Drought vs. No Drought
  misc_feature: MA Experiment ID: 108474 Result: Up-regulated in Transcription
  misc_feature: MA Experiment 108474 PARAMETER Experiment Name: At_Drought_Flowers_cDNA_P Parameter: Timepoint (hr) Value: null
  misc_feature: MA Experiment 108474 PARAMETER Experiment Name: At_Drought_Flowers_cDNA_P Parameter: Treatment Value: Drought vs. No Drought
  misc_feature: MA Experiment ID: 108561 Result: Up-regulated in Transcription
  misc_feature: MA Experiment 108561 PARAMETER Experiment Name: At_100uM_ABA_cDNA_P Parameter: Timepoint (hr) Value: 6
  misc_feature: MA Experiment 108561 PARAMETER Experiment Name: At_100uM_ABA_cDNA_P Parameter: Tissue Value: Aerial
  misc_feature: MA Experiment 108561 PARAMETER Experiment Name: At_100uM_ABA_cDNA_P Parameter: Treatment Value: 100uM ABA vs. No Treatment
  misc_feature: MA Experiment ID: 108572 Result: Up-regulated in Transcription
  misc_feature: MA Experiment 108572 PARAMETER Experiment Name: At_Drought_cDNA_P Parameter: Timepoint (hr) Value: 1
  misc_feature: MA Experiment 108572 PARAMETER Experiment Name: At_Drought_cDNA_P Parameter: Tissue Value: Aerial
  misc_feature: MA Experiment 108572 PARAMETER Experiment Name: At_Drought_cDNA_P Parameter: Treatment Value: Drought vs. No Drought
  misc_feature: MA Experiment ID: 108573 Result: Up-regulated in Transcription
  misc_feature: MA Experiment 108573 PARAMETER Experiment Name: At_Drought_cDNA_P Parameter: Timepoint (hr) Value: 6
  misc_feature: MA Experiment 108573 PARAMETER Experiment Name: At_Drought_cDNA_P Parameter: Tissue Value: Aerial
  misc_feature: MA Experiment 108573 PARAMETER Experiment Name: At_Drought_cDNA_P Parameter: Treatment Value: Drought vs. No Drought
  misc_feature: MA Experiment ID: 108577 Result: Down-regulated in Transcription
  misc_feature: MA Experiment 108577 PARAMETER Experiment Name: At_42deg_Heat_cDNA_P Parameter: Temperature (deg C) Value: 42 vs. 22
  misc_feature: MA Experiment 108577 PARAMETER Experiment Name: At_42deg_Heat_cDNA_P Parameter: Timepoint (hr) Value: 6
  misc_feature: MA Experiment 108577 PARAMETER Experiment Name: At_42deg_Heat_cDNA_P Parameter: Tissue Value: Aerial
  misc_feature: MA Experiment ID: 108579 Result: Up-regulated in Transcription
  misc_feature: MA Experiment 108579 PARAMETER Experiment Name: At_4deg_Cold_cDNA_P Parameter: Temperature (deg C) Value: 4 vs. 22
  misc_feature: MA Experiment 108579 PARAMETER Experiment Name: At_4deg_Cold_cDNA_P Parameter: Timepoint (hr) Value: 6
  misc_feature: MA Experiment 108579 PARAMETER Experiment Name: At_4deg_Cold_cDNA_P Parameter: Tissue Value: Aerial
  misc_feature: MA Experiment ID: 108594 Result: Down-regulated in Transcription
  misc_feature: MA Experiment 108594 PARAMETER Experiment Name: At_Ler-rhl_Root_cDNA_P Parameter: Plant Line Value: null
  misc_feature: MA Experiment ID: 108595 Result: Down-regulated in Transcription
  misc_feature: MA Experiment 108595 PARAMETER Experiment Name: At_Ler-pi_Ovule_cDNA_P Parameter: Plant Line Value: null
  misc_feature: MA Experiment ID: 108605 Result: Up-regulated in Transcription
  misc_feature: MA Experiment 108605 PARAMETER Experiment Name: At_100uM_ABA_cDNA_P Parameter: Timepoint (hr) Value: 6
  misc_feature: MA Experiment 108605 PARAMETER Experiment Name: At_100uM_ABA_cDNA_P Parameter: Tissue Value: Aerial
  misc_feature: MA Experiment 108605 PARAMETER Experiment Name: At_100uM_ABA_cDNA_P Parameter: Treatment Value: 100uM ABA vs. No Treatment
  misc_feature: MA Experiment ID: 108607 Result: Up-regulated in Transcription
  misc_feature: MA Experiment 108607 PARAMETER Experiment Name: At_100uM_ABA_cDNA_P Parameter: Timepoint (hr) Value: 4
  misc_feature: MA Experiment 108607 PARAMETER Experiment Name: At_100uM_ABA_cDNA_P Parameter: Tissue Value: Aerial
  misc_feature: MA Experiment 108607 PARAMETER Experiment Name: At_100uM_ABA_cDNA_P Parameter: Treatment Value: 100uM ABA vs. No Treatment
  misc_feature: MA Experiment ID: 108608 Result: Up-regulated in Transcription
  misc_feature: MA Experiment 108608 PARAMETER Experiment Name: At_100uM_ABA_cDNA_P Parameter: Timepoint (hr) Value: 1
  misc_feature: MA Experiment 108608 PARAMETER Experiment Name: At_100uM_ABA_cDNA_P Parameter: Tissue Value: Aerial
  misc_feature: MA Experiment 108608 PARAMETER Experiment Name: At_100uM_ABA_cDNA_P Parameter: Treatment Value: 100uM ABA vs. No Treatment
  misc_feature: MA Experiment ID: 108609 Result: Up-regulated in Transcription
  misc_feature: MA Experiment 108609 PARAMETER Experiment Name: At_100uM_ABA_cDNA_P Parameter: Timepoint (hr) Value: 24
  misc_feature: MA Experiment 108609 PARAMETER Experiment Name: At_100uM_ABA_cDNA_P Parameter: Tissue Value: Aerial
  misc_feature: MA Experiment 108609 PARAMETER Experiment Name: At_100uM_ABA_cDNA_P Parameter: Treatment Value: 100uM ABA vs. No Treatment
  misc_feature: MA Experiment ID: 20000030 Result: Down-regulated in Transcription
  misc_feature: MA Experiment 20000030 PARAMETER Experiment Name: At_CS6630_Roots_cDNA_P Parameter: Plant Line Value: CS6630 vs. WS
  misc_feature: MA Experiment 20000030 PARAMETER Experiment Name: At_CS6630_Roots_cDNA_P Parameter: Tissue Value: Roots
  misc_feature: MA Experiment ID: 20000068 Result: Up-regulated in Transcription
  misc_feature: MA Experiment ID: 20000069 Result: Up-regulated in Transcription
  misc_feature: MA Experiment 20000069 PARAMETER Experiment Name: At_100uM_ABA_Mutants_cDNA_P Parameter: Plant Line Value: CS23
  misc_feature: MA Experiment 20000069 PARAMETER Experiment Name: At_100uM_ABA_Mutants_cDNA_P Parameter: Timepoint (hr) Value: 6
  misc_feature: MA Experiment 20000069 PARAMETER Experiment Name: At_100uM_ABA_Mutants_cDNA_P Parameter: Tissue Value: Aerial
  misc_feature: MA Experiment 20000069 PARAMETER Experiment Name: At_100uM_ABA_Mutants_cDNA_P Parameter: Treatment Value: 100uM ABA vs. No Treatment
  misc_feature: MA Experiment ID: 20000071 Result: Up-regulated in Transcription
  misc_feature: MA Experiment 20000071 PARAMETER Experiment Name: At_100uM_ABA_Mutants_cDNA_P Parameter: Plant Line Value: CS8104
  misc_feature: MA Experiment 20000071 PARAMETER Experiment Name: At_100uM_ABA_Mutants_cDNA_P Parameter: Timepoint (hr) Value: 6
  misc_feature: MA Experiment 20000071 PARAMETER Experiment Name: At_100uM_ABA_Mutants_cDNA_P Parameter: Tissue Value: Aerial
  misc_feature: MA Experiment 20000071 PARAMETER Experiment Name: At_100uM_ABA_Mutants_cDNA_P Parameter: Treatment Value: 100uM ABA vs. No Treatment
  misc_feature: MA Experiment ID: 20000072 Result: Up-regulated in Transcription
  misc_feature: MA Experiment 20000072 PARAMETER Experiment Name: At_100uM_ABA_Mutants_cDNA_P Parameter: Plant Line Value: CS8105
  misc_feature: MA Experiment 20000072 PARAMETER Experiment Name: At_100uM_ABA_Mutants_cDNA_P Parameter: Timepoint (hr) Value: 6
  misc_feature: MA Experiment 20000072 PARAMETER Experiment Name: At_100uM_ABA_Mutants_cDNA_P Parameter: Tissue Value: Aerial
  misc_feature: MA Experiment 20000072 PARAMETER Experiment Name: At_100uM_ABA_Mutants_cDNA_P Parameter: Treatment Value: 100uM ABA vs. No Treatment
  misc_feature: MA Experiment ID: 20000086 Result: Up-regulated in Transcription
  misc_feature: MA Experiment 20000086 PARAMETER Experiment Name: At_100uM_ABA_Mutants_cDNA_P Parameter: Plant Line Value: CS22
  misc_feature: MA Experiment 20000086 PARAMETER Experiment Name: At_100uM_ABA_Mutants_cDNA_P Parameter: Timepoint (hr) Value: 6
  misc_feature: MA Experiment 20000086 PARAMETER Experiment Name: At_100uM_ABA_Mutants_cDNA_P Parameter: Tissue Value: Aerial
  misc_feature: MA Experiment 20000086 PARAMETER Experiment Name: At_100uM_ABA_Mutants_cDNA_P Parameter: Treatment Value: 100uM ABA vs. No Treatment
  misc_feature: MA Experiment ID: 20000087 Result: Up-regulated in Transcription
  misc_feature: MA Experiment 20000087 PARAMETER Experiment Name: At_100uM_ABA_Mutants_cDNA_P Parameter: Plant Line Value: WS
  misc_feature: MA Experiment 20000087 PARAMETER Experiment Name: At_100uM_ABA_Mutants_cDNA_P Parameter: Timepoint (hr) Value: 6
  misc_feature: MA Experiment 20000087 PARAMETER Experiment Name: At_100uM_ABA_Mutants_cDNA_P Parameter: Tissue Value: Aerial
  misc_feature: MA Experiment 20000087 PARAMETER Experiment Name: At_100uM_ABA_Mutants_cDNA_P Parameter: Treatment Value: 100uM ABA vs. No Treatment
  misc_feature: MA Experiment ID: 20000089 Result: Up-regulated in Transcription
  misc_feature: MA Experiment ID: 20000111 Result: Down-regulated in Transcription
  misc_feature: MA Experiment 20000111 PARAMETER Experiment Name: At_42deg_Heat_cDNA_P Parameter: Temperature (deg C) Value: 42 vs. 22
  misc_feature: MA Experiment 20000111 PARAMETER Experiment Name: At_42deg_Heat_cDNA_P Parameter: Timepoint (hr) Value: 6
  misc_feature: MA Experiment 20000111 PARAMETER Experiment Name: At_42deg_Heat_cDNA_P Parameter: Tissue Value: Aerial
  misc_feature: MA Experiment ID: 20000117 Result: Up-regulated in Transcription
  misc_feature: MA Experiment 20000117 PARAMETER Experiment Name: At_100uM_ABA_Mutants_cDNA_P Parameter: Plant Line Value: Columbia
  misc_feature: MA Experiment 20000117 PARAMETER Experiment Name: At_100uM_ABA_Mutants_cDNA_P Parameter: Timepoint (hr) Value: 6
  misc_feature: MA Experiment 20000117 PARAMETER Experiment Name: At_100uM_ABA_Mutants_cDNA_P Parameter: Tissue Value: Aerial
  misc_feature: MA Experiment 20000117 PARAMETER Experiment Name: At_100uM_ABA_Mutants_cDNA_P Parameter: Treatment Value: 100uM ABA vs. No Treatment
  misc_feature: MA Experiment ID: 20000224 Result: Up-regulated in Transcription
acacgtctatcttttataccaaaaaatataaaataaaaaacactatggcggaaaactacgaccgtgccagtgagttaaaagcattcgacgagatgaagattggcgtgaaaggactcgtcgacgccggagtcacaaaagtcccgcgcattttccataacccgcatgttaacgtagcaaaccctaagcctacatcgacggtggtgatgattccaacaatcgatctaggtggcgtgttcgaatccacggtcgtgcgagagagtgtagttgcgaaggttaaagacgcaatggagaagtttggatttttccaggcgattaaccatggggttccacttgatgtgatggagaagatgataaatggtattcgtcggtttcacgaccaagatccagaagtgaggaaaatgttctatacccgagacaaaaccaaaaagcttaaatatcactctaatgctgatctctatgagtctcctgctgcgagttggagagataccttaagttgtgtcatggctcctgatgttccaaaagcacaggacttacctgaggtttgtggggagatcatgttggagtactcaaaggaagtgatgaagttagcggagttaatgtttgaaattttatcagaagctttagggttgagtcctaaccacctcaaagaaatggattgcgcaaaaggtttatggatgctctgtcattgttttccaccctgtcctgagccaaaccgaacattcggcggcgctcagcacacagacagatctttccttactattcttcttaacgacaacaatggaggacttcaagttctctacgatggatactggatcgatgttcctcctaatcccgaagcacttatctttaacgtaggagatttcctccagcttatctcgaatgacaagtttgtaagcatggagcatagaattttggcaaatggaggtgaagagccgcgcatttcggtcgcttgtttctttgtgcatacttttacttcaccaagttcgagagtatatggacccattaaagagcttctgtctgagctaaaccctccaaaatacagagacaccacctcggaatcctccaatcactatgtggctagaaaacctaatgggaattcttcgttggaccatttaaggatctgaaacttgaacctatatctcagaggttttcttgagtttccaataaaatttggtgcacgctgtgacgtaccatgttcaagaccttgaacgtatcattcaataattcttccgttgtg

SEQ ID NO: 40797 - protein, 373 aa, Arabidopsis thaliana
  peptide (1)..(373): Ceres Seq. ID no. 12580435
  misc_feature (221)..(321): Pfam Name: 2OG-Fe(II) oxygenase superfamily Pfam Description: 2OG-Fe(II) oxygenase superfamily
  misc_feature (19)..(303): Homolog of NCBI NO: 25406927 NR Description: protein F12K11.6 [imported] - Arabidopsis
  misc_feature (288)..(373): Homolog of NCBI NO: 25406927 NR Description: protein F12K11.6 [imported] - Arabidopsis
  misc_feature (2)..(297): Homolog of NCBI NO: 25406927 NR Description: protein F12K11.6 [imported] - Arabidopsis
  misc_feature (19)..(373): Homolog of NCBI NO: 15221545 NR Description: oxidoreductase, putative
  misc_feature (19)..(373): Homolog of NCBI NO: 13878119 NR Description: putative oxidoreductase [Arabidopsis thaliana]
  misc_feature (15)..(367): Homolog of NCBI NO: 15221544 NR Description: oxidoreductase, putative
  misc_feature (20)..(373): Homolog of NCBI NO: 30679748 NR Description: 2-oxoglutarate-dependent dioxygenase, putative
  misc_feature (15)..(373): Homolog of NCBI NO: 15224576 NR Description: putative dioxygenase; protein id: At2g30840.1
  misc_feature (15)..(373): Homolog of NCBI NO: 15224575 NR Description: putative dioxygenase; protein id: At2g30830.1
  misc_feature (15)..(373): Homolog of NCBI NO: 15224730 NR Description: putative dioxygenase
TSIFYTKKYKIKNTMAENYDRASELKAFDEMKIGVKGLVDAGVTKVPRIFHNPHVNVANPKPTSTVVMIPTIDLGGVFESTVVRESVVAKVKDAMEKFGFFQAINHGVPLDVMEKMINGIRRFHDQDPEVRKMFYTRDKTKKLKYHSNADLYESPAASWRDTLSCVMAPDVPKAQDLPEVCGEIMLEYSKEVMKLAELMFEILSEALGLSPNHLKEMDCAKGLWMLCHCFPPCPEPNRTFGGAQHTDRSFLTILLNDNNGGLQVLYDGYWIDVPPNPEALIFNVGDFLQLISNDKFVSMEHRILANGGEEPRISVACFFVHTFTSPSSRVYGPIKELLSELNPPKYRDTTSESSNHYVARKPNGNSSLDHLRI

SEQ ID NO: 40798 - protein, 359 aa, Arabidopsis thaliana
  peptide (1)..(359): Ceres Seq. ID no. 12580436
  misc_feature (207)..(307): Pfam Name: 2OG-Fe(II) oxygenase superfamily Pfam Description: 2OG-Fe(II) oxygenase superfamily
  misc_feature (5)..(289): Homolog of NCBI NO: 25406927 NR Description: protein F12K11.6 [imported] - Arabidopsis
  misc_feature (274)..(359): Homolog of NCBI NO: 25406927 NR Description: protein F12K11.6 [imported] - Arabidopsis
  misc_feature (1)..(283): Homolog of NCBI NO: 25406927 NR Description: protein F12K11.6 [imported] - Arabidopsis
  misc_feature (5)..(359): Homolog of NCBI NO: 15221545 NR Description: oxidoreductase, putative
  misc_feature (5)..(359): Homolog of NCBI NO: 13878119 NR Description: putative oxidoreductase [Arabidopsis thaliana]
  misc_feature (1)..(353): Homolog of NCBI NO: 15221544 NR Description: oxidoreductase, putative
  misc_feature (6)..(359): Homolog of NCBI NO: 30679748 NR Description: 2-oxoglutarate-dependent dioxygenase, putative
  misc_feature (1)..(359): Homolog of NCBI NO: 15224576 NR Description: putative dioxygenase; protein id: At2g30840.1
  misc_feature (1)..(359): Homolog of NCBI NO: 15224575 NR Description: putative dioxygenase; protein id: At2g30830.1
  misc_feature (1)..(359): Homolog of NCBI NO: 15224730 NR Description: putative dioxygenase
MAENYDRASELKAFDEMKIGVKGLVDAGVTKVPRIFHNPHVNVANPKPTSTVVMIPTIDLGGVFESTVVRESVVAKVKDAMEKFGFFQAINHGVPLDVMEKMINGIRRFHDQDPEVRKMFYTRDKTKKLKYHSNADLYESPAASWRDTLSCVMAPDVPKAQDLPEVCGEIMLEYSKEVMKLAELMFEILSEALGLSPNHLKEMDCAKGLWMLCHCFPPCPEPNRTFGGAQHTDRSFLTILLNDNNGGLQVLYDGYWIDVPPNPEALIFNVGDFLQLISNDKFVSMEHRILANGGEEPRISVACFFVHTFTSPSSRVYGPIKELLSELNPPKYRDTTSESSNHYVARKPNGNSSLDHLRI

SEQ ID NO: 40799 - protein, 343 aa, Arabidopsis thaliana
  peptide (1)..(343): Ceres Seq. ID no. 12580437
  misc_feature (191)..(291): Pfam Name: 2OG-Fe(II) oxygenase superfamily Pfam Description: 2OG-Fe(II) oxygenase superfamily
  misc_feature (1)..(273): Homolog of NCBI NO: 25406927 NR Description: protein F12K11.6 [imported] - Arabidopsis
  misc_feature (258)..(343): Homolog of NCBI NO: 25406927 NR Description: protein F12K11.6 [imported] - Arabidopsis
  misc_feature (1)..(267): Homolog of NCBI NO: 25406927 NR Description: protein F12K11.6 [imported] - Arabidopsis
  misc_feature (1)..(343): Homolog of NCBI NO: 15221545 NR Description: oxidoreductase, putative
  misc_feature (1)..(343): Homolog of NCBI NO: 13878119 NR Description: putative oxidoreductase [Arabidopsis thaliana]
  misc_feature (1)..(337): Homolog of NCBI NO: 15221544 NR Description: oxidoreductase, putative
  misc_feature (1)..(343): Homolog of NCBI NO: 30679748 NR Description: 2-oxoglutarate-dependent dioxygenase, putative
  misc_feature (1)..(343): Homolog of NCBI NO: 15224576 NR Description: putative dioxygenase; protein id: At2g30840.1
  misc_feature (1)..(343): Homolog of NCBI NO: 15224575 NR Description: putative dioxygenase; protein id: At2g30830.1
  misc_feature (1)..(343): Homolog of NCBI NO: 15224730 NR Description: putative dioxygenase
MKIGVKGLVDAGVTKVPRIFHNPHVNVANPKPTSTVVMIPTIDLGGVFESTVVRESVVAKVKDAMEKFGFFQAINHGVPLDVMEKMINGIRRFHDQDPEVRKMFYTRDKTKKLKYHSNADLYESPAASWRDTLSCVMAPDVPKAQDLPEVCGEIMLEYSKEVMKLAELMFEILSEALGLSPNHLKEMDCAKGLWMLCHCFPPCPEPNRTFGGAQHTDRSFLTILLNDNNGGLQVLYDGYWIDVPPNPEALIFNVGDFLQLISNDKFVSMEHRILANGGEEPRISVACFFVHTFTSPSSRVYGPIKELLSELNPPKYRDTTSESSNHYVARKPNGNSSLDHLRI

SEQ ID NO: 40800 - DNA, 1832 bp, Arabidopsis thaliana
  misc_feature (1)..(1832): Ceres Seq. ID no. 12328138
  misc_feature: MA Experiment ID: 108462 Result: Up-regulated in Transcription
  misc_feature: MA Experiment 108462 PARAMETER Experiment Name: At_Germinating_Seeds_cDNA_P Parameter: Age (day) Value: 2 vs. 0
  misc_feature: MA Experiment 108462 PARAMETER Experiment Name: At_Germinating_Seeds_cDNA_P Parameter: Tissue Value: Germinating Seeds
  misc_feature: MA Experiment ID: 108463 Result: Up-regulated in Transcription
  misc_feature: MA Experiment 108463 PARAMETER Experiment Name: At_Germinating_Seeds_cDNA_P Parameter: Age (day) Value: 3 vs. 0
  misc_feature: MA Experiment 108463 PARAMETER Experiment Name: At_Germinating_Seeds_cDNA_P Parameter: Tissue Value: Germinating Seeds
  misc_feature: MA Experiment ID: 20000030 Result: Up-regulated in Transcription
  misc_feature: MA Experiment 20000030 PARAMETER Experiment Name: At_CS6630_Roots_cDNA_P Parameter: Plant Line Value: CS6630 vs. WS
  misc_feature: MA Experiment 20000030 PARAMETER Experiment Name: At_CS6630_Roots_cDNA_P Parameter: Tissue Value: Roots
  misc_feature: MA Experiment ID: 20000169 Result: Up-regulated in Transcription
  misc_feature: MA Experiment 20000169 PARAMETER Experiment Name: At_100uM_ABA_P Parameter: Age (day) Value: 14
  misc_feature: MA Experiment 20000169 PARAMETER Experiment Name: At_100uM_ABA_P Parameter: Organism Value: A. thaliana
  misc_feature: MA Experiment 20000169 PARAMETER Experiment Name: At_100uM_ABA_P Parameter: Plant Line Value: WS
  misc_feature: MA Experiment 20000169 PARAMETER Experiment Name: At_100uM_ABA_P Parameter: Timepoint (hr) Value: 6
  misc_feature: MA Experiment 20000169 PARAMETER Experiment Name: At_100uM_ABA_P Parameter: Tissue Value: Aerial
  misc_feature: MA Experiment 20000169 PARAMETER Experiment Name: At_100uM_ABA_P Parameter: Treatment Value: 100uM ABA vs. No Treatment
  misc_feature: MA Experiment ID: 20000184 Result: Up-regulated in Transcription
  misc_feature: MA Experiment 20000184 PARAMETER Experiment Name: At_Shoots__P Parameter: Age (day) Value: 7
  misc_feature: MA Experiment 20000184 PARAMETER Experiment Name: At_Shoots__P Parameter: Tissue Value: Shoots vs. Whole Plant
  misc_feature: MA Experiment ID: 20000224 Result: Up-regulated in Transcription
  misc_feature: MA Experiment ID: 20000227 Result: Down-regulated in Transcription
  misc_feature: MA Experiment 20000227 PARAMETER Experiment Name: At_Root-Tips-vs-Tops_P Parameter: Tissue Value: Root Tips vs. Root Tops
  misc_feature: MA Experiment ID: 20000438 Result: Up-regulated in Transcription
  misc_feature: MA Experiment 20000438 PARAMETER Experiment Name: At_Shoots__P Parameter: Age (day) Value: 14
  misc_feature: MA Experiment 20000438 PARAMETER Experiment Name: At_Shoots__P Parameter: Tissue Value: Shoots vs. Whole Plant
  misc_feature: MA Experiment ID: 20001248 Result: Down-regulated in Transcription
  misc_feature: MA Experiment 20001248 PARAMETER Experiment Name: At_Far-red-induction_P Parameter: Age (day) Value: 7
  misc_feature: MA Experiment 20001248 PARAMETER Experiment Name: At_Far-red-induction_P Parameter: Light Value: Far-red vs. White
  misc_feature: MA Experiment 20001248 PARAMETER Experiment Name: At_Far-red-induction_P Parameter: Organism Value: A. thaliana
  misc_feature: MA Experiment 20001248 PARAMETER Experiment Name: At_Far-red-induction_P Parameter: Plant Line Value: Columbia
  misc_feature: MA Experiment 20001248 PARAMETER Experiment Name: At_Far-red-induction_P Parameter: Timepoint (hr) Value: 4
  misc_feature: MA Experiment 20001248 PARAMETER Experiment Name: At_Far-red-induction_P Parameter: Tissue Value: Whole Plant
  misc_feature: MA Experiment ID: 20001554 Result: Up-regulated in Transcription
  misc_feature: MA Experiment 20001554 PARAMETER Experiment Name: At_Drought_Soil_Dry_P Parameter: Age (day) Value: 21
  misc_feature: MA Experiment 20001554 PARAMETER Experiment Name: At_Drought_Soil_Dry_P Parameter: Organism Value: A. thaliana
  misc_feature: MA Experiment 20001554 PARAMETER Experiment Name: At_Drought_Soil_Dry_P Parameter: Plant Line Value: WS
  misc_feature: MA Experiment 20001554 PARAMETER Experiment Name: At_Drought_Soil_Dry_P Parameter: Post Timepoint (hr) Value: None
  misc_feature: MA Experiment 20001554 PARAMETER Experiment Name: At_Drought_Soil_Dry_P Parameter: Post-Treatment Value: None
  misc_feature: MA Experiment 20001554 PARAMETER Experiment Name: At_Drought_Soil_Dry_P Parameter: Timepoint (day) Value: 7
  misc_feature: MA Experiment 20001554 PARAMETER Experiment Name: At_Drought_Soil_Dry_P Parameter: Treatment Value: Drought vs. No Drought
  misc_feature: MA Experiment ID: 20001556 Result: Up-regulated in Transcription
  misc_feature: MA Experiment 20001556 PARAMETER Experiment Name: At_Drought_Soil_Dry_P Parameter: Age (day) Value: 26
  misc_feature: MA Experiment 20001556 PARAMETER Experiment Name: At_Drought_Soil_Dry_P Parameter: Organism Value: A. thaliana
  misc_feature: MA Experiment 20001556 PARAMETER Experiment Name: At_Drought_Soil_Dry_P Parameter: Plant Line Value: WS
  misc_feature: MA Experiment 20001556 PARAMETER Experiment Name: At_Drought_Soil_Dry_P Parameter: Post Timepoint (hr) Value: None
  misc_feature: MA Experiment 20001556 PARAMETER Experiment Name: At_Drought_Soil_Dry_P Parameter: Post-Treatment Value: None
  misc_feature: MA Experiment 20001556 PARAMETER Experiment Name: At_Drought_Soil_Dry_P Parameter: Timepoint (day) Value: 12
  misc_feature: MA Experiment 20001556 PARAMETER Experiment Name: At_Drought_Soil_Dry_P Parameter: Treatment Value: Drought vs. No Drought
  misc_feature: MA Experiment ID: 20001559 Result: Up-regulated in Transcription
  misc_feature: MA Experiment 20001559 PARAMETER Experiment Name: At_Drought_Soil_Dry_P Parameter: Age (day) Value: 28
  misc_feature: MA Experiment 20001559 PARAMETER Experiment Name: At_Drought_Soil_Dry_P Parameter: Organism Value: A. thaliana
  misc_feature: MA Experiment 20001559 PARAMETER Experiment Name: At_Drought_Soil_Dry_P Parameter: Plant Line Value: WS
  misc_feature: MA Experiment 20001559 PARAMETER Experiment Name: At_Drought_Soil_Dry_P Parameter: Post Timepoint (hr) Value: 29
  misc_feature: MA Experiment 20001559 PARAMETER Experiment Name: At_Drought_Soil_Dry_P Parameter: Post-Treatment Value: Re-Water vs. No Drought
  misc_feature: MA Experiment 20001559 PARAMETER Experiment Name: At_Drought_Soil_Dry_P Parameter: Timepoint (day) Value: 14
  misc_feature: MA Experiment 20001559 PARAMETER Experiment Name: At_Drought_Soil_Dry_P Parameter: Treatment Value: Drought vs. No Drought
  misc_feature: MA Experiment ID: 20001904 Result: Up-regulated in Transcription
  misc_feature: MA Experiment 20001904 PARAMETER Experiment Name: At_Drought_Reproduction_P Parameter: Age (day) Value: 37
  misc_feature: MA Experiment 20001904 PARAMETER Experiment Name: At_Drought_Reproduction_P Parameter: Organism Value: A. thaliana
  misc_feature: MA Experiment 20001904 PARAMETER Experiment Name: At_Drought_Reproduction_P Parameter: Plant Line Value: WS
  misc_feature: MA Experiment 20001904 PARAMETER Experiment Name: At_Drought_Reproduction_P Parameter: Timepoint (day) Value: 7
  misc_feature: MA Experiment 20001904 PARAMETER Experiment Name: At_Drought_Reproduction_P Parameter: Tissue Value: Rosettes
  misc_feature: MA Experiment 20001904 PARAMETER Experiment Name: At_Drought_Reproduction_P Parameter: Treatment Value: Drought vs. No Drought
  misc_feature: MA Experiment ID: 20001911 Result: Up-regulated in Transcription
  misc_feature: MA Experiment 20001911 PARAMETER Experiment Name: At_Drought_Reproduction_P Parameter: Age (day) Value: 40
  misc_feature: MA Experiment 20001911 PARAMETER Experiment Name: At_Drought_Reproduction_P Parameter: Organism Value: A. thaliana
  misc_feature: MA Experiment 20001911 PARAMETER Experiment Name: At_Drought_Reproduction_P Parameter: Plant Line Value: WS
  misc_feature: MA Experiment 20001911 PARAMETER Experiment Name: At_Drought_Reproduction_P Parameter: Timepoint (day) Value: 10
  misc_feature: MA Experiment 20001911 PARAMETER Experiment Name: At_Drought_Reproduction_P Parameter: Tissue Value: Flowers
  misc_feature: MA Experiment 20001911 PARAMETER Experiment Name: At_Drought_Reproduction_P Parameter: Treatment Value: Drought vs. No Drought
acacttcgacggcgatttcgtagcgaaatctccgtctccttcctttaaccccatctcttcttcttcttcttttgctttctcattcgaattaacttcatctctttgatgggattcagcttgttttctcaaatgttagttttttcttcatttgttatgcagcaagtattaaaaaggtgaagactttatcatcctctcagcggcttggatgctaactgcaaactaatgggggatcttgtcaagagacagttttgattgttgatgtacatcaaagcaatcatgaacagacacaggcttctctcagcggcaacagatgaatgcaataaaaaacttggtcaagcttgctcttcttctttatctccagtccataactttctgaatgtccagccagaacaccggaaaactcctttcataaggtcacaatctccagattcacctggtcagctatggccaaagaatagttctcagagcaccttctctcggtcttccaccttttgcacaaacctctacttgtcatcatcttcaacctctgagactcagaaacatctaggaaacagtcttcctttcctccctgatccctcctcttacacccactcagcttctggtgtggagtctgcaagatctccatctattttcactgaggatttgggcaatcaatgtgatggaggcaactccgggtcgcttctcaaagacttccttaatctttctggagatgcttgttccgatggcgattttcatgattttggctgttcgaatgacagctattgcttatcagatcaaatggaattacagttcctgtctgatgaacttgagctggctatcacagaccgcgctgaaactcccaggcttgatgagatctatgaaacgccattggcgtcaaatccagtgacgagattgagtccaagccaaagctgtgttcctggagcaatgtctgtagacgtagtttcatctcacccttctccgggatcagcagccaatcaaaagtcgagaatgagatggactcctgagctccacgagtcttttgtaaaggcggtgatcaaacttgaagggcctgaaaaggccactccaaaggctgttaagaagctcatgaatgttgagggcttgacgatctatcatgtaaaaagccacttgcagaagtatagactagccaagtatatgccagagaaaaaagaagagaaaaggactgataactcagaagaaaagaaactggctttgagtaagagtgaagctgacgagaagaagaaaggggccatacaattaactgaagcactgcgtatgcagatggaagttcagaagcaattgcatgaacagctggaggtgcaacgggtgcttcagctacgaattgaagagcatgctaaatacttggaaaagatgttggaagaacaacgcaaaacaggaaggtggatttcttcttcttcgcagacagtgttatcacctagtgatgactctataccagattctcaaaacatgtccaaaaccaaagcatcttcgcctcagccgccattacctgcagagaacaaagcgtcggaaaccgaagacgataaatgtgaaagccctcagaaacgtcgcaggcttgagaacatagctgaatctgaagatcctaagaggtagtaagattcttcaagtatgtaaatatggtccgttttgtgtaatttagtgagagagagagtgtcactcaaaatatatgtttgtaatgtagatctttgtcagaaacgtgtaaacttattacggatattgaggatgtcactgccttcactgtgagaaaagaatctttaattctgtgtttgtgtgtgtataggtcactggttagtgagaaaactgaagagttcactttc

SEQ ID NO: 40801 - protein, 449 aa, Arabidopsis thaliana
  peptide (1)..(449): Ceres Seq. ID no. 12328139
  misc_feature (243)..(294): Pfam Name: Myb-like DNA-binding domain Pfam Description: Myb-like DNA-binding domain
  misc_feature (234)..(443): Homolog of NCBI NO: 15226170 NR Description: transfactor-like protein
  misc_feature (67)..(413): Homolog of NCBI NO: 6942190 NR Description: CDPK substrate protein 1; CSP1 [Mesembryanthemum
  misc_feature (59)..(443): Homolog of NCBI NO: 15229298 NR Description: transfactor, putative; protein id: At3g04450.1
  misc_feature (59)..(443): Homolog of NCBI NO: 26452281 NR Description: putative transfactor [Arabidopsis thaliana]
  misc_feature (73)..(440): Homolog of NCBI NO: 7487685 NR Description: hypothetical protein T5F17.60 - Arabidopsis
  misc_feature (73)..(440): Homolog of NCBI NO: 22329004 NR Description: putative protein
  misc_feature (183)..(445): Homolog of NCBI NO: 4519671 NR Description: transfactor [Nicotiana tabacum]
  misc_feature (7)..(449): Homolog of NCBI NO: 21536970 NR Description: transfactor-like protein [Arabidopsis thaliana]
  misc_feature (1)..(449): Homolog of NCBI NO: 18399836 NR Description: expressed protein
  misc_feature (1)..(449): Homolog of NCBI NO: 15795136 NR Description: transfactor-like protein [Arabidopsis thaliana]
MYIKAIMNRHRLLSAATDECNKKLGQACSSSLSPVHNFLNVQPEHRKTPFIRSQSPDSPGQLWPKNSSQSTFSRSSTFCTNLYLSSSSTSETQKHLGNSLPFLPDPSSYTHSASGVESARSPSIFTEDLGNQCDGGNSGSLLKDFLNLSGDACSDGDFHDFGCSNDSYCLSDQMELQFLSDELELAITDRAETPRLDEIYETPLASNPVTRLSPSQSCVPGAMSVDVVSSHPSPGSAANQKSRMRWTPELHESFVKAVIKLEGPEKATPKAVKKLMNVEGLTIYHVKSHLQKYRLAKYMPEKKEEKRTDNSEEKKLALSKSEADEKKKGAIQLTEALRMQMEVQKQLHEQLEVQRVLQLRIEEHAKYLEKMLEEQRKTGRWISSSSQTVLSPSDDSIPDSQNMSKTKASSPQPPLPAENKASETEDDKCESPQKRRRLENIAESEDPKR

SEQ ID NO: 40802 - protein, 443 aa, Arabidopsis thaliana
  peptide (1)..(443): Ceres Seq. ID no. 12328140
  misc_feature (237)..(288): Pfam Name: Myb-like DNA-binding domain Pfam Description: Myb-like DNA-binding domain
  misc_feature (228)..(437): Homolog of NCBI NO: 15226170 NR Description: transfactor-like protein
  misc_feature (61)..(407): Homolog of NCBI NO: 6942190 NR Description: CDPK substrate protein 1; CSP1 [Mesembryanthemum
  misc_feature (53)..(437): Homolog of NCBI NO: 15229298 NR Description: transfactor, putative; protein id: At3g04450.1
  misc_feature (53)..(437): Homolog of NCBI NO: 26452281 NR Description: putative transfactor [Arabidopsis thaliana]
  misc_feature (67)..(434): Homolog of NCBI NO: 7487685 NR Description: hypothetical protein T5F17.60 - Arabidopsis
  misc_feature (67)..(434): Homolog of NCBI NO: 22329004 NR Description: putative protein
  misc_feature (177)..(439): Homolog of NCBI NO: 4519671 NR Description: transfactor [Nicotiana tabacum]
  misc_feature (1)..(443): Homolog of NCBI NO: 21536970 NR Description: transfactor-like protein [Arabidopsis thaliana]
  misc_feature (1)..(443): Homolog of NCBI NO: 18399836 NR Description: expressed protein
  misc_feature (1)..(443): Homolog of NCBI NO: 15795136 NR Description: transfactor-like protein [Arabidopsis thaliana]
MNRHRLLSAATDECNKKLGQACSSSLSPVHNFLNVQPEHRKTPFIRSQSPDSPGQLWPKNSSQSTFSRSSTFCTNLYLSSSSTSETQKHLGNSLPFLPDPSSYTHSASGVESARSPSIFTEDLGNQCDGGNSGSLLKDFLNLSGDACSDGDFHDFGCSNDSYCLSDQMELQFLSDELELAITDRAETPRLDEIYETPLASNPVTRLSPSQSCVPGAMSVDVVSSHPSPGSAANQKSRMRWTPELHESFVKAVIKLEGPEKATPKAVKKLMNVEGLTIYHVKSHLQKYRLAKYMPEKKEEKRTDNSEEKKLALSKSEADEKKKGAIQLTEALRMQMEVQKQLHEQLEVQRVLQLRIEEHAKYLEKMLEEQRKTGRWISSSSQTVLSPSDDSIPDSQNMSKTKASSPQPPLPAENKASETEDDKCESPQKRRRLENIAESEDPKR

SEQ ID NO: 40803 - protein, 276 aa, Arabidopsis thaliana
  peptide (1)..(276): Ceres Seq. ID no. 12328141
  misc_feature (70)..(121): Pfam Name: Myb-like DNA-binding domain Pfam Description: Myb-like DNA-binding domain
  misc_feature (61)..(270): Homolog of NCBI NO: 15226170 NR Description: transfactor-like protein
  misc_feature (1)..(240): Homolog of NCBI NO: 6942190 NR Description: CDPK substrate protein 1; CSP1 [Mesembryanthemum
  misc_feature (1)..(270): Homolog of NCBI NO: 15229298 NR Description: transfactor, putative; protein id: At3g04450.1
  misc_feature (1)..(270): Homolog of NCBI NO: 26452281 NR Description: putative transfactor [Arabidopsis thaliana]
  misc_feature (1)..(267): Homolog of NCBI NO: 7487685 NR Description: hypothetical protein T5F17.60 - Arabidopsis
  misc_feature (1)..(267): Homolog of NCBI NO: 22329004 NR Description: putative protein
  misc_feature (10)..(272): Homolog of NCBI NO: 4519671 NR Description: transfactor [Nicotiana tabacum]
  misc_feature (1)..(276): Homolog of NCBI NO: 21536970 NR Description: transfactor-like protein [Arabidopsis thaliana]
  misc_feature (1)..(276): Homolog of NCBI NO: 18399836 NR Description: expressed protein
  misc_feature (1)..(276): Homolog of NCBI NO: 15795136 NR Description: transfactor-like protein [Arabidopsis thaliana]
MELQFLSDELELAITDRAETPRLDEIYETPLASNPVTRLSPSQSCVPGAMSVDVVSSHPSPGSAANQKSRMRWTPELHESFVKAVIKLEGPEKATPKAVKKLMNVEGLTIYHVKSHLQKYRLAKYMPEKKEEKRTDNSEEKKLALSKSEADEKKKGAIQLTEALRMQMEVQKQLHEQLEVQRVLQLRIEEHAKYLEKMLEEQRKTGRWISSSSQTVLSPSDDSIPDSQNMSKTKASSPQPPLPAENKASETEDDKCESPQKRRRLENIAESEDPKR

SEQ ID NO: 40804 - DNA, 1159 bp, Arabidopsis thaliana
  misc_feature (1)..(1159): Ceres Seq. ID no. 13488734
  misc_feature: MA Experiment ID: 108434 Result: Up-regulated in Transcription
  misc_feature: MA Experiment 108434 PARAMETER Experiment Name: At_Root_Tips_cDNA_P Parameter: Tissue Value: Root Tips
  misc_feature: MA Experiment ID: 108435 Result: Up-regulated in Transcription
  misc_feature: MA Experiment 108435 PARAMETER Experiment Name: At_stm_Mutants_cDNA_P Parameter: Plant Line Value: wt Landsburg vs stm
  misc_feature: MA Experiment 108435 PARAMETER Experiment Name: At_stm_Mutants_cDNA_P Parameter: Tissue Value: Shoot Apical Meristem Region
  misc_feature: MA Experiment ID: 108461 Result: Down-regulated in Transcription
  misc_feature: MA Experiment 108461 PARAMETER Experiment Name: At_Germinating_Seeds_cDNA_P Parameter: Age (day) Value: 1 vs. 0
  misc_feature: MA Experiment 108461 PARAMETER Experiment Name: At_Germinating_Seeds_cDNA_P Parameter: Tissue Value: Germinating Seeds
  misc_feature: MA Experiment ID: 108462 Result: Down-regulated in Transcription
  misc_feature: MA Experiment 108462 PARAMETER Experiment Name: At_Germinating_Seeds_cDNA_P Parameter: Age (day) Value: 2 vs. 0
  misc_feature: MA Experiment 108462 PARAMETER Experiment Name: At_Germinating_Seeds_cDNA_P Parameter: Tissue Value: Germinating Seeds
  misc_feature: MA Experiment ID: 108463 Result: Down-regulated in Transcription
  misc_feature: MA Experiment 108463 PARAMETER Experiment Name: At_Germinating_Seeds_cDNA_P Parameter: Age (day) Value: 3 vs. 0
  misc_feature: MA Experiment 108463 PARAMETER Experiment Name: At_Germinating_Seeds_cDNA_P Parameter: Tissue Value: Germinating Seeds
  misc_feature: MA Experiment ID: 108464 Result: Down-regulated in Transcription
  misc_feature: MA Experiment 108464 PARAMETER Experiment Name: At_Germinating_Seeds_cDNA_P Parameter: Age (day) Value: 4 vs. 0
  misc_feature: MA Experiment 108464 PARAMETER Experiment Name: At_Germinating_Seeds_cDNA_P Parameter: Tissue Value: Germinating Seeds
  misc_feature: MA Experiment ID: 108572 Result: Down-regulated in Transcription
  misc_feature: MA Experiment 108572 PARAMETER Experiment Name: At_Drought_cDNA_P Parameter: Timepoint (hr) Value: 1
  misc_feature: MA Experiment 108572 PARAMETER Experiment Name: At_Drought_cDNA_P Parameter: Tissue Value: Aerial
  misc_feature: MA Experiment 108572 PARAMETER Experiment Name: At_Drought_cDNA_P Parameter: Treatment Value: Drought vs. No Drought
  misc_feature: MA Experiment ID: 108573 Result: Down-regulated in Transcription
  misc_feature: MA Experiment 108573 PARAMETER Experiment Name: At_Drought_cDNA_P Parameter: Timepoint (hr) Value: 6
  misc_feature: MA Experiment 108573 PARAMETER Experiment Name: At_Drought_cDNA_P Parameter: Tissue Value: Aerial
  misc_feature: MA Experiment 108573 PARAMETER Experiment Name: At_Drought_cDNA_P Parameter: Treatment Value: Drought vs. No Drought
  misc_feature: MA Experiment ID: 108579 Result: Up-regulated in Transcription
  misc_feature: MA Experiment 108579 PARAMETER Experiment Name: At_4deg_Cold_cDNA_P Parameter: Temperature (deg C) Value: 4 vs. 22
  misc_feature: MA Experiment 108579 PARAMETER Experiment Name: At_4deg_Cold_cDNA_P Parameter: Timepoint (hr) Value: 6
  misc_feature: MA Experiment 108579 PARAMETER Experiment Name: At_4deg_Cold_cDNA_P Parameter: Tissue Value: Aerial
  misc_feature: MA Experiment ID: 20000089 Result: Up-regulated in Transcription
  misc_feature: MA Experiment ID: 20000090 Result: Up-regulated in Transcription
  misc_feature: MA Experiment ID: 20000224 Result: Up-regulated in Transcription
atctaagaagaggattcaggttgttgtaagtcctccaggcgcaagagttgagttcgtcggaactaattacacaggcgagcaagctgctatgcagacgaatacttatagagttggtgtttttaatagagaggctaaaactttgaggattcttcctgttgctcacaataagataatcagattggagcctagagttaaagctcaagaaacaaatgaggaagaagcttcaggaagtgctgtcgtcaaagaacttgaagaactaaaaacaggagaacgcgatcgttataatacaaaaaaagctgttactcgggataagaagaagcgtgccttatatatgggagatgatgctgcgactcagaaggtccttgatgggaaactaagtgagttagatgttaacacagctgctcttgaaggcaccagttctactgttgcacgcaacattcctccttacaataccgctgcaacgactgcaaatgaagcttatcccttagaaaagatcattgaaaagggggattggagttttcttgaagatatttactgacttctgcaacaggaaactgaagcagcaactgaggcttaccctgtatttgtccgcaacagattgtacagattgcgagatatcaaggacgatatgaaaaagcagacggtttgtggtgctgcaacgcttctcacccatctggttaagttcaaggacagaaactcaatgaatggttacgattccgctaaagaccacaagatgccagacatcttccgtcaaaaattcaacagcatgttcaaggattctgaatcagagaggatacctgttgacaagatcaaccttctgataagctacgttcttgtgctatcccttcacgtggataatttcatgaccgatccagaagacatagcaaaagatctgaggacaagcacagttgagctgaggaaacattttctacagcttggctgcaaattcctgaagcagaattctactacggttgctaccttaccgacccctctcaatttcccggaggttaaccggaggcgcagggcacgaaagtgatgacgattttgttctatctttacatatttgctgctattttaatgatatttctttgacggtctgttgagatattataaattgttctgtttcttgggtttaatgatatatgatgttttggcattt

SEQ ID NO: 40805 - protein, 178 aa, Arabidopsis thaliana
  peptide (1)..(178): Ceres Seq. ID no. 13488735
  misc_feature (15)..(178): Homolog of NCBI NO: 19115294 NR Description: probable DNA-directed RNA polymerase I 49 kd
  misc_feature (1)..(178): Homolog of NCBI NO: 15231416 NR Description: expressed protein [Arabidopsis thaliana]
SKKRIQVVVSPPGARVEFVGTNYTGEQAAMQTNTYRVGVFNREAKTLRILPVAHNKIIRLEPRVKAQETNEEEASGSAVVKELEELKTGERDRYNTKKAVTRDKKKRALYMGDDAATQKVLDGKLSELDVNTAALEGTSSTVARNIPPYNTAATTANEAYPLEKIIEKGDWSFLEDIY

SEQ ID NO: 40806 - protein, 149 aa, Arabidopsis thaliana
  peptide (1)..(149): Ceres Seq. ID no. 13488736
  misc_feature (1)..(149): Homolog of NCBI NO: 19115294 NR Description: probable DNA-directed RNA polymerase I 49 kd
  misc_feature (1)..(149): Homolog of NCBI NO: 15231416 NR Description: expressed protein [Arabidopsis thaliana]
MQTNTYRVGVFNREAKTLRILPVAHNKIIRLEPRVKAQETNEEEASGSAVVKELEELKTGERDRYNTKKAVTRDKKKRALYMGDDAATQKVLDGKLSELDVNTAALEGTSSTVARNIPPYNTAATTANEAYPLEKIIEKGDWSFLEDIY

SEQ ID NO: 40807 - protein, 135 aa, Arabidopsis thaliana
  peptide (1)..(135): Ceres Seq. ID no. 13488737
  misc_feature (1)..(133): Homolog of NCBI NO: 19115294 NR Description: probable DNA-directed RNA polymerase I 49 kd
  misc_feature (1)..(135): Homolog of NCBI NO: 15231416 NR Description: expressed protein [Arabidopsis thaliana]
MKKQTVCGAATLLTHLVKFKDRNSMNGYDSAKDHKMPDIFRQKFNSMFKDSESERIPVDKINLLISYVLVLSLHVDNFMTDPEDIAKDLRTSTVELRKHFLQLGCKFLKQNSTTVATLPTPLNFPEVNRRRRARK

SEQ ID NO: 40808 - DNA, 884 bp, Arabidopsis thaliana; identical to SEQ ID NO: 26495
  misc_feature (1)..(884): Ceres Seq. ID no. 12422963
  misc_feature: MA Experiment ID: 108434 Result: Down-regulated in Transcription
  misc_feature: MA Experiment 108434 PARAMETER Experiment Name: At_Root_Tips_cDNA_P Parameter: Tissue Value: Root Tips
  misc_feature: MA Experiment ID: 108488 Result: Down-regulated in Transcription
  misc_feature: MA Experiment ID: 108585 Result: Up-regulated in Transcription
  misc_feature: MA Experiment 108585 PARAMETER Experiment Name: At_5mM_NaNP_cDNA_P Parameter: Timepoint (hr) Value: 6
  misc_feature: MA Experiment 108585 PARAMETER Experiment Name: At_5mM_NaNP_cDNA_P Parameter: Tissue Value: Aerial
  misc_feature: MA Experiment 108585 PARAMETER Experiment Name: At_5mM_NaNP_cDNA_P Parameter: Treatment Value: null
  misc_feature: MA Experiment ID: 108595 Result: Up-regulated in Transcription
  misc_feature: MA Experiment 108595 PARAMETER Experiment Name: At_Ler-pi_Ovule_cDNA_P Parameter: Plant Line Value: null
  misc_feature: MA Experiment ID: 20000179 Result: Up-regulated in Transcription
  misc_feature: MA Experiment 20000179 PARAMETER Experiment Name: At_Germinating_Seeds_P Parameter: Age (hr) Value: 6 vs. 0
  misc_feature: MA Experiment 20000179 PARAMETER Experiment Name: At_Germinating_Seeds_P Parameter: Tissue Value: Germinating Seeds
  misc_feature: MA Experiment ID: 20000180 Result: Up-regulated in Transcription
  misc_feature: MA Experiment 20000180 PARAMETER Experiment Name: At_Germinating_Seeds_P Parameter: Age (hr) Value: 24 vs. 0
  misc_feature: MA Experiment 20000180 PARAMETER Experiment Name: At_Germinating_Seeds_P Parameter: Tissue Value: Germinating Seeds
  misc_feature: MA Experiment ID: 20000227 Result: Down-regulated in Transcription
  misc_feature: MA Experiment 20000227 PARAMETER Experiment Name: At_Root-Tips-vs-Tops_P Parameter: Tissue Value: Root Tips vs. Root Tops
  misc_feature: MA Experiment ID: 20000437 Result: Up-regulated in Transcription
  misc_feature: MA Experiment 20000437 PARAMETER Experiment Name: At_Drought_P Parameter: Age (day) Value: 8
  misc_feature: MA Experiment 20000437 PARAMETER Experiment Name: At_Drought_P Parameter: Organism Value: A. thaliana
  misc_feature: MA Experiment 20000437 PARAMETER Experiment Name: At_Drought_P Parameter: Plant Line Value: WS
  misc_feature: MA Experiment 20000437 PARAMETER Experiment Name: At_Drought_P Parameter: Timepoint (hr) Value: 24
  misc_feature: MA Experiment 20000437 PARAMETER Experiment Name: At_Drought_P Parameter: Tissue Value: Whole Plant
  misc_feature: MA Experiment 20000437 PARAMETER Experiment Name: At_Drought_P Parameter: Treatment Value: Drought vs. No Drought
  misc_feature: MA Experiment ID: 20001905 Result: Up-regulated in Transcription
  misc_feature: MA Experiment 20001905 PARAMETER Experiment Name: At_Drought_Reproduction_P Parameter: Age (day) Value: 40
  misc_feature: MA Experiment 20001905 PARAMETER Experiment Name: At_Drought_Reproduction_P Parameter: Organism Value: A. thaliana
  misc_feature: MA Experiment 20001905 PARAMETER Experiment Name: At_Drought_Reproduction_P Parameter: Plant Line Value: WS
  misc_feature: MA Experiment 20001905 PARAMETER Experiment Name: At_Drought_Reproduction_P Parameter: Timepoint (day) Value: 10
  misc_feature: MA Experiment 20001905 PARAMETER Experiment Name: At_Drought_Reproduction_P Parameter: Tissue Value: Rosettes
  misc_feature: MA Experiment 20001905 PARAMETER Experiment Name: At_Drought_Reproduction_P Parameter: Treatment Value: Drought vs. No Drought

SEQ ID NO: 40809 - protein, 245 aa, Arabidopsis thaliana; identical to SEQ ID NO: 26496
  peptide (1)..(245): Ceres Seq. ID no. 12422964
  misc_feature (29)..(227): Homolog of NCBI NO: 18390939 NR Description: expressed protein
  misc_feature (8)..(229): Homolog of NCBI NO: 40539036 NR Description: putative prenylated rab acceptor protein
  misc_feature (30)..(245): Homolog of NCBI NO: 15240698 NR Description: putative protein
  misc_feature (28)..(242): Homolog of NCBI NO: 15241022 NR Description: putative protein; protein id: At5g01640.1
  misc_feature (30)..(235): Homolog of NCBI NO: 15224494 NR Description: unknown protein; protein id: At2g38360.1
  misc_feature (29)..(245): Homolog of NCBI NO: 15226664 NR Description: unknown protein; protein id: At2g40380.1
  misc_feature (30)..(245): Homolog of NCBI NO: 15450978 NR Description: putative protein [Arabidopsis thaliana]
  misc_feature (30)..(245): Homolog of NCBI NO: 15228824 NR Description: putative protein
  misc_feature (30)..(245): Homolog of NCBI NO: 18072825 NR Description: prenylated Rab receptor 2 [Arabidopsis thaliana]
  misc_feature (29)..(245): Homolog of NCBI NO: 15239101 NR Description: putative protein; protein id: At5g05380.1
  misc_feature (29)..(227): Homolog of NCBI NO: 18390939 NR Description: expressed protein
  misc_feature (8)..(229): Homolog of NCBI NO: 40539036 NR Description: putative prenylated rab acceptor protein
  misc_feature (30)..(245): Homolog of NCBI NO: 15240698 NR Description: putative protein
  misc_feature (28)..(242): Homolog of NCBI NO: 15241022 NR Description: putative protein; protein id: At5g01640.1
  misc_feature (30)..(235): Homolog of NCBI NO: 15224494 NR Description: unknown protein; protein id: At2g38360.1
  misc_feature (29)..(245): Homolog of NCBI NO: 15226664 NR Description: unknown protein; protein id: At2g40380.1
  misc_feature (30)..(245): Homolog of NCBI NO: 15450978 NR Description: putative protein [Arabidopsis thaliana]
  misc_feature (30)..(245): Homolog of NCBI NO: 15228824 NR Description: putative protein
  misc_feature (30)..(245): Homolog of NCBI NO: 18072825 NR Description: prenylated Rab receptor 2 [Arabidopsis thaliana]
  misc_feature (29)..(245): Homolog of NCBI NO: 15239101 NR Description: putative protein; protein id: At5g05380.1

SEQ ID NO: 40810 - protein, 217 aa, Arabidopsis thaliana; identical to SEQ ID NO: 26497
  peptide (1)..(217): Ceres Seq. ID no. 12422965
  misc_feature (1)..(199): Homolog of NCBI NO: 18390939 NR Description: expressed protein
  misc_feature (1)..(201): Homolog of NCBI NO: 40539036 NR Description: putative prenylated rab acceptor protein
  misc_feature (2)..(217): Homolog of NCBI NO: 15240698 NR Description: putative protein
  misc_feature (1)..(214): Homolog of NCBI NO: 15241022 NR Description: putative protein; protein id: At5g01640.1
  misc_feature (2)..(207): Homolog of NCBI NO: 15224494 NR Description: unknown protein; protein id: At2g38360.1
  misc_feature (1)..(217): Homolog of NCBI NO: 15226664 NR Description: unknown protein; protein id: At2g40380.1
  misc_feature (2)..(217): Homolog of NCBI NO: 15450978 NR Description: putative protein [Arabidopsis thaliana]
  misc_feature (2)..(217): Homolog of NCBI NO: 15228824 NR Description: putative protein
  misc_feature (2)..(217): Homolog of NCBI NO: 18072825 NR Description: prenylated Rab receptor 2 [Arabidopsis thaliana]
  misc_feature (1)..(217): Homolog of NCBI NO: 15239101 NR Description: putative protein; protein id: At5g05380.1
  misc_feature (2)..(217): Homolog of NCBI NO: 18072825 NR Description: prenylated Rab receptor 2 [Arabidopsis thaliana]
  misc_feature (1)..(217): Homolog of NCBI NO: 15239101 NR Description: putative protein; protein id: At5g05380.1
  misc_feature (1)..(199): Homolog of NCBI NO: 18390939 NR Description: expressed protein
  misc_feature (1)..(201): Homolog of NCBI NO: 40539036 NR Description: putative prenylated rab acceptor protein
  misc_feature (2)..(217): Homolog of NCBI NO: 15240698 NR Description: putative protein
  misc_feature (1)..(214): Homolog of NCBI NO: 15241022 NR Description: putative protein; protein id: At5g01640.1
  misc_feature (2)..(207): Homolog of NCBI NO: 15224494 NR Description: unknown protein; protein id: At2g38360.1
  misc_feature (1)..(217): Homolog of NCBI NO: 15226664 NR Description: unknown protein; protein id: At2g40380.1
  misc_feature (2)..(217): Homolog of NCBI NO: 15450978 NR Description: putative protein [Arabidopsis thaliana]
  misc_feature (2)..(217): Homolog of NCBI NO: 15228824 NR Description: putative protein

SEQ ID NO: 40811 - protein, 216 aa, Arabidopsis thaliana; identical to SEQ ID NO: 26498
  peptide (1)..(216): Ceres Seq. ID no. 12422966
  misc_feature (1)..(198): Homolog of NCBI NO: 18390939 NR Description: expressed protein
  misc_feature (1)..(200): Homolog of NCBI NO: 40539036 NR Description: putative prenylated rab acceptor protein
  misc_feature (1)..(216): Homolog of NCBI NO: 15240698 NR Description: putative protein
  misc_feature (1)..(213): Homolog of NCBI NO: 15241022 NR Description: putative protein; protein id: At5g01640.1
  misc_feature (1)..(206): Homolog of NCBI NO: 15224494 NR Description: unknown protein; protein id: At2g38360.1
  misc_feature (1)..(216): Homolog of NCBI NO: 15226664 NR Description: unknown protein; protein id: At2g40380.1
  misc_feature (1)..(216): Homolog of NCBI NO: 15450978 NR Description: putative protein [Arabidopsis thaliana]
  misc_feature (1)..(216): Homolog of NCBI NO: 15228824 NR Description: putative protein
  misc_feature (1)..(216): Homolog of NCBI NO: 18072825 NR Description: prenylated Rab receptor 2 [Arabidopsis thaliana]
  misc_feature (1)..(216): Homolog of NCBI NO: 15239101 NR Description: putative protein; protein id: At5g05380.1
  misc_feature (1)..(198): Homolog of NCBI NO: 18390939 NR Description: expressed protein
  misc_feature (1)..(200): Homolog of NCBI NO: 40539036 NR Description: putative prenylated rab acceptor protein
  misc_feature (1)..(216): Homolog of NCBI NO: 15240698 NR Description: putative protein
  misc_feature (1)..(213): Homolog of NCBI NO: 15241022 NR Description: putative protein; protein id: At5g01640.1
  misc_feature (1)..(206): Homolog of NCBI NO: 15224494 NR Description: unknown protein; protein id: At2g38360.1
  misc_feature (1)..(216): Homolog of NCBI NO: 15226664 NR Description: unknown protein; protein id: At2g40380.1
  misc_feature (1)..(216): Homolog of NCBI NO: 15450978 NR Description: putative protein [Arabidopsis thaliana]
  misc_feature (1)..(216): Homolog of NCBI NO: 15228824 NR Description: putative protein
  misc_feature (1)..(216): Homolog of NCBI NO: 18072825 NR Description: prenylated Rab receptor 2 [Arabidopsis thaliana]
  misc_feature (1)..(216): Homolog of NCBI NO: 15239101 NR Description: putative protein; protein id: At5g05380.1

SEQ ID NO: 40812 - DNA, 1342 bp, Arabidopsis thaliana
  misc_feature (1)..(1342): Ceres Seq. ID no. 12396618
  misc_feature: MA Experiment ID: 108434 Result: Up-regulated in Transcription
  misc_feature: MA Experiment 108434 PARAMETER Experiment Name: At_Root_Tips_cDNA_P Parameter: Tissue Value: Root Tips
  misc_feature: MA Experiment ID: 108461 Result: Up-regulated in Transcription
  misc_feature: MA Experiment 108461 PARAMETER Experiment Name: At_Germinating_Seeds_cDNA_P Parameter: Age (day) Value: 1 vs. 0
  misc_feature: MA Experiment 108461 PARAMETER Experiment Name: At_Germinating_Seeds_cDNA_P Parameter: Tissue Value: Germinating Seeds
  misc_feature: MA Experiment ID: 108462 Result: Up-regulated in Transcription
  misc_feature: MA Experiment 108462 PARAMETER Experiment Name: At_Germinating_Seeds_cDNA_P Parameter: Age (day) Value: 2 vs. 0
  misc_feature: MA Experiment 108462 PARAMETER Experiment Name: At_Germinating_Seeds_cDNA_P Parameter: Tissue Value: Germinating Seeds
  misc_feature: MA Experiment ID: 108463 Result: Up-regulated in Transcription
  misc_feature: MA Experiment 108463 PARAMETER Experiment Name: At_Germinating_Seeds_cDNA_P Parameter: Age (day) Value: 3 vs. 0
  misc_feature: MA Experiment 108463 PARAMETER Experiment Name: At_Germinating_Seeds_cDNA_P Parameter: Tissue Value: Germinating Seeds
  misc_feature: MA Experiment ID: 108464 Result: Up-regulated in Transcription
  misc_feature: MA Experiment 108464 PARAMETER Experiment Name: At_Germinating_Seeds_cDNA_P Parameter: Age (day) Value: 4 vs. 0
  misc_feature: MA Experiment 108464 PARAMETER Experiment Name: At_Germinating_Seeds_cDNA_P Parameter: Tissue Value: Germinating Seeds
  misc_feature: MA Experiment ID: 108501 Result: Up-regulated in Transcription
  misc_feature: MA Experiment 108501 PARAMETER Experiment Name: At_ap2_floral_buds_cDNA_P Parameter: Plant Line Value: ap2 (Ler.)
  misc_feature: MA Experiment 108501 PARAMETER Experiment Name: At_ap2_floral_buds_cDNA_P Parameter: Tissue Value: Closed Flower
  misc_feature: MA Experiment ID: 108573 Result: Up-regulated in Transcription
  misc_feature: MA Experiment 108573 PARAMETER Experiment Name: At_Drought_cDNA_P Parameter: Timepoint (hr) Value: 6
  misc_feature: MA Experiment 108573 PARAMETER Experiment Name: At_Drought_cDNA_P Parameter: Tissue Value: Aerial
  misc_feature: MA Experiment 108573 PARAMETER Experiment Name: At_Drought_cDNA_P Parameter: Treatment Value: Drought vs. No Drought
  misc_feature: MA Experiment ID: 108577 Result: Down-regulated in Transcription
  misc_feature: MA Experiment 108577 PARAMETER Experiment Name: At_42deg_Heat_cDNA_P Parameter: Temperature (deg C) Value: 42 vs. 22
  misc_feature: MA Experiment 108577 PARAMETER Experiment Name: At_42deg_Heat_cDNA_P Parameter: Timepoint (hr) Value: 6
  misc_feature: MA Experiment 108577 PARAMETER Experiment Name: At_42deg_Heat_cDNA_P Parameter: Tissue Value: Aerial
  misc_feature: MA Experiment ID: 108595 Result: Up-regulated in Transcription
  misc_feature: MA Experiment 108595 PARAMETER Experiment Name: At_Ler-pi_Ovule_cDNA_P Parameter: Plant Line Value: null
  misc_feature: MA Experiment ID: 108605 Result: Down-regulated in Transcription
  misc_feature: MA Experiment 108605 PARAMETER Experiment Name: At_100uM_ABA_cDNA_P Parameter: Timepoint (hr) Value: 6
  misc_feature: MA Experiment 108605 PARAMETER Experiment Name: At_100uM_ABA_cDNA_P Parameter: Tissue Value: Aerial
  misc_feature: MA Experiment 108605 PARAMETER Experiment Name: At_100uM_ABA_cDNA_P Parameter: Treatment Value: 100uM ABA vs. No Treatment
  misc_feature: MA Experiment ID: 108607 Result: Down-regulated in Transcription
  misc_feature: MA Experiment 108607 PARAMETER Experiment Name: At_100uM_ABA_cDNA_P Parameter: Timepoint (hr) Value: 4
  misc_feature: MA Experiment 108607 PARAMETER Experiment Name: At_100uM_ABA_cDNA_P Parameter: Tissue Value: Aerial
  misc_feature: MA Experiment 108607 PARAMETER Experiment Name: At_100uM_ABA_cDNA_P Parameter: Treatment Value: 100uM ABA vs. No Treatment
  misc_feature: MA Experiment ID: 20000111 Result: Down-regulated in Transcription
  misc_feature: MA Experiment 20000111 PARAMETER Experiment Name: At_42deg_Heat_cDNA_P Parameter: Temperature (deg C) Value: 42 vs. 22
  misc_feature: MA Experiment 20000111 PARAMETER Experiment Name: At_42deg_Heat_cDNA_P Parameter: Timepoint (hr) Value: 6
  misc_feature: MA Experiment 20000111 PARAMETER Experiment Name: At_42deg_Heat_cDNA_P Parameter: Tissue Value: Aerial
  misc_feature: MA Experiment ID: 20000113 Result: Down-regulated in Transcription
  misc_feature: MA Experiment 20000113 PARAMETER Experiment Name: At_42deg_Heat_cDNA_P Parameter: Temperature (deg C) Value: 42 vs. 22
  misc_feature: MA Experiment 20000113 PARAMETER Experiment Name: At_42deg_Heat_cDNA_P Parameter: Timepoint (hr) Value: 8
  misc_feature: MA Experiment 20000113 PARAMETER Experiment Name: At_42deg_Heat_cDNA_P Parameter: Tissue Value: Aerial
  misc_feature: MA Experiment ID: 20000144 Result: Down-regulated in Transcription
  misc_feature: MA Experiment 20000144 PARAMETER Experiment Name: At_42deg_Heat_cDNA_P Parameter: Temperature (deg C) Value: 42 vs. 22
  misc_feature: MA Experiment 20000144 PARAMETER Experiment Name: At_42deg_Heat_cDNA_P Parameter: Timepoint (hr) Value: 1
  misc_feature: MA Experiment 20000144 PARAMETER Experiment Name: At_42deg_Heat_cDNA_P Parameter: Tissue Value: Aerial
  misc_feature: MA Experiment ID: 20000180 Result: Up-regulated in Transcription
  misc_feature: MA Experiment 20000180 PARAMETER Experiment Name: At_Germinating_Seeds_P Parameter: Age (hr) Value: 24 vs. 0
  misc_feature: MA Experiment 20000180 PARAMETER Experiment Name: At_Germinating_Seeds_P Parameter: Tissue Value: Germinating Seeds
  misc_feature: MA Experiment ID: 20000184 Result: Up-regulated in Transcription
  misc_feature: MA Experiment 20000184 PARAMETER Experiment Name: At_Shoots__P Parameter: Age (day) Value: 7
  misc_feature: MA Experiment 20000184 PARAMETER Experiment Name: At_Shoots__P Parameter: Tissue Value: Shoots vs. Whole Plant
  misc_feature: MA Experiment ID: 20000224 Result: Down-regulated in Transcription
  misc_feature: MA Experiment ID: 20000286 Result: Up-regulated in Transcription
  misc_feature: MA Experiment 20000286 PARAMETER Experiment Name: At_Open_Flower_P Parameter: Age (day) Value: 21
  misc_feature: MA Experiment 20000286 PARAMETER Experiment Name: At_Open_Flower_P Parameter: Plant Line Value: WS
  misc_feature: MA Experiment 20000286 PARAMETER Experiment Name: At_Open_Flower_P Parameter: Tissue Value: Half Open vs. Whole Plant
  misc_feature: MA Experiment ID: 20000437 Result: Up-regulated in Transcription
  misc_feature: MA Experiment 20000437 PARAMETER Experiment Name: At_Drought_P Parameter: Age (day) Value: 8
  misc_feature: MA Experiment 20000437 PARAMETER Experiment Name: At_Drought_P Parameter: Organism Value: A. thaliana
  misc_feature: MA Experiment 20000437 PARAMETER Experiment Name: At_Drought_P Parameter: Plant Line Value: WS
  misc_feature: MA Experiment 20000437 PARAMETER Experiment Name: At_Drought_P Parameter: Timepoint (hr) Value: 24
  misc_feature: MA Experiment 20000437 PARAMETER Experiment Name: At_Drought_P Parameter: Tissue Value: Whole Plant
  misc_feature: MA Experiment 20000437 PARAMETER Experiment Name: At_Drought_P Parameter: Treatment Value: Drought vs. No Drought
  misc_feature: MA Experiment ID: 20000438 Result: Up-regulated in Transcription
  misc_feature: MA Experiment 20000438 PARAMETER Experiment Name: At_Shoots__P Parameter: Age (day) Value: 14
  misc_feature: MA Experiment 20000438 PARAMETER Experiment Name: At_Shoots__P Parameter: Tissue Value: Shoots vs. Whole Plant
  misc_feature: MA Experiment ID: 20001248 Result: Up-regulated in Transcription
  misc_feature: MA Experiment 20001248 PARAMETER Experiment Name: At_Far-red-induction_P Parameter: Age (day) Value: 7
  misc_feature: MA Experiment 20001248 PARAMETER Experiment Name: At_Far-red-induction_P Parameter: Light Value: Far-red vs. White
  misc_feature: MA Experiment 20001248 PARAMETER Experiment Name: At_Far-red-induction_P Parameter: Organism Value: A. thaliana
  misc_feature: MA Experiment 20001248 PARAMETER Experiment Name: At_Far-red-induction_P Parameter: Plant Line Value: Columbia
  misc_feature: MA Experiment 20001248 PARAMETER Experiment Name: At_Far-red-induction_P Parameter: Timepoint (hr) Value: 4
  misc_feature: MA Experiment 20001248 PARAMETER Experiment Name: At_Far-red-induction_P Parameter: Tissue Value: Whole Plant
  misc_feature: MA Experiment ID: 20001450 Result: Up-regulated in Transcription
  misc_feature: MA Experiment 20001450 PARAMETER Experiment Name: At_Far-red-induction_P Parameter: Age (day) Value: 7
  misc_feature: MA Experiment 20001450 PARAMETER Experiment Name: At_Far-red-induction_P Parameter: Light Value: Far-red vs. White
  misc_feature: MA Experiment 20001450 PARAMETER Experiment Name: At_Far-red-induction_P Parameter: Organism Value: A. thaliana
  misc_feature: MA Experiment 20001450 PARAMETER Experiment Name: At_Far-red-induction_P Parameter: Plant Line Value: Columbia
  misc_feature: MA Experiment 20001450 PARAMETER Experiment Name: At_Far-red-induction_P Parameter: Timepoint (hr) Value: 8
  misc_feature: MA Experiment 20001450 PARAMETER Experiment Name: At_Far-red-induction_P Parameter: Tissue Value: Whole Plant
  misc_feature: MA Experiment ID: 20001451 Result: Up-regulated in Transcription
  misc_feature: MA Experiment 20001451 PARAMETER Experiment Name: At_Far-red-induction_P Parameter: Age (day) Value: 7
  misc_feature: MA Experiment 20001451 PARAMETER Experiment Name: At_Far-red-induction_P Parameter: Light Value: Far-red vs. White
  misc_feature: MA Experiment 20001451 PARAMETER Experiment Name: At_Far-red-induction_P Parameter: Organism Value: A. thaliana
  misc_feature: MA Experiment 20001451 PARAMETER Experiment Name: At_Far-red-induction_P Parameter: Plant Line Value: Columbia
  misc_feature: MA Experiment 20001451 PARAMETER Experiment Name: At_Far-red-induction_P Parameter: Timepoint (hr) Value: 24
  misc_feature: MA Experiment 20001451 PARAMETER Experiment Name: At_Far-red-induction_P Parameter: Tissue Value: Whole Plant
  misc_feature: MA Experiment ID: 20001555 Result: Down-regulated in Transcription
  misc_feature: MA Experiment 20001555 PARAMETER Experiment Name: At_Drought_Soil_Dry_P Parameter: Age (day) Value: 24
  misc_feature: MA Experiment 20001555 PARAMETER Experiment Name: At_Drought_Soil_Dry_P Parameter: Organism Value: A. thaliana
  misc_feature: MA Experiment 20001555 PARAMETER Experiment Name: At_Drought_Soil_Dry_P Parameter: Plant Line Value: WS
  misc_feature: MA Experiment 20001555 PARAMETER Experiment Name: At_Drought_Soil_Dry_P Parameter: Post Timepoint (hr) Value: None
  misc_feature: MA Experiment 20001555 PARAMETER Experiment Name: At_Drought_Soil_Dry_P Parameter: Post-Treatment Value: None
  misc_feature: MA Experiment 20001555 PARAMETER Experiment Name: At_Drought_Soil_Dry_P Parameter: Timepoint (day) Value: 10
  misc_feature: MA Experiment 20001555 PARAMETER Experiment Name: At_Drought_Soil_Dry_P Parameter: Treatment Value: Drought vs. No Drought
  misc_feature: MA Experiment ID: 20001556 Result: Down-regulated in Transcription
  misc_feature: MA Experiment 20001556 PARAMETER Experiment Name: At_Drought_Soil_Dry_P Parameter: Age (day) Value: 26
  misc_feature: MA Experiment 20001556 PARAMETER Experiment Name: At_Drought_Soil_Dry_P Parameter: Organism Value: A. thaliana
  misc_feature: MA Experiment 20001556 PARAMETER Experiment Name: At_Drought_Soil_Dry_P Parameter: Plant Line Value: WS
  misc_feature: MA Experiment 20001556 PARAMETER Experiment Name: At_Drought_Soil_Dry_P Parameter: Post Timepoint (hr) Value: None
  misc_feature: MA Experiment 20001556 PARAMETER Experiment Name: At_Drought_Soil_Dry_P Parameter: Post-Treatment Value: None
  misc_feature: MA Experiment 20001556 PARAMETER Experiment Name: At_Drought_Soil_Dry_P Parameter: Timepoint (day) Value: 12
  misc_feature: MA Experiment 20001556 PARAMETER Experiment Name: At_Drought_Soil_Dry_P Parameter: Treatment Value: Drought vs. No Drought
  misc_feature: MA Experiment ID: 20001558 Result: Down-regulated in Transcription
  misc_feature: MA Experiment 20001558 PARAMETER Experiment Name: At_Drought_Soil_Dry_P Parameter: Age (day) Value: 27
  misc_feature: MA Experiment 20001558 PARAMETER Experiment Name: At_Drought_Soil_Dry_P Parameter: Organism Value: A. thaliana
  misc_feature: MA Experiment 20001558 PARAMETER Experiment Name: At_Drought_Soil_Dry_P Parameter: Plant Line Value: WS
  misc_feature: MA Experiment 20001558 PARAMETER Experiment Name: At_Drought_Soil_Dry_P Parameter: Post Timepoint (hr) Value: 6
  misc_feature: MA Experiment 20001558 PARAMETER Experiment Name: At_Drought_Soil_Dry_P Parameter: Post-Treatment Value: Re-Water vs. No Drought
  misc_feature: MA Experiment 20001558 PARAMETER Experiment Name: At_Drought_Soil_Dry_P Parameter: Timepoint (day) Value: 13
  misc_feature: MA Experiment 20001558 PARAMETER Experiment Name: At_Drought_Soil_Dry_P Parameter: Treatment Value: Drought vs. No Drought
aacgagtatataactacctttcaattctctctgcctctcatagttaatatatatacgttcacaatcacttctcttctctatttcttattcattatctcaaccctctctctctctctctcagtacaacttatcatccatcaccatatatagagaatatgagcaaaacggaagcaatcagcttgaccaaaaggggaatgttgccgccaagtagttgcaatagcctaatggaccgctctgagtcccttaagagggacagtgtgatgggcaatggtgcagccaaagtgagaggaagcttggagcgcaagaaatcaaagagttttaaggaaggagatggttattcttcgtggctcataacggaggctcctgggagtatagccgccgtgaggagagagcaagtggcggcacaacaagcactaaggaaactaaagattgctcattacggtagatccaaatcaaccattaatttcacttcttccaaagtcgtccctcttcttaaccctaaccctaaccctcatcctcagagatgcagcttcctcacccccacttctgatcctatttacgtggcctaccatgatgaagaatggggagttccagttcatgatgacaagacgttgttcgaactgctgaccctaagcggcgcacaagtaggctccgattggacttcaaccttgagaaaacgccatgactataggaaggcctttatggagtttgaggcggaagtggttgccaaactcaccgagaaagagatgaatgcaataagcatcgaatacaagatagagatgagcaaagtgagaggtgttgtggaaaacgctaaaaagatcgtagagatcaagaaagcgtttgtgtcattagagaaatacctttggggatttgtgaaccacaaaccaatctccacgaactacaagcttggacacaagattccggtcaagacatcgaagtcggagagcatcagcaaagacatggttcgtcgaggcttccggttcgtgggtcccactgtggttcactcattcatgcaagccgctggtcttacaaacgaccacttgatcacttgctgtcgccacgctccttgcactctccttgcaaccaatccctaattattaatttttattttaattgaaagtggtgtttttatttaactttcgagtgcaaaatgtaggtttaggagaaaagagattgcagttttttaaaattggcaatgtaagataaaccagctggtttgatttttttcttgtgtgtgaggtgtttaaaatcacatgtataatggtttttgatgtatgtgtggtgtggcaaattgaaatagtaattgattttcatatgatttatctattgttcaaaatttgtt

SEQ ID NO: 40813 - protein, 312 aa, Arabidopsis thaliana
  peptide (1)..(312): Ceres Seq. ID no. 12396619
  misc_feature (126)..(304): Pfam Name: Methyladenine glycosylase Pfam Description: Methyladenine glycosylase
  misc_feature (122)..(305): Homolog of NCBI NO: 15220860 NR Description: DNA-3-methyladenine glycosidase, putative
  misc_feature (122)..(305): Homolog of NCBI NO: 15218379 NR Description: hypothetical protein; protein id: At1g15970.1
  misc_feature (51)..(307): Homolog of NCBI NO: 18410766 NR Description: putative DNA-3-methyladenine glycosylase I
  misc_feature (97)..(310): Homolog of NCBI NO: 38345034 NR Description: OSJNBa0029H02.18 [Oryza sativa (japonica
  misc_feature (131)..(306): Homolog of NCBI NO: 34908920 NR Description: P0691E06.10 [Oryza sativa (japonica
  misc_feature (1)..(148): Homolog of NCBI NO: 34908920 NR Description: P0691E06.10 [Oryza sativa (japonica
  misc_feature (1)..(309): Homolog of NCBI NO: 21592537 NR Description: unknown [Arabidopsis thaliana]
  misc_feature (1)..(309): Homolog of NCBI NO: 15241554 NR Description: putative protein
  misc_feature (1)..(312): Homolog of NCBI NO: 21536975 NR Description: unknown [Arabidopsis thaliana]
  misc_feature (1)..(312): Homolog of NCBI NO: 18399721 NR Description: expressed protein
MSKTEAISLTKRGMLPPSSCNSLMDRSESLKRDSVMGNGAAKVRGSLERKKSKSFKEGDGYSSWLITEAPGSIAAVRREQVAAQQALRKLKIAHYGRSKSTINFTSSKVVPLLNPNPNPHPQRCSFLTPTSDPIYVAYHDEEWGVPVHDDKTLFELLTLSGAQVGSDWTSTLRKRHDYRKAFMEFEAEVVAKLTEKEMNAISIEYKIEMSKVRGVVENAKKIVEIKKAFVSLEKYLWGFVNHKPISTNYKLGHKIPVKTSKSESISKDMVRRGFRFVGPTVVHSFMQAAGLTNDHLITCCRHAPCTLLATNP

SEQ ID NO: 40814 - protein, 299 aa, Arabidopsis thaliana
  peptide (1)..(299): Ceres Seq. ID no. 12396620
  misc_feature (113)..(291): Pfam Name: Methyladenine glycosylase Pfam Description: Methyladenine glycosylase
  misc_feature (109)..(292): Homolog of NCBI NO: 15220860 NR Description: DNA-3-methyladenine glycosidase, putative
  misc_feature (109)..(292): Homolog of NCBI NO: 15218379 NR Description: hypothetical protein; protein id: At1g15970.1
  misc_feature (38)..(294): Homolog of NCBI NO: 18410766 NR Description: putative DNA-3-methyladenine glycosylase I
  misc_feature (84)..(297): Homolog of NCBI NO: 38345034 NR Description: OSJNBa0029H02.18 [Oryza sativa (japonica
  misc_feature (118)..(293): Homolog of NCBI NO: 34908920 NR Description: P0691E06.10 [Oryza sativa (japonica
  misc_feature (1)..(135): Homolog of NCBI NO: 34908920 NR Description: P0691E06.10 [Oryza sativa (japonica
  misc_feature (1)..(296): Homolog of NCBI NO: 21592537 NR Description: unknown [Arabidopsis thaliana]
  misc_feature (1)..(296): Homolog of NCBI NO: 15241554 NR Description: putative protein
  misc_feature (1)..(299): Homolog of NCBI NO: 21536975 NR Description: unknown [Arabidopsis thaliana]
  misc_feature (1)..(299): Homolog of NCBI NO: 18399721 NR Description: expressed protein
MLPPSSCNSLMDRSESLKRDSVMGNGAAKVRGSLERKKSKSFKEGDGYSSWLITEAPGSIAAVRREQVAAQQALRKLKIAHYGRSKSTINFTSSKVVPLLNPNPNPHPQRCSFLTPTSDPIYVAYHDEEWGVPVHDDKTLFELLTLSGAQVGSDWTSTLRKRHDYRKAFMEFEAEVVAKLTEKEMNAISIEYKIEMSKVRGVVENAKKIVEIKKAFVSLEKYLWGFVNHKPISTNYKLGHKIPVKTSKSESISKDMVRRGFRFVGPTVVHSFMQAAGLTNDHLITCCRHAPCTLLATNP

SEQ ID NO: 40815 - protein, 289 aa, Arabidopsis thaliana
  peptide (1)..(289): Ceres Seq. ID no. 12396621
  misc_feature (103)..(281): Pfam Name: Methyladenine glycosylase Pfam Description: Methyladenine glycosylase
  misc_feature (99)..(282): Homolog of NCBI NO: 15220860 NR Description: DNA-3-methyladenine glycosidase, putative
  misc_feature (99)..(282): Homolog of NCBI NO: 15218379 NR Description: hypothetical protein; protein id: At1g15970.1
  misc_feature (28)..(284): Homolog of NCBI NO: 18410766 NR Description: putative DNA-3-methyladenine glycosylase I
  misc_feature (74)..(287): Homolog of NCBI NO: 38345034 NR Description: OSJNBa0029H02.18 [Oryza sativa (japonica
  misc_feature (108)..(283): Homolog of NCBI NO: 34908920 NR Description: P0691E06.10 [Oryza sativa (japonica
  misc_feature (1)..(125): Homolog of NCBI NO: 34908920 NR Description: P0691E06.10 [Oryza sativa (japonica
  misc_feature (1)..(286): Homolog of NCBI NO: 21592537 NR Description: unknown [Arabidopsis thaliana]
  misc_feature (1)..(286): Homolog of NCBI NO: 15241554 NR Description: putative protein
  misc_feature (1)..(289): Homolog of NCBI NO: 21536975 NR Description: unknown [Arabidopsis thaliana]
  misc_feature (1)..(289): Homolog of NCBI NO: 18399721 NR Description: expressed protein
MDRSESLKRDSVMGNGAAKVRGSLERKKSKSFKEGDGYSSWLITEAPGSIAAVRREQVAAQQALRKLKIAHYGRSKSTINFTSSKVVPLLNPNPNPHPQRCSFLTPTSDPIYVAYHDEEWGVPVHDDKTLFELLTLSGAQVGSDWTSTLRKRHDYRKAFMEFEAEVVAKLTEKEMNAISIEYKIEMSKVRGVVENAKKIVEIKKAFVSLEKYLWGFVNHKPISTNYKLGHKIPVKTSKSESISKDMVRRGFRFVGPTVVHSFMQAAGLTNDHLITCCRHAPCTLLATNP

SEQ ID NO: 40816 - DNA, 621 bp, Arabidopsis thaliana; identical to SEQ ID NO: 31032
  misc_feature (1)..(621): Ceres Seq. ID no. 12559532
  misc_feature: MA Experiment ID: 108434 Result: Up-regulated in Transcription
  misc_feature: MA Experiment 108434 PARAMETER Experiment Name: At_Root_Tips_cDNA_P Parameter: Tissue Value: Root Tips
  misc_feature: MA Experiment ID: 108462 Result: Down-regulated in Transcription
  misc_feature: MA Experiment 108462 PARAMETER Experiment Name: At_Germinating_Seeds_cDNA_P Parameter: Age (day) Value: 2 vs. 0
  misc_feature: MA Experiment 108462 PARAMETER Experiment Name: At_Germinating_Seeds_cDNA_P Parameter: Tissue Value: Germinating Seeds
  misc_feature: MA Experiment ID: 108463 Result: Down-regulated in Transcription
  misc_feature: MA Experiment 108463 PARAMETER Experiment Name: At_Germinating_Seeds_cDNA_P Parameter: Age (day) Value: 3 vs. 0
  misc_feature: MA Experiment 108463 PARAMETER Experiment Name: At_Germinating_Seeds_cDNA_P Parameter: Tissue Value: Germinating Seeds
  misc_feature: MA Experiment ID: 108464 Result: Down-regulated in Transcription
  misc_feature: MA Experiment 108464 PARAMETER Experiment Name: At_Germinating_Seeds_cDNA_P Parameter: Age (day) Value: 4 vs. 0
  misc_feature: MA Experiment 108464 PARAMETER Experiment Name: At_Germinating_Seeds_cDNA_P Parameter: Tissue Value: Germinating Seeds
  misc_feature: MA Experiment ID: 108573 Result: Down-regulated in Transcription
  misc_feature: MA Experiment 108573 PARAMETER Experiment Name: At_Drought_cDNA_P Parameter: Timepoint (hr) Value: 6
  misc_feature: MA Experiment 108573 PARAMETER Experiment Name: At_Drought_cDNA_P Parameter: Tissue Value: Aerial
  misc_feature: MA Experiment 108573 PARAMETER Experiment Name: At_Drought_cDNA_P Parameter: Treatment Value: Drought vs. No Drought
  misc_feature: MA Experiment ID: 20000184 Result: Up-regulated in Transcription
  misc_feature: MA Experiment 20000184 PARAMETER Experiment Name: At_Shoots__P Parameter: Age (day) Value: 7
  misc_feature: MA Experiment 20000184 PARAMETER Experiment Name: At_Shoots__P Parameter: Tissue Value: Shoots vs. Whole Plant
  misc_feature: MA Experiment ID: 20001451 Result: Up-regulated in Transcription
  misc_feature: MA Experiment 20001451 PARAMETER Experiment Name: At_Far-red-induction_P Parameter: Age (day) Value: 7
  misc_feature: MA Experiment 20001451 PARAMETER Experiment Name: At_Far-red-induction_P Parameter: Light Value: Far-red vs. White
  misc_feature: MA Experiment 20001451 PARAMETER Experiment Name: At_Far-red-induction_P Parameter: Organism Value: A. thaliana
  misc_feature: MA Experiment 20001451 PARAMETER Experiment Name: At_Far-red-induction_P Parameter: Plant Line Value: Columbia
  misc_feature: MA Experiment 20001451 PARAMETER Experiment Name: At_Far-red-induction_P Parameter: Timepoint (hr) Value: 24
  misc_feature: MA Experiment 20001451 PARAMETER Experiment Name: At_Far-red-induction_P Parameter: Tissue Value: Whole Plant
  misc_feature: MA Experiment ID: 20001560 Result: Up-regulated in Transcription
  misc_feature: MA Experiment 20001560 PARAMETER Experiment Name: At_Drought_Soil_Dry_P Parameter: Age (day) Value: 28
  misc_feature: MA Experiment 20001560 PARAMETER Experiment Name: At_Drought_Soil_Dry_P Parameter: Organism Value: A. thaliana
  misc_feature: MA Experiment 20001560 PARAMETER Experiment Name: At_Drought_Soil_Dry_P Parameter: Plant Line Value: WS
  misc_feature: MA Experiment 20001560 PARAMETER Experiment Name: At_Drought_Soil_Dry_P Parameter: Post Timepoint (hr) Value: None
  misc_feature: MA Experiment 20001560 PARAMETER Experiment Name: At_Drought_Soil_Dry_P Parameter: Post-Treatment Value: None
  misc_feature: MA Experiment 20001560 PARAMETER Experiment Name: At_Drought_Soil_Dry_P Parameter: Timepoint (day) Value: 14
  misc_feature: MA Experiment 20001560 PARAMETER Experiment Name: At_Drought_Soil_Dry_P Parameter: Treatment Value: Drought vs. No Drought
  misc_feature: MA Experiment ID: 20001757 Result: Up-regulated in Transcription
  misc_feature: MA Experiment 20001757 PARAMETER Experiment Name: At_50mM_NH4NO3_L-to-H_P Parameter: Timepoint (hr) Value: 6
  misc_feature: MA Experiment 20001757 PARAMETER Experiment Name: At_50mM_NH4NO3_L-to-H_P Parameter: Tissue Value: Leaf
  misc_feature: MA Experiment 20001757 PARAMETER Experiment Name: At_50mM_NH4NO3_L-to-H_P Parameter: Treatment Value: 50mM NH4NO3 vs 100mM Mannitol

SEQ ID NO: 40817 - protein, 115 aa, Arabidopsis thaliana; identical to SEQ ID NO: 31033
  peptide (1)..(115): Ceres Seq. ID no. 12559533
  misc_feature (17)..(114): Pfam Name: 60s Acidic ribosomal protein Pfam Description: 60s Acidic ribosomal protein
  misc_feature (17)..(114): Pfam Name: 60s Acidic ribosomal protein Pfam Description: 60s Acidic ribosomal protein
  misc_feature (1)..(115): Homolog of NCBI NO: 3122752 NR Description: 60S ACIDIC RIBOSOMAL PROTEIN P2
  misc_feature (1)..(115): Homolog of NCBI NO: 899610 NR Description: acidic ribosomal protein P2
  misc_feature (1)..(115): Homolog of NCBI NO: 730583 NR Description: 60S acidic ribosomal protein P2
  misc_feature (1)..(115): Homolog of NCBI NO: 1173073 NR Description: 60S ACIDIC RIBOSOMAL PROTEIN P2A (P2)
  misc_feature (1)..(115): Homolog of NCBI NO: 34906408 NR Description: putative 60S acidic ribosomal protein P2A
  misc_feature (1)..(115): Homolog of NCBI NO: 3122752 NR Description: 60S ACIDIC RIBOSOMAL PROTEIN P2
  misc_feature (1)..(115): Homolog of NCBI NO: 730583 NR Description: 60S acidic ribosomal protein P2
  misc_feature (1)..(115): Homolog of NCBI NO: 34906408 NR Description: putative 60S acidic ribosomal protein P2A
  misc_feature (1)..(115): Homolog of NCBI NO: 15226231 NR Description: 60S acidic ribosomal protein P2
  misc_feature (1)..(115): Homolog of NCBI NO: 21593095 NR Description: 60S acidic ribosomal protein P2 [Arabidopsis
  misc_feature (1)..(115): Homolog of NCBI NO: 15226230 NR Description: 60S acidic ribosomal protein P2
  misc_feature (1)..(115): Homolog of NCBI NO: 15230454 NR Description: acidic ribosomal protein P2 -like; protein id:
  misc_feature (1)..(115): Homolog of NCBI NO: 24473796 NR Description: 60s acidic ribosomal protein [Prunus dulcis]
  misc_feature (1)..(115): Homolog of NCBI NO: 1173073 NR Description: 60S ACIDIC RIBOSOMAL PROTEIN P2A (P2)
  misc_feature (1)..(115): Homolog of NCBI NO: 899610 NR Description: acidic ribosomal protein P2
  misc_feature (1)..(115): Homolog of NCBI NO: 24473796 NR Description: 60s acidic ribosomal protein [Prunus dulcis]
  misc_feature (1)..(115): Homolog of NCBI NO: 15230454 NR Description: acidic ribosomal protein P2 -like; protein id:
  misc_feature (1)..(115): Homolog of NCBI NO: 15226230 NR Description: 60S acidic ribosomal protein P2
  misc_feature (1)..(115): Homolog of NCBI NO: 21593095 NR Description: 60S acidic ribosomal protein P2 [Arabidopsis
  misc_feature (1)..(115): Homolog of NCBI NO: 15226231 NR Description: 60S acidic ribosomal protein P2

SEQ ID NO: 40818 - DNA, 1661 bp, Arabidopsis thaliana
  misc_feature (1)..(1661): Ceres Seq. ID no. 13488644
  misc_feature: MA Experiment ID: 20000264 Result: Up-regulated in Transcription
  misc_feature: MA Experiment 20000264 PARAMETER Experiment Name: At_Open_Flower_P Parameter: Age (day) Value: 21
  misc_feature: MA Experiment 20000264 PARAMETER Experiment Name: At_Open_Flower_P Parameter: Plant Line Value: WS
  misc_feature: MA Experiment 20000264 PARAMETER Experiment Name: At_Open_Flower_P Parameter: Tissue Value: Open Flower vs. Whole Plant
atttgtgtaatcatatgaaaagaaaagtaaggaattttccattactctctctcacttctctctctctaattctcaccaagaacccagaattgagaataagaatctatagatcattatgctcacctctctgctcttgtttaagtgatgagctgaatctaacaaacgttcacacgtgttaacacccacacgtgcgacttcttctttattctcttcaaagcctcttcttgaactagaagtttcttttgaacatgtatagtccaaatactctagttgctttagagtcattgccaaacttgaacttgttttatccttcttctctttcattagcttgagcaagctgaagcttctttgtgctttctccaagctccactttaaagttgaatcatactcaaacatttactgacagaggactgattcatagaatatttaacatcataagatgatcttctcaataataatggcggttcttttggcccaagcttcaagtttgccaaagaagactgtccagagttcggatggggatattgtagactgcttcgacgtgagagatcagccttcattggatcacccactattgcagaatcatgaaattcagggcgcacccgccacaggattaccatatatgatcaacaaagcgggaaaaagaagagtttggcaggtttggaaccaaaacggcaccagctgtcctgacgaaactatacccataagacgtagcgtggtcggggctaaaagatttaagaaaaaacattggacagatgttcgagtcaatcgccgaacagttccatacgccgctgaggagggacacgagtacgcgattggagaggtggtatatctgcggggaatatatggaacagtggcaactatgaacgtttggaatccatctgtagaacatggaacaaacgaatttagtttgtcccaaatttggctcgtcgctggacattacaacgattccgacctcaacacagtagaggctggttggcaggttttcccggatcattatcatgacagccagccacgacttttcgtctattggacgaaggacacatatcagaagacagggtgtctcaacctcgagtgccctggttttgttcaagtcactagcgagtttgccattggcagtgcattctctcctacatcttcttacggcggcagccagtacgacatcacgatgtacatatggaaggatactaaagatggcaactggtggctgagcattgactcctcagtgattgggtattggccggcgaggcttttcacgcatttagctcacgggccggcgacgttggtacagtggggaggcgagattgtaaactctcgcagctatggccagcacactaccacacagatgggctcgggacattttgcagaggaaggcttcggcaaagcaggtagcttccgaaacctgaaaattattgactacctctcgtacatgcaaccagtccaagagttcatcctgcaaacgaagaaccccacatgttatactgccataaagggatacagcgaggagtgggggagtcatttctactacggcggaccgggatataacgccctgtgtccatagtgtttggacattaggataaacttatttctttatgatatatgataaaactagagtttggagtgtttaatgacgttaaataaaaaactagagtttggatttc

SEQ ID NO: 40819 - protein, 373 aa, Arabidopsis thaliana
  peptide (1)..(373): Ceres Seq. ID no. 13488645
  misc_feature (135)..(331): Pfam Name: Arabidopsis proteins of unknown function Pfam Description: Arabidopsis proteins of unknown function
  misc_feature (18)..(373): Homolog of NCBI NO: 18400044 NR Description: expressed protein [Arabidopsis thaliana]
  misc_feature (20)..(373): Homolog of NCBI NO: 28416687 NR Description: At1g70550 [Arabidopsis thaliana]
  misc_feature (20)..(373): Homolog of NCBI NO: 15220207 NR Description: expressed protein [Arabidopsis thaliana]
  misc_feature (20)..(373): Homolog of NCBI NO: 30698726 NR Description: expressed protein [Arabidopsis thaliana]
  misc_feature (20)..(373): Homolog of NCBI NO: 25345697 NR Description: unknown protein F5A18.27 [imported] - Arabidopsis
  misc_feature (11)..(373): Homolog of NCBI NO: 34393554 NR Description: putative carboxyl-terminal proteinase
  misc_feature (10)..(373): Homolog of NCBI NO: 21389708 NR Description: putative carboxyl-terminal proteinase [Gossypium
  misc_feature (11)..(372): Homolog of NCBI NO: 15238835 NR Description: expressed protein [Arabidopsis thaliana]
  misc_feature (7)..(373): Homolog of NCBI NO: 7487383 NR Description: hypothetical protein T24C20.110 - Arabidopsis
  misc_feature (1)..(373): Homolog of NCBI NO: 30693008 NR Description: expressed protein [Arabidopsis thaliana]
MIFSIIMAVLLAQASSLPKKTVQSSDGDIVDCFDVRDQPSLDHPLLQNHEIQGAPATGLPYMINKAGKRRVWQVWNQNGTSCPDETIPIRRSVVGAKRFKKKHWTDVRVNRRTVPYAAEEGHEYAIGEVVYLRGIYGTVATMNVWNPSVEHGTNEFSLSQIWLVAGHYNDSDLNTVEAGWQVFPDHYHDSQPRLFVYWTKDTYQKTGCLNLECPGFVQVTSEFAIGSAFSPTSSYGGSQYDITMYIWKDTKDGNWWLSIDSSVIGYWPARLFTHLAHGPATLVQWGGEIVNSRSYGQHTTTQMGSGHFAEEGFGKAGSFRNLKIIDYLSYMQPVQEFILQTKNPTCYTAIKGYSEEWGSHFYYGGPGYNALCP

SEQ ID NO: 40820 - protein, 367 aa, Arabidopsis thaliana
  peptide (1)..(367): Ceres Seq. ID no. 13488646
  misc_feature (129)..(325): Pfam Name: Arabidopsis proteins of unknown function Pfam Description: Arabidopsis proteins of unknown function
  misc_feature (12)..(367): Homolog of NCBI NO: 18400044 NR Description: expressed protein [Arabidopsis thaliana]
  misc_feature (14)..(367): Homolog of NCBI NO: 28416687 NR Description: At1g70550 [Arabidopsis thaliana]
  misc_feature (14)..(367): Homolog of NCBI NO: 15220207 NR Description: expressed protein [Arabidopsis thaliana]
  misc_feature (14)..(367): Homolog of NCBI NO: 30698726 NR Description: expressed protein [Arabidopsis thaliana]
  misc_feature (14)..(367): Homolog of NCBI NO: 25345697 NR Description: unknown protein F5A18.27 [imported] - Arabidopsis
  misc_feature (5)..(367): Homolog of NCBI NO: 34393554 NR Description: putative carboxyl-terminal proteinase
  misc_feature (4)..(367): Homolog of NCBI NO: 21389708 NR Description: putative carboxyl-terminal proteinase [Gossypium
  misc_feature (5)..(366): Homolog of NCBI NO: 15238835 NR Description: expressed protein [Arabidopsis thaliana]
  misc_feature (1)..(367): Homolog of NCBI NO: 7487383 NR Description: hypothetical protein T24C20.110 - Arabidopsis
  misc_feature (1)..(367): Homolog of NCBI NO: 30693008 NR Description: expressed protein [Arabidopsis thaliana]
MAVLLAQASSLPKKTVQSSDGDIVDCFDVRDQPSLDHPLLQNHEIQGAPATGLPYMINKAGKRRVWQVWNQNGTSCPDETIPIRRSVVGAKRFKKKHWTDVRVNRRTVPYAAEEGHEYAIGEVVYLRGIYGTVATMNVWNPSVEHGTNEFSLSQIWLVAGHYNDSDLNTVEAGWQVFPDHYHDSQPRLFVYWTKDTYQKTGCLNLECPGFVQVTSEFAIGSAFSPTSSYGGSQYDITMYIWKDTKDGNWWLSIDSSVIGYWPARLFTHLAHGPATLVQWGGEIVNSRSYGQHTTTQMGSGHFAEEGFGKAGSFRNLKIIDYLSYMQPVQEFILQTKNPTCYTAIKGYSEEWGSHFYYGGPGYNALCP

SEQ ID NO: 40821 - protein, 312 aa, Arabidopsis thaliana
  peptide (1)..(312): Ceres Seq. ID no. 13488647
  misc_feature (74)..(270): Pfam Name: Arabidopsis proteins of unknown function Pfam Description: Arabidopsis proteins of unknown function
  misc_feature (1)..(312): Homolog of NCBI NO: 18400044 NR Description: expressed protein [Arabidopsis thaliana]
  misc_feature (1)..(312): Homolog of NCBI NO: 28416687 NR Description: At1g70550 [Arabidopsis thaliana]
  misc_feature (1)..(312): Homolog of NCBI NO: 15220207 NR Description: expressed protein [Arabidopsis thaliana]
  misc_feature (1)..(312): Homolog of NCBI NO: 30698726 NR Description: expressed protein [Arabidopsis thaliana]
  misc_feature (1)..(312): Homolog of NCBI NO: 25345697 NR Description: unknown protein F5A18.27 [imported] - Arabidopsis
  misc_feature (1)..(312): Homolog of NCBI NO: 34393554 NR Description: putative carboxyl-terminal proteinase
  misc_feature (1)..(312): Homolog of NCBI NO: 21389708 NR Description: putative carboxyl-terminal proteinase [Gossypium
  misc_feature (1)..(311): Homolog of NCBI NO: 15238835 NR Description: expressed protein [Arabidopsis thaliana]
  misc_feature (1)..(312): Homolog of NCBI NO: 7487383 NR Description: hypothetical protein T24C20.110 - Arabidopsis
  misc_feature (1)..(312): Homolog of NCBI NO: 30693008 NR Description: expressed protein [Arabidopsis thaliana]
MINKAGKRRVWQVWNQNGTSCPDETIPIRRSVVGAKRFKKKHWTDVRVNRRTVPYAAEEGHEYAIGEVVYLRGIYGTVATMNVWNPSVEHGTNEFSLSQIWLVAGHYNDSDLNTVEAGWQVFPDHYHDSQPRLFVYWTKDTYQKTGCLNLECPGFVQVTSEFAIGSAFSPTSSYGGSQYDITMYIWKDTKDGNWWLSIDSSVIGYWPARLFTHLAHGPATLVQWGGEIVNSRSYGQHTTTQMGSGHFAEEGFGKAGSFRNLKIIDYLSYMQPVQEFILQTKNPTCYTAIKGYSEEWGSHFYYGGPGYNALCP

SEQ ID NO: 40822 - DNA, 1343 bp, Arabidopsis thaliana
  misc_feature (1)..(1343): Ceres Seq. ID no. 12328390
  misc_feature: MA Experiment ID: 20000495 Result: Up-regulated in Transcription
  misc_feature: MA Experiment 20000495 PARAMETER Experiment Name: At_Guard_Cells_P Parameter: Harvest Date Value: 8/2/2002
  misc_feature: MA Experiment 20000495 PARAMETER Experiment Name: At_Guard_Cells_P Parameter: Organism Value: A. thaliana
  misc_feature: MA Experiment 20000495 PARAMETER Experiment Name: At_Guard_Cells_P Parameter: Tissue Value: Guard Cells vs. Leaves
aattccggtgcagctaagaaccagagatagagagatagagatgcggaggatcaattcactgtacggaagaattggtctcctaaaacgagtacccgagaaatctacgaagcaagctcatacatttctcgcatctctctccttctctacggaaggtgcttatggcggtgacggtgagtttcagcagaacagctccaaagtcaagatctttgaccgagacctcaagcgaatacatcgtgatcgagcggcgtggctttctcgccaaaaaaacgattcttttgttgacgctgttgcagataatctacttgatcgcttagaggattgtaagaagagttttcccactgcattttgtttgggaggatctcttggtgctgttaagagattactacgtcgtcgcggtgggattgagaagcttatcatgatggatacttcatatgacatgattaagtcatgtagagatgctcaagacgattcactcgataactccattgaaacctcttactttgttggtgatgaagagtttctgccagtcaaagagagttcggttgatttgatcattagttcgttggggcttcactggacaaatgatcttcctggatccatgatacagtgcaagctagcactgaagccggatggcttatttttagcagcaattcttggtggagaaaccttaaaggagctgagaatagcatgcactttggctcacatggagcgggaaggagggattagtcctcggctatcacctttggcacaggttagggacgcagggaatctgttgaccagggcgggttttagtcttcctggtgttgatgttgatgaatatgtagttaaatacaagagagcgatggatcttatagagcatcttcgtgcgatgggtgaaaccaatgctcttctcgagagaaacaagattttgaatcgtgaaactgctgttgccacggcagccatatatgactccatgtttgccacagaggacggcactatacccgctacttttcaggtgatttacatgacaggatggagagaacaatcgtctcacccgcaggccaaacgaagaggttcagccaccgtatccttcacggatctccaaaagcaatttggcggacaatcttgatggaatgattgaagaagagaaacattcaataagcagagactttacaaatgacacttgagagagaaatcagtgacttaagctataaggtacttggaggaactcttgtagatttgtcggagtctttcactgggcgaaagcatcacaattaggacgcctgctttcgcccatgtatttcgtatcgaataatagctgatcagaaacatatttgtattttacaaaaatattacgaatactt

SEQ ID NO: 40823 - protein, 368 aa, Arabidopsis thaliana
  peptide (1)..(368): Ceres Seq. ID no. 12328391
  misc_feature (78)..(227): Pfam Name: ubiE/COQ5 methyltransferase family Pfam Description: ubiE/COQ5 methyltransferase family
  misc_feature (68)..(362): Homolog of NCBI NO: 17937221 NR Description: methyltransferase
  misc_feature (68)..(363): Homolog of NCBI NO: 17986466 NR Description: BIOTIN SYNTHESIS PROTEIN BIOC [Brucella
  misc_feature (68)..(363): Homolog of NCBI NO: 23502732 NR Description: conserved hypothetical protein [Brucella suis
  misc_feature (152)..(362): Homolog of NCBI NO: 13559240 NR Description: dJ842G6.1.1 (novel protein) [Homo sapiens]
  misc_feature (68)..(360): Homolog of NCBI NO: 19922210 NR Description: CG8067-PA [Drosophila melanogaster]
  misc_feature (66)..(362): Homolog of NCBI NO: 34858816 NR Description: similar to dJ842G6.1.1 (novel protein) [Rattus
  misc_feature (66)..(362): Homolog of NCBI NO: 40018642 NR Description: chromosome 20 open reading frame 7 isoform 1
  misc_feature (63)..(355): Homolog of NCBI NO: 22968351 NR Description: hypothetical protein [Rhodospirillum rubrum]
  misc_feature (14)..(331): Homolog of NCBI NO: 6648045 NR Description: Hypothetical protein At1g22800
  misc_feature (14)..(368): Homolog of NCBI NO: 15219953 NR Description: unknown protein; protein id: At1g22800.1
IPVQLRTRDREIEMRRINSLYGRIGLLKRVPEKSTKQAHTFLASLSFSTEGAYGGDGEFQQNSSKVKIFDRDLKRIHRDRAAWLSRQKNDSFVDAVADNLLDRLEDCKKSFPTAFCLGGSLGAVKRLLRRRGGIEKLIMMDTSYDMIKSCRDAQDDSLDNSIETSYFVGDEEFLPVKESSVDLIISSLGLHWTNDLPGSMIQCKLALKPDGLFLAAILGGETLKELRIACTLAHMEREGGISPRLSPLAQVRDAGNLLTRAGFSLPGVDVDEYVVKYKRAMDLIEHLRAMGETNALLERNKILNRETAVATAAIYDSMFATEDGTIPATFQVIYMTGWREQSSHPQAKRRGSATVSFTDLQKQFGGQS

SEQ ID NO: 40824 - protein, 355 aa, Arabidopsis thaliana
  peptide (1)..(355): Ceres Seq. ID no. 12328392
  misc_feature (65)..(214): Pfam Name: ubiE/COQ5 methyltransferase family Pfam Description: ubiE/COQ5 methyltransferase family
  misc_feature (55)..(349): Homolog of NCBI NO: 17937221 NR Description: methyltransferase
  misc_feature (55)..(350): Homolog of NCBI NO: 17986466 NR Description: BIOTIN SYNTHESIS PROTEIN BIOC [Brucella
  misc_feature (55)..(350): Homolog of NCBI NO: 23502732 NR Description: conserved hypothetical protein [Brucella suis
  misc_feature (139)..(349): Homolog of NCBI NO: 13559240 NR Description: dJ842G6.1.1 (novel protein) [Homo sapiens]
  misc_feature (55)..(347): Homolog of NCBI NO: 19922210 NR Description: CG8067-PA [Drosophila melanogaster]
  misc_feature (53)..(349): Homolog of NCBI NO: 34858816 NR Description: similar to dJ842G6.1.1 (novel protein) [Rattus
  misc_feature (53)..(349): Homolog of NCBI NO: 40018642 NR Description: chromosome 20 open reading frame 7 isoform 1
  misc_feature (50)..(342): Homolog of NCBI NO: 22968351 NR Description: hypothetical protein [Rhodospirillum rubrum]
  misc_feature (1)..(318): Homolog of NCBI NO: 6648045 NR Description: Hypothetical protein At1g22800
  misc_feature (1)..(355): Homolog of NCBI NO: 15219953 NR Description: unknown protein; protein id: At1g22800.1
MRRINSLYGRIGLLKRVPEKSTKQAHTFLASLSFSTEGAYGGDGEFQQNSSKVKIFDRDLKRIHRDRAAWLSRQKNDSFVDAVADNLLDRLEDCKKSFPTAFCLGGSLGAVKRLLRRRGGIEKLIMMDTSYDMIKSCRDAQDDSLDNSIETSYFVGDEEFLPVKESSVDLIISSLGLHWTNDLPGSMIQCKLALKPDGLFLAAILGGETLKELRIACTLAHMEREGGISPRLSPLAQVRDAGNLLTRAGFSLPGVDVDEYVVKYKRAMDLIEHLRAMGETNALLERNKILNRETAVATAAIYDSMFATEDGTIPATFQVIYMTGWREQSSHPQAKRRGSATVSFTDLQKQFGGQS

SEQ ID NO: 40825 - protein, 230 aa, Arabidopsis thaliana
  peptide (1)..(230): Ceres Seq. ID no. 12328393
  misc_feature (1)..(89): Pfam Name: ubiE/COQ5 methyltransferase family Pfam Description: ubiE/COQ5 methyltransferase family
  misc_feature (1)..(224): Homolog of NCBI NO: 17937221 NR Description: methyltransferase
  misc_feature (1)..(225): Homolog of NCBI NO: 17986466 NR Description: BIOTIN SYNTHESIS PROTEIN BIOC [Brucella
  misc_feature (1)..(225): Homolog of NCBI NO: 23502732 NR Description: conserved hypothetical protein [Brucella suis
  misc_feature (14)..(224): Homolog of NCBI NO: 13559240 NR Description: dJ842G6.1.1 (novel protein) [Homo sapiens]
  misc_feature (1)..(222): Homolog of NCBI NO: 19922210 NR Description: CG8067-PA [Drosophila melanogaster]
  misc_feature (1)..(224): Homolog of NCBI NO: 34858816 NR Description: similar to dJ842G6.1.1 (novel protein) [Rattus
  misc_feature (1)..(224): Homolog of NCBI NO: 40018642 NR Description: chromosome 20 open reading frame 7 isoform 1
  misc_feature (1)..(217): Homolog of NCBI NO: 22968351 NR Description: hypothetical protein [Rhodospirillum rubrum]
  misc_feature (1)..(193): Homolog of NCBI NO: 6648045 NR Description: Hypothetical protein At1g22800
  misc_feature (1)..(230): Homolog of NCBI NO: 15219953 NR Description: unknown protein; protein id: At1g22800.1
MMDTSYDMIKSCRDAQDDSLDNSIETSYFVGDEEFLPVKESSVDLIISSLGLHWTNDLPGSMIQCKLALKPDGLFLAAILGGETLKELRIACTLAHMEREGGISPRLSPLAQVRDAGNLLTRAGFSLPGVDVDEYVVKYKRAMDLIEHLRAMGETNALLERNKILNRETAVATAAIYDSMFATEDGTIPATFQVIYMTGWREQSSHPQAKRRGSATVSFTDLQKQFGGQS

SEQ ID NO: 40826 - DNA, 1452 bp, Arabidopsis thaliana
  misc_feature (1)..(1452): Ceres Seq. ID no. 12395487
  misc_feature: MA Experiment ID: 108433 Result: Down-regulated in Transcription
  misc_feature: MA Experiment 108433 PARAMETER Experiment Name: At_rhl_Mutant2_cDNA_P Parameter: Age (day) Value: 7
  misc_feature: MA Experiment 108433 PARAMETER Experiment Name: At_rhl_Mutant2_cDNA_P Parameter: Organism Value: A. thaliana
  misc_feature: MA Experiment 108433 PARAMETER Experiment Name: At_rhl_Mutant2_cDNA_P Parameter: Plant Line Value: rhl Mutant vs. wt landsburg
  misc_feature: MA Experiment 108433 PARAMETER Experiment Name: At_rhl_Mutant2_cDNA_P Parameter: Tissue Value: Roots
  misc_feature: MA Experiment ID: 108434 Result: Up-regulated in Transcription
  misc_feature: MA Experiment 108434 PARAMETER Experiment Name: At_Root_Tips_cDNA_P Parameter: Tissue Value: Root Tips
aaatcgagcgattgagagcacttcgcaaaatcagagcgacaaaaaaaaataaaaaccaatcctttcgattccaaattttttgttactcactcgcacgagttttatttggtcgttagttatctctttcgttgaataacggttttaatttaaaccgttactttttatcaatggcgacttcgtcaccgtctctgagtaacaatggtctttcctccgtcgtcacgcctcccaaaactctccgtggtctcaataagcctaagtgtattcaatgcggcaatgtagctcgctccaggtgcccttttcaatcttgtaagggttgttgttcaagagcagagaatccctgcccgattcacgttcttaaagtagcttcaacgtctggtgagaagacgcaggcgccaagtactccatcttcagagcagaaagcaaccgagggcactcccgggagtaccactagagtttcgtcaatccggcaactttctagcaactttgctcagtttaataacctgaatgcttcttcccgccagagaaaacctttgacgataaaggatgctcaagctttaaacgagtggcggtttacaaagctaaaagagtacagagacagaaacattgaagtagaaaatgaagcttttgatcggtacatgagtaatgtgaatttactcgaagaagcattttcatttacatctgttcctgatgaagagagtcatggaacagcagctcctgagcaaaacaaagaggaaaatattgtttcagagcttaaactgaggctgagatcgaactctgcaagaacagagagctttaagaagcggatcgcggagacagtcaaagccggtttggtgaagcttaagagactggatttaggcagttcttcagatgatcaagatgatatcaaaaggcgggtcaaaagaaagaaatgggaagagaaaggttcagctttgaatgaaataatcgataaactgaacaaagcaagaaccgaagaggatctcaaatcttgcttagagatgaaatcaaagctctgtggtcaagtttctcccactgctgcttccgagaagaacaagatctttccgggtgtagtccgaaaagttgagatgagtgaagaagcacttcaaaaaatcgctgagaatctccaatcttttgacaaagttggaatgttgtgaagtcgagaacatcctgtggatgaactgaaaagtttgagtggcaagaaaatttctagatccttcgtgaccacggtattgtacaatgatcaaacatccctcaaaactgatcctgaagactccaaagactcaagagattcttgtaaagtagtgttgagcatcatttagatattagaactcagccatggataaagctgttgattctatctcattggatttttttcactgtgtgttgttgctttgttagatttgaaattgctcattggattacctttgacttaataaatagttggtttggtttggt

SEQ ID NO: 40827 - protein, 327 aa, Arabidopsis thaliana
  peptide (1)..(327): Ceres Seq. ID no. 12395488
  misc_feature (19)..(61): Homolog of NCBI NO: 29467526 NR Description: P0582D05.16 [Oryza sativa (japonica
  misc_feature (92)..(314): Homolog of NCBI NO: 29467525 NR Description: P0582D05.15 [Oryza sativa (japonica
  misc_feature (1)..(327): Homolog of NCBI NO: 18398564 NR Description: expressed protein
MATSSPSLSNNGLSSVVTPPKTLRGLNKPKCIQCGNVARSRCPFQSCKGCCSRAENPCPIHVLKVASTSGEKTQAPSTPSSEQKATEGTPGSTTRVSSIRQLSSNFAQFNNLNASSRQRKPLTIKDAQALNEWRFTKLKEYRDRNIEVENEAFDRYMSNVNLLEEAFSFTSVPDEESHGTAAPEQNKEENIVSELKLRLRSNSARTESFKKRIAETVKAGLVKLKRLDLGSSSDDQDDIKRRVKRKKWEEKGSALNEIIDKLNKARTEEDLKSCLEMKSKLCGQVSPTAASEKNKIFPGVVRKVEMSEEALQKIAENLQSFDKVGML

SEQ ID NO: 40828 - protein, 171 aa, Arabidopsis thaliana
  peptide (1)..(171): Ceres Seq. ID no. 12395489
  misc_feature (1)..(158): Homolog of NCBI NO: 29467525 NR Description: P0582D05.15 [Oryza sativa (japonica
  misc_feature (1)..(171): Homolog of NCBI NO: 18398564 NR Description: expressed protein
MSNVNLLEEAFSFTSVPDEESHGTAAPEQNKEENIVSELKLRLRSNSARTESFKKRIAETVKAGLVKLKRLDLGSSSDDQDDIKRRVKRKKWEEKGSALNEIIDKLNKARTEEDLKSCLEMKSKLCGQVSPTAASEKNKIFPGVVRKVEMSEEALQKIAENLQSFDKVGML

SEQ ID NO: 40829 - DNA, 703 bp, Arabidopsis thaliana
  misc_feature (1)..(703): Ceres Seq. ID no. 12580344
  misc_feature: MA Experiment ID: 108461 Result: Down-regulated in Transcription
  misc_feature: MA Experiment 108461 PARAMETER Experiment Name: At_Germinating_Seeds_cDNA_P Parameter: Age (day) Value: 1 vs. 0
  misc_feature: MA Experiment 108461 PARAMETER Experiment Name: At_Germinating_Seeds_cDNA_P Parameter: Tissue Value: Germinating Seeds
  misc_feature: MA Experiment ID: 108488 Result: Down-regulated in Transcription
  misc_feature: MA Experiment ID: 108569 Result: Up-regulated in Transcription
  misc_feature: MA Experiment 108569 PARAMETER Experiment Name: At_0.001%_MeJA__cDNA_P Parameter: Timepoint (hr) Value: 6
  misc_feature: MA Experiment 108569 PARAMETER Experiment Name: At_0.001%_MeJA__cDNA_P Parameter: Tissue Value: Aerial
  misc_feature: MA Experiment 108569 PARAMETER Experiment Name: At_0.001%_MeJA__cDNA_P Parameter: Treatment Value: 0.001% MeJA vs. No Treatment
  misc_feature: MA Experiment ID: 108573 Result: Up-regulated in Transcription
  misc_feature: MA Experiment 108573 PARAMETER Experiment Name: At_Drought_cDNA_P Parameter: Timepoint (hr) Value: 6
  misc_feature: MA Experiment 108573 PARAMETER Experiment Name: At_Drought_cDNA_P Parameter: Tissue Value: Aerial
  misc_feature: MA Experiment 108573 PARAMETER Experiment Name: At_Drought_cDNA_P Parameter: Treatment Value: Drought vs. No Drought
  misc_feature: MA Experiment ID: 108585 Result: Up-regulated in Transcription
  misc_feature: MA Experiment 108585 PARAMETER Experiment Name: At_5mM_NaNP_cDNA_P Parameter: Timepoint (hr) Value: 6
  misc_feature: MA Experiment 108585 PARAMETER Experiment Name: At_5mM_NaNP_cDNA_P Parameter: Tissue Value: Aerial
  misc_feature: MA Experiment 108585 PARAMETER Experiment Name: At_5mM_NaNP_cDNA_P Parameter: Treatment Value: null
  misc_feature: MA Experiment ID: 108595 Result: Up-regulated in Transcription
  misc_feature: MA Experiment 108595 PARAMETER Experiment Name: At_Ler-pi_Ovule_cDNA_P Parameter: Plant Line Value: null
aaaatacttttttgttgctctctactagcctgcctttctgggaacgcgaaaagaaagacaaaattttcttgcaattgaaggtgaggtttggtgaaagggaaattgagaaaaccctagaacaagtacggtctctattttgctttaatgggtcgcgaatctgtggctgttgtgactgcgccgccctcggcgactgctccgggtactgcttcggtggcgacctcgcttgctcctggcttccgatttcatccgactgatgaggaactcgtgagctattacttgaagaggaaggttctgggccaacctgtacgcttcgatgcgattggagaggtcgatatatacaagcatgagccctgggatttagcagtgttttcgagattgaagacaagggaccaagaatggtacttctacagtgcattagataagaagtatggaaacggtgctaggatgaaccgagcaactaacagagggtactggaaagctactggaaaagacagagaaatccgccgtgacattctgcttctcggtatgaaaaagacacttgttttccacagtgggcgtgcaccagacgggcttcggactaattgggttatgcacgagtatcgccttgtggaatatgaaaccgagaaaaacggaaacctggtgcaagatgcatatgtgttgtgtagagtcttgttttccatctaatgacttaaggtttttatcc

SEQ ID NO: 40830 - protein, 179 aa, Arabidopsis thaliana
  peptide (1)..(179): Ceres Seq. ID no. 12580345
  misc_feature (27)..(155): Pfam Name: No apical meristem (NAM) protein Pfam Description: No apical meristem (NAM) protein
  misc_feature (27)..(155): Pfam Name: No apical meristem (NAM) protein Pfam Description: No apical meristem (NAM) protein
  misc_feature (19)..(175): Homolog of NCBI NO: 21593389 NR Description: NAC, putative [Arabidopsis thaliana]
  misc_feature (19)..(175): Homolog of NCBI NO: 18398895 NR Description: expressed protein; protein id: At3g10500.1
  misc_feature (19)..(175): Homolog of NCBI NO: 8567779 NR Description: NAC, putative [Arabidopsis thaliana]
  misc_feature (19)..(175): Homolog of NCBI NO: 15237699 NR Description: putative protein
  misc_feature (27)..(175): Homolog of NCBI NO: 21105746 NR Description: nam-like protein 9 [Petunia x hybrida]
  misc_feature (19)..(175): Homolog of NCBI NO: 21593389 NR Description: NAC, putative [Arabidopsis thaliana]
  misc_feature (19)..(175): Homolog of NCBI NO: 8567779 NR Description: NAC, putative [Arabidopsis thaliana]
  misc_feature (27)..(175): Homolog of NCBI NO: 21105746 NR Description: nam-like protein 9 [Petunia x hybrida]
  misc_feature (1)..(175): Homolog of NCBI NO: 18398893 NR Description: expressed protein; protein id: At3g10490.1
  misc_feature (1)..(175): Homolog of NCBI NO: 30681347 NR Description: expressed protein [Arabidopsis thaliana]
  misc_feature (1)..(175): Homolog of NCBI NO: 18398891 NR Description: expressed protein; protein id: At3g10480.1
  misc_feature (1)..(175): Homolog of NCBI NO: 21105744 NR Description: nam-like protein 8 [Petunia x hybrida]
  misc_feature (1)..(175): Homolog of NCBI NO: 21105736 NR Description: nam-like protein 4 [Petunia x hybrida]
  misc_feature (19)..(175): Homolog of NCBI NO: 15237699 NR Description: putative protein
  misc_feature (19)..(175): Homolog of NCBI NO: 18398895 NR Description: expressed protein; protein id: At3g10500.1
  misc_feature (1)..(175): Homolog of NCBI NO: 21105736 NR Description: nam-like protein 4 [Petunia x hybrida]
  misc_feature (1)..(175): Homolog of NCBI NO: 21105744 NR Description: nam-like protein 8 [Petunia x hybrida]
  misc_feature (1)..(175): Homolog of NCBI NO: 18398891 NR Description: expressed protein; protein id: At3g10480.1
  misc_feature (1)..(175): Homolog of NCBI NO: 30681347 NR Description: expressed protein [Arabidopsis thaliana]
  misc_feature (1)..(175): Homolog of NCBI NO: 18398893 NR Description: expressed protein; protein id: At3g10490.1
MGRESVAVVTAPPSATAPGTASVATSLAPGFRFHPTDEELVSYYLKRKVLGQPVRFDAIGEVDIYKHEPWDLAVFSRLKTRDQEWYFYSALDKKYGNGARMNRATNRGYWKATGKDREIRRDILLLGMKKTLVFHSGRAPDGLRTNWVMHEYRLVEYETEKNGNLVQDAYVLCRVLFSI

SEQ ID NO: 40831 - DNA, 1931 bp, Arabidopsis thaliana
  misc_feature (1)..(1931): Ceres Seq. ID no. 13492425
  misc_feature: MA Experiment ID: 108463 Result: Down-regulated in Transcription
  misc_feature: MA Experiment 108463 PARAMETER Experiment Name: At_Germinating_Seeds_cDNA_P Parameter: Age (day) Value: 3 vs. 0
  misc_feature: MA Experiment 108463 PARAMETER Experiment Name: At_Germinating_Seeds_cDNA_P Parameter: Tissue Value: Germinating Seeds
  misc_feature: MA Experiment ID: 108464 Result: Down-regulated in Transcription
  misc_feature: MA Experiment 108464 PARAMETER Experiment Name: At_Germinating_Seeds_cDNA_P Parameter: Age (day) Value: 4 vs. 0
  misc_feature: MA Experiment 108464 PARAMETER Experiment Name: At_Germinating_Seeds_cDNA_P Parameter: Tissue Value: Germinating Seeds
  misc_feature: MA Experiment ID: 108577 Result: Down-regulated in Transcription
  misc_feature: MA Experiment 108577 PARAMETER Experiment Name: At_42deg_Heat_cDNA_P Parameter: Temperature (deg C) Value: 42 vs. 22
  misc_feature: MA Experiment 108577 PARAMETER Experiment Name: At_42deg_Heat_cDNA_P Parameter: Timepoint (hr) Value: 6
  misc_feature: MA Experiment 108577 PARAMETER Experiment Name: At_42deg_Heat_cDNA_P Parameter: Tissue Value: Aerial
  misc_feature: MA Experiment ID: 108579 Result: Down-regulated in Transcription
  misc_feature: MA Experiment 108579 PARAMETER Experiment Name: At_4deg_Cold_cDNA_P Parameter: Temperature (deg C) Value: 4 vs. 22
  misc_feature: MA Experiment 108579 PARAMETER Experiment Name: At_4deg_Cold_cDNA_P Parameter: Timepoint (hr) Value: 6
  misc_feature: MA Experiment 108579 PARAMETER Experiment Name: At_4deg_Cold_cDNA_P Parameter: Tissue Value: Aerial
  misc_feature: MA Experiment ID: 108594 Result: Up-regulated in Transcription
  misc_feature: MA Experiment 108594 PARAMETER Experiment Name: At_Ler-rhl_Root_cDNA_P Parameter: Plant Line Value: null
  misc_feature: MA Experiment ID: 20000113 Result: Down-regulated in Transcription
  misc_feature: MA Experiment 20000113 PARAMETER Experiment Name: At_42deg_Heat_cDNA_P Parameter: Temperature (deg C) Value: 42 vs. 22
  misc_feature: MA Experiment 20000113 PARAMETER Experiment Name: At_42deg_Heat_cDNA_P Parameter: Timepoint (hr) Value: 8
  misc_feature: MA Experiment 20000113 PARAMETER Experiment Name: At_42deg_Heat_cDNA_P Parameter: Tissue Value: Aerial
  misc_feature: MA Experiment ID: 20000180 Result: Up-regulated in Transcription
  misc_feature: MA Experiment 20000180 PARAMETER Experiment Name: At_Germinating_Seeds_P Parameter: Age (hr) Value: 24 vs. 0
  misc_feature: MA Experiment 20000180 PARAMETER Experiment Name: At_Germinating_Seeds_P Parameter: Tissue Value: Germinating Seeds
  misc_feature: MA Experiment ID: 20000265 Result: Up-regulated in Transcription
  misc_feature: MA Experiment 20000265 PARAMETER Experiment Name: At_Open_Flower_P Parameter: Age (day) Value: 21
  misc_feature: MA Experiment 20000265 PARAMETER Experiment Name: At_Open_Flower_P Parameter: Plant Line Value: WS
  misc_feature: MA Experiment 20000265 PARAMETER Experiment Name: At_Open_Flower_P Parameter: Tissue Value: Closed Flower vs. Whole Plant
  misc_feature: MA Experiment ID: 20000286 Result: Up-regulated in Transcription
  misc_feature: MA Experiment 20000286 PARAMETER Experiment Name: At_Open_Flower_P Parameter: Age (day) Value: 21
  misc_feature: MA Experiment 20000286 PARAMETER Experiment Name: At_Open_Flower_P Parameter: Plant Line Value: WS
  misc_feature: MA Experiment 20000286 PARAMETER Experiment Name: At_Open_Flower_P Parameter: Tissue Value: Half Open vs. Whole Plant
  misc_feature: MA Experiment ID: 20000443 Result: Down-regulated in Transcription
  misc_feature: MA Experiment 20000443 PARAMETER Experiment Name: At_1uM_BR-BRZ__P Parameter: Tissue Value: Shoot Apices
  misc_feature: MA Experiment 20000443 PARAMETER Experiment Name: At_1uM_BR-BRZ__P Parameter: Treatment Value: 1uM BRZ vs. No Treatment
  misc_feature: MA Experiment ID: 20000495 Result: Up-regulated in Transcription
  misc_feature: MA Experiment 20000495 PARAMETER Experiment Name: At_Guard_Cells_P Parameter: Harvest Date Value: 8/2/2002
  misc_feature: MA Experiment 20000495 PARAMETER Experiment Name: At_Guard_Cells_P Parameter: Organism Value: A. thaliana
  misc_feature: MA Experiment 20000495 PARAMETER Experiment Name: At_Guard_Cells_P Parameter: Tissue Value: Guard Cells vs. Leaves
cttcttaaactcgtttttaactctccatctctaaaaagaccatcaacgctcttctctttattgcagcagaaacagaacccagttcaataaagctttttggtaagaaaatttgaaaggaaaagatatttgaaaactcgtagagagaaagtggcacagaatctgaaattctgacactttttaccacgaataatgattctcttttgaaaaacatgactcaatgttttctttatctttttctctgaattgaggtttgtttgtacttaaagtatgctcctttatctaccgttgactgattctactcttttattctcaacttttctctgatttgctcgtgtgtttacttcaattcctcagttcttgtgtagaaagttgagtttcatgtgatcaaaattggggctttactacttttaagagaatgagtgacaaagacgagtttgccgcaaagaagaaggatttggtcaatacgccagtggatttgtatcctccggagaatccaatgttgggtccttctccgatgatggattcattcagagaaactctttggcatgatggtggtttcaatgtccacacagatgcagacacttcctttagaggtaataataatattgatatacctcttgaaatgggttggaatatggctcagttccctgcagattcaggattcattgagcgtgctgcaaagttttctttttttggatgtggtgaaatgatgatgaaccaacaacaatcatctcttggagttccagattcaactggcttgtttcttcaagatacacagattcctagtggatccaaactagataatggtcctcttactgatgcatctaagttagtgaaagagagatcgattaataatgtatcagaggattctcaatctagtggaggtaatggtcatgatgatgctaagtgtgggcaaacatcttccaaggggtttagtagtaagaagaggaaaagaattgggaaggattgtgaagaagaagaagataaaaagcaaaaggatgagcaaagtccaacttcaaatgcgaacaagacaaacagtgagaagcaaccttctgattctttaaaggatgggtatattcacatgagggcacgaagaggccaggctactaatagtcacagtcttgctgaaagagtaagaagagaaaaaatcagtgaaaggatgaagttcttgcaagatcttgtgccaggttgcgacaaggtgactggtaaggcagttatgctcgatgaaatcattaactatgtgcaatcacttcaatgccaaatcgagtttttatcgatgaaactttcggctgtgaatcctgtgctcgattttaacctcgaaagcctccttgcaaaagatgctcttcaatcatctgcaccgacatttccccacaacatgtcgatgctttatcctcctgtatcgtatctctctcaaacaggattcatgcaaccgaacatttcctcaatgtcgctattgagtggaggattaaaacggcaggaaacacatggatatgaaagtgatcaccacaatcttgtccacatgaaccatgaaaccggcactgcacctgatcatgaagatacaacagctgacatgaaggtggagccgtagatgtttcttcttcactttgtactcagctttagctgctgatatagtgcgccgcggtcgagaattttattaacttcgaacagaagagtgaaaacgaaacagaggaggaagcagattttgtctttgaaatattgacagctcccggagaaagagtcgagagtaagaatcaacaatgttgtgtaatgaatagctactgtctgcttcttttgtagctattgtctgcttcttttttgtacatataaatccatgcaagggaagaggaatgttaattcaacacatgtgcacaacatgatcatcacatatgtacttcaacttgatcaatcggaattagctctacttggcaacc

SEQ ID NO: 40832 - protein, 390 aa, Arabidopsis thaliana
  peptide (1)..(390): Ceres Seq. ID no. 13492426
  misc_feature (230)..(280): Pfam Name: Helix-loop-helix DNA-binding domain Pfam Description: Helix-loop-helix DNA-binding domain
  misc_feature (167)..(368): Homolog of NCBI NO: 20127064 NR Description: putative bHLH transcription factor [Arabidopsis
  misc_feature (167)..(368): Homolog of NCBI NO: 15231450 NR Description: bHLH protein family [Arabidopsis thaliana]
  misc_feature (155)..(316): Homolog of NCBI NO: 34898690 NR Description: hypothetical protein [Oryza sativa (japonica
  misc_feature (68)..(349): Homolog of NCBI NO: 34906952 NR Description: DNA-binding protein-like protein
  misc_feature (61)..(347): Homolog of NCBI NO: 20127085 NR Description: putative bHLH transcription factor [Arabidopsis
  misc_feature (61)..(347): Homolog of NCBI NO: 15239013 NR Description: bHLH protein family [Arabidopsis thaliana]
  misc_feature (147)..(390): Homolog of NCBI NO: 30697769 NR Description: DNA-binding protein -related [Arabidopsis
  misc_feature (147)..(390): Homolog of NCBI NO: 20127044 NR Description: putative bHLH transcription factor [Arabidopsis
  misc_feature (147)..(390): Homolog of NCBI NO: 15221563 NR Description: DNA-binding protein -related [Arabidopsis
  misc_feature (1)..(390): Homolog of NCBI NO: 15222679 NR Description: bHLH protein [Arabidopsis thaliana]
MSDKDEFAAKKKDLVNTPVDLYPPENPMLGPSPMMDSFRETLWHDGGFNVHTDADTSFRGNNNIDIPLEMGWNMAQFPADSGFIERAAKFSFFGCGEMMMNQQQSSLGVPDSTGLFLQDTQIPSGSKLDNGPLTDASKLVKERSINNVSEDSQSSGGNGHDDAKCGQTSSKGFSSKKRKRIGKDCEEEEDKKQKDEQSPTSNANKTNSEKQPSDSLKDGYIHMRARRGQATNSHSLAERVRREKISERMKFLQDLVPGCDKVTGKAVMLDEIINYVQSLQCQIEFLSMKLSAVNPVLDFNLESLLAKDALQSSAPTFPHNMSMLYPPVSYLSQTGFMQPNISSMSLLSGGLKRQETHGYESDHHNLVHMNHETGTAPDHEDTTADMKVEP

SEQ ID NO: 40833 - protein, 363 aa, Arabidopsis thaliana
  peptide (1)..(363): Ceres Seq. ID no. 13492427
  misc_feature (203)..(253): Pfam Name: Helix-loop-helix DNA-binding domain Pfam Description: Helix-loop-helix DNA-binding domain
  misc_feature (140)..(341): Homolog of NCBI NO: 20127064 NR Description: putative bHLH transcription factor [Arabidopsis
  misc_feature (140)..(341): Homolog of NCBI NO: 15231450 NR Description: bHLH protein family [Arabidopsis thaliana]
  misc_feature (128)..(289): Homolog of NCBI NO: 34898690 NR Description: hypothetical protein [Oryza sativa (japonica
  misc_feature (41)..(322): Homolog of NCBI NO: 34906952 NR Description: DNA-binding protein-like protein
  misc_feature (34)..(320): Homolog of NCBI NO: 20127085 NR Description: putative bHLH transcription factor [Arabidopsis
  misc_feature (34)..(320): Homolog of NCBI NO: 15239013 NR Description: bHLH protein family [Arabidopsis thaliana]
  misc_feature (120)..(363): Homolog of NCBI NO: 30697769 NR Description: DNA-binding protein -related [Arabidopsis
  misc_feature (120)..(363): Homolog of NCBI NO: 20127044 NR Description: putative bHLH transcription factor [Arabidopsis
  misc_feature (120)..(363): Homolog of NCBI NO: 15221563 NR Description: DNA-binding protein -related [Arabidopsis
  misc_feature (1)..(363): Homolog of NCBI NO: 15222679 NR Description: bHLH protein [Arabidopsis thaliana]
MLGPSPMMDSFRETLWHDGGFNVHTDADTSFRGNNNIDIPLEMGWNMAQFPADSGFIERAAKFSFFGCGEMMMNQQQSSLGVPDSTGLFLQDTQIPSGSKLDNGPLTDASKLVKERSINNVSEDSQSSGGNGHDDAKCGQTSSKGFSSKKRKRIGKDCEEEEDKKQKDEQSPTSNANKTNSEKQPSDSLKDGYIHMRARRGQATNSHSLAERVRREKISERMKFLQDLVPGCDKVTGKAVMLDEIINYVQSLQCQIEFLSMKLSAVNPVLDFNLESLLAKDALQSSAPTFPHNMSMLYPPVSYLSQTGFMQPNISSMSLLSGGLKRQETHGYESDHHNLVHMNHETGTAPDHEDTTADMKVEP

SEQ ID NO: 40834 - protein, 357 aa, Arabidopsis thaliana
  peptide (1)..(357): Ceres Seq. ID no. 13492428
  misc_feature (197)..(247): Pfam Name: Helix-loop-helix DNA-binding domain Pfam Description: Helix-loop-helix DNA-binding domain
  misc_feature (134)..(335): Homolog of NCBI NO: 20127064 NR Description: putative bHLH transcription factor [Arabidopsis
  misc_feature (134)..(335): Homolog of NCBI NO: 15231450 NR Description: bHLH protein family [Arabidopsis thaliana]
  misc_feature (122)..(283): Homolog of NCBI NO: 34898690 NR Description: hypothetical protein [Oryza sativa (japonica
  misc_feature (35)..(316): Homolog of NCBI NO: 34906952 NR Description: DNA-binding protein-like protein
  misc_feature (28)..(314): Homolog of NCBI NO: 20127085 NR Description: putative bHLH transcription factor [Arabidopsis
  misc_feature (28)..(314): Homolog of NCBI NO: 15239013 NR Description: bHLH protein family [Arabidopsis thaliana]
  misc_feature (114)..(357): Homolog of NCBI NO: 30697769 NR Description: DNA-binding protein -related [Arabidopsis
  misc_feature (114)..(357): Homolog of NCBI NO: 20127044 NR Description: putative bHLH transcription factor [Arabidopsis
  misc_feature (114)..(357): Homolog of NCBI NO: 15221563 NR Description: DNA-binding protein -related [Arabidopsis
  misc_feature (1)..(357): Homolog of NCBI NO: 15222679 NR Description: bHLH protein [Arabidopsis thaliana]
MMDSFRETLWHDGGFNVHTDADTSFRGNNNIDIPLEMGWNMAQFPADSGFIERAAKFSFFGCGEMMMNQQQSSLGVPDSTGLFLQDTQIPSGSKLDNGPLTDASKLVKERSINNVSEDSQSSGGNGHDDAKCGQTSSKGFSSKKRKRIGKDCEEEEDKKQKDEQSPTSNANKTNSEKQPSDSLKDGYIHMRARRGQATNSHSLAERVRREKISERMKFLQDLVPGCDKVTGKAVMLDEIINYVQSLQCQIEFLSMKLSAVNPVLDFNLESLLAKDALQSSAPTFPHNMSMLYPPVSYLSQTGFMQPNISSMSLLSGGLKRQETHGYESDHHNLVHMNHETGTAPDHEDTTADMKVEP

SEQ ID NO: 40835 - DNA, 1662 bp, Arabidopsis thaliana
  misc_feature (1)..(1662): Ceres Seq. ID no. 13491575
  misc_feature: MA Experiment ID: 20000184 Result: Up-regulated in Transcription
  misc_feature: MA Experiment 20000184 PARAMETER Experiment Name: At_Shoots__P Parameter: Age (day) Value: 7
  misc_feature: MA Experiment 20000184 PARAMETER Experiment Name: At_Shoots__P Parameter: Tissue Value: Shoots vs. Whole Plant
  misc_feature: MA Experiment ID: 20000227 Result: Up-regulated in Transcription
  misc_feature: MA Experiment 20000227 PARAMETER Experiment Name: At_Root-Tips-vs-Tops_P Parameter: Tissue Value: Root Tips vs. Root Tops
  misc_feature: MA Experiment ID: 20000264 Result: Up-regulated in Transcription
  misc_feature: MA Experiment 20000264 PARAMETER Experiment Name: At_Open_Flower_P Parameter: Age (day) Value: 21
  misc_feature: MA Experiment 20000264 PARAMETER Experiment Name: At_Open_Flower_P Parameter: Plant Line Value: WS
  misc_feature: MA Experiment 20000264 PARAMETER Experiment Name: At_Open_Flower_P Parameter: Tissue Value: Open Flower vs. Whole Plant
  misc_feature: MA Experiment ID: 20000307 Result: Up-regulated in Transcription
  misc_feature: MA Experiment 20000307 PARAMETER Experiment Name: At_Germinating_Seeds_Sub_P Parameter: Age (hr) Value: 24 vs. 0
  misc_feature: MA Experiment 20000307 PARAMETER Experiment Name: At_Germinating_Seeds_Sub_P Parameter: Organism Value: A. thaliana
  misc_feature: MA Experiment 20000307 PARAMETER Experiment Name: At_Germinating_Seeds_Sub_P Parameter: Plant Line Value: WS
  misc_feature: MA Experiment 20000307 PARAMETER Experiment Name: At_Germinating_Seeds_Sub_P Parameter: Tissue Value: Germinating Seeds
  misc_feature: MA Experiment ID: 20000314 Result: Up-regulated in Transcription
  misc_feature: MA Experiment 20000314 PARAMETER Experiment Name: At_14day_Shoots-Roots_Sub_P Parameter: Age (day) Value: 14
  misc_feature: MA Experiment 20000314 PARAMETER Experiment Name: At_14day_Shoots-Roots_Sub_P Parameter: Organism Value: A. thaliana
  misc_feature: MA Experiment 20000314 PARAMETER Experiment Name: At_14day_Shoots-Roots_Sub_P Parameter: Plant Line Value: WS
  misc_feature: MA Experiment 20000314 PARAMETER Experiment Name: At_14day_Shoots-Roots_Sub_P Parameter: Tissue Value: Roots vs. Whole Plant
  misc_feature: MA Experiment ID: 20000315 Result: Up-regulated in Transcription
  misc_feature: MA Experiment 20000315 PARAMETER Experiment Name: At_14day_Shoots-Roots_Sub_P Parameter: Age (day) Value: 14
  misc_feature: MA Experiment 20000315 PARAMETER Experiment Name: At_14day_Shoots-Roots_Sub_P Parameter: Organism Value: A. thaliana
  misc_feature: MA Experiment 20000315 PARAMETER Experiment Name: At_14day_Shoots-Roots_Sub_P Parameter: Plant Line Value: WS
  misc_feature: MA Experiment 20000315 PARAMETER Experiment Name: At_14day_Shoots-Roots_Sub_P Parameter: Tissue Value: Shoots vs. Whole Plant
  misc_feature: MA Experiment ID: 20000794 Result: Up-regulated in Transcription
  misc_feature: MA Experiment 20000794 PARAMETER Experiment Name: At_Petals_P Parameter: Age (day) Value: 23-25 days
  misc_feature: MA Experiment 20000794 PARAMETER Experiment Name: At_Petals_P Parameter: Plant Line Value: WS
  misc_feature: MA Experiment 20000794 PARAMETER Experiment Name: At_Petals_P Parameter: Tissue Value: Petals vs. Whole plant
  misc_feature: MA Experiment ID: 20001557 Result: Up-regulated in Transcription
  misc_feature: MA Experiment 20001557 PARAMETER Experiment Name: At_Drought_Soil_Dry_P Parameter: Age (day) Value: 27
  misc_feature: MA Experiment 20001557 PARAMETER Experiment Name: At_Drought_Soil_Dry_P Parameter: Organism Value: A. thaliana
  misc_feature: MA Experiment 20001557 PARAMETER Experiment Name: At_Drought_Soil_Dry_P Parameter: Plant Line Value: WS
  misc_feature: MA Experiment 20001557 PARAMETER Experiment Name: At_Drought_Soil_Dry_P Parameter: Post Timepoint (hr) Value: 3
  misc_feature: MA Experiment 20001557 PARAMETER Experiment Name: At_Drought_Soil_Dry_P Parameter: Post-Treatment Value: Re-Water vs. No Drought
  misc_feature: MA Experiment 20001557 PARAMETER Experiment Name: At_Drought_Soil_Dry_P Parameter: Timepoint (day) Value: 13
  misc_feature: MA Experiment 20001557 PARAMETER Experiment Name: At_Drought_Soil_Dry_P Parameter: Treatment Value: Drought vs. No Drought
  misc_feature: MA Experiment ID: 20001905 Result: Up-regulated in Transcription
  misc_feature: MA Experiment 20001905 PARAMETER Experiment Name: At_Drought_Reproduction_P Parameter: Age (day) Value: 40
  misc_feature: MA Experiment 20001905 PARAMETER Experiment Name: At_Drought_Reproduction_P Parameter: Organism Value: A. thaliana
  misc_feature: MA Experiment 20001905 PARAMETER Experiment Name: At_Drought_Reproduction_P Parameter: Plant Line Value: WS
  misc_feature: MA Experiment 20001905 PARAMETER Experiment Name: At_Drought_Reproduction_P Parameter: Timepoint (day) Value: 10
  misc_feature: MA Experiment 20001905 PARAMETER Experiment Name: At_Drought_Reproduction_P Parameter: Tissue Value: Rosettes
  misc_feature: MA Experiment 20001905 PARAMETER Experiment Name: At_Drought_Reproduction_P Parameter: Treatment Value: Drought vs. No Drought
  misc_feature: MA Experiment ID: 20001910 Result: Up-regulated in Transcription
  misc_feature: MA Experiment 20001910 PARAMETER Experiment Name: At_Drought_Reproduction_P Parameter: Age (day) Value: 37
  misc_feature: MA Experiment 20001910 PARAMETER Experiment Name: At_Drought_Reproduction_P Parameter: Organism Value: A. thaliana
  misc_feature: MA Experiment 20001910 PARAMETER Experiment Name: At_Drought_Reproduction_P Parameter: Plant Line Value: WS
  misc_feature: MA Experiment 20001910 PARAMETER Experiment Name: At_Drought_Reproduction_P Parameter: Timepoint (day) Value: 7
  misc_feature: MA Experiment 20001910 PARAMETER Experiment Name: At_Drought_Reproduction_P Parameter: Tissue Value: Flowers
  misc_feature: MA Experiment 20001910 PARAMETER Experiment Name: At_Drought_Reproduction_P Parameter: Treatment Value: Drought vs. No Drought
ctcccgacgccattatccttcaccctcggagcttttcttgaagcagggattcttctaatcattaatccctacttctttctttcttttttgtttgttctcctttgagatctatctagtactagtagtaaaaccccctcccctccattgaatttgaattgaattgaatctctgggaatcaaatctttgatgtcgcatctggacgacattccttctacgcctgggaaattcaagatgatggataaatcccccttcttcctccaccgtactcgttggcaatcctccgtcgccaagcttgccttttggtcccttgtctttttcggattgctcttcatcttcttctaccgatctcccatctccaatcccgattcctctcgccgctctcttcgcacctactcttggggcggtcccgcctgggagaaacgcgtccgatcctccgctcgtgtccgcacccgcaacggcgtctccgttctcgtcaccggggccgccggtttcgtcgggactcacgtctctgccgctcttaaacgacgcggcgacggcgttctaggcctcgacaacttcaacgattactacgacacctctctcaagagatctcgacaagccctcctcgagagaagcggagtgttcatcgttgaaggagacatcaacgatctgtctctcctcaagaagctcttcgaggtcgtccctttcactcacgtcatgcatcttgccgctcaagctggtgtcagatacgccatggagaaccccggctcctacgttcacagcaacatcgctggtttcgttaacctcctcgaggtctgtaaatccgctaatcctcagccggcgatcgtgtgggcatcgtctagctccgtctacggtttaaacaccaaagtccccttctctgagaaagacagaacagatcagcctgcgagtctctacgctgcgaccaagaaagctggagaagagattgcccacacttacaaccacatctacgggctctctctcaccggcttgaggtttttcacggtgtacgggccgtggggaagacctgacatggcttacttcttcttcaccagagacatcctcaaagggaaagctatttcgatcttcgaaggagccaatcacggaacagtggctagggatttcacatacatcgatgacatagtgaaaggatgtttgggggctctggacacggcggagaagagcacagggagtggtggcaagaagcggggagcggctcagctaagggtattcaacctggggaacacatctccggtgccggtgactgatcttgtgagtatattggagagattgttgaaagtgaaagccaagaggaacatgatgaagctgccgaggaatggtgatgtgcccttcacacatgctaatatcagttcggcacagagagagtttgggtacaaaccaagcacggatttgcagactggtctaaagaagtttgtgagatggtatcttggttactacaagcaggggggaaagaaagttgctgctgctgcttgaatattgataattcacaagattctttagtgtatagtgagtgagtggattgatacacaccataaagaagagacatgattcattcgagattatatattctttacatttgtgttctgctttgtaatttcgatctcttgagtcgaatctctgatatttatttcataggaagttcac

SEQ ID NO: 40836 - protein, 434 aa, Arabidopsis thaliana
  peptide (1)..(434): Ceres Seq. ID no. 13491576
  misc_feature (94)..(423): Pfam Name: NAD dependent epimerase/dehydratase family Pfam Description: NAD dependent epimerase/dehydratase family
  misc_feature (61)..(431): Homolog of NCBI NO: 29647497 NR Description: OJ1191_A10.21 [Oryza sativa (japonica
  misc_feature (70)..(423): Homolog of NCBI NO: 24417280 NR Description: unknown [Arabidopsis thaliana]
  misc_feature (70)..(423): Homolog of NCBI NO: 15229524 NR Description: NAD-dependent epimerase/dehydratase family
  misc_feature (1)..(423): Homolog of NCBI NO: 15234745 NR Description: nucleotide sugar epimerase family [Arabidopsis
  misc_feature (1)..(429): Homolog of NCBI NO: 15293119 NR Description: putative nucleotide sugar epimerase [Arabidopsis
  misc_feature (1)..(429): Homolog of NCBI NO: 15234486 NR Description: nucleotide sugar epimerase family [Arabidopsis
  misc_feature (1)..(432): Homolog of NCBI NO: 15225451 NR Description: nucleotide sugar epimerase family [Arabidopsis
  misc_feature (1)..(432): Homolog of NCBI NO: 15236712 NR Description: nucleotide sugar epimerase family [Arabidopsis
  misc_feature (16)..(434): Homolog of NCBI NO: 21536982 NR Description: nucleotide sugar epimerase, putative [Arabidopsis
  misc_feature (1)..(434): Homolog of NCBI NO: 15217591 NR Description: nucleotide sugar epimerase family [Arabidopsis
MSHLDDIPSTPGKFKMMDKSPFFLHRTRWQSSVAKLAFWSLVFFGLLFIFFYRSPISNPDSSRRSLRTYSWGGPAWEKRVRSSARVRTRNGVSVLVTGAAGFVGTHVSAALKRRGDGVLGLDNFNDYYDTSLKRSRQALLERSGVFIVEGDINDLSLLKKLFEVVPFTHVMHLAAQAGVRYAMENPGSYVHSNIAGFVNLLEVCKSANPQPAIVWASSSSVYGLNTKVPFSEKDRTDQPASLYAATKKAGEEIAHTYNHIYGLSLTGLRFFTVYGPWGRPDMAYFFFTRDILKGKAISIFEGANHGTVARDFTYIDDIVKGCLGALDTAEKSTGSGGKKRGAAQLRVFNLGNTSPVPVTDLVSILERLLKVKAKRNMMKLPRNGDVPFTHANISSAQREFGYKPSTDLQTGLKKFVRWYLGYYKQGGKKVAAAA

SEQ ID NO: 40837 - protein, 419 aa, Arabidopsis thaliana
  peptide (1)..(419): Ceres Seq. ID no. 13491577
  misc_feature (79)..(408): Pfam Name: NAD dependent epimerase/dehydratase family Pfam Description: NAD dependent epimerase/dehydratase family
  misc_feature (46)..(416): Homolog of NCBI NO: 29647497 NR Description: OJ1191_A10.21 [Oryza sativa (japonica
  misc_feature (55)..(408): Homolog of NCBI NO: 24417280 NR Description: unknown [Arabidopsis thaliana]
  misc_feature (55)..(408): Homolog of NCBI NO: 15229524 NR Description: NAD-dependent epimerase/dehydratase family
  misc_feature (1)..(408): Homolog of NCBI NO: 15234745 NR Description: nucleotide sugar epimerase family [Arabidopsis
  misc_feature (1)..(414): Homolog of NCBI NO: 15293119 NR Description: putative nucleotide sugar epimerase [Arabidopsis
  misc_feature (1)..(414): Homolog of NCBI NO: 15234486 NR Description: nucleotide sugar epimerase family [Arabidopsis
  misc_feature (1)..(417): Homolog of NCBI NO: 15225451 NR Description: nucleotide sugar epimerase family [Arabidopsis
  misc_feature (1)..(417): Homolog of NCBI NO: 15236712 NR Description: nucleotide sugar epimerase family [Arabidopsis
  misc_feature (1)..(419): Homolog of NCBI NO: 21536982 NR Description: nucleotide sugar epimerase, putative [Arabidopsis
  misc_feature (1)..(419): Homolog of NCBI NO: 15217591 NR Description: nucleotide sugar epimerase family [Arabidopsis
MMDKSPFFLHRTRWQSSVAKLAFWSLVFFGLLFIFFYRSPISNPDSSRRSLRTYSWGGPAWEKRVRSSARVRTRNGVSVLVTGAAGFVGTHVSAALKRRGDGVLGLDNFNDYYDTSLKRSRQALLERSGVFIVEGDINDLSLLKKLFEVVPFTHVMHLAAQAGVRYAMENPGSYVHSNIAGFVNLLEVCKSANPQPAIVWASSSSVYGLNTKVPFSEKDRTDQPASLYAATKKAGEEIAHTYNHIYGLSLTGLRFFTVYGPWGRPDMAYFFFTRDILKGKAISIFEGANHGTVARDFTYIDDIVKGCLGALDTAEKSTGSGGKKRGAAQLRVFNLGNTSPVPVTDLVSILERLLKVKAKRNMMKLPRNGDVPFTHANISSAQREFGYKPSTDLQTGLKKFVRWYLGYYKQGGKKVAAAA

SEQ ID NO: 40838 - protein, 418 aa, Arabidopsis thaliana
  peptide (1)..(418): Ceres Seq. ID no. 13491578
  misc_feature (78)..(407): Pfam Name: NAD dependent epimerase/dehydratase family Pfam Description: NAD dependent epimerase/dehydratase family
  misc_feature (45)..(415): Homolog of NCBI NO: 29647497 NR Description: OJ1191_A10.21 [Oryza sativa (japonica
  misc_feature (54)..(407): Homolog of NCBI NO: 24417280 NR Description: unknown [Arabidopsis thaliana]
  misc_feature (54)..(407): Homolog of NCBI NO: 15229524 NR Description: NAD-dependent epimerase/dehydratase family
  misc_feature (1)..(407): Homolog of NCBI NO: 15234745 NR Description: nucleotide sugar epimerase family [Arabidopsis
  misc_feature (1)..(413): Homolog of NCBI NO: 15293119 NR Description: putative nucleotide sugar epimerase [Arabidopsis
  misc_feature (1)..(413): Homolog of NCBI NO: 15234486 NR Description: nucleotide sugar epimerase family [Arabidopsis
  misc_feature (1)..(416): Homolog of NCBI NO: 15225451 NR Description: nucleotide sugar epimerase family [Arabidopsis
  misc_feature (1)..(416): Homolog of NCBI NO: 15236712 NR Description: nucleotide sugar epimerase family [Arabidopsis
  misc_feature (1)..(418): Homolog of NCBI NO: 21536982 NR Description: nucleotide sugar epimerase, putative [Arabidopsis
  misc_feature (1)..(418): Homolog of NCBI NO: 15217591 NR Description: nucleotide sugar epimerase family [Arabidopsis
MDKSPFFLHRTRWQSSVAKLAFWSLVFFGLLFIFFYRSPISNPDSSRRSLRTYSWGGPAWEKRVRSSARVRTRNGVSVLVTGAAGFVGTHVSAALKRRGDGVLGLDNFNDYYDTSLKRSRQALLERSGVFIVEGDINDLSLLKKLFEVVPFTHVMHLAAQAGVRYAMENPGSYVHSNIAGFVNLLEVCKSANPQPAIVWASSSSVYGLNTKVPFSEKDRTDQPASLYAATKKAGEEIAHTYNHIYGLSLTGLRFFTVYGPWGRPDMAYFFFTRDILKGKAISIFEGANHGTVARDFTYIDDIVKGCLGALDTAEKSTGSGGKKRGAAQLRVFNLGNTSPVPVTDLVSILERLLKVKAKRNMMKLPRNGDVPFTHANISSAQREFGYKPSTDLQTGLKKFVRWYLGYYKQGGKKVAAAA

SEQ ID NO: 40839 - DNA, 1110 bp, Arabidopsis thaliana
  misc_feature (1)..(1110): Ceres Seq. ID no. 12439693
  misc_feature: MA Experiment ID: 108462 Result: Down-regulated in Transcription
  misc_feature: MA Experiment 108462 PARAMETER Experiment Name: At_Germinating_Seeds_cDNA_P Parameter: Age (day) Value: 2 vs. 0
  misc_feature: MA Experiment 108462 PARAMETER Experiment Name: At_Germinating_Seeds_cDNA_P Parameter: Tissue Value: Germinating Seeds
  misc_feature: MA Experiment ID: 108463 Result: Down-regulated in Transcription
  misc_feature: MA Experiment 108463 PARAMETER Experiment Name: At_Germinating_Seeds_cDNA_P Parameter: Age (day) Value: 3 vs. 0
  misc_feature: MA Experiment 108463 PARAMETER Experiment Name: At_Germinating_Seeds_cDNA_P Parameter: Tissue Value: Germinating Seeds
  misc_feature: MA Experiment ID: 108464 Result: Down-regulated in Transcription
  misc_feature: MA Experiment 108464 PARAMETER Experiment Name: At_Germinating_Seeds_cDNA_P Parameter: Age (day) Value: 4 vs. 0
  misc_feature: MA Experiment 108464 PARAMETER Experiment Name: At_Germinating_Seeds_cDNA_P Parameter: Tissue Value: Germinating Seeds
  misc_feature: MA Experiment ID: 108501 Result: Down-regulated in Transcription
  misc_feature: MA Experiment 108501 PARAMETER Experiment Name: At_ap2_floral_buds_cDNA_P Parameter: Plant Line Value: ap2 (Ler.)
  misc_feature: MA Experiment 108501 PARAMETER Experiment Name: At_ap2_floral_buds_cDNA_P Parameter: Tissue Value: Closed Flower
  misc_feature: MA Experiment ID: 20000113 Result: Down-regulated in Transcription
  misc_feature: MA Experiment 20000113 PARAMETER Experiment Name: At_42deg_Heat_cDNA_P Parameter: Temperature (deg C) Value: 42 vs. 22
  misc_feature: MA Experiment 20000113 PARAMETER Experiment Name: At_42deg_Heat_cDNA_P Parameter: Timepoint (hr) Value: 8
  misc_feature: MA Experiment 20000113 PARAMETER Experiment Name: At_42deg_Heat_cDNA_P Parameter: Tissue Value: Aerial
  misc_feature: MA Experiment ID: 20000173 Result: Down-regulated in Transcription
  misc_feature: MA Experiment 20000173 PARAMETER Experiment Name: At_42deg_Heat_P Parameter: Age (day) Value: 14
  misc_feature: MA Experiment 20000173 PARAMETER Experiment Name: At_42deg_Heat_P Parameter: Organism Value: A. thaliana
  misc_feature: MA Experiment 20000173 PARAMETER Experiment Name: At_42deg_Heat_P Parameter: Plant Line Value: WS
  misc_feature: MA Experiment 20000173 PARAMETER Experiment Name: At_42deg_Heat_P Parameter: Temperature (deg C) Value: 42 vs. 22
  misc_feature: MA Experiment 20000173 PARAMETER Experiment Name: At_42deg_Heat_P Parameter: Timepoint (hr) Value: 6
  misc_feature: MA Experiment 20000173 PARAMETER Experiment Name: At_42deg_Heat_P Parameter: Tissue Value: Aerial
  misc_feature: MA Experiment ID: 20000184 Result: Down-regulated in Transcription
  misc_feature: MA Experiment 20000184 PARAMETER Experiment Name: At_Shoots__P Parameter: Age (day) Value: 7
  misc_feature: MA Experiment 20000184 PARAMETER Experiment Name: At_Shoots__P Parameter: Tissue Value: Shoots vs. Whole Plant
  misc_feature: MA Experiment ID: 20000185 Result: Down-regulated in Transcription
  misc_feature: MA Experiment 20000185 PARAMETER Experiment Name: At_Roots__P Parameter: Age (day) Value: 7 vs. 21
  misc_feature: MA Experiment 20000185 PARAMETER Experiment Name: At_Roots__P Parameter: Organism Value: A. thaliana
  misc_feature: MA Experiment 20000185 PARAMETER Experiment Name: At_Roots__P Parameter: Tissue Value: Roots vs. Whole Plant
  misc_feature: MA Experiment ID: 20000234 Result: Down-regulated in Transcription
  misc_feature: MA Experiment 20000234 PARAMETER Experiment Name: At_Siliques_P Parameter: Age (day) Value: 21
  misc_feature: MA Experiment 20000234 PARAMETER Experiment Name: At_Siliques_P Parameter: Organism Value: A. thaliana
  misc_feature: MA Experiment 20000234 PARAMETER Experiment Name: At_Siliques_P Parameter: Plant Line Value: WS
  misc_feature: MA Experiment 20000234 PARAMETER Experiment Name: At_Siliques_P Parameter: Tissue Value: Less Than 5mm Siliques vs. Whole Plant
  misc_feature: MA Experiment ID: 20000235 Result: Down-regulated in Transcription
  misc_feature: MA Experiment 20000235 PARAMETER Experiment Name: At_Siliques_P Parameter: Age (day) Value: 21
  misc_feature: MA Experiment 20000235 PARAMETER Experiment Name: At_Siliques_P Parameter: Organism Value: A. thaliana
  misc_feature: MA Experiment 20000235 PARAMETER Experiment Name: At_Siliques_P Parameter: Plant Line Value: WS
  misc_feature: MA Experiment 20000235 PARAMETER Experiment Name: At_Siliques_P Parameter: Tissue Value: 5-10mm Siliques vs. Whole Plant
  misc_feature: MA Experiment ID: 20000265 Result: Up-regulated in Transcription
  misc_feature: MA Experiment 20000265 PARAMETER Experiment Name: At_Open_Flower_P Parameter: Age (day) Value: 21
  misc_feature: MA Experiment 20000265 PARAMETER Experiment Name: At_Open_Flower_P Parameter: Plant Line Value: WS
  misc_feature: MA Experiment 20000265 PARAMETER Experiment Name: At_Open_Flower_P Parameter: Tissue Value: Closed Flower vs. Whole Plant
  misc_feature: MA Experiment ID: 20000439 Result: Down-regulated in Transcription
  misc_feature: MA Experiment 20000439 PARAMETER Experiment Name: At_Roots__P Parameter: Age (day) Value: 14 vs. 21
  misc_feature: MA Experiment 20000439 PARAMETER Experiment Name: At_Roots__P Parameter: Organism Value: A. thaliana
  misc_feature: MA Experiment 20000439 PARAMETER Experiment Name: At_Roots__P Parameter: Tissue Value: Roots vs. Whole Plant
  misc_feature: MA Experiment ID: 20001247 Result: Down-regulated in Transcription
  misc_feature: MA Experiment 20001247 PARAMETER Experiment Name: At_Far-red-induction_P Parameter: Age (day) Value: 7
  misc_feature: MA Experiment 20001247 PARAMETER Experiment Name: At_Far-red-induction_P Parameter: Light Value: Far-red vs. White
  misc_feature: MA Experiment 20001247 PARAMETER Experiment Name: At_Far-red-induction_P Parameter: Organism Value: A. thaliana
  misc_feature: MA Experiment 20001247 PARAMETER Experiment Name: At_Far-red-induction_P Parameter: Plant Line Value: Columbia
  misc_feature: MA Experiment 20001247 PARAMETER Experiment Name: At_Far-red-induction_P Parameter: Timepoint (hr) Value: 1
  misc_feature: MA Experiment 20001247 PARAMETER Experiment Name: At_Far-red-induction_P Parameter: Tissue Value: Whole Plant
  misc_feature: MA Experiment ID: 20001556 Result: Up-regulated in Transcription
  misc_feature: MA Experiment 20001556 PARAMETER Experiment Name: At_Drought_Soil_Dry_P Parameter: Age (day) Value: 26
  misc_feature: MA Experiment 20001556 PARAMETER Experiment Name: At_Drought_Soil_Dry_P Parameter: Organism Value: A. thaliana
  misc_feature: MA Experiment 20001556 PARAMETER Experiment Name: At_Drought_Soil_Dry_P Parameter: Plant Line Value: WS
  misc_feature: MA Experiment 20001556 PARAMETER Experiment Name: At_Drought_Soil_Dry_P Parameter: Post Timepoint (hr) Value: None
  misc_feature: MA Experiment 20001556 PARAMETER Experiment Name: At_Drought_Soil_Dry_P Parameter: Post-Treatment Value: None
  misc_feature: MA Experiment 20001556 PARAMETER Experiment Name: At_Drought_Soil_Dry_P Parameter: Timepoint (day) Value: 12
  misc_feature: MA Experiment 20001556 PARAMETER Experiment Name: At_Drought_Soil_Dry_P Parameter: Treatment Value: Drought vs. No Drought
  misc_feature: MA Experiment ID: 20001910 Result: Down-regulated in Transcription
  misc_feature: MA Experiment 20001910 PARAMETER Experiment Name: At_Drought_Reproduction_P Parameter: Age (day) Value: 37
  misc_feature: MA Experiment 20001910 PARAMETER Experiment Name: At_Drought_Reproduction_P Parameter: Organism Value: A. thaliana
  misc_feature: MA Experiment 20001910 PARAMETER Experiment Name: At_Drought_Reproduction_P Parameter: Plant Line Value: WS
  misc_feature: MA Experiment 20001910 PARAMETER Experiment Name: At_Drought_Reproduction_P Parameter: Timepoint (day) Value: 7
  misc_feature: MA Experiment 20001910 PARAMETER Experiment Name: At_Drought_Reproduction_P Parameter: Tissue Value: Flowers
  misc_feature: MA Experiment 20001910 PARAMETER Experiment Name: At_Drought_Reproduction_P Parameter: Treatment Value: Drought vs. No Drought
attcaaaattatataaaatgggaagaagcagcgacgagacgccagtggttctcatcacaggatgttctcagggaggaatcggtcacgcgttggcgcgtgagttctctgctaatggttgtcgtgtggtggcgacgagtcgatcgcagaagacgatgactgaattggagaaagattccaagttctttgtgcaagagctcgatgttcagtctgagcagagcgtgagtaaagttgtgtcgaaagttatcgacaaatttggtcagattgatgttttggttaataacgccggagttcagtgtatcggacctttggcggagattccaatttcagccatggattacaccttcaacaccaatgtgctcggtgaatgaaaattttcgagttacttcttatatgcacaccatgtgtttgttaaaattcttgactcaactctttcatgttttattttgctctgttgatttgggttgtgagaagtctcttcaagaactgaactttgtaaagaaactttgcaggttccatgaggatgactcaagctgttgtacctcacatggcgtctaagaaaaagggaaagattgtgaacataggaagtattagcataatggcaccaggaccatgggctggggtttatactgcatcaaaagctgctcttcatgctcttaccgacactttaaggttggagcttaagccatttgggattgatgtaatcaacattgtaccaggaggtattcaatcaaacatagctaactcagggatatcgagtttcaacaatttacctgaattgaaactatacaaaccgttcgaggacgctatccgtgagagagcgtttctgtcgcaaaacataaagccgatacccacagagacttttgcgaaagagactgtttccgtggtgctgaagaaaaacccaccggcttggtactctacaggtaggttatctacagtcatggcgatcatgcaccatataccgattttcatgaaagattttctgttgactaagagttttatgaaaaagggagtaaaacctgaatagttgtgttcttggttagaaactgttttaaatgtatccaacaaagtaaatgtgttgcctaaccatgttacatctttagtaaaaggatt

SEQ ID NO: 40840 - protein, 169 aa, Arabidopsis thaliana
  peptide (1)..(169): Ceres Seq. ID no. 12439694
  misc_feature (3)..(161): Homolog of NCBI NO: 15599078 NR Description: probable short-chain dehydrogenase [Pseudomonas
  misc_feature (3)..(161): Homolog of NCBI NO: 23470225 NR Description: hypothetical protein [Pseudomonas syringae pv.
  misc_feature (3)..(161): Homolog of NCBI NO: 28868436 NR Description: oxidoreductase, short chain
  misc_feature (1)..(163): Homolog of NCBI NO: 38567881 NR Description: OSJNBa0036B21.7 [Oryza sativa (japonica
  misc_feature (1)..(164): Homolog of NCBI NO: 26453106 NR Description: unknown protein [Arabidopsis thaliana]
  misc_feature (1)..(164): Homolog of NCBI NO: 30682984 NR Description: short-chain dehydrogenase/reductase family
  misc_feature (1)..(164): Homolog of NCBI NO: 11358313 NR Description: hypothetical protein T31P16.40 - Arabidopsis
  misc_feature (1)..(169): Homolog of NCBI NO: 26450169 NR Description: unknown protein [Arabidopsis thaliana]
  misc_feature (1)..(169): Homolog of NCBI NO: 10178182 NR Description: contains similarity to
  misc_feature (1)..(169): Homolog of NCBI NO: 18424923 NR Description: Expressed protein
MRMTQAVVPHMASKKKGKIVNIGSISIMAPGPWAGVYTASKAALHALTDTLRLELKPFGIDVINIVPGGIQSNIANSGISSFNNLPELKLYKPFEDAIRERAFLSQNIKPIPTETFAKETVSVVLKKNPPAWYSTGRLSTVMAIMHHIPIFMKDFLLTKSFMKKGVKPE

SEQ ID NO: 40841 - protein, 167 aa, Arabidopsis thaliana
  peptide (1)..(167): Ceres Seq. ID no. 12439695
  misc_feature (1)..(159): Homolog of NCBI NO: 15599078 NR Description: probable short-chain dehydrogenase [Pseudomonas
  misc_feature (1)..(159): Homolog of NCBI NO: 23470225 NR Description: hypothetical protein [Pseudomonas syringae pv.
  misc_feature (1)..(159): Homolog of NCBI NO: 28868436 NR Description: oxidoreductase, short chain
  misc_feature (1)..(161): Homolog of NCBI NO: 38567881 NR Description: OSJNBa0036B21.7 [Oryza sativa (japonica
  misc_feature (1)..(162): Homolog of NCBI NO: 26453106 NR Description: unknown protein [Arabidopsis thaliana]
  misc_feature (1)..(162): Homolog of NCBI NO: 30682984 NR Description: short-chain dehydrogenase/reductase family
  misc_feature (1)..(162): Homolog of NCBI NO: 11358313 NR Description: hypothetical protein T31P16.40 - Arabidopsis
  misc_feature (1)..(167): Homolog of NCBI NO: 26450169 NR Description: unknown protein [Arabidopsis thaliana]
  misc_feature (1)..(167): Homolog of NCBI NO: 10178182 NR Description: contains similarity to
  misc_feature (1)..(167): Homolog of NCBI NO: 18424923 NR Description: Expressed protein
MTQAVVPHMASKKKGKIVNIGSISIMAPGPWAGVYTASKAALHALTDTLRLELKPFGIDVINIVPGGIQSNIANSGISSFNNLPELKLYKPFEDAIRERAFLSQNIKPIPTETFAKETVSVVLKKNPPAWYSTGRLSTVMAIMHHIPIFMKDFLLTKSFMKKGVKPE

SEQ ID NO: 40842 - protein, 159 aa, Arabidopsis thaliana
  peptide (1)..(159): Ceres Seq. ID no. 12439696
  misc_feature (1)..(151): Homolog of NCBI NO: 15599078 NR Description: probable short-chain dehydrogenase [Pseudomonas
  misc_feature (1)..(151): Homolog of NCBI NO: 23470225 NR Description: hypothetical protein [Pseudomonas syringae pv.
  misc_feature (1)..(151): Homolog of NCBI NO: 28868436 NR Description: oxidoreductase, short chain
  misc_feature (1)..(153): Homolog of NCBI NO: 38567881 NR Description: OSJNBa0036B21.7 [Oryza sativa (japonica
  misc_feature (1)..(154): Homolog of NCBI NO: 26453106 NR Description: unknown protein [Arabidopsis thaliana]
  misc_feature (1)..(154): Homolog of NCBI NO: 30682984 NR Description: short-chain dehydrogenase/reductase family
  misc_feature (1)..(154): Homolog of NCBI NO: 11358313 NR Description: hypothetical protein T31P16.40 - Arabidopsis
  misc_feature (1)..(159): Homolog of NCBI NO: 26450169 NR Description: unknown protein [Arabidopsis thaliana]
  misc_feature (1)..(159): Homolog of NCBI NO: 10178182 NR Description: contains similarity to
  misc_feature (1)..(159): Homolog of NCBI NO: 18424923 NR Description: Expressed protein
MASKKKGKIVNIGSISIMAPGPWAGVYTASKAALHALTDTLRLELKPFGIDVINIVPGGIQSNIANSGISSFNNLPELKLYKPFEDAIRERAFLSQNIKPIPTETFAKETVSVVLKKNPPAWYSTGRLSTVMAIMHHIPIFMKDFLLTKSFMKKGVKPE

SEQ ID NO: 40843 - DNA, 2010 bp, Arabidopsis thaliana
  misc_feature (1)..(2010): Ceres Seq. ID no. 13489428
  misc_feature: MA Experiment ID: 108462 Result: Down-regulated in Transcription
  misc_feature: MA Experiment 108462 PARAMETER Experiment Name: At_Germinating_Seeds_cDNA_P Parameter: Age (day) Value: 2 vs. 0
  misc_feature: MA Experiment 108462 PARAMETER Experiment Name: At_Germinating_Seeds_cDNA_P Parameter: Tissue Value: Germinating Seeds
  misc_feature: MA Experiment ID: 108463 Result: Down-regulated in Transcription
  misc_feature: MA Experiment 108463 PARAMETER Experiment Name: At_Germinating_Seeds_cDNA_P Parameter: Age (day) Value: 3 vs. 0
  misc_feature: MA Experiment 108463 PARAMETER Experiment Name: At_Germinating_Seeds_cDNA_P Parameter: Tissue Value: Germinating Seeds
  misc_feature: MA Experiment ID: 108464 Result: Down-regulated in Transcription
  misc_feature: MA Experiment 108464 PARAMETER Experiment Name: At_Germinating_Seeds_cDNA_P Parameter: Age (day) Value: 4 vs. 0
  misc_feature: MA Experiment 108464 PARAMETER Experiment Name: At_Germinating_Seeds_cDNA_P Parameter: Tissue Value: Germinating Seeds
  misc_feature: MA Experiment ID: 20000071 Result: Down-regulated in Transcription
  misc_feature: MA Experiment 20000071 PARAMETER Experiment Name: At_100uM_ABA_Mutants_cDNA_P Parameter: Plant Line Value: CS8104
  misc_feature: MA Experiment 20000071 PARAMETER Experiment Name: At_100uM_ABA_Mutants_cDNA_P Parameter: Timepoint (hr) Value: 6
  misc_feature: MA Experiment 20000071 PARAMETER Experiment Name: At_100uM_ABA_Mutants_cDNA_P Parameter: Tissue Value: Aerial
  misc_feature: MA Experiment 20000071 PARAMETER Experiment Name: At_100uM_ABA_Mutants_cDNA_P Parameter: Treatment Value: 100uM ABA vs. No Treatment
  misc_feature: MA Experiment ID: 20000072 Result: Down-regulated in Transcription
  misc_feature: MA Experiment 20000072 PARAMETER Experiment Name: At_100uM_ABA_Mutants_cDNA_P Parameter: Plant Line Value: CS8105
  misc_feature: MA Experiment 20000072 PARAMETER Experiment Name: At_100uM_ABA_Mutants_cDNA_P Parameter: Timepoint (hr) Value: 6
  misc_feature: MA Experiment 20000072 PARAMETER Experiment Name: At_100uM_ABA_Mutants_cDNA_P Parameter: Tissue Value: Aerial
  misc_feature: MA Experiment 20000072 PARAMETER Experiment Name: At_100uM_ABA_Mutants_cDNA_P Parameter: Treatment Value: 100uM ABA vs. No Treatment
  misc_feature: MA Experiment ID: 20000087 Result: Down-regulated in Transcription
  misc_feature: MA Experiment 20000087 PARAMETER Experiment Name: At_100uM_ABA_Mutants_cDNA_P Parameter: Plant Line Value: WS
  misc_feature: MA Experiment 20000087 PARAMETER Experiment Name: At_100uM_ABA_Mutants_cDNA_P Parameter: Timepoint (hr) Value: 6
  misc_feature: MA Experiment 20000087 PARAMETER Experiment Name: At_100uM_ABA_Mutants_cDNA_P Parameter: Tissue Value: Aerial
  misc_feature: MA Experiment 20000087 PARAMETER Experiment Name: At_100uM_ABA_Mutants_cDNA_P Parameter: Treatment Value: 100uM ABA vs. No Treatment
  misc_feature: MA Experiment ID: 20000117 Result: Down-regulated in Transcription
  misc_feature: MA Experiment 20000117 PARAMETER Experiment Name: At_100uM_ABA_Mutants_cDNA_P Parameter: Plant Line Value: Columbia
  misc_feature: MA Experiment 20000117 PARAMETER Experiment Name: At_100uM_ABA_Mutants_cDNA_P Parameter: Timepoint (hr) Value: 6
  misc_feature: MA Experiment 20000117 PARAMETER Experiment Name: At_100uM_ABA_Mutants_cDNA_P Parameter: Tissue Value: Aerial
  misc_feature: MA Experiment 20000117 PARAMETER Experiment Name: At_100uM_ABA_Mutants_cDNA_P Parameter: Treatment Value: 100uM ABA vs. No Treatment
  misc_feature: MA Experiment ID: 20000185 Result: Up-regulated in Transcription
  misc_feature: MA Experiment 20000185 PARAMETER Experiment Name: At_Roots__P Parameter: Age (day) Value: 7 vs. 21
  misc_feature: MA Experiment 20000185 PARAMETER Experiment Name: At_Roots__P Parameter: Organism Value: A. thaliana
  misc_feature: MA Experiment 20000185 PARAMETER Experiment Name: At_Roots__P Parameter: Tissue Value: Roots vs. Whole Plant
  misc_feature: MA Experiment ID: 20000227 Result: Up-regulated in Transcription
  misc_feature: MA Experiment 20000227 PARAMETER Experiment Name: At_Root-Tips-vs-Tops_P Parameter: Tissue Value: Root Tips vs. Root Tops
  misc_feature: MA Experiment ID: 20000234 Result: Up-regulated in Transcription
  misc_feature: MA Experiment 20000234 PARAMETER Experiment Name: At_Siliques_P Parameter: Age (day) Value: 21
  misc_feature: MA Experiment 20000234 PARAMETER Experiment Name: At_Siliques_P Parameter: Organism Value: A. thaliana
  misc_feature: MA Experiment 20000234 PARAMETER Experiment Name: At_Siliques_P Parameter: Plant Line Value: WS
  misc_feature: MA Experiment 20000234 PARAMETER Experiment Name: At_Siliques_P Parameter: Tissue Value: Less Than 5mm Siliques vs. Whole Plant
  misc_feature: MA Experiment ID: 20000235 Result: Up-regulated in Transcription
  misc_feature: MA Experiment 20000235 PARAMETER Experiment Name: At_Siliques_P Parameter: Age (day) Value: 21
  misc_feature: MA Experiment 20000235 PARAMETER Experiment Name: At_Siliques_P Parameter: Organism Value: A. thaliana
  misc_feature: MA Experiment 20000235 PARAMETER Experiment Name: At_Siliques_P Parameter: Plant Line Value: WS
  misc_feature: MA Experiment 20000235 PARAMETER Experiment Name: At_Siliques_P Parameter: Tissue Value: 5-10mm Siliques vs. Whole Plant
  misc_feature: MA Experiment ID: 20000265 Result: Down-regulated in Transcription
  misc_feature: MA Experiment 20000265 PARAMETER Experiment Name: At_Open_Flower_P Parameter: Age (day) Value: 21
  misc_feature: MA Experiment 20000265 PARAMETER Experiment Name: At_Open_Flower_P Parameter: Plant Line Value: WS
  misc_feature: MA Experiment 20000265 PARAMETER Experiment Name: At_Open_Flower_P Parameter: Tissue Value: Closed Flower vs. Whole Plant
  misc_feature: MA Experiment ID: 20000437 Result: Down-regulated in Transcription
  misc_feature: MA Experiment 20000437 PARAMETER Experiment Name: At_Drought_P Parameter: Age (day) Value: 8
  misc_feature: MA Experiment 20000437 PARAMETER Experiment Name: At_Drought_P Parameter: Organism Value: A. thaliana
  misc_feature: MA Experiment 20000437 PARAMETER Experiment Name: At_Drought_P Parameter: Plant Line Value: WS
  misc_feature: MA Experiment 20000437 PARAMETER Experiment Name: At_Drought_P Parameter: Timepoint (hr) Value: 24
  misc_feature: MA Experiment 20000437 PARAMETER Experiment Name: At_Drought_P Parameter: Tissue Value: Whole Plant
  misc_feature: MA Experiment 20000437 PARAMETER Experiment Name: At_Drought_P Parameter: Treatment Value: Drought vs. No Drought
  misc_feature: MA Experiment ID: 20000495 Result: Up-regulated in Transcription
  misc_feature: MA Experiment 20000495 PARAMETER Experiment Name: At_Guard_Cells_P Parameter: Harvest Date Value: 8/2/2002
  misc_feature: MA Experiment 20000495 PARAMETER Experiment Name: At_Guard_Cells_P Parameter: Organism Value: A. thaliana
  misc_feature: MA Experiment 20000495 PARAMETER Experiment Name: At_Guard_Cells_P Parameter: Tissue Value: Guard Cells vs. Leaves
  misc_feature: MA Experiment ID: 20000573 Result: Up-regulated in Transcription
  misc_feature: MA Experiment 20000573 PARAMETER Experiment Name: At_100uM_ABA_Mutants__P Parameter: Organism Value: A. thaliana
  misc_feature: MA Experiment 20000573 PARAMETER Experiment Name: At_100uM_ABA_Mutants__P Parameter: Plant Line Value: CS22 vs. Ler wt
  misc_feature: MA Experiment 20000573 PARAMETER Experiment Name: At_100uM_ABA_Mutants__P Parameter: Timepoint (hr) Value: N/A
  misc_feature: MA Experiment 20000573 PARAMETER Experiment Name: At_100uM_ABA_Mutants__P Parameter: Tissue Value: Whole Plant
  misc_feature: MA Experiment 20000573 PARAMETER Experiment Name: At_100uM_ABA_Mutants__P Parameter: Treatment Value: None
  misc_feature: MA Experiment ID: 20000794 Result: Down-regulated in Transcription
  misc_feature: MA Experiment 20000794 PARAMETER Experiment Name: At_Petals_P Parameter: Age (day) Value: 23-25 days
  misc_feature: MA Experiment 20000794 PARAMETER Experiment Name: At_Petals_P Parameter: Plant Line Value: WS
  misc_feature: MA Experiment 20000794 PARAMETER Experiment Name: At_Petals_P Parameter: Tissue Value: Petals vs. Whole plant
  misc_feature: MA Experiment ID: 20001247 Result: Up-regulated in Transcription
  misc_feature: MA Experiment 20001247 PARAMETER Experiment Name: At_Far-red-induction_P Parameter: Age (day) Value: 7
  misc_feature: MA Experiment 20001247 PARAMETER Experiment Name: At_Far-red-induction_P Parameter: Light Value: Far-red vs. White
  misc_feature: MA Experiment 20001247 PARAMETER Experiment Name: At_Far-red-induction_P Parameter: Organism Value: A. thaliana
  misc_feature: MA Experiment 20001247 PARAMETER Experiment Name: At_Far-red-induction_P Parameter: Plant Line Value: Columbia
  misc_feature: MA Experiment 20001247 PARAMETER Experiment Name: At_Far-red-induction_P Parameter: Timepoint (hr) Value: 1
  misc_feature: MA Experiment 20001247 PARAMETER Experiment Name: At_Far-red-induction_P Parameter: Tissue Value: Whole Plant
  misc_feature: MA Experiment ID: 20001556 Result: Down-regulated in Transcription
  misc_feature: MA Experiment 20001556 PARAMETER Experiment Name: At_Drought_Soil_Dry_P Parameter: Age (day) Value: 26
  misc_feature: MA Experiment 20001556 PARAMETER Experiment Name: At_Drought_Soil_Dry_P Parameter: Organism Value: A. thaliana
  misc_feature: MA Experiment 20001556 PARAMETER Experiment Name: At_Drought_Soil_Dry_P Parameter: Plant Line Value: WS
  misc_feature: MA Experiment 20001556 PARAMETER Experiment Name: At_Drought_Soil_Dry_P Parameter: Post Timepoint (hr) Value: None
  misc_feature: MA Experiment 20001556 PARAMETER Experiment Name: At_Drought_Soil_Dry_P Parameter: Post-Treatment Value: None
  misc_feature: MA Experiment 20001556 PARAMETER Experiment Name: At_Drought_Soil_Dry_P Parameter: Timepoint (day) Value: 12
  misc_feature: MA Experiment 20001556 PARAMETER Experiment Name: At_Drought_Soil_Dry_P Parameter: Treatment Value: Drought vs. No Drought
  misc_feature: MA Experiment ID: 20001557 Result: Up-regulated in Transcription
  misc_feature: MA Experiment 20001557 PARAMETER Experiment Name: At_Drought_Soil_Dry_P Parameter: Age (day) Value: 27
  misc_feature: MA Experiment 20001557 PARAMETER Experiment Name: At_Drought_Soil_Dry_P Parameter: Organism Value: A. thaliana
  misc_feature: MA Experiment 20001557 PARAMETER Experiment Name: At_Drought_Soil_Dry_P Parameter: Plant Line Value: WS
  misc_feature: MA Experiment 20001557 PARAMETER Experiment Name: At_Drought_Soil_Dry_P Parameter: Post Timepoint (hr) Value: 3
  misc_feature: MA Experiment 20001557 PARAMETER Experiment Name: At_Drought_Soil_Dry_P Parameter: Post-Treatment Value: Re-Water vs. No Drought
  misc_feature: MA Experiment 20001557 PARAMETER Experiment Name: At_Drought_Soil_Dry_P Parameter: Timepoint (day) Value: 13
  misc_feature: MA Experiment 20001557 PARAMETER Experiment Name: At_Drought_Soil_Dry_P Parameter: Treatment Value: Drought vs. No Drought
  misc_feature: MA Experiment ID: 20001558 Result: Up-regulated in Transcription
  misc_feature: MA Experiment 20001558 PARAMETER Experiment Name: At_Drought_Soil_Dry_P Parameter: Age (day) Value: 27
  misc_feature: MA Experiment 20001558 PARAMETER Experiment Name: At_Drought_Soil_Dry_P Parameter: Organism Value: A. thaliana
  misc_feature: MA Experiment 20001558 PARAMETER Experiment Name: At_Drought_Soil_Dry_P Parameter: Plant Line Value: WS
  misc_feature: MA Experiment 20001558 PARAMETER Experiment Name: At_Drought_Soil_Dry_P Parameter: Post Timepoint (hr) Value: 6
  misc_feature: MA Experiment 20001558 PARAMETER Experiment Name: At_Drought_Soil_Dry_P Parameter: Post-Treatment Value: Re-Water vs. No Drought
  misc_feature: MA Experiment 20001558 PARAMETER Experiment Name: At_Drought_Soil_Dry_P Parameter: Timepoint (day) Value: 13
  misc_feature: MA Experiment 20001558 PARAMETER Experiment Name: At_Drought_Soil_Dry_P Parameter: Treatment Value: Drought vs. No Drought
  misc_feature: MA Experiment ID: 20001911 Result: Down-regulated in Transcription
  misc_feature: MA Experiment 20001911 PARAMETER Experiment Name: At_Drought_Reproduction_P Parameter: Age (day) Value: 40
  misc_feature: MA Experiment 20001911 PARAMETER Experiment Name: At_Drought_Reproduction_P Parameter: Organism Value: A. thaliana
  misc_feature: MA Experiment 20001911 PARAMETER Experiment Name: At_Drought_Reproduction_P Parameter: Plant Line Value: WS
  misc_feature: MA Experiment 20001911 PARAMETER Experiment Name: At_Drought_Reproduction_P Parameter: Timepoint (day) Value: 10
  misc_feature: MA Experiment 20001911 PARAMETER Experiment Name: At_Drought_Reproduction_P Parameter: Tissue Value: Flowers
  misc_feature: MA Experiment 20001911 PARAMETER Experiment Name: At_Drought_Reproduction_P Parameter: Treatment Value: Drought vs. No Drought
gcactttttatagaccaaagtccctacattactctattttctcaaaccccatttagaagaagagttcttagctgtcttcaatctctttgtctgtatcattctttacggaagccatgaaaatggcatcaagaaaaacaacatccttgcttaatcatcttcttcttcttggagctttgactcttttgagcagtttggtgatagtgaaaggagaaagcccttacaagttttacacttggactgtgacttatggcattatctctcctcttggtgttcctcaacaggttattctcatcaatggtcagtttcctggtccaaaacttgaagttgtgaccaacgacaacatcatcctcaacctcatcaacaaacttgaccagcctttcctcttgacctggaatgggattaagcagaggaagaactcatggcaagatggtgttttgggaacaaactgtccgatccaaccaaactcaaacttcacttacaaattccaaaccaaagatcagatcggaactttcaactacttcccttccactgcttttcacaaagccgccggtggattcggagccatcaatgtctacgcaagacctggaattccaatcccttaccctctcccaaccgcagatttcactttactcgttggtgattggttcaaaaccaaccacaaaacgcttcaacagcgtttggattctggtggggttcttccatttcccgatgggatgcttataaatggacaaacccaatcaacgttttcaggcgaccaagggaagacttacatgttgagaatctccaatgttgggttatcaagcactttcaatttcagaatccaaggccatacaatgaaagtagttgaagttgaaggctctcatgttattcaaactgattatgattctcttgacattcacgttggccagtctttagcagttcttgttactttaaaccaatctcctaaagattattacatcgttgcaagcacccggttcataagaagcaagctttctgttatgggtttgttgcgttattctaactctcgcgtcccagcttctggtgatcctcccgctcttccacctggagagcttgtttggtccatgagacaagctagaaccttcagatggaacttaacagcaaatgcagctagaccaaaccctcaaggatctttccactatggaatgatcagtccaacaaagacatttgtcttctcaaattcagctcctttgattaatgggaagcaaagatatgcagtcaatggagtctcttatgtgaaatcagagacgcctcttaaactcgctgatcactttggcatctcaggagttttcagcaccaatgccattcaaagcgtcccatcaaactctccgccaacagttgcaacatcagttgttcaaacatctcaccatgacttccttgaaattgtatttcagaacaatgagaagtcaatgcagtcttggcatcttgatggatatgacttctgggtcgttggatttggttctggacaatggacacctgcaaaaagatcacttcacaatcttgttgatgctctgaccagacacacaactcaggtctacccagagtcttggacaacaatcttagtgtctttagacaatcaagggatgtggaatatgagatcagcgatatgggaaagacaatattcaggacaacagttttatctcaaagtatggaattcagtacagagtcttgccaatgaatacaatcctcctgacaatcttcaactctgtggcaaagctgttggacgacatgtttagagaaaatcctcttacagtttcctctgttctttcttaaaagtgatttactttaaggctttttcgattcaatttggttgaggttttgcgtttgttcgttatggtcatgagagtatggctgatggcttacttgtagtaaacaaagggaagaggaaagttatatgtgtcattggtggtaggctagcttggagttttataataatcttcctatatacaattctattcatgtgttttttctaatcgaaatctcttgcggttt

SEQ ID NO: 40844 - protein, 546 aa, Arabidopsis thaliana
  peptide (1)..(546): Ceres Seq. ID no. 13489429
  misc_feature (8)..(289): Homolog of NCBI NO: 22328918 NR Description: pectinesterase (pectin methylesterase) family
  misc_feature (21)..(545): Homolog of NCBI NO: 18400509 NR Description: pectinesterase (pectin methylesterase) -related
  misc_feature (21)..(545): Homolog of NCBI NO: 16648889 NR Description: Unknown protein [Arabidopsis thaliana]
  misc_feature (16)..(545): Homolog of NCBI NO: 1255951 NR Description: PS60 [Nicotiana tabacum]
  misc_feature (20)..(545): Homolog of NCBI NO: 15234688 NR Description: pectinesterase (pectin methylesterase), putative
  misc_feature (7)..(541): Homolog of NCBI NO: 15235448 NR Description: pectinesterase (pectin methylesterase) family
  misc_feature (14)..(541): Homolog of NCBI NO: 18400335 NR Description: pectinesterase (pectin methylesterase) family
  misc_feature (3)..(546): Homolog of NCBI NO: 9758142 NR Description: pectinesterase like protein [Arabidopsis thaliana]
  misc_feature (1)..(546): Homolog of NCBI NO: 21536987 NR Description: pectinesterase-like protein [Arabidopsis thaliana]
  misc_feature (1)..(546): Homolog of NCBI NO: 18425129 NR Description: pectinesterase (pectin methylesterase) family
MKMASRKTTSLLNHLLLLGALTLLSSLVIVKGESPYKFYTWTVTYGIISPLGVPQQVILINGQFPGPKLEVVTNDNIILNLINKLDQPFLLTWNGIKQRKNSWQDGVLGTNCPIQPNSNFTYKFQTKDQIGTFNYFPSTAFHKAAGGFGAINVYARPGIPIPYPLPTADFTLLVGDWFKTNHKTLQQRLDSGGVLPFPDGMLINGQTQSTFSGDQGKTYMLRISNVGLSSTFNFRIQGHTMKVVEVEGSHVIQTDYDSLDIHVGQSLAVLVTLNQSPKDYYIVASTRFIRSKLSVMGLLRYSNSRVPASGDPPALPPGELVWSMRQARTFRWNLTANAARPNPQGSFHYGMISPTKTFVFSNSAPLINGKQRYAVNGVSYVKSETPLKLADHFGISGVFSTNAIQSVPSNSPPTVATSVVQTSHHDFLEIVFQNNEKSMQSWHLDGYDFWVVGFGSGQWTPAKRSLHNLVDALTRHTTQVYPESWTTILVSLDNQGMWNMRSAIWERQYSGQQFYLKVWNSVQSLANEYNPPDNLQLCGKAVGRHV

SEQ ID NO: 40845 - protein, 544 aa, Arabidopsis thaliana
  peptide (1)..(544): Ceres Seq. ID no. 13489430
  misc_feature (6)..(287): Homolog of NCBI NO: 22328918 NR Description: pectinesterase (pectin methylesterase) family
  misc_feature (19)..(543): Homolog of NCBI NO: 18400509 NR Description: pectinesterase (pectin methylesterase) -related
  misc_feature (19)..(543): Homolog of NCBI NO: 16648889 NR Description: Unknown protein [Arabidopsis thaliana]
  misc_feature (14)..(543): Homolog of NCBI NO: 1255951 NR Description: PS60 [Nicotiana tabacum]
  misc_feature (18)..(543): Homolog of NCBI NO: 15234688 NR Description: pectinesterase (pectin methylesterase), putative
  misc_feature (5)..(539): Homolog of NCBI NO: 15235448 NR Description: pectinesterase (pectin methylesterase) family
  misc_feature (12)..(539): Homolog of NCBI NO: 18400335 NR Description: pectinesterase (pectin methylesterase) family
  misc_feature (1)..(544): Homolog of NCBI NO: 9758142 NR Description: pectinesterase like protein [Arabidopsis thaliana]
  misc_feature (1)..(544): Homolog of NCBI NO: 21536987 NR Description: pectinesterase-like protein [Arabidopsis thaliana]
  misc_feature (1)..(544): Homolog of NCBI NO: 18425129 NR Description: pectinesterase (pectin methylesterase) family
MASRKTTSLLNHLLLLGALTLLSSLVIVKGESPYKFYTWTVTYGIISPLGVPQQVILINGQFPGPKLEVVTNDNIILNLINKLDQPFLLTWNGIKQRKNSWQDGVLGTNCPIQPNSNFTYKFQTKDQIGTFNYFPSTAFHKAAGGFGAINVYARPGIPIPYPLPTADFTLLVGDWFKTNHKTLQQRLDSGGVLPFPDGMLINGQTQSTFSGDQGKTYMLRISNVGLSSTFNFRIQGHTMKVVEVEGSHVIQTDYDSLDIHVGQSLAVLVTLNQSPKDYYIVASTRFIRSKLSVMGLLRYSNSRVPASGDPPALPPGELVWSMRQARTFRWNLTANAARPNPQGSFHYGMISPTKTFVFSNSAPLINGKQRYAVNGVSYVKSETPLKLADHFGISGVFSTNAIQSVPSNSPPTVATSVVQTSHHDFLEIVFQNNEKSMQSWHLDGYDFWVVGFGSGQWTPAKRSLHNLVDALTRHTTQVYPESWTTILVSLDNQGMWNMRSAIWERQYSGQQFYLKVWNSVQSLANEYNPPDNLQLCGKAVGRHV

SEQ ID NO: 40846 - protein, 346 aa, Arabidopsis thaliana
  peptide (1)..(346): Ceres Seq. ID no. 13489431
  misc_feature (1)..(89): Homolog of NCBI NO: 22328918 NR Description: pectinesterase (pectin methylesterase) family
  misc_feature (1)..(345): Homolog of NCBI NO: 18400509 NR Description: pectinesterase (pectin methylesterase) -related
  misc_feature (1)..(345): Homolog of NCBI NO: 16648889 NR Description: Unknown protein [Arabidopsis thaliana]
  misc_feature (1)..(345): Homolog of NCBI NO: 1255951 NR Description: PS60 [Nicotiana tabacum]
  misc_feature (1)..(345): Homolog of NCBI NO: 15234688 NR Description: pectinesterase (pectin methylesterase), putative
  misc_feature (1)..(341): Homolog of NCBI NO: 15235448 NR Description: pectinesterase (pectin methylesterase) family
  misc_feature (1)..(341): Homolog of NCBI NO: 18400335 NR Description: pectinesterase (pectin methylesterase) family
  misc_feature (1)..(346): Homolog of NCBI NO: 9758142 NR Description: pectinesterase like protein [Arabidopsis thaliana]
  misc_feature (1)..(346): Homolog of NCBI NO: 21536987 NR Description: pectinesterase-like protein [Arabidopsis thaliana]
  misc_feature (1)..(346): Homolog of NCBI NO: 18425129 NR Description: pectinesterase (pectin methylesterase) family
MLINGQTQSTFSGDQGKTYMLRISNVGLSSTFNFRIQGHTMKVVEVEGSHVIQTDYDSLDIHVGQSLAVLVTLNQSPKDYYIVASTRFIRSKLSVMGLLRYSNSRVPASGDPPALPPGELVWSMRQARTFRWNLTANAARPNPQGSFHYGMISPTKTFVFSNSAPLINGKQRYAVNGVSYVKSETPLKLADHFGISGVFSTNAIQSVPSNSPPTVATSVVQTSHHDFLEIVFQNNEKSMQSWHLDGYDFWVVGFGSGQWTPAKRSLHNLVDALTRHTTQVYPESWTTILVSLDNQGMWNMRSAIWERQYSGQQFYLKVWNSVQSLANEYNPPDNLQLCGKAVGRHV

SEQ ID NO: 40847 - DNA, 1402 bp, Arabidopsis thaliana
  misc_feature (1)..(1402): Ceres Seq. ID no. 12330726
  misc_feature: MA Experiment ID: 108461 Result: Down-regulated in Transcription
  misc_feature: MA Experiment 108461 PARAMETER Experiment Name: At_Germinating_Seeds_cDNA_P Parameter: Age (day) Value: 1 vs. 0
  misc_feature: MA Experiment 108461 PARAMETER Experiment Name: At_Germinating_Seeds_cDNA_P Parameter: Tissue Value: Germinating Seeds
  misc_feature: MA Experiment ID: 108462 Result: Down-regulated in Transcription
  misc_feature: MA Experiment 108462 PARAMETER Experiment Name: At_Germinating_Seeds_cDNA_P Parameter: Age (day) Value: 2 vs. 0
  misc_feature: MA Experiment 108462 PARAMETER Experiment Name: At_Germinating_Seeds_cDNA_P Parameter: Tissue Value: Germinating Seeds
  misc_feature: MA Experiment ID: 108463 Result: Down-regulated in Transcription
  misc_feature: MA Experiment 108463 PARAMETER Experiment Name: At_Germinating_Seeds_cDNA_P Parameter: Age (day) Value: 3 vs. 0
  misc_feature: MA Experiment 108463 PARAMETER Experiment Name: At_Germinating_Seeds_cDNA_P Parameter: Tissue Value: Germinating Seeds
  misc_feature: MA Experiment ID: 108464 Result: Down-regulated in Transcription
  misc_feature: MA Experiment 108464 PARAMETER Experiment Name: At_Germinating_Seeds_cDNA_P Parameter: Age (day) Value: 4 vs. 0
  misc_feature: MA Experiment 108464 PARAMETER Experiment Name: At_Germinating_Seeds_cDNA_P Parameter: Tissue Value: Germinating Seeds
  misc_feature: MA Experiment ID: 20000171 Result: Down-regulated in Transcription
  misc_feature: MA Experiment 20000171 PARAMETER Experiment Name: At_42deg_Heat_P Parameter: Age (day) Value: 14
  misc_feature: MA Experiment 20000171 PARAMETER Experiment Name: At_42deg_Heat_P Parameter: Organism Value: A. thaliana
  misc_feature: MA Experiment 20000171 PARAMETER Experiment Name: At_42deg_Heat_P Parameter: Plant Line Value: WS
  misc_feature: MA Experiment 20000171 PARAMETER Experiment Name: At_42deg_Heat_P Parameter: Temperature (deg C) Value: 42 vs. 22
  misc_feature: MA Experiment 20000171 PARAMETER Experiment Name: At_42deg_Heat_P Parameter: Timepoint (hr) Value: 1
  misc_feature: MA Experiment 20000171 PARAMETER Experiment Name: At_42deg_Heat_P Parameter: Tissue Value: Aerial
  misc_feature: MA Experiment ID: 20000180 Result: Down-regulated in Transcription
  misc_feature: MA Experiment 20000180 PARAMETER Experiment Name: At_Germinating_Seeds_P Parameter: Age (hr) Value: 24 vs. 0
  misc_feature: MA Experiment 20000180 PARAMETER Experiment Name: At_Germinating_Seeds_P Parameter: Tissue Value: Germinating Seeds
  misc_feature: MA Experiment ID: 20000224 Result: Down-regulated in Transcription
  misc_feature: MA Experiment ID: 20000265 Result: Up-regulated in Transcription
  misc_feature: MA Experiment 20000265 PARAMETER Experiment Name: At_Open_Flower_P Parameter: Age (day) Value: 21
  misc_feature: MA Experiment 20000265 PARAMETER Experiment Name: At_Open_Flower_P Parameter: Plant Line Value: WS
  misc_feature: MA Experiment 20000265 PARAMETER Experiment Name: At_Open_Flower_P Parameter: Tissue Value: Closed Flower vs. Whole Plant
  misc_feature: MA Experiment ID: 20001247 Result: Down-regulated in Transcription
  misc_feature: MA Experiment 20001247 PARAMETER Experiment Name: At_Far-red-induction_P Parameter: Age (day) Value: 7
  misc_feature: MA Experiment 20001247 PARAMETER Experiment Name: At_Far-red-induction_P Parameter: Light Value: Far-red vs. White
  misc_feature: MA Experiment 20001247 PARAMETER Experiment Name: At_Far-red-induction_P Parameter: Organism Value: A. thaliana
  misc_feature: MA Experiment 20001247 PARAMETER Experiment Name: At_Far-red-induction_P Parameter: Plant Line Value: Columbia
  misc_feature: MA Experiment 20001247 PARAMETER Experiment Name: At_Far-red-induction_P Parameter: Timepoint (hr) Value: 1
  misc_feature: MA Experiment 20001247 PARAMETER Experiment Name: At_Far-red-induction_P Parameter: Tissue Value: Whole Plant
  misc_feature: MA Experiment ID: 20001558 Result: Up-regulated in Transcription
  misc_feature: MA Experiment 20001558 PARAMETER Experiment Name: At_Drought_Soil_Dry_P Parameter: Age (day) Value: 27
  misc_feature: MA Experiment 20001558 PARAMETER Experiment Name: At_Drought_Soil_Dry_P Parameter: Organism Value: A. thaliana
  misc_feature: MA Experiment 20001558 PARAMETER Experiment Name: At_Drought_Soil_Dry_P Parameter: Plant Line Value: WS
  misc_feature: MA Experiment 20001558 PARAMETER Experiment Name: At_Drought_Soil_Dry_P Parameter: Post Timepoint (hr) Value: 6
  misc_feature: MA Experiment 20001558 PARAMETER Experiment Name: At_Drought_Soil_Dry_P Parameter: Post-Treatment Value: Re-Water vs. No Drought
  misc_feature: MA Experiment 20001558 PARAMETER Experiment Name: At_Drought_Soil_Dry_P Parameter: Timepoint (day) Value: 13
  misc_feature: MA Experiment 20001558 PARAMETER Experiment Name: At_Drought_Soil_Dry_P Parameter: Treatment Value: Drought vs. No Drought
  misc_feature: MA Experiment ID: 20001757 Result: Up-regulated in Transcription
  misc_feature: MA Experiment 20001757 PARAMETER Experiment Name: At_50mM_NH4NO3_L-to-H_P Parameter: Timepoint (hr) Value: 6
  misc_feature: MA Experiment 20001757 PARAMETER Experiment Name: At_50mM_NH4NO3_L-to-H_P Parameter: Tissue Value: Leaf
  misc_feature: MA Experiment 20001757 PARAMETER Experiment Name: At_50mM_NH4NO3_L-to-H_P Parameter: Treatment Value: 50mM NH4NO3 vs 100mM Mannitol
ttcagtgagcattgtgcaaaatgcatttccttctaccaccaaatcgttctcttctacaatagctaaagattcgagtactttcacagtctcttatcttgttgaatcattgggtttgactaaaaaacttgcagaaacaatctcaaagaaagtcaccttccaagacaaggtaaatccggattctgttctgaatcttcttagaagtaatgggtttaaagattctcagatctctaggatccttagggcttacccaagattgcttgtaatagatgctgagaagtctcttcgtccaaagcttcagtttttaaagtctagaggagcttcaagctctgaggtcatagagattgtttcgaatgttccaacaatcttggataagaaaggtgaagaatctgttagtttatactatgatttcgctaaggacattatgcaagatggtaaaagtttgtgtatttcttgtccagagggaaagaaaggtaacagaattcgaaatatatcggttttgagagaattgggagtacctcagaagttgttgttttcattgcttatatctagatatcaacctgtttgtggtaaagagaagtttgaagaaagtttaaagaaagttgttgatatgggttttgatccggctaaatccaagtttgtggaagctttgcatgtagtttacgaaatgagcgagaaaacgatagaagagaaagtgaatgtgtataagaggttaggctttagtgaagccgagatatgggcgattttcaagaagtggccttactttttaaaattctctgagaagaagataattctgatgtttgaaacactgaagaagtgtggtttggtagaggaagagattatttcggtgttgaagagtcgtccacaatgcatacgatcttctgagcagaagatattagactctattgaaatgttcttaggcttaggattcagtagagatgatttcaagatgatggttaagcgatatccttgttgcactgcatattctggcgagaccctgaggaagaagtttgaggttttggtgaagaagatgaattggccgctagaggctgtggtcatgatccctacggtacttggatacagcttggagaagaggatagtgccaaggtctaacgtgatcaaagctctcatgtcgaaaggattgatcggaagtgaaaaccctccaatttcatctgtcttggtatgtactgatcaggagttcttgaaaaggtatgtgatgaagcatgacaagctagtgcctaagttgatggctatcttcaacagaggtcgtgtttcatagttaatcttttaacgcgtgaatggaactgaggaagaggagtttttatttactagtgtctgttaatgtctaaactgaaatccatttctgtaatagtcgtaacgaaaaatttaactactatatttgtgc

SEQ ID NO: 40848 - protein, 424 aa, Arabidopsis thaliana
  peptide (1)..(424): Ceres Seq. ID no. 12330727
  misc_feature (62)..(401): Pfam Name: mTERF Pfam Description: mTERF
  misc_feature (1)..(305): Homolog of NCBI NO: 25404361 NR Description: hypothetical protein F19K23.6 [imported] -
  misc_feature (4)..(395): Homolog of NCBI NO: 25404361 NR Description: hypothetical protein F19K23.6 [imported] -
  misc_feature (1)..(424): Homolog of NCBI NO: 25345736 NR Description: hypothetical protein F19K23.9 [imported] -
  misc_feature (1)..(424): Homolog of NCBI NO: 15220717 NR Description: hypothetical protein; protein id: At1g62150.1
  misc_feature (4)..(424): Homolog of NCBI NO: 30696656 NR Description: expressed protein [Arabidopsis thaliana]
  misc_feature (1)..(424): Homolog of NCBI NO: 15220696 NR Description: hypothetical protein; protein id: At1g62090.1
  misc_feature (2)..(424): Homolog of NCBI NO: 25345734 NR Description: hypothetical protein F19K23.4 [imported] -
  misc_feature (3)..(418): Homolog of NCBI NO: 26450011 NR Description: unknown protein [Arabidopsis thaliana]
  misc_feature (3)..(418): Homolog of NCBI NO: 15220660 NR Description: hypothetical protein; protein id: At1g61960.1
  misc_feature (1)..(424): Homolog of NCBI NO: 15232683 NR Description: putative protein
SVSIVQNAFPSTTKSFSSTIAKDSSTFTVSYLVESLGLTKKLAETISKKVTFQDKVNPDSVLNLLRSNGFKDSQISRILRAYPRLLVIDAEKSLRPKLQFLKSRGASSSEVIEIVSNVPTILDKKGEESVSLYYDFAKDIMQDGKSLCISCPEGKKGNRIRNISVLRELGVPQKLLFSLLISRYQPVCGKEKFEESLKKVVDMGFDPAKSKFVEALHVVYEMSEKTIEEKVNVYKRLGFSEAEIWAIFKKWPYFLKFSEKKIILMFETLKKCGLVEEEIISVLKSRPQCIRSSEQKILDSIEMFLGLGFSRDDFKMMVKRYPCCTAYSGETLRKKFEVLVKKMNWPLEAVVMIPTVLGYSLEKRIVPRSNVIKALMSKGLIGSENPPISSVLVCTDQEFLKRYVMKHDKLVPKLMAIFNRGRVS

SEQ ID NO: 40849 - protein, 284 aa, Arabidopsis thaliana
  peptide (1)..(284): Ceres Seq. ID no. 12330728
  misc_feature (1)..(261): Pfam Name: mTERF Pfam Description: mTERF
  misc_feature (1)..(165): Homolog of NCBI NO: 25404361 NR Description: hypothetical protein F19K23.6 [imported] -
  misc_feature (1)..(255): Homolog of NCBI NO: 25404361 NR Description: hypothetical protein F19K23.6 [imported] -
  misc_feature (1)..(284): Homolog of NCBI NO: 25345736 NR Description: hypothetical protein F19K23.9 [imported] -
  misc_feature (1)..(284): Homolog of NCBI NO: 15220717 NR Description: hypothetical protein; protein id: At1g62150.1
  misc_feature (1)..(284): Homolog of NCBI NO: 30696656 NR Description: expressed protein [Arabidopsis thaliana]
  misc_feature (1)..(284): Homolog of NCBI NO: 15220696 NR Description: hypothetical protein; protein id: At1g62090.1
  misc_feature (1)..(284): Homolog of NCBI NO: 25345734 NR Description: hypothetical protein F19K23.4 [imported] -
  misc_feature (1)..(278): Homolog of NCBI NO: 26450011 NR Description: unknown protein [Arabidopsis thaliana]
  misc_feature (1)..(278): Homolog of NCBI NO: 15220660 NR Description: hypothetical protein; protein id: At1g61960.1
  misc_feature (1)..(284): Homolog of NCBI NO: 15232683 NR Description: putative protein
MQDGKSLCISCPEGKKGNRIRNISVLRELGVPQKLLFSLLISRYQPVCGKEKFEESLKKVVDMGFDPAKSKFVEALHVVYEMSEKTIEEKVNVYKRLGFSEAEIWAIFKKWPYFLKFSEKKIILMFETLKKCGLVEEEIISVLKSRPQCIRSSEQKILDSIEMFLGLGFSRDDFKMMVKRYPCCTAYSGETLRKKFEVLVKKMNWPLEAVVMIPTVLGYSLEKRIVPRSNVIKALMSKGLIGSENPPISSVLVCTDQEFLKRYVMKHDKLVPKLMAIFNRGRVS

SEQ ID NO: 40850 - protein, 222 aa, Arabidopsis thaliana
  peptide (1)..(222): Ceres Seq. ID no. 12330729
  misc_feature (1)..(199): Pfam Name: mTERF Pfam Description: mTERF
  misc_feature (1)..(103): Homolog of NCBI NO: 25404361 NR Description: hypothetical protein F19K23.6 [imported] -
  misc_feature (1)..(193): Homolog of NCBI NO: 25404361 NR Description: hypothetical protein F19K23.6 [imported] -
  misc_feature (1)..(222): Homolog of NCBI NO: 25345736 NR Description: hypothetical protein F19K23.9 [imported] -
  misc_feature (1)..(222): Homolog of NCBI NO: 15220717 NR Description: hypothetical protein; protein id: At1g62150.1
  misc_feature (1)..(222): Homolog of NCBI NO: 30696656 NR Description: expressed protein [Arabidopsis thaliana]
  misc_feature (1)..(222): Homolog of NCBI NO: 15220696 NR Description: hypothetical protein; protein id: At1g62090.1
  misc_feature (1)..(222): Homolog of NCBI NO: 25345734 NR Description: hypothetical protein F19K23.4 [imported] -
  misc_feature (1)..(216): Homolog of NCBI NO: 26450011 NR Description: unknown protein [Arabidopsis thaliana]
  misc_feature (1)..(216): Homolog of NCBI NO: 15220660 NR Description: hypothetical protein; protein id: At1g61960.1
  misc_feature (1)..(222): Homolog of NCBI NO: 15232683 NR Description: putative protein
MGFDPAKSKFVEALHVVYEMSEKTIEEKVNVYKRLGFSEAEIWAIFKKWPYFLKFSEKKIILMFETLKKCGLVEEEIISVLKSRPQCIRSSEQKILDSIEMFLGLGFSRDDFKMMVKRYPCCTAYSGETLRKKFEVLVKKMNWPLEAVVMIPTVLGYSLEKRIVPRSNVIKALMSKGLIGSENPPISSVLVCTDQEFLKRYVMKHDKLVPKLMAIFNRGRVS

SEQ ID NO: 40851 - DNA, 1376 bp, Arabidopsis thaliana
  misc_feature (1)..(1376): Ceres Seq. ID no. 13576752
  misc_feature: MA Experiment ID: 108434 Result: Up-regulated in Transcription
  misc_feature: MA Experiment 108434 PARAMETER Experiment Name: At_Root_Tips_cDNA_P Parameter: Tissue Value: Root Tips
  misc_feature: MA Experiment ID: 108435 Result: Up-regulated in Transcription
  misc_feature: MA Experiment 108435 PARAMETER Experiment Name: At_stm_Mutants_cDNA_P Parameter: Plant Line Value: wt Landsburg vs stm
  misc_feature: MA Experiment 108435 PARAMETER Experiment Name: At_stm_Mutants_cDNA_P Parameter: Tissue Value: Shoot Apical Meristem Region
  misc_feature: MA Experiment ID: 108462 Result: Down-regulated in Transcription
  misc_feature: MA Experiment 108462 PARAMETER Experiment Name: At_Germinating_Seeds_cDNA_P Parameter: Age (day) Value: 2 vs. 0
  misc_feature: MA Experiment 108462 PARAMETER Experiment Name: At_Germinating_Seeds_cDNA_P Parameter: Tissue Value: Germinating Seeds
  misc_feature: MA Experiment ID: 108463 Result: Down-regulated in Transcription
  misc_feature: MA Experiment 108463 PARAMETER Experiment Name: At_Germinating_Seeds_cDNA_P Parameter: Age (day) Value: 3 vs. 0
  misc_feature: MA Experiment 108463 PARAMETER Experiment Name: At_Germinating_Seeds_cDNA_P Parameter: Tissue Value: Germinating Seeds
  misc_feature: MA Experiment ID: 108464 Result: Down-regulated in Transcription
  misc_feature: MA Experiment 108464 PARAMETER Experiment Name: At_Germinating_Seeds_cDNA_P Parameter: Age (day) Value: 4 vs. 0
  misc_feature: MA Experiment 108464 PARAMETER Experiment Name: At_Germinating_Seeds_cDNA_P Parameter: Tissue Value: Germinating Seeds
  misc_feature: MA Experiment ID: 108488 Result: Up-regulated in Transcription
  misc_feature: MA Experiment ID: 20000069 Result: Down-regulated in Transcription
  misc_feature: MA Experiment 20000069 PARAMETER Experiment Name: At_100uM_ABA_Mutants_cDNA_P Parameter: Plant Line Value: CS23
  misc_feature: MA Experiment 20000069 PARAMETER Experiment Name: At_100uM_ABA_Mutants_cDNA_P Parameter: Timepoint (hr) Value: 6
  misc_feature: MA Experiment 20000069 PARAMETER Experiment Name: At_100uM_ABA_Mutants_cDNA_P Parameter: Tissue Value: Aerial
  misc_feature: MA Experiment 20000069 PARAMETER Experiment Name: At_100uM_ABA_Mutants_cDNA_P Parameter: Treatment Value: 100uM ABA vs. No Treatment
  misc_feature: MA Experiment ID: 20000087 Result: Down-regulated in Transcription
  misc_feature: MA Experiment 20000087 PARAMETER Experiment Name: At_100uM_ABA_Mutants_cDNA_P Parameter: Plant Line Value: WS
  misc_feature: MA Experiment 20000087 PARAMETER Experiment Name: At_100uM_ABA_Mutants_cDNA_P Parameter: Timepoint (hr) Value: 6
  misc_feature: MA Experiment 20000087 PARAMETER Experiment Name: At_100uM_ABA_Mutants_cDNA_P Parameter: Tissue Value: Aerial
  misc_feature: MA Experiment 20000087 PARAMETER Experiment Name: At_100uM_ABA_Mutants_cDNA_P Parameter: Treatment Value: 100uM ABA vs. No Treatment
  misc_feature: MA Experiment ID: 20000315 Result: Up-regulated in Transcription
  misc_feature: MA Experiment 20000315 PARAMETER Experiment Name: At_14day_Shoots-Roots_Sub_P Parameter: Age (day) Value: 14
  misc_feature: MA Experiment 20000315 PARAMETER Experiment Name: At_14day_Shoots-Roots_Sub_P Parameter: Organism Value: A. thaliana
  misc_feature: MA Experiment 20000315 PARAMETER Experiment Name: At_14day_Shoots-Roots_Sub_P Parameter: Plant Line Value: WS
  misc_feature: MA Experiment 20000315 PARAMETER Experiment Name: At_14day_Shoots-Roots_Sub_P Parameter: Tissue Value: Shoots vs. Whole Plant
  misc_feature: MA Experiment ID: 20001807 Result: Up-regulated in Transcription
  misc_feature: MA Experiment 20001807 PARAMETER Experiment Name: At_50mM_NH4NO3_L-to-H_Sub_P Parameter: Timepoint (hr) Value: 6
  misc_feature: MA Experiment 20001807 PARAMETER Experiment Name: At_50mM_NH4NO3_L-to-H_Sub_P Parameter: Tissue Value: Leaf
  misc_feature: MA Experiment 20001807 PARAMETER Experiment Name: At_50mM_NH4NO3_L-to-H_Sub_P Parameter: Treatment Value: 50mM NH4NO3 vs 100mM Mannitol
acgccgctcatttttagggtttcagatataggcagattctcacatttgcaaacatgacgactcagatcagcaagaagagaaagtttgtagcggacggtgtgttctacgctgaattgaatgaggttcttacaagagagctagcagaggatggttactctggtgttgaggttagggttactcctatgaggactgagattatcatcagagctacacgtactcagaatgttctcggtgagaaggggaggagaattagggaattgacttcccttgttcagaagagattcaagtttccagttgacagtgttgagctttatgccgagaaggttaacaacagaggtctctgtgccatcgctcaggctgagtctttacgttacaagcttcttggcataaagctcaacactgtcaactggaaacttgaatntcttctgaacaagggatctcaaaaccctaatatctgaacttcgccgtcgagagcatccatgggtcgtgtcatcagagctcaacgtaagggtgcgggttccgtcttcaaatcccacactcaccaccgcaaaggtccggctaagttccgtagcctcgatttcggcgagagaaatggttacctcaagggcgtcgtgacggagatcatccacgatcctggtcgtggtgctcctcttgctcgtgtcactttccgtcatcctttccgtttcaagaaacaaaaggagctcttcgtcgccgccgaaggtatgtacaccggtcagttcttgtactgcggtaagaaagctactctcgtcgttggaaatgttctccctcttagatctattcctgaaggagctgttgtctgcaacgtcgagcatcacgtcggtgatcgtggtgtcctcgctagagcttctggtgattacgccattgttatcgctcacaaccctgacagcgacactactaggattaagttgccatcgggttcgaagaagattgtcccaagtggatgcagggctatgattggacaagttgctggaggtggaagaactgagaagccgatgctcaaggcaggaaacgcgtaccacaagtaccgtgtgaagaggaactcatggcctaaggttcgtggtgtggctatgaatccagtggagcatcctcatggaggaggtaaccatcagcacattggtcacgccagtactgttaggcgtgatgcacctcctggacagaaggttggtcttattgctgcaaggaggactggtcgtctcagaggtcaagctgctgcttcagctgccaaggcagactagagttaaaagagataaactttgtttctcttgttttctatgtttcaagttttgttgtctgtgtttccttttgaacctcattctgaaatcctaaaagatttttatgataaacctttctctctt

SEQ ID NO: 40852 - protein, 258 aa, Arabidopsis thaliana [sequence omitted]

SEQ ID NO: 40853 - protein, 177 aa, Arabidopsis thaliana
  peptide (1)..(177): Ceres Seq. ID no. 13576754
  misc_feature (15)..(150): Pfam Name: Ribosomal Proteins L2, C-terminal domain Pfam Description: Ribosomal Proteins L2, C-terminal domain
  misc_feature (15)..(150): Pfam Name: Ribosomal Proteins L2, C-terminal domain Pfam Description: Ribosomal Proteins L2, C-terminal domain
  misc_feature (1)..(177): Homolog of NCBI NO: 798818 NR Description: 60S ribosomal protein L2 [Arabidopsis thaliana]
  misc_feature (1)..(177): Homolog of NCBI NO: 266944 NR Description: 60S RIBOSOMAL PROTEIN L2 (L8) (RIBOSOMAL PROTEIN
  misc_feature (1)..(177): Homolog of NCBI NO: 798818 NR Description: 60S ribosomal protein L2 [Arabidopsis thaliana]
  misc_feature (1)..(177): Homolog of NCBI NO: 15234298 NR Description: 60S ribosomal protein L8 (RPL8C) [Arabidopsis
  misc_feature (1)..(177): Homolog of NCBI NO: 15227954 NR Description: 60S ribosomal protein L8 (RPL8A) [Arabidopsis
  misc_feature (1)..(177): Homolog of NCBI NO: 266944 NR Description: 60S RIBOSOMAL PROTEIN L2 (L8) (RIBOSOMAL PROTEIN
  misc_feature (1)..(177): Homolog of NCBI NO: 15234298 NR Description: 60S ribosomal protein L8 (RPL8C) [Arabidopsis
  misc_feature (1)..(177): Homolog of NCBI NO: 15227954 NR Description: 60S ribosomal protein L8 (RPL8A) [Arabidopsis
MYTGQFLYCGKKATLVVGNVLPLRSIPEGAVVCNVEHHVGDRGVLARASGDYAIVIAHNPDSDTTRIKLPSGSKKIVPSGCRAMIGQVAGGGRTEKPMLKAGNAYHKYRVKRNSWPKVRGVAMNPVEHPHGGGNHQHIGHASTVRRDAPPGQKVGLIAARRTGRLRGQAAASAAKAD

SEQ ID NO: 40854 - protein, 134 aa, Arabidopsis thaliana
  peptide (1)..(134): Ceres Seq. ID no. 13576755
  misc_feature (47)..(95): Pfam Name: KH domain Pfam Description: KH domain
  misc_feature (47)..(95): Pfam Name: KH domain Pfam Description: KH domain
  misc_feature (1)..(111): Homolog of NCBI NO: 28189605 NR Description: similar to ribosomal protein S3 [Bos taurus]
  misc_feature (1)..(111): Homolog of NCBI NO: 12848978 NR Description: unnamed protein product [Mus musculus]
  misc_feature (1)..(111): Homolog of NCBI NO: 133940 NR Description: 40S ribosomal protein S3A (S1A)
  misc_feature (1)..(111): Homolog of NCBI NO: 28630346 NR Description: ribosomal protein S3 [Petromyzon marinus]
  misc_feature (1)..(111): Homolog of NCBI NO: 12847921 NR Description: unnamed protein product [Mus musculus]
  misc_feature (1)..(111): Homolog of NCBI NO: 28189605 NR Description: similar to ribosomal protein S3 [Bos taurus]
  misc_feature (1)..(111): Homolog of NCBI NO: 133940 NR Description: 40S ribosomal protein S3A (S1A)
  misc_feature (1)..(111): Homolog of NCBI NO: 12847921 NR Description: unnamed protein product [Mus musculus]
  misc_feature (1)..(111): Homolog of NCBI NO: 15232352 NR Description: 40S ribosomal protein S3 (RPS3B) [Arabidopsis
  misc_feature (1)..(111): Homolog of NCBI NO: 15225107 NR Description: 40S ribosomal protein S3 (RPS3A) [Arabidopsis
  misc_feature (1)..(111): Homolog of NCBI NO: 15238533 NR Description: 40S ribosomal protein S3 (RPS3C) [Arabidopsis
  misc_feature (3)..(111): Homolog of NCBI NO: 14192875 NR Description: Putative 40S ribosomal protein; contains
  misc_feature (1)..(111): Homolog of NCBI NO: 22204124 NR Description: putative 40S ribosomal protein S3 [Triticum
  misc_feature (1)..(111): Homolog of NCBI NO: 28630346 NR Description: ribosomal protein S3 [Petromyzon marinus]
  misc_feature (1)..(111): Homolog of NCBI NO: 12848978 NR Description: unnamed protein product [Mus musculus]
  misc_feature (1)..(111): Homolog of NCBI NO: 22204124 NR Description: putative 40S ribosomal protein S3 [Triticum
  misc_feature (3)..(111): Homolog of NCBI NO: 14192875 NR Description: Putative 40S ribosomal protein; contains
  misc_feature (1)..(111): Homolog of NCBI NO: 15238533 NR Description: 40S ribosomal protein S3 (RPS3C) [Arabidopsis
  misc_feature (1)..(111): Homolog of NCBI NO: 15225107 NR Description: 40S ribosomal protein S3 (RPS3A) [Arabidopsis
  misc_feature (1)..(111): Homolog of NCBI NO: 15232352 NR Description: 40S ribosomal protein S3 (RPS3B) [Arabidopsis
  misc_feature (123)..(123): Xaa is any aa, unknown or other
MTTQISKKRKFVADGVFYAELNEVLTRELAEDGYSGVEVRVTPMRTEIIIRATRTQNVLGEKGRRIRELTSLVQKRFKFPVDSVELYAEKVNNRGLCAIAQAESLRYKLLGIKLNTVNWKLEXLLNKGSQNPNI

SEQ ID NO: 40855 - DNA, 1240 bp, Arabidopsis thaliana
  misc_feature (1)..(1240): Ceres Seq. ID no. 12482127
  misc_feature: MA Experiment ID: 108577 Result: Down-regulated in Transcription
  misc_feature: MA Experiment 108577 PARAMETER Experiment Name: At_42deg_Heat_cDNA_P Parameter: Temperature (deg C) Value: 42 vs. 22
  misc_feature: MA Experiment 108577 PARAMETER Experiment Name: At_42deg_Heat_cDNA_P Parameter: Timepoint (hr) Value: 6
  misc_feature: MA Experiment 108577 PARAMETER Experiment Name: At_42deg_Heat_cDNA_P Parameter: Tissue Value: Aerial
  misc_feature: MA Experiment ID: 20000093 Result: Down-regulated in Transcription
  misc_feature: MA Experiment 20000093 PARAMETER Experiment Name: At_42deg_Heat_cDNA_P Parameter: Temperature (deg C) Value: 42 vs. 22
  misc_feature: MA Experiment 20000093 PARAMETER Experiment Name: At_42deg_Heat_cDNA_P Parameter: Timepoint (hr) Value: 0.5
  misc_feature: MA Experiment 20000093 PARAMETER Experiment Name: At_42deg_Heat_cDNA_P Parameter: Tissue Value: Aerial
  misc_feature: MA Experiment ID: 20000111 Result: Down-regulated in Transcription
  misc_feature: MA Experiment 20000111 PARAMETER Experiment Name: At_42deg_Heat_cDNA_P Parameter: Temperature (deg C) Value: 42 vs. 22
  misc_feature: MA Experiment 20000111 PARAMETER Experiment Name: At_42deg_Heat_cDNA_P Parameter: Timepoint (hr) Value: 6
  misc_feature: MA Experiment 20000111 PARAMETER Experiment Name: At_42deg_Heat_cDNA_P Parameter: Tissue Value: Aerial
  misc_feature: MA Experiment ID: 20000113 Result: Down-regulated in Transcription
  misc_feature: MA Experiment 20000113 PARAMETER Experiment Name: At_42deg_Heat_cDNA_P Parameter: Temperature (deg C) Value: 42 vs. 22
  misc_feature: MA Experiment 20000113 PARAMETER Experiment Name: At_42deg_Heat_cDNA_P Parameter: Timepoint (hr) Value: 8
  misc_feature: MA Experiment 20000113 PARAMETER Experiment Name: At_42deg_Heat_cDNA_P Parameter: Tissue Value: Aerial
  misc_feature: MA Experiment ID: 20000171 Result: Up-regulated in Transcription
  misc_feature: MA Experiment 20000171 PARAMETER Experiment Name: At_42deg_Heat_P Parameter: Age (day) Value: 14
  misc_feature: MA Experiment 20000171 PARAMETER Experiment Name: At_42deg_Heat_P Parameter: Organism Value: A. thaliana
  misc_feature: MA Experiment 20000171 PARAMETER Experiment Name: At_42deg_Heat_P Parameter: Plant Line Value: WS
  misc_feature: MA Experiment 20000171 PARAMETER Experiment Name: At_42deg_Heat_P Parameter: Temperature (deg C) Value: 42 vs. 22
  misc_feature: MA Experiment 20000171 PARAMETER Experiment Name: At_42deg_Heat_P Parameter: Timepoint (hr) Value: 1
  misc_feature: MA Experiment 20000171 PARAMETER Experiment Name: At_42deg_Heat_P Parameter: Tissue Value: Aerial
aatttgataaacaccgatgattcgattctaagggaagaagatctctctctactacgacaagctcaactctttcgttttcgagaaaccaattccaaagatcatcctaaacaattcgaaaccacaacaatgttcaacaacaacagtgtctcgatctcagtatctgacgacgaatctaacgatttgaatcggatccgagctcgtacccgacgaaagcggaagaaagtgagtcacagaaccagctacgagcttcctcgtcatgttctaaggctttttgtgagatactgggtcgtcttagtttttcttctcgctgttgggttgcttgtatttgaatcaacgaggatcggattcaaatctagtgacttgaagaaaccagatttgaatgggaaagagagtcctagtaagaaaaatgaaggaaatttgaatcgattggatcctactaccaaagttattggtggtgttagacaacgttgtttgaagcttttaccacctgaggagcttgagcatcttgatatcttagagcgtaaagattcaggctctccggttaagagagttgtgtatctaactgatacggatgtgtcggtgggagaaatgagaggtgttcgtggtaatgggacgcggtttaatttattcacggggaaccagacttttgctgagagagaaaatagttttcaggtaagggaaacagtttctttgcattgtgggtttttcaatgaaaatgggggatttaggatttcggataaggataagaagtttatgacatcatgtgaagtagtggtctcgacgtgtgcgtttggtggtggagataacctttatgaacctattggaatgtctaagacatcaagtcaaaaggtttgctatgttgcgttttgggatgaagttactcttacaacacaagaagcagagggtcataagatcgatgagaatgatcacattggaaagtggcgtattgtgattgtaaaggatcttccttttacagaccaaaggcttaatgggaagatcccaaaggtactactcatctacttcagaggcacatgtgatgatttgtactgcacgtagcaatcttattcgctgggtgttaacgtttctgattatgcgttcatggtactgtgtaaaatgtttccattacaaccaaatttaaccttctttggttttcattttgtgctgtgtaaaatggtatgtgctcgatttgaattagctcactgttgtcttttttttttccttacatcttttaatcttgttt

SEQ ID NO: 40856 - protein, 351 aa, Arabidopsis thaliana
  peptide (1)..(351): Ceres Seq. ID no. 12482128
  misc_feature (188)..(350): Pfam Name: Protein of unknown function (DUF616) Pfam Description: Protein of unknown function (DUF616)
  misc_feature (161)..(338): Homolog of NCBI NO: 15217874 NR Description: unknown protein
  misc_feature (210)..(332): Homolog of NCBI NO: 15218687 NR Description: hypothetical protein; protein id: At1g34550.1
  misc_feature (210)..(337): Homolog of NCBI NO: 15233955 NR Description: putative protein; protein id: At4g09630.1
  misc_feature (210)..(337): Homolog of NCBI NO: 25403429 NR Description: protein F12K21.12 [imported] - Arabidopsis
  misc_feature (186)..(337): Homolog of NCBI NO: 15227062 NR Description: unknown protein; protein id: At2g02910.1
  misc_feature (47)..(337): Homolog of NCBI NO: 40539063 NR Description: hypothetical protein [Oryza sativa (japonica
  misc_feature (48)..(337): Homolog of NCBI NO: 34909520 NR Description: P0481E12.30 [Oryza sativa (japonica
  misc_feature (43)..(337): Homolog of NCBI NO: 30694104 NR Description: expressed protein [Arabidopsis thaliana]
  misc_feature (43)..(337): Homolog of NCBI NO: 10177269 NR Description: gb|AAC32911.1~gene_id:MJB21.3~similar to unknown
  misc_feature (43)..(351): Homolog of NCBI NO: 21536990 NR Description: unknown [Arabidopsis thaliana]
NLINTDDSILREEDLSLLRQAQLFRFRETNSKDHPKQFETTTMFNNNSVSISVSDDESNDLNRIRARTRRKRKKVSHRTSYELPRHVLRLFVRYWVVLVFLLAVGLLVFESTRIGFKSSDLKKPDLNGKESPSKKNEGNLNRLDPTTKVIGGVRQRCLKLLPPEELEHLDILERKDSGSPVKRVVYLTDTDVSVGEMRGVRGNGTRFNLFTGNQTFAERENSFQVRETVSLHCGFFNENGGFRISDKDKKFMTSCEVVVSTCAFGGGDNLYEPIGMSKTSSQKVCYVAFWDEVTLTTQEAEGHKIDENDHIGKWRIVIVKDLPFTDQRLNGKIPKVLLIYFRGTCDDLYCT

SEQ ID NO: 40857 - protein, 309 aa, Arabidopsis thaliana
  peptide (1)..(309): Ceres Seq. ID no. 12482129
  misc_feature (146)..(308): Pfam Name: Protein of unknown function (DUF616) Pfam Description: Protein of unknown function (DUF616)
  misc_feature (119)..(296): Homolog of NCBI NO: 15217874 NR Description: unknown protein
  misc_feature (168)..(290): Homolog of NCBI NO: 15218687 NR Description: hypothetical protein; protein id: At1g34550.1
  misc_feature (168)..(295): Homolog of NCBI NO: 15233955 NR Description: putative protein; protein id: At4g09630.1
  misc_feature (168)..(295): Homolog of NCBI NO: 25403429 NR Description: protein F12K21.12 [imported] - Arabidopsis
  misc_feature (144)..(295): Homolog of NCBI NO: 15227062 NR Description: unknown protein; protein id: At2g02910.1
  misc_feature (5)..(295): Homolog of NCBI NO: 40539063 NR Description: hypothetical protein [Oryza sativa (japonica
  misc_feature (6)..(295): Homolog of NCBI NO: 34909520 NR Description: P0481E12.30 [Oryza sativa (japonica
  misc_feature (1)..(295): Homolog of NCBI NO: 30694104 NR Description: expressed protein [Arabidopsis thaliana]
  misc_feature (1)..(295): Homolog of NCBI NO: 10177269 NR Description: gb|AAC32911.1~gene_id:MJB21.3~similar to unknown
  misc_feature (1)..(309): Homolog of NCBI NO: 21536990 NR Description: unknown [Arabidopsis thaliana]
MFNNNSVSISVSDDESNDLNRIRARTRRKRKKVSHRTSYELPRHVLRLFVRYWVVLVFLLAVGLLVFESTRIGFKSSDLKKPDLNGKESPSKKNEGNLNRLDPTTKVIGGVRQRCLKLLPPEELEHLDILERKDSGSPVKRVVYLTDTDVSVGEMRGVRGNGTRFNLFTGNQTFAERENSFQVRETVSLHCGFFNENGGFRISDKDKKFMTSCEVVVSTCAFGGGDNLYEPIGMSKTSSQKVCYVAFWDEVTLTTQEAEGHKIDENDHIGKWRIVIVKDLPFTDQRLNGKIPKVLLIYFRGTCDDLYCT

SEQ ID NO: 40858 - DNA, 1328 bp, Arabidopsis thaliana
  misc_feature (1)..(1328): Ceres Seq. ID no. 12421168
  misc_feature: MA Experiment ID: 108461 Result: Down-regulated in Transcription
  misc_feature: MA Experiment 108461 PARAMETER Experiment Name: At_Germinating_Seeds_cDNA_P Parameter: Age (day) Value: 1 vs. 0
  misc_feature: MA Experiment 108461 PARAMETER Experiment Name: At_Germinating_Seeds_cDNA_P Parameter: Tissue Value: Germinating Seeds
  misc_feature: MA Experiment ID: 108462 Result: Down-regulated in Transcription
  misc_feature: MA Experiment 108462 PARAMETER Experiment Name: At_Germinating_Seeds_cDNA_P Parameter: Age (day) Value: 2 vs. 0
  misc_feature: MA Experiment 108462 PARAMETER Experiment Name: At_Germinating_Seeds_cDNA_P Parameter: Tissue Value: Germinating Seeds
  misc_feature: MA Experiment ID: 108463 Result: Down-regulated in Transcription
  misc_feature: MA Experiment 108463 PARAMETER Experiment Name: At_Germinating_Seeds_cDNA_P Parameter: Age (day) Value: 3 vs. 0
  misc_feature: MA Experiment 108463 PARAMETER Experiment Name: At_Germinating_Seeds_cDNA_P Parameter: Tissue Value: Germinating Seeds
  misc_feature: MA Experiment ID: 108464 Result: Down-regulated in Transcription
  misc_feature: MA Experiment 108464 PARAMETER Experiment Name: At_Germinating_Seeds_cDNA_P Parameter: Age (day) Value: 4 vs. 0
  misc_feature: MA Experiment 108464 PARAMETER Experiment Name: At_Germinating_Seeds_cDNA_P Parameter: Tissue Value: Germinating Seeds
  misc_feature: MA Experiment ID: 20000224 Result: Up-regulated in Transcription
  misc_feature: MA Experiment ID: 20000307 Result: Down-regulated in Transcription
  misc_feature: MA Experiment 20000307 PARAMETER Experiment Name: At_Germinating_Seeds_Sub_P Parameter: Age (hr) Value: 24 vs. 0
  misc_feature: MA Experiment 20000307 PARAMETER Experiment Name: At_Germinating_Seeds_Sub_P Parameter: Organism Value: A. thaliana
  misc_feature: MA Experiment 20000307 PARAMETER Experiment Name: At_Germinating_Seeds_Sub_P Parameter: Plant Line Value: WS
  misc_feature: MA Experiment 20000307 PARAMETER Experiment Name: At_Germinating_Seeds_Sub_P Parameter: Tissue Value: Germinating Seeds
  misc_feature: MA Experiment ID: 20000315 Result: Down-regulated in Transcription
  misc_feature: MA Experiment 20000315 PARAMETER Experiment Name: At_14day_Shoots-Roots_Sub_P Parameter: Age (day) Value: 14
  misc_feature: MA Experiment 20000315 PARAMETER Experiment Name: At_14day_Shoots-Roots_Sub_P Parameter: Organism Value: A. thaliana
  misc_feature: MA Experiment 20000315 PARAMETER Experiment Name: At_14day_Shoots-Roots_Sub_P Parameter: Plant Line Value: WS
  misc_feature: MA Experiment 20000315 PARAMETER Experiment Name: At_14day_Shoots-Roots_Sub_P Parameter: Tissue Value: Shoots vs. Whole Plant
  misc_feature: MA Experiment ID: 20000328 Result: Up-regulated in Transcription
  misc_feature: MA Experiment 20000328 PARAMETER Experiment Name: At_42deg_Heat_Sub_P Parameter: Age (day) Value: 14
  misc_feature: MA Experiment 20000328 PARAMETER Experiment Name: At_42deg_Heat_Sub_P Parameter: Organism Value: A. thaliana
  misc_feature: MA Experiment 20000328 PARAMETER Experiment Name: At_42deg_Heat_Sub_P Parameter: Plant Line Value: WS
  misc_feature: MA Experiment 20000328 PARAMETER Experiment Name: At_42deg_Heat_Sub_P Parameter: Temperature (deg C) Value: 42 vs. 22
  misc_feature: MA Experiment 20000328 PARAMETER Experiment Name: At_42deg_Heat_Sub_P Parameter: Timepoint (hr) Value: 6
  misc_feature: MA Experiment 20000328 PARAMETER Experiment Name: At_42deg_Heat_Sub_P Parameter: Tissue Value: Aerial
gtcggaaaatacggacggcgtcgtcgttctttttgacggtgtagctcaccggcgacgatttttagatttttttttaagggaaacactaagcagcaaattacaagtgggtgatttgtgtttgttacataatcttatatctaactatgtcagattctggtgagcctaaaccttctcagcaagaagagcctctacctcaacctgctgcccaagaaactcagtctcaacaagtttgcactttcttcaagaagccaacgaaaagtaaaaacataagaaaaagaaccattgacgctgatgaagaagacggagattcgaaaagcgaaagctctattctacaaaatctaaagaaagttgcaaaacccgatagcaagttatacttttcttctggaccatctaagagctctactacaacgagtggagctcctgagagatccgtctttcactacgattcatccaaggaaatccaggttcagaacgacagtggagcaacagcaacccttgaaactgagaccgacttcaatcaagacgcacgagctatccgtgagagagttcttaaaaaagcagacgaagcattgaaagggaataagaaaaaggcttctgatgagaagctgtacaaaggaattcatggatatacagatcacaaagctgggtttagaagagaacaaacaatctcgagcgagaaagctggaggctcacacgggccattaagagcttctgctcacataagagtgtcggctagatttgattaccagccagacatttgcaaggattacaaagaaaccggatactgtggatatggagattcgtgtaagttcttgcatgaccgtggggattacaaaccgggatggcagatagagaaagagtgggaagaagcagagaaagttaggaagagaaataaagctatgggagttgaggatgaagatgatgaggctgacaaggatagcgacgaagacgaaaatgcattgccctttgcttgcttcatttgcagggagccatttgttgatccagttgtcaccaaatgcaagcattacttctgtgagcattgtgctttaaagcatcacacgaagaacaagaagtgctttgtgtgtaaccaaccaacaatggggattttcaatgcagcacatgagatcaagaagagaatggctgaagaacggagtaaagctgaagaaggattgtgaagtccttgtttcactggacaaaaaggcaaaaactatatttggttatttagctttttgttttgttgtactcactggcctacatatattcattcggatgacgacgatgtttgtttcaaactgattaacttttaaatttaaacaaactgaaaattg

SEQ ID NO: 40859 - protein, 343 aa, Arabidopsis thaliana
  peptide (1)..(343): Ceres Seq. ID no. 12421169
  misc_feature (277)..(314): Pfam Name: Zinc finger, C3HC4 type (RING finger) Pfam Description: Zinc finger, C3HC4 type (RING finger)
  misc_feature (28)..(342): Homolog of NCBI NO: 5902158 NR Description: zinc finger protein 183 (RING finger, C3HC4 type)
  misc_feature (13)..(342): Homolog of NCBI NO: 34935361 NR Description: similar to RIKEN cDNA 2310020H19 [Rattus
  misc_feature (16)..(343): Homolog of NCBI NO: 21313494 NR Description: RIKEN cDNA 2310020H19 [Mus musculus]
  misc_feature (28)..(340): Homolog of NCBI NO: 27715515 NR Description: similar to RIKEN cDNA 2810428C21
  misc_feature (26)..(343): Homolog of NCBI NO: 23943840 NR Description: RIKEN cDNA 2810428C21 [Mus musculus]
  misc_feature (1)..(303): Homolog of NCBI NO: 25406720 NR Description: probable zinc finger protein [imported] -
  misc_feature (25)..(343): Homolog of NCBI NO: 22531136 NR Description: putative protein [Arabidopsis thaliana]
  misc_feature (25)..(343): Homolog of NCBI NO: 15240037 NR Description: putative protein
  misc_feature (1)..(343): Homolog of NCBI NO: 26451788 NR Description: unknown protein [Arabidopsis thaliana]
  misc_feature (1)..(343): Homolog of NCBI NO: 15223384 NR Description: hypothetical protein; protein id: At1g01350.1
MSDSGEPKPSQQEEPLPQPAAQETQSQQVCTFFKKPTKSKNIRKRTIDADEEDGDSKSESSILQNLKKVAKPDSKLYFSSGPSKSSTTTSGAPERSVFHYDSSKEIQVQNDSGATATLETETDFNQDARAIRERVLKKADEALKGNKKKASDEKLYKGIHGYTDHKAGFRREQTISSEKAGGSHGPLRASAHIRVSARFDYQPDICKDYKETGYCGYGDSCKFLHDRGDYKPGWQIEKEWEEAEKVRKRNKAMGVEDEDDEADKDSDEDENALPFACFICREPFVDPVVTKCKHYFCEHCALKHHTKNKKCFVCNQPTMGIFNAAHEIKKRMAEERSKAEEGL

SEQ ID NO: 40860 - DNA, 825 bp, Arabidopsis thaliana
  misc_feature (1)..(825): Ceres Seq. ID no. 12329445
  misc_feature: MA Experiment ID: 108434 Result: Up-regulated in Transcription
  misc_feature: MA Experiment 108434 PARAMETER Experiment Name: At_Root_Tips_cDNA_P Parameter: Tissue Value: Root Tips
  misc_feature: MA Experiment ID: 108462 Result: Down-regulated in Transcription
  misc_feature: MA Experiment 108462 PARAMETER Experiment Name: At_Germinating_Seeds_cDNA_P Parameter: Age (day) Value: 2 vs. 0
  misc_feature: MA Experiment 108462 PARAMETER Experiment Name: At_Germinating_Seeds_cDNA_P Parameter: Tissue Value: Germinating Seeds
  misc_feature: MA Experiment ID: 108463 Result: Down-regulated in Transcription
  misc_feature: MA Experiment 108463 PARAMETER Experiment Name: At_Germinating_Seeds_cDNA_P Parameter: Age (day) Value: 3 vs. 0
  misc_feature: MA Experiment 108463 PARAMETER Experiment Name: At_Germinating_Seeds_cDNA_P Parameter: Tissue Value: Germinating Seeds
  misc_feature: MA Experiment ID: 108464 Result: Down-regulated in Transcription
  misc_feature: MA Experiment 108464 PARAMETER Experiment Name: At_Germinating_Seeds_cDNA_P Parameter: Age (day) Value: 4 vs. 0
  misc_feature: MA Experiment 108464 PARAMETER Experiment Name: At_Germinating_Seeds_cDNA_P Parameter: Tissue Value: Germinating Seeds
  misc_feature: MA Experiment ID: 108573 Result: Down-regulated in Transcription
  misc_feature: MA Experiment 108573 PARAMETER Experiment Name: At_Drought_cDNA_P Parameter: Timepoint (hr) Value: 6
  misc_feature: MA Experiment 108573 PARAMETER Experiment Name: At_Drought_cDNA_P Parameter: Tissue Value: Aerial
  misc_feature: MA Experiment 108573 PARAMETER Experiment Name: At_Drought_cDNA_P Parameter: Treatment Value: Drought vs. No Drought
  misc_feature: MA Experiment ID: 108577 Result: Down-regulated in Transcription
  misc_feature: MA Experiment 108577 PARAMETER Experiment Name: At_42deg_Heat_cDNA_P Parameter: Temperature (deg C) Value: 42 vs. 22
  misc_feature: MA Experiment 108577 PARAMETER Experiment Name: At_42deg_Heat_cDNA_P Parameter: Timepoint (hr) Value: 6
  misc_feature: MA Experiment 108577 PARAMETER Experiment Name: At_42deg_Heat_cDNA_P Parameter: Tissue Value: Aerial
  misc_feature: MA Experiment ID: 108579 Result: Up-regulated in Transcription
  misc_feature: MA Experiment 108579 PARAMETER Experiment Name: At_4deg_Cold_cDNA_P Parameter: Temperature (deg C) Value: 4 vs. 22
  misc_feature: MA Experiment 108579 PARAMETER Experiment Name: At_4deg_Cold_cDNA_P Parameter: Timepoint (hr) Value: 6
  misc_feature: MA Experiment 108579 PARAMETER Experiment Name: At_4deg_Cold_cDNA_P Parameter: Tissue Value: Aerial
  misc_feature: MA Experiment ID: 20000113 Result: Down-regulated in Transcription
  misc_feature: MA Experiment 20000113 PARAMETER Experiment Name: At_42deg_Heat_cDNA_P Parameter: Temperature (deg C) Value: 42 vs. 22
  misc_feature: MA Experiment 20000113 PARAMETER Experiment Name: At_42deg_Heat_cDNA_P Parameter: Timepoint (hr) Value: 8
  misc_feature: MA Experiment 20000113 PARAMETER Experiment Name: At_42deg_Heat_cDNA_P Parameter: Tissue Value: Aerial
  misc_feature: MA Experiment ID: 20000180 Result: Down-regulated in Transcription
  misc_feature: MA Experiment 20000180 PARAMETER Experiment Name: At_Germinating_Seeds_P Parameter: Age (hr) Value: 24 vs. 0
  misc_feature: MA Experiment 20000180 PARAMETER Experiment Name: At_Germinating_Seeds_P Parameter: Tissue Value: Germinating Seeds
  misc_feature: MA Experiment ID: 20000184 Result: Up-regulated in Transcription
  misc_feature: MA Experiment 20000184 PARAMETER Experiment Name: At_Shoots__P Parameter: Age (day) Value: 7
  misc_feature: MA Experiment 20000184 PARAMETER Experiment Name: At_Shoots__P Parameter: Tissue Value: Shoots vs. Whole Plant
  misc_feature: MA Experiment ID: 20000437 Result: Down-regulated in Transcription
  misc_feature: MA Experiment 20000437 PARAMETER Experiment Name: At_Drought_P Parameter: Age (day) Value: 8
  misc_feature: MA Experiment 20000437 PARAMETER Experiment Name: At_Drought_P Parameter: Organism Value: A. thaliana
  misc_feature: MA Experiment 20000437 PARAMETER Experiment Name: At_Drought_P Parameter: Plant Line Value: WS
  misc_feature: MA Experiment 20000437 PARAMETER Experiment Name: At_Drought_P Parameter: Timepoint (hr) Value: 24
  misc_feature: MA Experiment 20000437 PARAMETER Experiment Name: At_Drought_P Parameter: Tissue Value: Whole Plant
  misc_feature: MA Experiment 20000437 PARAMETER Experiment Name: At_Drought_P Parameter: Treatment Value: Drought vs. No Drought
  misc_feature: MA Experiment ID: 20001558 Result: Up-regulated in Transcription
  misc_feature: MA Experiment 20001558 PARAMETER Experiment Name: At_Drought_Soil_Dry_P Parameter: Age (day) Value: 27
  misc_feature: MA Experiment 20001558 PARAMETER Experiment Name: At_Drought_Soil_Dry_P Parameter: Organism Value: A. thaliana
  misc_feature: MA Experiment 20001558 PARAMETER Experiment Name: At_Drought_Soil_Dry_P Parameter: Plant Line Value: WS
  misc_feature: MA Experiment 20001558 PARAMETER Experiment Name: At_Drought_Soil_Dry_P Parameter: Post Timepoint (hr) Value: 6
  misc_feature: MA Experiment 20001558 PARAMETER Experiment Name: At_Drought_Soil_Dry_P Parameter: Post-Treatment Value: Re-Water vs. No Drought
  misc_feature: MA Experiment 20001558 PARAMETER Experiment Name: At_Drought_Soil_Dry_P Parameter: Timepoint (day) Value: 13
  misc_feature: MA Experiment 20001558 PARAMETER Experiment Name: At_Drought_Soil_Dry_P Parameter: Treatment Value: Drought vs. No Drought
  misc_feature: MA Experiment ID: 20001757 Result: Up-regulated in Transcription
  misc_feature: MA Experiment 20001757 PARAMETER Experiment Name: At_50mM_NH4NO3_L-to-H_P Parameter: Timepoint (hr) Value: 6
  misc_feature: MA Experiment 20001757 PARAMETER Experiment Name: At_50mM_NH4NO3_L-to-H_P Parameter: Tissue Value: Leaf
  misc_feature: MA Experiment 20001757 PARAMETER Experiment Name: At_50mM_NH4NO3_L-to-H_P Parameter: Treatment Value: 50mM NH4NO3 vs 100mM Mannitol
atgatcaagcctgacggcgtccagagaggactcatcggtgaagtcatctgcagatttgagaagaagggtttcactttgaaaggtaacgatgattaccaaacttacttgactgattttactttataattagaggtcttagttctaatttaagtcactttgttacttgaattaagattttaatgacactatagttgcttatggtttggtctagtttctgaacattgatagtttagtaaaacttctttggcttgacaaagattctatgtgttgtctaatagagtttagattagagtatctgtgcataagaacttgttattatgtaatttggtagataagagtgttagtcttgtgtttctgatcagtgtagatttgtattttatacaggtctgaagttgatcagtgtagagagatcttttgctgagaagcactacgaagacttatcttcaaagtctttcttcagtggacttgttgactacattgtatccggccctgttgttgctatgatctgggaaggaaagaatgttgtcttgaccggaagaaagatcattggagctaccaacccagcagcttctgagcctggaactatccgtggggactttgctattgacattggaaggaatgtgatccacggtagtgactctgtcgagagcgccagaaaggagattgctttgtggttccctgatggacctgtcaactggcagagcagcgttcacccttgggtctatgaaacttgatgatctgttgctttttcagtagtgtgttttctacattgcttgcttttgaacaagactgaaatattttaagttgaatttgattatccttctc

SEQ ID NO: 40861 - protein, 77 aa, Arabidopsis thaliana; identical to SEQ ID NO: 21516
  peptide (1)..(77): Ceres Seq. ID no. 12329446
  misc_feature (1)..(66): Pfam Name: Nucleoside diphosphate kinase Pfam Description: Nucleoside diphosphate kinase
  misc_feature (1)..(76): Homolog of NCBI NO: 1346672 NR Description: Nucleoside diphosphate kinase I (NDK I) (NDP
  misc_feature (1)..(76): Homolog of NCBI NO: 1389640 NR Description: PNDKN1 [Pisum sativum]
  misc_feature (1)..(76): Homolog of NCBI NO: 19570344 NR Description: nucleoside diphosphate kinase 1 [Brassica rapa]
  misc_feature (1)..(77): Homolog of NCBI NO: 18413214 NR Description: nucleoside-diphosphate kinase
  misc_feature (1)..(77): Homolog of NCBI NO: 13899069 NR Description: Unknown protein [Arabidopsis thaliana]
  misc_feature (1)..(77): Homolog of NCBI NO: 730129 NR Description: Nucleoside diphosphate kinase I (NDK I) (NDP
  misc_feature (1)..(77): Homolog of NCBI NO: 322552 NR Description: nucleoside-diphosphate kinase (EC 2.7.4.6) -

SEQ ID NO: 40862 - protein, 41 aa, Arabidopsis thaliana
  peptide (1)..(41): Ceres Seq. ID no. 12329447
  misc_feature (1)..(28): Homolog of NCBI NO: 1346672 NR Description: Nucleoside diphosphate kinase I (NDK I) (NDP
  misc_feature (1)..(28): Homolog of NCBI NO: 1389640 NR Description: PNDKN1 [Pisum sativum]
  misc_feature (1)..(28): Homolog of NCBI NO: 19570344 NR Description: nucleoside diphosphate kinase 1 [Brassica rapa]
  misc_feature (1)..(28): Homolog of NCBI NO: 18413214 NR Description: nucleoside-diphosphate kinase
  misc_feature (1)..(28): Homolog of NCBI NO: 730129 NR Description: Nucleoside diphosphate kinase I (NDK I) (NDP
  misc_feature (1)..(28): Homolog of NCBI NO: 13899069 NR Description: Unknown protein [Arabidopsis thaliana]
  misc_feature (1)..(28): Homolog of NCBI NO: 322552 NR Description: nucleoside-diphosphate kinase (EC 2.7.4.6) -
MIKPDGVQRGLIGEVICRFEKKGFTLKGNDDYQTYLTDFTL

SEQ ID NO: 40863 - DNA, 593 bp, Arabidopsis thaliana
  misc_feature (1)..(593): Ceres Seq. ID no. 12559998
  misc_feature: MA Experiment ID: 20000173 Result: Down-regulated in Transcription
  misc_feature: MA Experiment 20000173 PARAMETER Experiment Name: At_42deg_Heat_P Parameter: Age (day) Value: 14
  misc_feature: MA Experiment 20000173 PARAMETER Experiment Name: At_42deg_Heat_P Parameter: Organism Value: A. thaliana
  misc_feature: MA Experiment 20000173 PARAMETER Experiment Name: At_42deg_Heat_P Parameter: Plant Line Value: WS
  misc_feature: MA Experiment 20000173 PARAMETER Experiment Name: At_42deg_Heat_P Parameter: Temperature (deg C) Value: 42 vs. 22
  misc_feature: MA Experiment 20000173 PARAMETER Experiment Name: At_42deg_Heat_P Parameter: Timepoint (hr) Value: 6
  misc_feature: MA Experiment 20000173 PARAMETER Experiment Name: At_42deg_Heat_P Parameter: Tissue Value: Aerial
  misc_feature: MA Experiment ID: 20000213 Result: Up-regulated in Transcription
  misc_feature: MA Experiment 20000213 PARAMETER Experiment Name: At_4deg_Cold_P Parameter: Timepoint (hr) Value: 2
  misc_feature: MA Experiment ID: 20000453 Result: Down-regulated in Transcription
  misc_feature: MA Experiment 20000453 PARAMETER Experiment Name: At_100uM_ABA_P Parameter: Age (day) Value: 15
  misc_feature: MA Experiment 20000453 PARAMETER Experiment Name: At_100uM_ABA_P Parameter: Organism Value: A. thaliana
  misc_feature: MA Experiment 20000453 PARAMETER Experiment Name: At_100uM_ABA_P Parameter: Plant Line Value: WS
  misc_feature: MA Experiment 20000453 PARAMETER Experiment Name: At_100uM_ABA_P Parameter: Timepoint (hr) Value: 24
  misc_feature: MA Experiment 20000453 PARAMETER Experiment Name: At_100uM_ABA_P Parameter: Tissue Value: Aerial
  misc_feature: MA Experiment 20000453 PARAMETER Experiment Name: At_100uM_ABA_P Parameter: Treatment Value: 100uM ABA vs. No Treatment
  misc_feature: MA Experiment ID: 20001247 Result: Down-regulated in Transcription
  misc_feature: MA Experiment 20001247 PARAMETER Experiment Name: At_Far-red-induction_P Parameter: Age (day) Value: 7
  misc_feature: MA Experiment 20001247 PARAMETER Experiment Name: At_Far-red-induction_P Parameter: Light Value: Far-red vs. White
  misc_feature: MA Experiment 20001247 PARAMETER Experiment Name: At_Far-red-induction_P Parameter: Organism Value: A. thaliana
  misc_feature: MA Experiment 20001247 PARAMETER Experiment Name: At_Far-red-induction_P Parameter: Plant Line Value: Columbia
  misc_feature: MA Experiment 20001247 PARAMETER Experiment Name: At_Far-red-induction_P Parameter: Timepoint (hr) Value: 1
  misc_feature: MA Experiment 20001247 PARAMETER Experiment Name: At_Far-red-induction_P Parameter: Tissue Value: Whole Plant
  misc_feature: MA Experiment ID: 20001248 Result: Up-regulated in Transcription
  misc_feature: MA Experiment 20001248 PARAMETER Experiment Name: At_Far-red-induction_P Parameter: Age (day) Value: 7
  misc_feature: MA Experiment 20001248 PARAMETER Experiment Name: At_Far-red-induction_P Parameter: Light Value: Far-red vs. White
  misc_feature: MA Experiment 20001248 PARAMETER Experiment Name: At_Far-red-induction_P Parameter: Organism Value: A. thaliana
  misc_feature: MA Experiment 20001248 PARAMETER Experiment Name: At_Far-red-induction_P Parameter: Plant Line Value: Columbia
  misc_feature: MA Experiment 20001248 PARAMETER Experiment Name: At_Far-red-induction_P Parameter: Timepoint (hr) Value: 4
  misc_feature: MA Experiment 20001248 PARAMETER Experiment Name: At_Far-red-induction_P Parameter: Tissue Value: Whole Plant
  misc_feature: MA Experiment ID: 20001557 Result: Up-regulated in Transcription
  misc_feature: MA Experiment 20001557 PARAMETER Experiment Name: At_Drought_Soil_Dry_P Parameter: Age (day) Value: 27
  misc_feature: MA Experiment 20001557 PARAMETER Experiment Name: At_Drought_Soil_Dry_P Parameter: Organism Value: A. thaliana
  misc_feature: MA Experiment 20001557 PARAMETER Experiment Name: At_Drought_Soil_Dry_P Parameter: Plant Line Value: WS
  misc_feature: MA Experiment 20001557 PARAMETER Experiment Name: At_Drought_Soil_Dry_P Parameter: Post Timepoint (hr) Value: 3
  misc_feature: MA Experiment 20001557 PARAMETER Experiment Name: At_Drought_Soil_Dry_P Parameter: Post-Treatment Value: Re-Water vs. No Drought
  misc_feature: MA Experiment 20001557 PARAMETER Experiment Name: At_Drought_Soil_Dry_P Parameter: Timepoint (day) Value: 13
  misc_feature: MA Experiment 20001557 PARAMETER Experiment Name: At_Drought_Soil_Dry_P Parameter: Treatment Value: Drought vs. No Drought
acataagtctctctcttacattttgaaaccctaatttctcaaaaaaaatgtctgaagttgagtaccggtgctttgtcggcggccttgcctgggccaccaatgatgaagatcttcaaaggacgttctcacagttcggcgacgttatcgattctaagatcattaacgaccgcgagagtggaagatcaaggggattcggattcgtcaccttcaaggacgagaaagccatgagggatgcgattgaagagatgaacggtaaagagctcgatggacgtgtcatcaccgtgaacgaggctcagtcgagaggtagcggcggtggcggaggaggccgtggtggaagcggtggtggttaccgcagcggaggcggtgatggtggaagttacggcggcggtggtggcggctggtaatcaaagatagagttgtttgcgtgctgctgctctgtttttggtttagatttggatttgtgtcaccacttctggtttggttatcgttcgtttggtttacttttttgatgaaacagtttcgtttaagtcttctttgtctggatcgaaatgttaattcgcgtgttgtttactaaatttataacgtttcctttt

SEQ ID NO: 40864 - protein, 118 aa, Arabidopsis thaliana
  peptide (1)..(118): Ceres Seq. ID no. 12559999
  misc_feature (8)..(79): Pfam Name: RNA recognition motif. (a.k.a. RRM, RBD, or RNP domain) Pfam Description: RNA recognition motif. (a.k.a. RRM, RBD, or RNP
  misc_feature (3)..(117): Homolog of NCBI NO: 1346181 NR Description: Glycine-rich RNA-binding protein GRP2A
  misc_feature (1)..(118): Homolog of NCBI NO: 2226370 NR Description: RNA-binding protein [Nicotiana glutinosa]
  misc_feature (1)..(116): Homolog of NCBI NO: 2119042 NR Description: glycine-rich RNA-binding protein RGP-1a - wood
  misc_feature (3)..(118): Homolog of NCBI NO: 1346180 NR Description: Glycine-rich RNA-binding protein GRP1A
  misc_feature (3)..(116): Homolog of NCBI NO: 21553354 NR Description: glycine-rich RNA binding protein 7 [Arabidopsis
  misc_feature (3)..(116): Homolog of NCBI NO: 15226605 NR Description: glycine-rich RNA binding protein AtGRP7
  misc_feature (1)..(118): Homolog of NCBI NO: 544426 NR Description: Glycine-rich RNA-binding protein
  misc_feature (1)..(118): Homolog of NCBI NO: 544416 NR Description: Glycine-rich RNA-binding protein 10
  misc_feature (1)..(118): Homolog of NCBI NO: 30692254 NR Description: glycine-rich RNA-binding protein 8 (GRP8) (CCR1)
  misc_feature (1)..(118): Homolog of NCBI NO: 15235002 NR Description: glycine-rich RNA-binding protein 8 (GRP8)
MSEVEYRCFVGGLAWATNDEDLQRTFSQFGDVIDSKIINDRESGRSRGFGFVTFKDEKAMRDAIEEMNGKELDGRVITVNEAQSRGSGGGGGGRGGSGGGYRSGGGDGGSYGGGGGGW

SEQ ID NO: 40865 - protein, 59 aa, Arabidopsis thaliana
  peptide (1)..(59): Ceres Seq. ID no. 12560000
  misc_feature (1)..(58): Homolog of NCBI NO: 1346181 NR Description: Glycine-rich RNA-binding protein GRP2A
  misc_feature (1)..(59): Homolog of NCBI NO: 2226370 NR Description: RNA-binding protein [Nicotiana glutinosa]
  misc_feature (1)..(57): Homolog of NCBI NO: 2119042 NR Description: glycine-rich RNA-binding protein RGP-1a - wood
  misc_feature (1)..(59): Homolog of NCBI NO: 1346180 NR Description: Glycine-rich RNA-binding protein GRP1A
  misc_feature (1)..(57): Homolog of NCBI NO: 21553354 NR Description: glycine-rich RNA binding protein 7 [Arabidopsis
  misc_feature (1)..(57): Homolog of NCBI NO: 15226605 NR Description: glycine-rich RNA binding protein AtGRP7
  misc_feature (1)..(59): Homolog of NCBI NO: 544426 NR Description: Glycine-rich RNA-binding protein
  misc_feature (1)..(59): Homolog of NCBI NO: 544416 NR Description: Glycine-rich RNA-binding protein 10
  misc_feature (1)..(59): Homolog of NCBI NO: 30692254 NR Description: glycine-rich RNA-binding protein 8 (GRP8) (CCR1)
  misc_feature (1)..(59): Homolog of NCBI NO: 15235002 NR Description: glycine-rich RNA-binding protein 8 (GRP8)
MRDAIEEMNGKELDGRVITVNEAQSRGSGGGGGGRGGSGGGYRSGGGDGGSYGGGGGGW

SEQ ID NO: 40866 - DNA, 868 bp, Arabidopsis thaliana
  misc_feature (1)..(868): Ceres Seq. ID no. 13489284
  misc_feature: MA Experiment ID: 108462 Result: Up-regulated in Transcription
  misc_feature: MA Experiment 108462 PARAMETER Experiment Name: At_Germinating_Seeds_cDNA_P Parameter: Age (day) Value: 2 vs. 0
  misc_feature: MA Experiment 108462 PARAMETER Experiment Name: At_Germinating_Seeds_cDNA_P Parameter: Tissue Value: Germinating Seeds
  misc_feature: MA Experiment ID: 108464 Result: Up-regulated in Transcription
  misc_feature: MA Experiment 108464 PARAMETER Experiment Name: At_Germinating_Seeds_cDNA_P Parameter: Age (day) Value: 4 vs. 0
  misc_feature: MA Experiment 108464 PARAMETER Experiment Name: At_Germinating_Seeds_cDNA_P Parameter: Tissue Value: Germinating Seeds
  misc_feature: MA Experiment ID: 108579 Result: Down-regulated in Transcription
  misc_feature: MA Experiment 108579 PARAMETER Experiment Name: At_4deg_Cold_cDNA_P Parameter: Temperature (deg C) Value: 4 vs. 22
  misc_feature: MA Experiment 108579 PARAMETER Experiment Name: At_4deg_Cold_cDNA_P Parameter: Timepoint (hr) Value: 6
  misc_feature: MA Experiment 108579 PARAMETER Experiment Name: At_4deg_Cold_cDNA_P Parameter: Tissue Value: Aerial
  misc_feature: MA Experiment ID: 108585 Result: Up-regulated in Transcription
  misc_feature: MA Experiment 108585 PARAMETER Experiment Name: At_5mM_NaNP_cDNA_P Parameter: Timepoint (hr) Value: 6
  misc_feature: MA Experiment 108585 PARAMETER Experiment Name: At_5mM_NaNP_cDNA_P Parameter: Tissue Value: Aerial
  misc_feature: MA Experiment 108585 PARAMETER Experiment Name: At_5mM_NaNP_cDNA_P Parameter: Treatment Value: null
  misc_feature: MA Experiment ID: 108668 Result: Up-regulated in Transcription
  misc_feature: MA Experiment 108668 PARAMETER Experiment Name: At_2mM_SA_cDNA_P Parameter: Plant Line Value: WS
  misc_feature: MA Experiment 108668 PARAMETER Experiment Name: At_2mM_SA_cDNA_P Parameter: Timepoint (hr) Value: 6
  misc_feature: MA Experiment 108668 PARAMETER Experiment Name: At_2mM_SA_cDNA_P Parameter: Treatment Value: 2mM SA vs. No Treatment
  misc_feature: MA Experiment ID: 20000090 Result: Up-regulated in Transcription
  misc_feature: MA Experiment ID: 20000179 Result: Up-regulated in Transcription
  misc_feature: MA Experiment 20000179 PARAMETER Experiment Name: At_Germinating_Seeds_P Parameter: Age (hr) Value: 6 vs. 0
  misc_feature: MA Experiment 20000179 PARAMETER Experiment Name: At_Germinating_Seeds_P Parameter: Tissue Value: Germinating Seeds
  misc_feature: MA Experiment ID: 20000180 Result: Up-regulated in Transcription
  misc_feature: MA Experiment 20000180 PARAMETER Experiment Name: At_Germinating_Seeds_P Parameter: Age (hr) Value: 24 vs. 0
  misc_feature: MA Experiment 20000180 PARAMETER Experiment Name: At_Germinating_Seeds_P Parameter: Tissue Value: Germinating Seeds
  misc_feature: MA Experiment ID: 20000182 Result: Up-regulated in Transcription
  misc_feature: MA Experiment 20000182 PARAMETER Experiment Name: At_2mM_SA_P Parameter: Age (day) Value: 14
  misc_feature: MA Experiment 20000182 PARAMETER Experiment Name: At_2mM_SA_P Parameter: Organism Value: A. thaliana
  misc_feature: MA Experiment 20000182 PARAMETER Experiment Name: At_2mM_SA_P Parameter: Plant Line Value: WS
  misc_feature: MA Experiment 20000182 PARAMETER Experiment Name: At_2mM_SA_P Parameter: Timepoint (hr) Value: 6
  misc_feature: MA Experiment 20000182 PARAMETER Experiment Name: At_2mM_SA_P Parameter: Tissue Value: Aerial
  misc_feature: MA Experiment 20000182 PARAMETER Experiment Name: At_2mM_SA_P Parameter: Treatment Value: 2mM SA vs. No Treatment
  misc_feature: MA Experiment ID: 20000184 Result: Down-regulated in Transcription
  misc_feature: MA Experiment 20000184 PARAMETER Experiment Name: At_Shoots__P Parameter: Age (day) Value: 7
  misc_feature: MA Experiment 20000184 PARAMETER Experiment Name: At_Shoots__P Parameter: Tissue Value: Shoots vs. Whole Plant
  misc_feature: MA Experiment ID: 20000438 Result: Down-regulated in Transcription
  misc_feature: MA Experiment 20000438 PARAMETER Experiment Name: At_Shoots__P Parameter: Age (day) Value: 14
  misc_feature: MA Experiment 20000438 PARAMETER Experiment Name: At_Shoots__P Parameter: Tissue Value: Shoots vs. Whole Plant
  misc_feature: MA Experiment ID: 20001557 Result: Down-regulated in Transcription
  misc_feature: MA Experiment 20001557 PARAMETER Experiment Name: At_Drought_Soil_Dry_P Parameter: Age (day) Value: 27
  misc_feature: MA Experiment 20001557 PARAMETER Experiment Name: At_Drought_Soil_Dry_P Parameter: Organism Value: A. thaliana
  misc_feature: MA Experiment 20001557 PARAMETER Experiment Name: At_Drought_Soil_Dry_P Parameter: Plant Line Value: WS
  misc_feature: MA Experiment 20001557 PARAMETER Experiment Name: At_Drought_Soil_Dry_P Parameter: Post Timepoint (hr) Value: 3
  misc_feature: MA Experiment 20001557 PARAMETER Experiment Name: At_Drought_Soil_Dry_P Parameter: Post-Treatment Value: Re-Water vs. No Drought
  misc_feature: MA Experiment 20001557 PARAMETER Experiment Name: At_Drought_Soil_Dry_P Parameter: Timepoint (day) Value: 13
  misc_feature: MA Experiment 20001557 PARAMETER Experiment Name: At_Drought_Soil_Dry_P Parameter: Treatment Value: Drought vs. No Drought
  misc_feature: MA Experiment ID: 20001558 Result: Down-regulated in Transcription
  misc_feature: MA Experiment 20001558 PARAMETER Experiment Name: At_Drought_Soil_Dry_P Parameter: Age (day) Value: 27
  misc_feature: MA Experiment 20001558 PARAMETER Experiment Name: At_Drought_Soil_Dry_P Parameter: Organism Value: A. thaliana
  misc_feature: MA Experiment 20001558 PARAMETER Experiment Name: At_Drought_Soil_Dry_P Parameter: Plant Line Value: WS
  misc_feature: MA Experiment 20001558 PARAMETER Experiment Name: At_Drought_Soil_Dry_P Parameter: Post Timepoint (hr) Value: 6
  misc_feature: MA Experiment 20001558 PARAMETER Experiment Name: At_Drought_Soil_Dry_P Parameter: Post-Treatment Value: Re-Water vs. No Drought
  misc_feature: MA Experiment 20001558 PARAMETER Experiment Name: At_Drought_Soil_Dry_P Parameter: Timepoint (day) Value: 13
  misc_feature: MA Experiment 20001558 PARAMETER Experiment Name: At_Drought_Soil_Dry_P Parameter: Treatment Value: Drought vs. No Drought
cttcgtcttcgatctctctaccaactccacgatcaacgaaaccaaagatctctcttcaaagcttccaccatgtttctccgatcactcaatctctgtacaatactactcttcctagcgatttcatcacaagtttctcaatctctccacttcgaattgcaatctggtcgaacaaaatgtatatcggaagacataaaaagcaattcaatgaccgtcgggatgtacaccgtcgttaaccctaacgaagctcatccttctcctcaatctcacaagatctccatcagagtgacatcgagttacgggaacacgtatcatcacgcggaagatgtagaatcgggacaattcgcgttcacggcggtggagtctggagattacatggcttgttacacagctgttgatcataaacctgaggttacattgagtattgatttcgattggagaactggtgttcaatctaaaagctggagtagtgttgctaagaagagccaagtcgaagttatggagtttgatgtaaaaagacttattgaaaccgtcaattcgattcatgaagagatgttttatctcagagaaagggaagaagagatgcagaatctgaaccgggctactaactcgaaaatggcgtggttgagtttcctctctcttttcgtatgcttaggagtcgcgggaatgcagtttgtgcatttgaagacgtttttcgagaagaagaaagtcatctaagatggttagatgaaacaaatcccactcttttcttttcccaactcaaaggagtcttctattcctccatgagttttgtacatttagatctttacttttgagtatgtactctcggaactggaaattaaatgaatatgaaagtattgcccctttttcc

SEQ ID NO: 40867 - protein, 237 aa, Arabidopsis thaliana
  peptide (1)..(237): Ceres Seq. ID no. 13489285
  misc_feature (32)..(237): Pfam Name: emp24/gp25L/p24 family Pfam Description: emp24/gp25L/p24 family
  misc_feature (37)..(237): Homolog of NCBI NO: 18921314 NR Description: putative transmembrane protein [Oryza sativa]
  misc_feature (29)..(237): Homolog of NCBI NO: 33146897 NR Description: putative transmembrane protein
  misc_feature (29)..(237): Homolog of NCBI NO: 15227591 NR Description: emp24/gp25L/p24 family [Arabidopsis thaliana]
  misc_feature (34)..(237): Homolog of NCBI NO: 8778403 NR Description: F16A14.23 [Arabidopsis thaliana]
  misc_feature (34)..(237): Homolog of NCBI NO: 15223027 NR Description: emp24/gp25L/p24 family [Arabidopsis thaliana]
  misc_feature (34)..(237): Homolog of NCBI NO: 12597802 NR Description: unknown protein [Arabidopsis thaliana]
  misc_feature (73)..(237): Homolog of NCBI NO: 26452085 NR Description: unknown protein [Arabidopsis thaliana]
  misc_feature (24)..(237): Homolog of NCBI NO: 22330523 NR Description: emp24/gp25L/p24 family [Arabidopsis thaliana]
  misc_feature (24)..(237): Homolog of NCBI NO: 21618241 NR Description: unknown [Arabidopsis thaliana]
  misc_feature (24)..(237): Homolog of NCBI NO: 18396016 NR Description: emp24/gp25L/p24 family [Arabidopsis thaliana]
LRLRSLYQLHDQRNQRSLFKASTMFLRSLNLCTILLFLAISSQVSQSLHFELQSGRTKCISEDIKSNSMTVGMYTVVNPNEAHPSPQSHKISIRVTSSYGNTYHHAEDVESGQFAFTAVESGDYMACYTAVDHKPEVTLSIDFDWRTGVQSKSWSSVAKKSQVEVMEFDVKRLIETVNSIHEEMFYLREREEEMQNLNRATNSKMAWLSFLSLFVCLGVAGMQFVHLKTFFEKKKVI

SEQ ID NO: 40868 - protein, 214 aa, Arabidopsis thaliana
  peptide (1)..(214): Ceres Seq. ID no. 13489286
  misc_feature (9)..(214): Pfam Name: emp24/gp25L/p24 family Pfam Description: emp24/gp25L/p24 family
  misc_feature (14)..(214): Homolog of NCBI NO: 18921314 NR Description: putative transmembrane protein [Oryza sativa]
  misc_feature (6)..(214): Homolog of NCBI NO: 33146897 NR Description: putative transmembrane protein
  misc_feature (6)..(214): Homolog of NCBI NO: 15227591 NR Description: emp24/gp25L/p24 family [Arabidopsis thaliana]
  misc_feature (11)..(214): Homolog of NCBI NO: 8778403 NR Description: F16A14.23 [Arabidopsis thaliana]
  misc_feature (11)..(214): Homolog of NCBI NO: 15223027 NR Description: emp24/gp25L/p24 family [Arabidopsis thaliana]
  misc_feature (11)..(214): Homolog of NCBI NO: 12597802 NR Description: unknown protein [Arabidopsis thaliana]
  misc_feature (50)..(214): Homolog of NCBI NO: 26452085 NR Description: unknown protein [Arabidopsis thaliana]
  misc_feature (1)..(214): Homolog of NCBI NO: 22330523 NR Description: emp24/gp25L/p24 family [Arabidopsis thaliana]
  misc_feature (1)..(214): Homolog of NCBI NO: 21618241 NR Description: unknown [Arabidopsis thaliana]
  misc_feature (1)..(214): Homolog of NCBI NO: 18396016 NR Description: emp24/gp25L/p24 family [Arabidopsis thaliana]
MFLRSLNLCTILLFLAISSQVSQSLHFELQSGRTKCISEDIKSNSMTVGMYTVVNPNEAHPSPQSHKISIRVTSSYGNTYHHAEDVESGQFAFTAVESGDYMACYTAVDHKPEVTLSIDFDWRTGVQSKSWSSVAKKSQVEVMEFDVKRLIETVNSIHEEMFYLREREEEMQNLNRATNSKMAWLSFLSLFVCLGVAGMQFVHLKTFFEKKKVI

SEQ ID NO: 40869 - protein, 169 aa, Arabidopsis thaliana
  peptide (1)..(169): Ceres Seq. ID no. 13489287
  misc_feature (1)..(169): Pfam Name: emp24/gp25L/p24 family Pfam Description: emp24/gp25L/p24 family
  misc_feature (1)..(169): Homolog of NCBI NO: 18921314 NR Description: putative transmembrane protein [Oryza sativa]
  misc_feature (1)..(169): Homolog of NCBI NO: 33146897 NR Description: putative transmembrane protein
  misc_feature (1)..(169): Homolog of NCBI NO: 15227591 NR Description: emp24/gp25L/p24 family [Arabidopsis thaliana]
  misc_feature (1)..(169): Homolog of NCBI NO: 8778403 NR Description: F16A14.23 [Arabidopsis thaliana]
  misc_feature (1)..(169): Homolog of NCBI NO: 15223027 NR Description: emp24/gp25L/p24 family [Arabidopsis thaliana]
  misc_feature (1)..(169): Homolog of NCBI NO: 12597802 NR Description: unknown protein [Arabidopsis thaliana]
  misc_feature (5)..(169): Homolog of NCBI NO: 26452085 NR Description: unknown protein [Arabidopsis thaliana]
  misc_feature (1)..(169): Homolog of NCBI NO: 22330523 NR Description: emp24/gp25L/p24 family [Arabidopsis thaliana]
  misc_feature (1)..(169): Homolog of NCBI NO: 21618241 NR Description: unknown [Arabidopsis thaliana]
  misc_feature (1)..(169): Homolog of NCBI NO: 18396016 NR Description: emp24/gp25L/p24 family [Arabidopsis thaliana]
MTVGMYTVVNPNEAHPSPQSHKISIRVTSSYGNTYHHAEDVESGQFAFTAVESGDYMACYTAVDHKPEVTLSIDFDWRTGVQSKSWSSVAKKSQVEVMEFDVKRLIETVNSIHEEMFYLREREEEMQNLNRATNSKMAWLSFLSLFVCLGVAGMQFVHLKTFFEKKKVI

SEQ ID NO: 40870 - DNA, 853 bp, Arabidopsis thaliana; identical to SEQ ID NO: 27020
  misc_feature (1)..(853): Ceres Seq. ID no. 13645771
  misc_feature: MA Experiment ID: 108473 Result: Down-regulated in Transcription
  misc_feature: MA Experiment 108473 PARAMETER Experiment Name: At_Drought_Flowers_cDNA_P Parameter: Timepoint (hr) Value: 7 d
  misc_feature: MA Experiment 108473 PARAMETER Experiment Name: At_Drought_Flowers_cDNA_P Parameter: Tissue Value: Flower
  misc_feature: MA Experiment 108473 PARAMETER Experiment Name: At_Drought_Flowers_cDNA_P Parameter: Treatment Value: Drought vs. No Drought
  misc_feature: MA Experiment ID: 108474 Result: Up-regulated in Transcription
  misc_feature: MA Experiment 108474 PARAMETER Experiment Name: At_Drought_Flowers_cDNA_P Parameter: Timepoint (hr) Value: null
  misc_feature: MA Experiment 108474 PARAMETER Experiment Name: At_Drought_Flowers_cDNA_P Parameter: Treatment Value: Drought vs. No Drought
  misc_feature: MA Experiment ID: 108501 Result: Down-regulated in Transcription
  misc_feature: MA Experiment 108501 PARAMETER Experiment Name: At_ap2_floral_buds_cDNA_P Parameter: Plant Line Value: ap2 (Ler.)
  misc_feature: MA Experiment 108501 PARAMETER Experiment Name: At_ap2_floral_buds_cDNA_P Parameter: Tissue Value: Closed Flower
  misc_feature: MA Experiment ID: 108573 Result: Down-regulated in Transcription
  misc_feature: MA Experiment 108573 PARAMETER Experiment Name: At_Drought_cDNA_P Parameter: Timepoint (hr) Value: 6
  misc_feature: MA Experiment 108573 PARAMETER Experiment Name: At_Drought_cDNA_P Parameter: Tissue Value: Aerial
  misc_feature: MA Experiment 108573 PARAMETER Experiment Name: At_Drought_cDNA_P Parameter: Treatment Value: Drought vs. No Drought
  misc_feature: MA Experiment ID: 108595 Result: Up-regulated in Transcription
  misc_feature: MA Experiment 108595 PARAMETER Experiment Name: At_Ler-pi_Ovule_cDNA_P Parameter: Plant Line Value: null
  misc_feature: MA Experiment ID: 20000087 Result: Up-regulated in Transcription
  misc_feature: MA Experiment 20000087 PARAMETER Experiment Name: At_100uM_ABA_Mutants_cDNA_P Parameter: Plant Line Value: WS
  misc_feature: MA Experiment 20000087 PARAMETER Experiment Name: At_100uM_ABA_Mutants_cDNA_P Parameter: Timepoint (hr) Value: 6
  misc_feature: MA Experiment 20000087 PARAMETER Experiment Name: At_100uM_ABA_Mutants_cDNA_P Parameter: Tissue Value: Aerial
  misc_feature: MA Experiment 20000087 PARAMETER Experiment Name: At_100uM_ABA_Mutants_cDNA_P Parameter: Treatment Value: 100uM ABA vs. No Treatment
  misc_feature: MA Experiment ID: 20000117 Result: Up-regulated in Transcription
  misc_feature: MA Experiment 20000117 PARAMETER Experiment Name: At_100uM_ABA_Mutants_cDNA_P Parameter: Plant Line Value: Columbia
  misc_feature: MA Experiment 20000117 PARAMETER Experiment Name: At_100uM_ABA_Mutants_cDNA_P Parameter: Timepoint (hr) Value: 6
  misc_feature: MA Experiment 20000117 PARAMETER Experiment Name: At_100uM_ABA_Mutants_cDNA_P Parameter: Tissue Value: Aerial
  misc_feature: MA Experiment 20000117 PARAMETER Experiment Name: At_100uM_ABA_Mutants_cDNA_P Parameter: Treatment Value: 100uM ABA vs. No Treatment
  misc_feature: MA Experiment ID: 20000314 Result: Down-regulated in Transcription
  misc_feature: MA Experiment 20000314 PARAMETER Experiment Name: At_14day_Shoots-Roots_Sub_P Parameter: Age (day) Value: 14
  misc_feature: MA Experiment 20000314 PARAMETER Experiment Name: At_14day_Shoots-Roots_Sub_P Parameter: Organism Value: A. thaliana
  misc_feature: MA Experiment 20000314 PARAMETER Experiment Name: At_14day_Shoots-Roots_Sub_P Parameter: Plant Line Value: WS
  misc_feature: MA Experiment 20000314 PARAMETER Experiment Name: At_14day_Shoots-Roots_Sub_P Parameter: Tissue Value: Roots vs. Whole Plant
  misc_feature: MA Experiment ID: 20000315 Result: Down-regulated in Transcription
  misc_feature: MA Experiment 20000315 PARAMETER Experiment Name: At_14day_Shoots-Roots_Sub_P Parameter: Age (day) Value: 14
  misc_feature: MA Experiment 20000315 PARAMETER Experiment Name: At_14day_Shoots-Roots_Sub_P Parameter: Organism Value: A. thaliana
  misc_feature: MA Experiment 20000315 PARAMETER Experiment Name: At_14day_Shoots-Roots_Sub_P Parameter: Plant Line Value: WS
  misc_feature: MA Experiment 20000315 PARAMETER Experiment Name: At_14day_Shoots-Roots_Sub_P Parameter: Tissue Value: Shoots vs. Whole Plant
  misc_feature: MA Experiment ID: 20000328 Result: Down-regulated in Transcription
  misc_feature: MA Experiment 20000328 PARAMETER Experiment Name: At_42deg_Heat_Sub_P Parameter: Age (day) Value: 14
  misc_feature: MA Experiment 20000328 PARAMETER Experiment Name: At_42deg_Heat_Sub_P Parameter: Organism Value: A. thaliana
  misc_feature: MA Experiment 20000328 PARAMETER Experiment Name: At_42deg_Heat_Sub_P Parameter: Plant Line Value: WS
  misc_feature: MA Experiment 20000328 PARAMETER Experiment Name: At_42deg_Heat_Sub_P Parameter: Temperature (deg C) Value: 42 vs. 22
  misc_feature: MA Experiment 20000328 PARAMETER Experiment Name: At_42deg_Heat_Sub_P Parameter: Timepoint (hr) Value: 6
  misc_feature: MA Experiment 20000328 PARAMETER Experiment Name: At_42deg_Heat_Sub_P Parameter: Tissue Value: Aerial
  misc_feature: MA Experiment ID: 20000440 Result: Up-regulated in Transcription
  misc_feature: MA Experiment 20000440 PARAMETER Experiment Name: At_Closed-Flower__Sub_P Parameter: Tissue Value: Closed Flower vs. Whole Plant

SEQ ID NO: 40871 - protein, 244 aa, Arabidopsis thaliana; identical to SEQ ID NO: 27021
  peptide (1)..(244): Ceres Seq. ID no. 13645772
  misc_feature (32)..(243): Pfam Name: O-methyltransferase Pfam Description: O-methyltransferase
  misc_feature (32)..(243): Pfam Name: O-methyltransferase Pfam Description: O-methyltransferase
  misc_feature (19)..(243): Homolog of NCBI NO: 30580334 NR Description: Caffeoyl-CoA O-methyltransferase 2
  misc_feature (19)..(243): Homolog of NCBI NO: 30580341 NR Description: Caffeoyl-CoA O-methyltransferase
  misc_feature (59)..(244): Homolog of NCBI NO: 15221807 NR Description: caffeoyl-CoA 3-O-methyltransferase, putative
  misc_feature (15)..(243): Homolog of NCBI NO: 37720881 NR Description: O-methyltransferase [Mesembryanthemum
  misc_feature (16)..(243): Homolog of NCBI NO: 3023432 NR Description: Caffeoyl-CoA O-methyltransferase
  misc_feature (15)..(243): Homolog of NCBI NO: 37720881 NR Description: O-methyltransferase [Mesembryanthemum
  misc_feature (32)..(244): Homolog of NCBI NO: 682728 NR Description: S-adenosyl-L-methionine:trans-caffeoyl-Coenzyme A
  misc_feature (12)..(244): Homolog of NCBI NO: 30580369 NR Description: Putative caffeoyl-CoA O-methyltransferase
  misc_feature (59)..(244): Homolog of NCBI NO: 15221807 NR Description: caffeoyl-CoA 3-O-methyltransferase, putative
  misc_feature (19)..(243): Homolog of NCBI NO: 30580341 NR Description: Caffeoyl-CoA O-methyltransferase
  misc_feature (19)..(243): Homolog of NCBI NO: 30580334 NR Description: Caffeoyl-CoA O-methyltransferase 2
  misc_feature (12)..(244): Homolog of NCBI NO: 18408913 NR Description: caffeoyl-CoA 3-O-methyltransferase, putative
  misc_feature (12)..(244): Homolog of NCBI NO: 30580370 NR Description: Putative caffeoyl-CoA O-methyltransferase
  misc_feature (32)..(244): Homolog of NCBI NO: 18408911 NR Description: caffeoyl-CoA 3-O-methyltransferase, putative
  misc_feature (16)..(243): Homolog of NCBI NO: 3023432 NR Description: Caffeoyl-CoA O-methyltransferase
  misc_feature (32)..(244): Homolog of NCBI NO: 682728 NR Description: S-adenosyl-L-methionine:trans-caffeoyl-Coenzyme A
  misc_feature (32)..(244): Homolog of NCBI NO: 18408911 NR Description: caffeoyl-CoA 3-O-methyltransferase, putative
  misc_feature (12)..(244): Homolog of NCBI NO: 30580369 NR Description: Putative caffeoyl-CoA O-methyltransferase
  misc_feature (12)..(244): Homolog of NCBI NO: 30580370 NR Description: Putative caffeoyl-CoA O-methyltransferase
  misc_feature (12)..(244): Homolog of NCBI NO: 18408913 NR Description: caffeoyl-CoA 3-O-methyltransferase, putative

SEQ ID NO: 40872 - protein, 233 aa, Arabidopsis thaliana; identical to SEQ ID NO: 27022
  peptide (1)..(233): Ceres Seq. ID no. 13645773
  misc_feature (21)..(232): Pfam Name: O-methyltransferase Pfam Description: O-methyltransferase
  misc_feature (21)..(232): Pfam Name: O-methyltransferase Pfam Description: O-methyltransferase
  misc_feature (8)..(232): Homolog of NCBI NO: 30580334 NR Description: Caffeoyl-CoA O-methyltransferase 2
  misc_feature (8)..(232): Homolog of NCBI NO: 30580341 NR Description: Caffeoyl-CoA O-methyltransferase
  misc_feature (48)..(233): Homolog of NCBI NO: 15221807 NR Description: caffeoyl-CoA 3-O-methyltransferase, putative
  misc_feature (4)..(232): Homolog of NCBI NO: 37720881 NR Description: O-methyltransferase [Mesembryanthemum
  misc_feature (5)..(232): Homolog of NCBI NO: 3023432 NR Description: Caffeoyl-CoA O-methyltransferase
  misc_feature (8)..(232): Homolog of NCBI NO: 30580334 NR Description: Caffeoyl-CoA O-methyltransferase 2
  misc_feature (48)..(233): Homolog of NCBI NO: 15221807 NR Description: caffeoyl-CoA 3-O-methyltransferase, putative
  misc_feature (5)..(232): Homolog of NCBI NO: 3023432 NR Description: Caffeoyl-CoA O-methyltransferase
  misc_feature (1)..(233): Homolog of NCBI NO: 18408913 NR Description: caffeoyl-CoA 3-O-methyltransferase, putative
  misc_feature (1)..(233): Homolog of NCBI NO: 30580370 NR Description: Putative caffeoyl-CoA O-methyltransferase
  misc_feature (1)..(233): Homolog of NCBI NO: 30580369 NR Description: Putative caffeoyl-CoA O-methyltransferase
  misc_feature (21)..(233): Homolog of NCBI NO: 18408911 NR Description: caffeoyl-CoA 3-O-methyltransferase, putative
  misc_feature (21)..(233): Homolog of NCBI NO: 682728 NR Description: S-adenosyl-L-methionine:trans-caffeoyl-Coenzyme A
  misc_feature (4)..(232): Homolog of NCBI NO: 37720881 NR Description: O-methyltransferase [Mesembryanthemum
  misc_feature (8)..(232): Homolog of NCBI NO: 30580341 NR Description: Caffeoyl-CoA O-methyltransferase
  misc_feature (21)..(233): Homolog of NCBI NO: 682728 NR Description: S-adenosyl-L-methionine:trans-caffeoyl-Coenzyme A
  misc_feature (21)..(233): Homolog of NCBI NO: 18408911 NR Description: caffeoyl-CoA 3-O-methyltransferase, putative
  misc_feature (1)..(233): Homolog of NCBI NO: 30580369 NR Description: Putative caffeoyl-CoA O-methyltransferase
  misc_feature (1)..(233): Homolog of NCBI NO: 30580370 NR Description: Putative caffeoyl-CoA O-methyltransferase
  misc_feature (1)..(233): Homolog of NCBI NO: 18408913 NR Description: caffeoyl-CoA 3-O-methyltransferase, putative

SEQ ID NO: 40873 - protein, 213 aa, Arabidopsis thaliana; identical to SEQ ID NO: 27023
  peptide (1)..(213): Ceres Seq. ID no. 13645774
  misc_feature (1)..(212): Pfam Name: O-methyltransferase Pfam Description: O-methyltransferase
  misc_feature (1)..(212): Pfam Name: O-methyltransferase Pfam Description: O-methyltransferase
  misc_feature (1)..(212): Homolog of NCBI NO: 30580334 NR Description: Caffeoyl-CoA O-methyltransferase 2
  misc_feature (1)..(212): Homolog of NCBI NO: 30580341 NR Description: Caffeoyl-CoA O-methyltransferase
  misc_feature (28)..(213): Homolog of NCBI NO: 15221807 NR Description: caffeoyl-CoA 3-O-methyltransferase, putative
  misc_feature (1)..(212): Homolog of NCBI NO: 37720881 NR Description: O-methyltransferase [Mesembryanthemum
  misc_feature (1)..(212): Homolog of NCBI NO: 3023432 NR Description: Caffeoyl-CoA O-methyltransferase
  misc_feature (1)..(212): Homolog of NCBI NO: 30580334 NR Description: Caffeoyl-CoA O-methyltransferase 2
  misc_feature (28)..(213): Homolog of NCBI NO: 15221807 NR Description: caffeoyl-CoA 3-O-methyltransferase, putative
  misc_feature (1)..(212): Homolog of NCBI NO: 3023432 NR Description: Caffeoyl-CoA O-methyltransferase
  misc_feature (1)..(213): Homolog of NCBI NO: 18408913 NR Description: caffeoyl-CoA 3-O-methyltransferase, putative
  misc_feature (1)..(213): Homolog of NCBI NO: 30580370 NR Description: Putative caffeoyl-CoA O-methyltransferase
  misc_feature (1)..(213): Homolog of NCBI NO: 30580369 NR Description: Putative caffeoyl-CoA O-methyltransferase
  misc_feature (1)..(213): Homolog of NCBI NO: 18408911 NR Description: caffeoyl-CoA 3-O-methyltransferase, putative
  misc_feature (1)..(213): Homolog of NCBI NO: 682728 NR Description: S-adenosyl-L-methionine:trans-caffeoyl-Coenzyme A
  misc_feature (1)..(212): Homolog of NCBI NO: 37720881 NR Description: O-methyltransferase [Mesembryanthemum
  misc_feature (1)..(212): Homolog of NCBI NO: 30580341 NR Description: Caffeoyl-CoA O-methyltransferase
  misc_feature (1)..(213): Homolog of NCBI NO: 682728 NR Description: S-adenosyl-L-methionine:trans-caffeoyl-Coenzyme A
  misc_feature (1)..(213): Homolog of NCBI NO: 18408911 NR Description: caffeoyl-CoA 3-O-methyltransferase, putative
  misc_feature (1)..(213): Homolog of NCBI NO: 30580369 NR Description: Putative caffeoyl-CoA O-methyltransferase
  misc_feature (1)..(213): Homolog of NCBI NO: 30580370 NR Description: Putative caffeoyl-CoA O-methyltransferase
  misc_feature (1)..(213): Homolog of NCBI NO: 18408913 NR Description: caffeoyl-CoA 3-O-methyltransferase, putative

SEQ ID NO: 40874 - DNA, 1636 bp, Arabidopsis thaliana
  misc_feature (1)..(1636): Ceres Seq. ID no. 13620891
  misc_feature: MA Experiment ID: 20000437 Result: Down-regulated in Transcription
  misc_feature: MA Experiment 20000437 PARAMETER Experiment Name: At_Drought_P Parameter: Age (day) Value: 8
  misc_feature: MA Experiment 20000437 PARAMETER Experiment Name: At_Drought_P Parameter: Organism Value: A. thaliana
  misc_feature: MA Experiment 20000437 PARAMETER Experiment Name: At_Drought_P Parameter: Plant Line Value: WS
  misc_feature: MA Experiment 20000437 PARAMETER Experiment Name: At_Drought_P Parameter: Timepoint (hr) Value: 24
  misc_feature: MA Experiment 20000437 PARAMETER Experiment Name: At_Drought_P Parameter: Tissue Value: Whole Plant
  misc_feature: MA Experiment 20000437 PARAMETER Experiment Name: At_Drought_P Parameter: Treatment Value: Drought vs. No Drought
  misc_feature: MA Experiment ID: 20001451 Result: Down-regulated in Transcription
  misc_feature: MA Experiment 20001451 PARAMETER Experiment Name: At_Far-red-induction_P Parameter: Age (day) Value: 7
  misc_feature: MA Experiment 20001451 PARAMETER Experiment Name: At_Far-red-induction_P Parameter: Light Value: Far-red vs. White
  misc_feature: MA Experiment 20001451 PARAMETER Experiment Name: At_Far-red-induction_P Parameter: Organism Value: A. thaliana
  misc_feature: MA Experiment 20001451 PARAMETER Experiment Name: At_Far-red-induction_P Parameter: Plant Line Value: Columbia
  misc_feature: MA Experiment 20001451 PARAMETER Experiment Name: At_Far-red-induction_P Parameter: Timepoint (hr) Value: 24
  misc_feature: MA Experiment 20001451 PARAMETER Experiment Name: At_Far-red-induction_P Parameter: Tissue Value: Whole Plant
  misc_feature: MA Experiment ID: 20001557 Result: Up-regulated in Transcription
  misc_feature: MA Experiment 20001557 PARAMETER Experiment Name: At_Drought_Soil_Dry_P Parameter: Age (day) Value: 27
  misc_feature: MA Experiment 20001557 PARAMETER Experiment Name: At_Drought_Soil_Dry_P Parameter: Organism Value: A. thaliana
  misc_feature: MA Experiment 20001557 PARAMETER Experiment Name: At_Drought_Soil_Dry_P Parameter: Plant Line Value: WS
  misc_feature: MA Experiment 20001557 PARAMETER Experiment Name: At_Drought_Soil_Dry_P Parameter: Post Timepoint (hr) Value: 3
  misc_feature: MA Experiment 20001557 PARAMETER Experiment Name: At_Drought_Soil_Dry_P Parameter: Post-Treatment Value: Re-Water vs. No Drought
  misc_feature: MA Experiment 20001557 PARAMETER Experiment Name: At_Drought_Soil_Dry_P Parameter: Timepoint (day) Value: 13
  misc_feature: MA Experiment 20001557 PARAMETER Experiment Name: At_Drought_Soil_Dry_P Parameter: Treatment Value: Drought vs. No Drought
  misc_feature: MA Experiment ID: 20001558 Result: Up-regulated in Transcription
  misc_feature: MA Experiment 20001558 PARAMETER Experiment Name: At_Drought_Soil_Dry_P Parameter: Age (day) Value: 27
  misc_feature: MA Experiment 20001558 PARAMETER Experiment Name: At_Drought_Soil_Dry_P Parameter: Organism Value: A. thaliana
  misc_feature: MA Experiment 20001558 PARAMETER Experiment Name: At_Drought_Soil_Dry_P Parameter: Plant Line Value: WS
  misc_feature: MA Experiment 20001558 PARAMETER Experiment Name: At_Drought_Soil_Dry_P Parameter: Post Timepoint (hr) Value: 6
  misc_feature: MA Experiment 20001558 PARAMETER Experiment Name: At_Drought_Soil_Dry_P Parameter: Post-Treatment Value: Re-Water vs. No Drought
  misc_feature: MA Experiment 20001558 PARAMETER Experiment Name: At_Drought_Soil_Dry_P Parameter: Timepoint (day) Value: 13
  misc_feature: MA Experiment 20001558 PARAMETER Experiment Name: At_Drought_Soil_Dry_P Parameter: Treatment Value: Drought vs. No Drought
  misc_feature: MA Experiment ID: 20001757 Result: Up-regulated in Transcription
  misc_feature: MA Experiment 20001757 PARAMETER Experiment Name: At_50mM_NH4NO3_L-to-H_P Parameter: Timepoint (hr) Value: 6
  misc_feature: MA Experiment 20001757 PARAMETER Experiment Name: At_50mM_NH4NO3_L-to-H_P Parameter: Tissue Value: Leaf
  misc_feature: MA Experiment 20001757 PARAMETER Experiment Name: At_50mM_NH4NO3_L-to-H_P Parameter: Treatment Value: 50mM NH4NO3 vs 100mM Mannitol
gcgctctcatatttctcacattttcgtagccgcaagactcctttcagattcttacttgcagctatgggtaaagagaagtttcacattaacattgtggtcattggtcatgttgattctggaaaatcgaccacaactggtcacttgatctataagcttggtggtattgacaagcgtgtcatcgagaggttcgagaaggaggctgctgagatgaacaagaggtccttcaagtacgcatgggtgttggacaaacttaaggccgagcgtgagcgtggtattaccatcgatattgctctatggaagttcgagaccaccaagtactactgcacagtcattgatgccccaggacatcgtgatttcatcaagaacatgattactggtacctcccaggctgattgtgctgttcttatcattgactccaccactggaggttttgaggctggtatctctaaggatggtcagacccgtgagcacgctcttcttgctttcacccttggtgtcaagcagatgatttgctgttgtaacaagatggatgccaccacccccaaatactccaaggctaggtacgatgaaatcatcaaggaggtgtcttcatacctgaagaaggtcggatacaaccctgacaaaatcccatttgtgccaatctctggattcgagggagacaacatgattgagaggtcaaccaaccttgactggtacaagggaccaactcttcttgaggctcttgaccagatcaacgagcccaagaggccatcagacaagccccttcgtcttccacttcaggatgtctacaagattggtggtattggaacggtgccagtgggacgtgttgagactggtatgatcaagcctggtatggttgttacctttgctcccacagggttgaccactgaggttaagtctgttgagatgcaccacgagtctcttcttgaggcacttcccggtgacaatgttggattcaatgtcaagaatgttgctgtcaaggatcttaagagaggatacgttgcctctaactccaaggatgatccagctaagggtgccgccaacttcacctcccaggtcatcatcatgaaccaccctggtcagattggtaacggttacgccccagttctcgattgccacacctctcacattgcagtcaagttctctgagatcttgaccaagattgacaggcgttctggtaaggagattgagaaggagcccaagtttttgaagaatggtgacgctggtatggttaagatgaccccaaccaagcccatggttgttgagactttctccgagtacccacctttgggacgtttcgctgttagggacatgaggcagaccgttgctgttggtgttattaagagcgtggacaagaaggacccaactggagccaaggtcaccaaggctgcagtgaagaagggtgccaaatgatgagactttcgttatgatcgactctcttatggttttctttggttcttaaaactttgatggcgtttgagcctttttcttttttctctttatttctgtgactttctctctccctcctttttggatatctctgagactttttattatggttttcaattatgcagtttccggataattttgcttgaaacttatttaggagttgtgttacaaagttgctgtctttctt

SEQ ID NO: 40875 - protein, 470 aa, Arabidopsis thaliana
  peptide (1)..(470): Ceres Seq. ID no. 13620892
  misc_feature (26)..(248): Pfam Name: Elongation factor Tu GTP binding domain Pfam Description: Elongation factor Tu GTP binding domain
  misc_feature (22)..(470): Homolog of NCBI NO: 15081765 NR Description: At1g07930/T6D22_3 [Arabidopsis thaliana]
  misc_feature (22)..(470): Homolog of NCBI NO: 17064954 NR Description: putative elongation factor 1-a [Arabidopsis
  misc_feature (22)..(470): Homolog of NCBI NO: 18086389 NR Description: At1g07930/T6D22_3 [Arabidopsis thaliana]
  misc_feature (22)..(470): Homolog of NCBI NO: 23397097 NR Description: putative translation elongation factor eEF-1
  misc_feature (22)..(470): Homolog of NCBI NO: 25407012 NR Description: protein T6D22.2 [imported] - Arabidopsis thaliana
  misc_feature (22)..(470): Homolog of NCBI NO: 13430510 NR Description: putative translation elongation factor eEF-1
  misc_feature (22)..(470): Homolog of NCBI NO: 13605682 NR Description: At1g07930/T6D22_3 [Arabidopsis thaliana]
  misc_feature (22)..(470): Homolog of NCBI NO: 99688 NR Description: translation elongation factor eEF-1 alpha chain
  misc_feature (22)..(470): Homolog of NCBI NO: 15239308 NR Description: elongation factor 1-alpha (EF-1-alpha)
  misc_feature (17)..(470): Homolog of NCBI NO: 25407012 NR Description: protein T6D22.2 [imported] - Arabidopsis thaliana
ALSYFSHFRSRKTPFRFLLAAMGKEKFHINIVVIGHVDSGKSTTTGHLIYKLGGIDKRVIERFEKEAAEMNKRSFKYAWVLDKLKAERERGITIDIALWKFETTKYYCTVIDAPGHRDFIKNMITGTSQADCAVLIIDSTTGGFEAGISKDGQTREHALLAFTLGVKQMICCCNKMDATTPKYSKARYDEIIKEVSSYLKKVGYNPDKIPFVPISGFEGDNMIERSTNLDWYKGPTLLEALDQINEPKRPSDKPLRLPLQDVYKIGGIGTVPVGRVETGMIKPGMVVTFAPTGLTTEVKSVEMHHESLLEALPGDNVGFNVKNVAVKDLKRGYVASNSKDDPAKGAANFTSQVIIMNHPGQIGNGYAPVLDCHTSHIAVKFSEILTKIDRRSGKEIEKEPKFLKNGDAGMVKMTPTKPMVVETFSEYPPLGRFAVRDMRQTVAVGVIKSVDKKDPTGAKVTKAAVKKGAK

SEQ ID NO: 40876 - protein, 449 aa, Arabidopsis thaliana; identical to SEQ ID NO: 27284
  peptide (1)..(449): Ceres Seq. ID no. 13620893
  misc_feature (5)..(227): Pfam Name: Elongation factor Tu GTP binding domain Pfam Description: Elongation factor Tu GTP binding domain
  misc_feature (1)..(449): Homolog of NCBI NO: 15081765 NR Description: At1g07930/T6D22_3 [Arabidopsis thaliana]
  misc_feature (1)..(449): Homolog of NCBI NO: 17064954 NR Description: putative elongation factor 1-a [Arabidopsis
  misc_feature (1)..(449): Homolog of NCBI NO: 18086389 NR Description: At1g07930/T6D22_3 [Arabidopsis thaliana]
  misc_feature (1)..(449): Homolog of NCBI NO: 23397097 NR Description: putative translation elongation factor eEF-1
  misc_feature (1)..(449): Homolog of NCBI NO: 25407012 NR Description: protein T6D22.2 [imported] - Arabidopsis thaliana
  misc_feature (1)..(449): Homolog of NCBI NO: 13430510 NR Description: putative translation elongation factor eEF-1
  misc_feature (1)..(449): Homolog of NCBI NO: 13605682 NR Description: At1g07930/T6D22_3 [Arabidopsis thaliana]
  misc_feature (1)..(449): Homolog of NCBI NO: 99688 NR Description: translation elongation factor eEF-1 alpha chain
  misc_feature (1)..(449): Homolog of NCBI NO: 15239308 NR Description: elongation factor 1-alpha (EF-1-alpha)
  misc_feature (1)..(449): Homolog of NCBI NO: 25407012 NR Description: protein T6D22.2 [imported] - Arabidopsis thaliana

SEQ ID NO: 40877 - protein, 401 aa, Arabidopsis thaliana; identical to SEQ ID NO: 21437
  peptide (1)..(401): Ceres Seq. ID no. 13620894
  misc_feature (1)..(179): Pfam Name: Elongation factor Tu GTP binding domain Pfam Description: Elongation factor Tu GTP binding domain
  misc_feature (1)..(401): Homolog of NCBI NO: 15081765 NR Description: At1g07930/T6D22_3 [Arabidopsis thaliana]
  misc_feature (1)..(401): Homolog of NCBI NO: 17064954 NR Description: putative elongation factor 1-a [Arabidopsis
  misc_feature (1)..(401): Homolog of NCBI NO: 18086389 NR Description: At1g07930/T6D22_3 [Arabidopsis thaliana]
  misc_feature (1)..(401): Homolog of NCBI NO: 23397097 NR Description: putative translation elongation factor eEF-1
  misc_feature (1)..(401): Homolog of NCBI NO: 25407012 NR Description: protein T6D22.2 [imported] - Arabidopsis thaliana
  misc_feature (1)..(401): Homolog of NCBI NO: 13430510 NR Description: putative translation elongation factor eEF-1
  misc_feature (1)..(401): Homolog of NCBI NO: 13605682 NR Description: At1g07930/T6D22_3 [Arabidopsis thaliana]
  misc_feature (1)..(401): Homolog of NCBI NO: 99688 NR Description: translation elongation factor eEF-1 alpha chain
  misc_feature (1)..(401): Homolog of NCBI NO: 15239308 NR Description: elongation factor 1-alpha (EF-1-alpha)
  misc_feature (1)..(401): Homolog of NCBI NO: 25407012 NR Description: protein T6D22.2 [imported] - Arabidopsis thaliana

SEQ ID NO: 40878 - DNA, 1561 bp, Arabidopsis thaliana
  misc_feature (1)..(1561): Ceres Seq. ID no. 13494109
  misc_feature: MA Experiment ID: 108433 Result: Down-regulated in Transcription
  misc_feature: MA Experiment 108433 PARAMETER Experiment Name: At_rhl_Mutant2_cDNA_P Parameter: Age (day) Value: 7
  misc_feature: MA Experiment 108433 PARAMETER Experiment Name: At_rhl_Mutant2_cDNA_P Parameter: Organism Value: A. thaliana
  misc_feature: MA Experiment 108433 PARAMETER Experiment Name: At_rhl_Mutant2_cDNA_P Parameter: Plant Line Value: rhl Mutant vs. wt landsburg
  misc_feature: MA Experiment 108433 PARAMETER Experiment Name: At_rhl_Mutant2_cDNA_P Parameter: Tissue Value: Roots
  misc_feature: MA Experiment ID: 108434 Result: Up-regulated in Transcription
  misc_feature: MA Experiment 108434 PARAMETER Experiment Name: At_Root_Tips_cDNA_P Parameter: Tissue Value: Root Tips
  misc_feature: MA Experiment ID: 108462 Result: Down-regulated in Transcription
  misc_feature: MA Experiment 108462 PARAMETER Experiment Name: At_Germinating_Seeds_cDNA_P Parameter: Age (day) Value: 2 vs. 0
  misc_feature: MA Experiment 108462 PARAMETER Experiment Name: At_Germinating_Seeds_cDNA_P Parameter: Tissue Value: Germinating Seeds
  misc_feature: MA Experiment ID: 108463 Result: Down-regulated in Transcription
  misc_feature: MA Experiment 108463 PARAMETER Experiment Name: At_Germinating_Seeds_cDNA_P Parameter: Age (day) Value: 3 vs. 0
  misc_feature: MA Experiment 108463 PARAMETER Experiment Name: At_Germinating_Seeds_cDNA_P Parameter: Tissue Value: Germinating Seeds
  misc_feature: MA Experiment ID: 108464 Result: Down-regulated in Transcription
  misc_feature: MA Experiment 108464 PARAMETER Experiment Name: At_Germinating_Seeds_cDNA_P Parameter: Age (day) Value: 4 vs. 0
  misc_feature: MA Experiment 108464 PARAMETER Experiment Name: At_Germinating_Seeds_cDNA_P Parameter: Tissue Value: Germinating Seeds
  misc_feature: MA Experiment ID: 20000113 Result: Down-regulated in Transcription
  misc_feature: MA Experiment 20000113 PARAMETER Experiment Name: At_42deg_Heat_cDNA_P Parameter: Temperature (deg C) Value: 42 vs. 22
  misc_feature: MA Experiment 20000113 PARAMETER Experiment Name: At_42deg_Heat_cDNA_P Parameter: Timepoint (hr) Value: 8
  misc_feature: MA Experiment 20000113 PARAMETER Experiment Name: At_42deg_Heat_cDNA_P Parameter: Tissue Value: Aerial
gaggaggaagaagacgatggttgacacttgacagagtaagctcagaaatggcgactctggtttcgaattgaacttgtgaggaaggtttttagggttataaggtgataaagaaaatggggaatagtggagatttggagcaggctctgcaagatgggaatatctttagacagctcaatgctcttattgtagctcatctccgtcatcacaatctctcacaagttgcaagtgcggttgcttcagcaacaatgacaccattgaatattgaggttcctccaaaccgtcttttggagcttgttgcaaagggtcttgcagcggagaacaatgggacattgagaggtgtttcttcatcagtcttgttaccttcttcttatggatcaatcactactcctcgaacagcttctatcgactttagtgttaatcatgcgaagggctcatcaaagactatcccaaagcatgaatcaaagacgctatcagagcacaagagcgttgttaggtgtgcaagatttagtcctgatggaatgttttttgctactggtggtgcagacacatctattaagctctttgaggtgccaaaagttaaacagatgatttcaggagatactcaagctcgaccattaatacggactttttatgatcatgctgaaccgataaacgatcttgatttccaccctcggagcacaatcctaatatctagtgccaaagacaactgtataaagttcttcgacttctccaaaaccacggctaaacgagcattcaaagtttttcaggatacccataacgtgcgctctatatcttttcatccgtcaggagagtttcttcttgcaggaaccgatcatccaattccacatctgtacgatgtaaacacatatcagtgctttcttccttcaaacttccctgacagtggagtaagtggagccattaatcaggtgagatattcttccacgggatccatctacattacagcctcaaaggatggagctattcgactctttgacggggttagcgcaaagtgtgttcgctccattggcaatgcacatggaaaatcagaggtcacaagcgcagtgttcactaaagatcaaaggtttgttctctcatccggtaaggattccacagttaagttatgggaaataggctcaggtcgaatggtaaaggaatatcttggagcaaagcgggtaaaactgcggtctcaggcaatttttaacgacactgaagagtttgtaatctccatagatgaagcaagcaatgaggtcgttacatgggatgctagaaccgcagataaagtggcaaagtggccttctaaccataacggtgcaccacggtggatcgagcactcgccggttgaatcagtctttgttacttgtggaatagatagatcaattcggttctggaaggaatccgtttagatgagaatccaatcaatcaaagtagtgtattttattctcttaaaacataaaccatacatgaaaaaaaaaaaaaaatccgttgttcatgttgctttgtagaagacgcaagtaatcttccaggtcactgcaaaagaacgaaatcaaagcaggtgagcttc

SEQ ID NO: 40879 - protein, 429 aa, Arabidopsis thaliana
  peptide (1)..(429): Ceres Seq. ID no. 13494110
  misc_feature (18)..(425): Homolog of NCBI NO: 27696890 NR Description: Similar to RIKEN cDNA 1700057K18 gene [Xenopus
  misc_feature (18)..(425): Homolog of NCBI NO: 13195628 NR Description: cleavage stimulation factor, 3' pre-RNA, subunit
  misc_feature (18)..(425): Homolog of NCBI NO: 30585197 NR Description: Homo sapiens cleavage stimulation factor, 3'
  misc_feature (18)..(425): Homolog of NCBI NO: 4557491 NR Description: cleavage stimulation factor subunit 1
  misc_feature (7)..(426): Homolog of NCBI NO: 12278523 NR Description: putative cleavage stimulation factor subunit 1
  misc_feature (7)..(426): Homolog of NCBI NO: 18496652 NR Description: putative cleavage stimulation factor subunit 1
  misc_feature (7)..(429): Homolog of NCBI NO: 21326112 NR Description: putative cleavage stimulation factor subunit 1
  misc_feature (7)..(429): Homolog of NCBI NO: 12061242 NR Description: 36I5.2 [Oryza sativa (japonica cultivar-group)]
  misc_feature (1)..(429): Homolog of NCBI NO: 10177317 NR Description: cleavage stimulation factor subunit 1-like
  misc_feature (1)..(429): Homolog of NCBI NO: 15239477 NR Description: transducin / WD-40 repeat protein family
MGNSGDLEQALQDGNIFRQLNALIVAHLRHHNLSQVASAVASATMTPLNIEVPPNRLLELVAKGLAAENNGTLRGVSSSVLLPSSYGSITTPRTASIDFSVNHAKGSSKTIPKHESKTLSEHKSVVRCARFSPDGMFFATGGADTSIKLFEVPKVKQMISGDTQARPLIRTFYDHAEPINDLDFHPRSTILISSAKDNCIKFFDFSKTTAKRAFKVFQDTHNVRSISFHPSGEFLLAGTDHPIPHLYDVNTYQCFLPSNFPDSGVSGAINQVRYSSTGSIYITASKDGAIRLFDGVSAKCVRSIGNAHGKSEVTSAVFTKDQRFVLSSGKDSTVKLWEIGSGRMVKEYLGAKRVKLRSQAIFNDTEEFVISIDEASNEVVTWDARTADKVAKWPSNHNGAPRWIEHSPVESVFVTCGIDRSIRFWKESV

SEQ ID NO: 40880 - protein, 385 aa, Arabidopsis thaliana
  peptide (1)..(385): Ceres Seq. ID no. 13494111
  misc_feature (1)..(381): Homolog of NCBI NO: 27696890 NR Description: Similar to RIKEN cDNA 1700057K18 gene [Xenopus
  misc_feature (1)..(381): Homolog of NCBI NO: 13195628 NR Description: cleavage stimulation factor, 3' pre-RNA, subunit
  misc_feature (1)..(381): Homolog of NCBI NO: 30585197 NR Description: Homo sapiens cleavage stimulation factor, 3'
  misc_feature (1)..(381): Homolog of NCBI NO: 4557491 NR Description: cleavage stimulation factor subunit 1
  misc_feature (1)..(382): Homolog of NCBI NO: 12278523 NR Description: putative cleavage stimulation factor subunit 1
  misc_feature (1)..(382): Homolog of NCBI NO: 18496652 NR Description: putative cleavage stimulation factor subunit 1
  misc_feature (1)..(385): Homolog of NCBI NO: 21326112 NR Description: putative cleavage stimulation factor subunit 1
  misc_feature (1)..(385): Homolog of NCBI NO: 12061242 NR Description: 36I5.2 [Oryza sativa (japonica cultivar-group)]
  misc_feature (1)..(385): Homolog of NCBI NO: 10177317 NR Description: cleavage stimulation factor subunit 1-like
  misc_feature (1)..(385): Homolog of NCBI NO: 15239477 NR Description: transducin / WD-40 repeat protein family
MTPLNIEVPPNRLLELVAKGLAAENNGTLRGVSSSVLLPSSYGSITTPRTASIDFSVNHAKGSSKTIPKHESKTLSEHKSVVRCARFSPDGMFFATGGADTSIKLFEVPKVKQMISGDTQARPLIRTFYDHAEPINDLDFHPRSTILISSAKDNCIKFFDFSKTTAKRAFKVFQDTHNVRSISFHPSGEFLLAGTDHPIPHLYDVNTYQCFLPSNFPDSGVSGAINQVRYSSTGSIYITASKDGAIRLFDGVSAKCVRSIGNAHGKSEVTSAVFTKDQRFVLSSGKDSTVKLWEIGSGRMVKEYLGAKRVKLRSQAIFNDTEEFVISIDEASNEVVTWDARTADKVAKWPSNHNGAPRWIEHSPVESVFVTCGIDRSIRFWKESV

SEQ ID NO: 40881 - protein, 294 aa, Arabidopsis thaliana
  peptide (1)..(294): Ceres Seq. ID no. 13494112
  misc_feature (1)..(290): Homolog of NCBI NO: 27696890 NR Description: Similar to RIKEN cDNA 1700057K18 gene [Xenopus
  misc_feature (1)..(290): Homolog of NCBI NO: 13195628 NR Description: cleavage stimulation factor, 3' pre-RNA, subunit
  misc_feature (1)..(290): Homolog of NCBI NO: 30585197 NR Description: Homo sapiens cleavage stimulation factor, 3'
  misc_feature (1)..(290): Homolog of NCBI NO: 4557491 NR Description: cleavage stimulation factor subunit 1
  misc_feature (1)..(291): Homolog of NCBI NO: 12278523 NR Description: putative cleavage stimulation factor subunit 1
  misc_feature (1)..(291): Homolog of NCBI NO: 18496652 NR Description: putative cleavage stimulation factor subunit 1
  misc_feature (1)..(294): Homolog of NCBI NO: 21326112 NR Description: putative cleavage stimulation factor subunit 1
  misc_feature (1)..(294): Homolog of NCBI NO: 12061242 NR Description: 36I5.2 [Oryza sativa (japonica cultivar-group)]
  misc_feature (1)..(294): Homolog of NCBI NO: 10177317 NR Description: cleavage stimulation factor subunit 1-like
  misc_feature (1)..(294): Homolog of NCBI NO: 15239477 NR Description: transducin / WD-40 repeat protein family
MFFATGGADTSIKLFEVPKVKQMISGDTQARPLIRTFYDHAEPINDLDFHPRSTILISSAKDNCIKFFDFSKTTAKRAFKVFQDTHNVRSISFHPSGEFLLAGTDHPIPHLYDVNTYQCFLPSNFPDSGVSGAINQVRYSSTGSIYITASKDGAIRLFDGVSAKCVRSIGNAHGKSEVTSAVFTKDQRFVLSSGKDSTVKLWEIGSGRMVKEYLGAKRVKLRSQAIFNDTEEFVISIDEASNEVVTWDARTADKVAKWPSNHNGAPRWIEHSPVESVFVTCGIDRSIRFWKESV

SEQ ID NO: 40882 - DNA, 2128 bp, Arabidopsis thaliana
  misc_feature (1)..(2128): Ceres Seq. ID no. 12371466
  misc_feature: MA Experiment ID: 108434 Result: Down-regulated in Transcription
  misc_feature: MA Experiment 108434 PARAMETER Experiment Name: At_Root_Tips_cDNA_P Parameter: Tissue Value: Root Tips
  misc_feature: MA Experiment ID: 108573 Result: Up-regulated in Transcription
  misc_feature: MA Experiment 108573 PARAMETER Experiment Name: At_Drought_cDNA_P Parameter: Timepoint (hr) Value: 6
  misc_feature: MA Experiment 108573 PARAMETER Experiment Name: At_Drought_cDNA_P Parameter: Tissue Value: Aerial
  misc_feature: MA Experiment 108573 PARAMETER Experiment Name: At_Drought_cDNA_P Parameter: Treatment Value: Drought vs. No Drought
  misc_feature: MA Experiment ID: 108577 Result: Down-regulated in Transcription
  misc_feature: MA Experiment 108577 PARAMETER Experiment Name: At_42deg_Heat_cDNA_P Parameter: Temperature (deg C) Value: 42 vs. 22
  misc_feature: MA Experiment 108577 PARAMETER Experiment Name: At_42deg_Heat_cDNA_P Parameter: Timepoint (hr) Value: 6
  misc_feature: MA Experiment 108577 PARAMETER Experiment Name: At_42deg_Heat_cDNA_P Parameter: Tissue Value: Aerial
  misc_feature: MA Experiment ID: 108585 Result: Up-regulated in Transcription
  misc_feature: MA Experiment 108585 PARAMETER Experiment Name: At_5mM_NaNP_cDNA_P Parameter: Timepoint (hr) Value: 6
  misc_feature: MA Experiment 108585 PARAMETER Experiment Name: At_5mM_NaNP_cDNA_P Parameter: Tissue Value: Aerial
  misc_feature: MA Experiment 108585 PARAMETER Experiment Name: At_5mM_NaNP_cDNA_P Parameter: Treatment Value: null
  misc_feature: MA Experiment ID: 108595 Result: Down-regulated in Transcription
  misc_feature: MA Experiment 108595 PARAMETER Experiment Name: At_Ler-pi_Ovule_cDNA_P Parameter: Plant Line Value: null
  misc_feature: MA Experiment ID: 20000111 Result: Down-regulated in Transcription
  misc_feature: MA Experiment 20000111 PARAMETER Experiment Name: At_42deg_Heat_cDNA_P Parameter: Temperature (deg C) Value: 42 vs. 22
  misc_feature: MA Experiment 20000111 PARAMETER Experiment Name: At_42deg_Heat_cDNA_P Parameter: Timepoint (hr) Value: 6
  misc_feature: MA Experiment 20000111 PARAMETER Experiment Name: At_42deg_Heat_cDNA_P Parameter: Tissue Value: Aerial
  misc_feature: MA Experiment ID: 20000171 Result: Down-regulated in Transcription
  misc_feature: MA Experiment 20000171 PARAMETER Experiment Name: At_42deg_Heat_P Parameter: Age (day) Value: 14
  misc_feature: MA Experiment 20000171 PARAMETER Experiment Name: At_42deg_Heat_P Parameter: Organism Value: A. thaliana
  misc_feature: MA Experiment 20000171 PARAMETER Experiment Name: At_42deg_Heat_P Parameter: Plant Line Value: WS
  misc_feature: MA Experiment 20000171 PARAMETER Experiment Name: At_42deg_Heat_P Parameter: Temperature (deg C) Value: 42 vs. 22
  misc_feature: MA Experiment 20000171 PARAMETER Experiment Name: At_42deg_Heat_P Parameter: Timepoint (hr) Value: 1
  misc_feature: MA Experiment 20000171 PARAMETER Experiment Name: At_42deg_Heat_P Parameter: Tissue Value: Aerial
  misc_feature: MA Experiment ID: 20000173 Result: Down-regulated in Transcription
  misc_feature: MA Experiment 20000173 PARAMETER Experiment Name: At_42deg_Heat_P Parameter: Age (day) Value: 14
  misc_feature: MA Experiment 20000173 PARAMETER Experiment Name: At_42deg_Heat_P Parameter: Organism Value: A. thaliana
  misc_feature: MA Experiment 20000173 PARAMETER Experiment Name: At_42deg_Heat_P Parameter: Plant Line Value: WS
  misc_feature: MA Experiment 20000173 PARAMETER Experiment Name: At_42deg_Heat_P Parameter: Temperature (deg C) Value: 42 vs. 22
  misc_feature: MA Experiment 20000173 PARAMETER Experiment Name: At_42deg_Heat_P Parameter: Timepoint (hr) Value: 6
  misc_feature: MA Experiment 20000173 PARAMETER Experiment Name: At_42deg_Heat_P Parameter: Tissue Value: Aerial
  misc_feature: MA Experiment ID: 20000185 Result: Up-regulated in Transcription
  misc_feature: MA Experiment 20000185 PARAMETER Experiment Name: At_Roots__P Parameter: Age (day) Value: 7 vs. 21
  misc_feature: MA Experiment 20000185 PARAMETER Experiment Name: At_Roots__P Parameter: Organism Value: A. thaliana
  misc_feature: MA Experiment 20000185 PARAMETER Experiment Name: At_Roots__P Parameter: Tissue Value: Roots vs. Whole Plant
  misc_feature: MA Experiment ID: 20000286 Result: Down-regulated in Transcription
  misc_feature: MA Experiment 20000286 PARAMETER Experiment Name: At_Open_Flower_P Parameter: Age (day) Value: 21
  misc_feature: MA Experiment 20000286 PARAMETER Experiment Name: At_Open_Flower_P Parameter: Plant Line Value: WS
  misc_feature: MA Experiment 20000286 PARAMETER Experiment Name: At_Open_Flower_P Parameter: Tissue Value: Half Open vs. Whole Plant
acattttcatgacgtctcgtttgatctacacatattgtttgacctctctctatctctaagtttacatattcctaatgcgtttagctcaaagcatccacgacaagataagtagaaaaaaaaagacatccttttttggttcttcttcttcttcttcttcagacaaaaaggaagaaggtgttgactgattcttaagatgggtttgtgttaagtttgtgagtatagttgaaagtttcagttcaatttcaatggagcctccaataggatttcgagcttctttattccaattcttactcttccttccttatttcattggattgctatttctgggtttcatcaaaggtattgttttgtgcccactcgtatgcctcgttgtgactataggcaactccgcggtcatactgagtcttctaccagtccacatcgtttggactttctattcaatcgtgagtgccaaacaagtaggaccaatcttgaagatctttctatgcttatgtcttcctgctgccatcattctctggcctattgttggtattttaggaagtgttttgggaggagctttatatggtttcttctccccaattttcgccacctttgatgctgttggtgaaggcaatccttaccagtttttccattgcttttatgatggaacttggagcaccatgcaacgcagcttcaccgttgttcgggattttaaagatgtttgctttcattcatacttctcacttatggatgagctgaaacaaagctgtccggatcgaaaatattatgagataaggctacttcaacttccaggggctttagtagtttcagttctcgggatacttgttgatcctccggttatctcacttgtagccatatgcaaaagcccttatatgttgtttaaaggatggcaccgtttgtttcacgacctgattggacgggaaggtccattcttggagacaatgtgtgtccccatagcaggcctcgcgatcttactctggcctttggctgtcacgggcgcggttattggatcagttatctctagtatcttccttggtgcttatgcaggagtagtctcatatcaagaatcatctttttactatggactctgctatatagttgcctctgtctccatttacgacgagtatagcaccgatatacttgacttgcctgaaggatcttgttttccaaggccgaaatatcggaaaaaggacgaggaaccaacgcctgtttctggtcctgtaccaagactaggctctgtcaagaacgcgtcatcagtcagaatccctatgattgatattaagcctctcgatctgttgaatgagctctttgtggaatgtagaagatatggagaagttttggcaacaaaaggattgataaactcgaaagatatcgaagaagcgagatctagtagaggcagccaagtgatcagcgttggtttaccggcttatggacttctttacgagattcttcgctcagtcaaagccaattcttccggcttgttactaagtgacggtgtaactgaaataactaccatgaaccgaccaaaagacgtcttctttgattggtttctgaatccgtttttgatactaaaggagcaaatgaaagctacaaacttgtctgaggaagaagaagagtacctcggaagattagttttgctatttggagatccagagaggctaaagagctcgaatgccatttccgcgtctcctcctctcaccgaacgtaaaagagccgaactcgatgcctttgctcgcaggatgcaagggctaacgaaaacggtatcaagatatccaacatttcgtcgacattttgtggcattagtgaagaaactatcggaagatttggacttgaaagacaacaattcggctaaggacgaatcgataacagaaccgccagctccggttaagatcatttcgcggatattcagtcagagatcgttcagaagaaaaggaagtgtcaatggatctgatcaagaatcgcaaaagggtgtctcaaggaatgtagatatagtttaaacatggaacgtgtggtgtggatatttgaaacttaaaacgcatttagttctttgctttataaactttgtcattccttgtaaagatttttcagacgtttttatttatttatagaacagtgtatgttttcgttc

SEQ ID NO: 40883 - protein, 583 aa, Arabidopsis thaliana
  peptide (1)..(583): Ceres Seq. ID no. 12371467
  misc_feature (314)..(540): Homolog of NCBI NO: 38344840 NR Description: OSJNBa0064H22.21 [Oryza sativa (japonica
  misc_feature (1)..(315): Homolog of NCBI NO: 38344840 NR Description: OSJNBa0064H22.21 [Oryza sativa (japonica
  misc_feature (1)..(523): Homolog of NCBI NO: 15235450 NR Description: putative protein; protein id: At4g12680.1
  misc_feature (1)..(573): Homolog of NCBI NO: 38345330 NR Description: OSJNBa0081L15.3 [Oryza sativa (japonica
  misc_feature (1)..(583): Homolog of NCBI NO: 9758091 NR Description: dbj|BAA95714.1~gene_id:MNF13.19~strong similarity
  misc_feature (1)..(583): Homolog of NCBI NO: 30693640 NR Description: expressed protein [Arabidopsis thaliana]
  misc_feature (331)..(583): Homolog of NCBI NO: 7939511 NR Description: emb|CAB40985.1~gene_id:K1G2.10~similar to unknown
  misc_feature (99)..(350): Homolog of NCBI NO: 7939511 NR Description: emb|CAB40985.1~gene_id:K1G2.10~similar to unknown
  misc_feature (1)..(583): Homolog of NCBI NO: 27311557 NR Description: Unknown protein [Arabidopsis thaliana]
  misc_feature (1)..(583): Homolog of NCBI NO: 30688768 NR Description: expressed protein [Arabidopsis thaliana]
MEPPIGFRASLFQFLLFLPYFIGLLFLGFIKGIVLCPLVCLVVTIGNSAVILSLLPVHIVWTFYSIVSAKQVGPILKIFLCLCLPAAIILWPIVGILGSVLGGALYGFFSPIFATFDAVGEGNPYQFFHCFYDGTWSTMQRSFTVVRDFKDVCFHSYFSLMDELKQSCPDRKYYEIRLLQLPGALVVSVLGILVDPPVISLVAICKSPYMLFKGWHRLFHDLIGREGPFLETMCVPIAGLAILLWPLAVTGAVIGSVISSIFLGAYAGVVSYQESSFYYGLCYIVASVSIYDEYSTDILDLPEGSCFPRPKYRKKDEEPTPVSGPVPRLGSVKNASSVRIPMIDIKPLDLLNELFVECRRYGEVLATKGLINSKDIEEARSSRGSQVISVGLPAYGLLYEILRSVKANSSGLLLSDGVTEITTMNRPKDVFFDWFLNPFLILKEQMKATNLSEEEEEYLGRLVLLFGDPERLKSSNAISASPPLTERKRAELDAFARRMQGLTKTVSRYPTFRRHFVALVKKLSEDLDLKDNNSAKDESITEPPAPVKIISRIFSQRSFRRKGSVNGSDQESQKGVSRNVDIV

SEQ ID NO: 40884 - protein, 445 aa, Arabidopsis thaliana
  peptide (1)..(445): Ceres Seq. ID no. 12371468
  misc_feature (176)..(402): Homolog of NCBI NO: 38344840 NR Description: OSJNBa0064H22.21 [Oryza sativa (japonica
  misc_feature (1)..(177): Homolog of NCBI NO: 38344840 NR Description: OSJNBa0064H22.21 [Oryza sativa (japonica
  misc_feature (1)..(385): Homolog of NCBI NO: 15235450 NR Description: putative protein; protein id: At4g12680.1
  misc_feature (1)..(435): Homolog of NCBI NO: 38345330 NR Description: OSJNBa0081L15.3 [Oryza sativa (japonica
  misc_feature (1)..(445): Homolog of NCBI NO: 9758091 NR Description: dbj|BAA95714.1~gene_id:MNF13.19~strong similarity
  misc_feature (1)..(445): Homolog of NCBI NO: 30693640 NR Description: expressed protein [Arabidopsis thaliana]
  misc_feature (193)..(445): Homolog of NCBI NO: 7939511 NR Description: emb|CAB40985.1~gene_id:K1G2.10~similar to unknown
  misc_feature (1)..(212): Homolog of NCBI NO: 7939511 NR Description: emb|CAB40985.1~gene_id:K1G2.10~similar to unknown
  misc_feature (1)..(445): Homolog of NCBI NO: 27311557 NR Description: Unknown protein [Arabidopsis thaliana]
  misc_feature (1)..(445): Homolog of NCBI NO: 30688768 NR Description: expressed protein [Arabidopsis thaliana]
MQRSFTVVRDFKDVCFHSYFSLMDELKQSCPDRKYYEIRLLQLPGALVVSVLGILVDPPVISLVAICKSPYMLFKGWHRLFHDLIGREGPFLETMCVPIAGLAILLWPLAVTGAVIGSVISSIFLGAYAGVVSYQESSFYYGLCYIVASVSIYDEYSTDILDLPEGSCFPRPKYRKKDEEPTPVSGPVPRLGSVKNASSVRIPMIDIKPLDLLNELFVECRRYGEVLATKGLINSKDIEEARSSRGSQVISVGLPAYGLLYEILRSVKANSSGLLLSDGVTEITTMNRPKDVFFDWFLNPFLILKEQMKATNLSEEEEEYLGRLVLLFGDPERLKSSNAISASPPLTERKRAELDAFARRMQGLTKTVSRYPTFRRHFVALVKKLSEDLDLKDNNSAKDESITEPPAPVKIISRIFSQRSFRRKGSVNGSDQESQKGVSRNVDIV

SEQ ID NO: 40885 - protein, 423 aa, Arabidopsis thaliana
  peptide (1)..(423): Ceres Seq. ID no. 12371469
  misc_feature (154)..(380): Homolog of NCBI NO: 38344840 NR Description: OSJNBa0064H22.21 [Oryza sativa (japonica
  misc_feature (1)..(155): Homolog of NCBI NO: 38344840 NR Description: OSJNBa0064H22.21 [Oryza sativa (japonica
  misc_feature (1)..(363): Homolog of NCBI NO: 15235450 NR Description: putative protein; protein id: At4g12680.1
  misc_feature (1)..(413): Homolog of NCBI NO: 38345330 NR Description: OSJNBa0081L15.3 [Oryza sativa (japonica
  misc_feature (1)..(423): Homolog of NCBI NO: 9758091 NR Description: dbj|BAA95714.1~gene_id:MNF13.19~strong similarity
  misc_feature (1)..(423): Homolog of NCBI NO: 30693640 NR Description: expressed protein [Arabidopsis thaliana]
  misc_feature (171)..(423): Homolog of NCBI NO: 7939511 NR Description: emb|CAB40985.1~gene_id:K1G2.10~similar to unknown
  misc_feature (1)..(190): Homolog of NCBI NO: 7939511 NR Description: emb|CAB40985.1~gene_id:K1G2.10~similar to unknown
  misc_feature (1)..(423): Homolog of NCBI NO: 27311557 NR Description: Unknown protein [Arabidopsis thaliana]
  misc_feature (1)..(423): Homolog of NCBI NO: 30688768 NR Description: expressed protein [Arabidopsis thaliana]
MDELKQSCPDRKYYEIRLLQLPGALVVSVLGILVDPPVISLVAICKSPYMLFKGWHRLFHDLIGREGPFLETMCVPIAGLAILLWPLAVTGAVIGSVISSIFLGAYAGVVSYQESSFYYGLCYIVASVSIYDEYSTDILDLPEGSCFPRPKYRKKDEEPTPVSGPVPRLGSVKNASSVRIPMIDIKPLDLLNELFVECRRYGEVLATKGLINSKDIEEARSSRGSQVISVGLPAYGLLYEILRSVKANSSGLLLSDGVTEITTMNRPKDVFFDWFLNPFLILKEQMKATNLSEEEEEYLGRLVLLFGDPERLKSSNAISASPPLTERKRAELDAFARRMQGLTKTVSRYPTFRRHFVALVKKLSEDLDLKDNNSAKDESITEPPAPVKIISRIFSQRSFRRKGSVNGSDQESQKGVSRNVDIV

SEQ ID NO: 40886 - DNA, 1718 bp, Arabidopsis thaliana
  misc_feature (1)..(1718): Ceres Seq. ID no. 13499932
  misc_feature: MA Experiment ID: 108435 Result: Up-regulated in Transcription
  misc_feature: MA Experiment 108435 PARAMETER Experiment Name: At_stm_Mutants_cDNA_P Parameter: Plant Line Value: wt Landsburg vs stm
  misc_feature: MA Experiment 108435 PARAMETER Experiment Name: At_stm_Mutants_cDNA_P Parameter: Tissue Value: Shoot Apical Meristem Region
  misc_feature: MA Experiment ID: 20000264 Result: Up-regulated in Transcription
  misc_feature: MA Experiment 20000264 PARAMETER Experiment Name: At_Open_Flower_P Parameter: Age (day) Value: 21
  misc_feature: MA Experiment 20000264 PARAMETER Experiment Name: At_Open_Flower_P Parameter: Plant Line Value: WS
  misc_feature: MA Experiment 20000264 PARAMETER Experiment Name: At_Open_Flower_P Parameter: Tissue Value: Open Flower vs. Whole Plant
  misc_feature: MA Experiment ID: 20000265 Result: Up-regulated in Transcription
  misc_feature: MA Experiment 20000265 PARAMETER Experiment Name: At_Open_Flower_P Parameter: Age (day) Value: 21
  misc_feature: MA Experiment 20000265 PARAMETER Experiment Name: At_Open_Flower_P Parameter: Plant Line Value: WS
  misc_feature: MA Experiment 20000265 PARAMETER Experiment Name: At_Open_Flower_P Parameter: Tissue Value: Closed Flower vs. Whole Plant
  misc_feature: MA Experiment ID: 20000286 Result: Up-regulated in Transcription
  misc_feature: MA Experiment 20000286 PARAMETER Experiment Name: At_Open_Flower_P Parameter: Age (day) Value: 21
  misc_feature: MA Experiment 20000286 PARAMETER Experiment Name: At_Open_Flower_P Parameter: Plant Line Value: WS
  misc_feature: MA Experiment 20000286 PARAMETER Experiment Name: At_Open_Flower_P Parameter: Tissue Value: Half Open vs. Whole Plant
  misc_feature: MA Experiment ID: 20000443 Result: Down-regulated in Transcription
  misc_feature: MA Experiment 20000443 PARAMETER Experiment Name: At_1uM_BR-BRZ__P Parameter: Tissue Value: Shoot Apices
  misc_feature: MA Experiment 20000443 PARAMETER Experiment Name: At_1uM_BR-BRZ__P Parameter: Treatment Value: 1uM BRZ vs. No Treatment
  misc_feature: MA Experiment ID: 20001910 Result: Down-regulated in Transcription
  misc_feature: MA Experiment 20001910 PARAMETER Experiment Name: At_Drought_Reproduction_P Parameter: Age (day) Value: 37
  misc_feature: MA Experiment 20001910 PARAMETER Experiment Name: At_Drought_Reproduction_P Parameter: Organism Value: A. thaliana
  misc_feature: MA Experiment 20001910 PARAMETER Experiment Name: At_Drought_Reproduction_P Parameter: Plant Line Value: WS
  misc_feature: MA Experiment 20001910 PARAMETER Experiment Name: At_Drought_Reproduction_P Parameter: Timepoint (day) Value: 7
  misc_feature: MA Experiment 20001910 PARAMETER Experiment Name: At_Drought_Reproduction_P Parameter: Tissue Value: Flowers
  misc_feature: MA Experiment 20001910 PARAMETER Experiment Name: At_Drought_Reproduction_P Parameter: Treatment Value: Drought vs. No Drought
agtgaaaaaaccaaaaccccacaaagcttggaaagagccacaaataggtcaaagaatgggtgaagacaagaagacggcaagggagacggtggaggaggaaccacttagcccatgttcacggctgttcaattcgccggattttaactgtgcaataatcgttacaatgggatctaaagttaaaggagacacaccagccatcatccacggccttgaacacaccctcgtaaaccaccctcgcttctctagcattttagagatgaacaatgggaagaagccgcgttgggttcggacaaaagttaaagtagaagagcatgtgattgttcctgatgtggatcccgacattgaaaatccggatcagtatcttgaagactatatctctaagttaacgaccattcctatggatttgtctaaaccattatgggaaatgcacttactaggcgtcaaaacatcgagcgctgaatcctatgctattctcaagatccatcattctttgggtgatggaatgtctctcatgtctcttttactggcttgtacccgcaaaacatcagaccccgaggctttgcctaccgttgcggttcataaaaaacgctttggaccgagctgcaacagcgggtttttcaacaagatttggtggttatttgtagggctctggttcatcctaagattgctattcaacacttttgttgatatcttaatgtttgctcttacaatatttgtcttgagggatacggagactcctctcttggccaaacccggtagtgaacttatccctaagaggttcgtccaccggattatcagttttgacgatgttaagctggtgaaaaacgcaatgaaaatgacggtgaacgatgttcttcttggagtaacgcaagccggactttcgcgttaccttagtcgaaaatatgatcaagaagcaacaccgaaatcgaaagagtccatgaggagaatccgacttcgttcagccattatgattaacttgagaccaaacgcaggaattgaggctctagcggatatgatggccaagaaatcaaaatgcagatggggaaatctcttcggctacattctcctaccgttctccgttgggctagagaccgatcctctagaatacgtgcgccaagctaaagccacgattgaccgcaagaaacactctctagaagccgtattctccatggcattctttaaattgatactaaaagttcttgggctcaaggcaagtgtagttcttgtaaggaaagtgatccatagcacaacgttatcattttcaaatgtggtcggtccaaaggaagaaattacattccatggtcacccactgaattatatctccccatgtgtttttggccacccacatgctcttactctacatttccagacctacgcgaacaaggtcataatatcggtaacggctgatccaacggtcattcctgaccctcacaagatgtgtgatgatttggtggagtctctcaagatgattaaagccgctgttcttgaaagagggttatatgagattgaggtctaactaaagctcttttgttgtggatcacaatgtggattcgcccgtttcttctttgtctacggctcctcaatgattactctaaattgataccttaggaagttattattataataactagacatattgatataaaaaagttgtaagacatcaagttaaaattttaagcatgtagtgtatcattttaatagatactaattcacttccg

SEQ ID NO: 40887 - protein, 504 aa, Arabidopsis thaliana
  peptide (1)..(504): Ceres Seq. ID no. 13499933
  misc_feature (31)..(319): Pfam Name: Condensation domain Pfam Description: Condensation domain
  misc_feature (22)..(499): Homolog of NCBI NO: 15242259 NR Description: hypothetical protein [Arabidopsis thaliana]
  misc_feature (28)..(504): Homolog of NCBI NO: 18421632 NR Description: expressed protein [Arabidopsis thaliana]
  misc_feature (7)..(504): Homolog of NCBI NO: 9758716 NR Description: emb|CAB66398.1~gene_id:MNJ8.9~strong similarity
  misc_feature (28)..(497): Homolog of NCBI NO: 15229102 NR Description: expressed protein [Arabidopsis thaliana]
  misc_feature (27)..(504): Homolog of NCBI NO: 15218351 NR Description: expressed protein [Arabidopsis thaliana]
  misc_feature (24)..(504): Homolog of NCBI NO: 30687731 NR Description: hypothetical protein [Arabidopsis thaliana]
  misc_feature (12)..(497): Homolog of NCBI NO: 15229103 NR Description: hypothetical protein [Arabidopsis thaliana]
  misc_feature (19)..(504): Homolog of NCBI NO: 9759186 NR Description: emb|CAB66399.1~gene_id:K19E1.19~strong similarity
  misc_feature (19)..(504): Homolog of NCBI NO: 30696326 NR Description: expressed protein [Arabidopsis thaliana]
  misc_feature (19)..(504): Homolog of NCBI NO: 26451548 NR Description: unknown protein [Arabidopsis thaliana]
VKKPKPHKAWKEPQIGQRMGEDKKTARETVEEEPLSPCSRLFNSPDFNCAIIVTMGSKVKGDTPAIIHGLEHTLVNHPRFSSILEMNNGKKPRWVRTKVKVEEHVIVPDVDPDIENPDQYLEDYISKLTTIPMDLSKPLWEMHLLGVKTSSAESYAILKIHHSLGDGMSLMSLLLACTRKTSDPEALPTVAVHKKRFGPSCNSGFFNKIWWLFVGLWFILRLLFNTFVDILMFALTIFVLRDTETPLLAKPGSELIPKRFVHRIISFDDVKLVKNAMKMTVNDVLLGVTQAGLSRYLSRKYDQEATPKSKESMRRIRLRSAIMINLRPNAGIEALADMMAKKSKCRWGNLFGYILLPFSVGLETDPLEYVRQAKATIDRKKHSLEAVFSMAFFKLILKVLGLKASVVLVRKVIHSTTLSFSNVVGPKEEITFHGHPLNYISPCVFGHPHALTLHFQTYANKVIISVTADPTVIPDPHKMCDDLVESLKMIKAAVLERGLYEIEV

SEQ ID NO: 40888 - protein, 486 aa, Arabidopsis thaliana
  peptide (1)..(486): Ceres Seq. ID no. 13499934
  misc_feature (13)..(301): Pfam Name: Condensation domain Pfam Description: Condensation domain
  misc_feature (4)..(481): Homolog of NCBI NO: 15242259 NR Description: hypothetical protein [Arabidopsis thaliana]
  misc_feature (10)..(486): Homolog of NCBI NO: 18421632 NR Description: expressed protein [Arabidopsis thaliana]
  misc_feature (1)..(486): Homolog of NCBI NO: 9758716 NR Description: emb|CAB66398.1~gene_id:MNJ8.9~strong similarity
  misc_feature (10)..(479): Homolog of NCBI NO: 15229102 NR Description: expressed protein [Arabidopsis thaliana]
  misc_feature (9)..(486): Homolog of NCBI NO: 15218351 NR Description: expressed protein [Arabidopsis thaliana]
  misc_feature (6)..(486): Homolog of NCBI NO: 30687731 NR Description: hypothetical protein [Arabidopsis thaliana]
  misc_feature (1)..(479): Homolog of NCBI NO: 15229103 NR Description: hypothetical protein [Arabidopsis thaliana]
  misc_feature (1)..(486): Homolog of NCBI NO: 9759186 NR Description: emb|CAB66399.1~gene_id:K19E1.19~strong similarity
  misc_feature (1)..(486): Homolog of NCBI NO: 30696326 NR Description: expressed protein [Arabidopsis thaliana]
  misc_feature (1)..(486): Homolog of NCBI NO: 26451548 NR Description: unknown protein [Arabidopsis thaliana]
MGEDKKTARETVEEEPLSPCSRLFNSPDFNCAIIVTMGSKVKGDTPAIIHGLEHTLVNHPRFSSILEMNNGKKPRWVRTKVKVEEHVIVPDVDPDIENPDQYLEDYISKLTTIPMDLSKPLWEMHLLGVKTSSAESYAILKIHHSLGDGMSLMSLLLACTRKTSDPEALPTVAVHKKRFGPSCNSGFFNKIWWLFVGLWFILRLLFNTFVDILMFALTIFVLRDTETPLLAKPGSELIPKRFVHRIISFDDVKLVKNAMKMTVNDVLLGVTQAGLSRYLSRKYDQEATPKSKESMRRIRLRSAIMINLRPNAGIEALADMMAKKSKCRWGNLFGYILLPFSVGLETDPLEYVRQAKATIDRKKHSLEAVFSMAFFKLILKVLGLKASVVLVRKVIHSTTLSFSNVVGPKEEITFHGHPLNYISPCVFGHPHALTLHFQTYANKVIISVTADPTVIPDPHKMCDDLVESLKMIKAAVLERGLYEIEV

SEQ ID NO: 40889 - protein, 450 aa, Arabidopsis thaliana
  peptide (1)..(450): Ceres Seq. ID no. 13499935
  misc_feature (1)..(265): Pfam Name: Condensation domain Pfam Description: Condensation domain
  misc_feature (1)..(445): Homolog of NCBI NO: 15242259 NR Description: hypothetical protein [Arabidopsis thaliana]
  misc_feature (1)..(450): Homolog of NCBI NO: 18421632 NR Description: expressed protein [Arabidopsis thaliana]
  misc_feature (1)..(450): Homolog of NCBI NO: 9758716 NR Description: emb|CAB66398.1~gene_id:MNJ8.9~strong similarity
  misc_feature (1)..(443): Homolog of NCBI NO: 15229102 NR Description: expressed protein [Arabidopsis thaliana]
  misc_feature (1)..(450): Homolog of NCBI NO: 15218351 NR Description: expressed protein [Arabidopsis thaliana]
  misc_feature (1)..(450): Homolog of NCBI NO: 30687731 NR Description: hypothetical protein [Arabidopsis thaliana]
  misc_feature (1)..(443): Homolog of NCBI NO: 15229103 NR Description: hypothetical protein [Arabidopsis thaliana]
  misc_feature (1)..(450): Homolog of NCBI NO: 9759186 NR Description: emb|CAB66399.1~gene_id:K19E1.19~strong similarity
  misc_feature (1)..(450): Homolog of NCBI NO: 30696326 NR Description: expressed protein [Arabidopsis thaliana]
  misc_feature (1)..(450): Homolog of NCBI NO: 26451548 NR Description: unknown protein [Arabidopsis thaliana]
MGSKVKGDTPAIIHGLEHTLVNHPRFSSILEMNNGKKPRWVRTKVKVEEHVIVPDVDPDIENPDQYLEDYISKLTTIPMDLSKPLWEMHLLGVKTSSAESYAILKIHHSLGDGMSLMSLLLACTRKTSDPEALPTVAVHKKRFGPSCNSGFFNKIWWLFVGLWFILRLLFNTFVDILMFALTIFVLRDTETPLLAKPGSELIPKRFVHRIISFDDVKLVKNAMKMTVNDVLLGVTQAGLSRYLSRKYDQEATPKSKESMRRIRLRSAIMINLRPNAGIEALADMMAKKSKCRWGNLFGYILLPFSVGLETDPLEYVRQAKATIDRKKHSLEAVFSMAFFKLILKVLGLKASVVLVRKVIHSTTLSFSNVVGPKEEITFHGHPLNYISPCVFGHPHALTLHFQTYANKVIISVTADPTVIPDPHKMCDDLVESLKMIKAAVLERGLYEIEV

SEQ ID NO: 40890 - DNA, 1197 bp, Arabidopsis thaliana
  misc_feature (1)..(1197): Ceres Seq. ID no. 13497435
  misc_feature: MA Experiment ID: 108434 Result: Down-regulated in Transcription
  misc_feature: MA Experiment 108434 PARAMETER Experiment Name: At_Root_Tips_cDNA_P Parameter: Tissue Value: Root Tips
  misc_feature: MA Experiment ID: 108435 Result: Down-regulated in Transcription
  misc_feature: MA Experiment 108435 PARAMETER Experiment Name: At_stm_Mutants_cDNA_P Parameter: Plant Line Value: wt Landsburg vs stm
  misc_feature: MA Experiment 108435 PARAMETER Experiment Name: At_stm_Mutants_cDNA_P Parameter: Tissue Value: Shoot Apical Meristem Region
  misc_feature: MA Experiment ID: 108462 Result: Down-regulated in Transcription
  misc_feature: MA Experiment 108462 PARAMETER Experiment Name: At_Germinating_Seeds_cDNA_P Parameter: Age (day) Value: 2 vs. 0
  misc_feature: MA Experiment 108462 PARAMETER Experiment Name: At_Germinating_Seeds_cDNA_P Parameter: Tissue Value: Germinating Seeds
  misc_feature: MA Experiment ID: 108501 Result: Down-regulated in Transcription
  misc_feature: MA Experiment 108501 PARAMETER Experiment Name: At_ap2_floral_buds_cDNA_P Parameter: Plant Line Value: ap2 (Ler.)
  misc_feature: MA Experiment 108501 PARAMETER Experiment Name: At_ap2_floral_buds_cDNA_P Parameter: Tissue Value: Closed Flower
  misc_feature: MA Experiment ID: 108605 Result: Down-regulated in Transcription
  misc_feature: MA Experiment 108605 PARAMETER Experiment Name: At_100uM_ABA_cDNA_P Parameter: Timepoint (hr) Value: 6
  misc_feature: MA Experiment 108605 PARAMETER Experiment Name: At_100uM_ABA_cDNA_P Parameter: Tissue Value: Aerial
  misc_feature: MA Experiment 108605 PARAMETER Experiment Name: At_100uM_ABA_cDNA_P Parameter: Treatment Value: 100uM ABA vs. No Treatment
  misc_feature: MA Experiment ID: 108607 Result: Down-regulated in Transcription
  misc_feature: MA Experiment 108607 PARAMETER Experiment Name: At_100uM_ABA_cDNA_P Parameter: Timepoint (hr) Value: 4
  misc_feature: MA Experiment 108607 PARAMETER Experiment Name: At_100uM_ABA_cDNA_P Parameter: Tissue Value: Aerial
  misc_feature: MA Experiment 108607 PARAMETER Experiment Name: At_100uM_ABA_cDNA_P Parameter: Treatment Value: 100uM ABA vs. No Treatment
  misc_feature: MA Experiment ID: 108608 Result: Down-regulated in Transcription
  misc_feature: MA Experiment 108608 PARAMETER Experiment Name: At_100uM_ABA_cDNA_P Parameter: Timepoint (hr) Value: 1
  misc_feature: MA Experiment 108608 PARAMETER Experiment Name: At_100uM_ABA_cDNA_P Parameter: Tissue Value: Aerial
  misc_feature: MA Experiment 108608 PARAMETER Experiment Name: At_100uM_ABA_cDNA_P Parameter: Treatment Value: 100uM ABA vs. No Treatment
  misc_feature: MA Experiment ID: 108609 Result: Down-regulated in Transcription
  misc_feature: MA Experiment 108609 PARAMETER Experiment Name: At_100uM_ABA_cDNA_P Parameter: Timepoint (hr) Value: 24
  misc_feature: MA Experiment 108609 PARAMETER Experiment Name: At_100uM_ABA_cDNA_P Parameter: Tissue Value: Aerial
  misc_feature: MA Experiment 108609 PARAMETER Experiment Name: At_100uM_ABA_cDNA_P Parameter: Treatment Value: 100uM ABA vs. No Treatment
  misc_feature: MA Experiment ID: 20000071 Result: Down-regulated in Transcription
  misc_feature: MA Experiment 20000071 PARAMETER Experiment Name: At_100uM_ABA_Mutants_cDNA_P Parameter: Plant Line Value: CS8104
  misc_feature: MA Experiment 20000071 PARAMETER Experiment Name: At_100uM_ABA_Mutants_cDNA_P Parameter: Timepoint (hr) Value: 6
  misc_feature: MA Experiment 20000071 PARAMETER Experiment Name: At_100uM_ABA_Mutants_cDNA_P Parameter: Tissue Value: Aerial
  misc_feature: MA Experiment 20000071 PARAMETER Experiment Name: At_100uM_ABA_Mutants_cDNA_P Parameter: Treatment Value: 100uM ABA vs. No Treatment
  misc_feature: MA Experiment ID: 20000112 Result: Up-regulated in Transcription
  misc_feature: MA Experiment 20000112 PARAMETER Experiment Name: At_42deg_Heat_cDNA_P Parameter: Temperature (deg C) Value: 42 vs. 22
  misc_feature: MA Experiment 20000112 PARAMETER Experiment Name: At_42deg_Heat_cDNA_P Parameter: Timepoint (hr) Value: 2
  misc_feature: MA Experiment 20000112 PARAMETER Experiment Name: At_42deg_Heat_cDNA_P Parameter: Tissue Value: Aerial
  misc_feature: MA Experiment ID: 20000117 Result: Down-regulated in Transcription
  misc_feature: MA Experiment 20000117 PARAMETER Experiment Name: At_100uM_ABA_Mutants_cDNA_P Parameter: Plant Line Value: Columbia
  misc_feature: MA Experiment 20000117 PARAMETER Experiment Name: At_100uM_ABA_Mutants_cDNA_P Parameter: Timepoint (hr) Value: 6
  misc_feature: MA Experiment 20000117 PARAMETER Experiment Name: At_100uM_ABA_Mutants_cDNA_P Parameter: Tissue Value: Aerial
  misc_feature: MA Experiment 20000117 PARAMETER Experiment Name: At_100uM_ABA_Mutants_cDNA_P Parameter: Treatment Value: 100uM ABA vs. No Treatment
  misc_feature: MA Experiment ID: 20000166 Result: Down-regulated in Transcription
  misc_feature: MA Experiment 20000166 PARAMETER Experiment Name: At_100uM_ABA_P Parameter: Age (day) Value: 14
  misc_feature: MA Experiment 20000166 PARAMETER Experiment Name: At_100uM_ABA_P Parameter: Organism Value: A. thaliana
  misc_feature: MA Experiment 20000166 PARAMETER Experiment Name: At_100uM_ABA_P Parameter: Plant Line Value: WS
  misc_feature: MA Experiment 20000166 PARAMETER Experiment Name: At_100uM_ABA_P Parameter: Timepoint (hr) Value: 1
  misc_feature: MA Experiment 20000166 PARAMETER Experiment Name: At_100uM_ABA_P Parameter: Tissue Value: Aerial
  misc_feature: MA Experiment 20000166 PARAMETER Experiment Name: At_100uM_ABA_P Parameter: Treatment Value: 100uM ABA vs. No Treatment
  misc_feature: MA Experiment ID: 20000224 Result: Down-regulated in Transcription
  misc_feature: MA Experiment ID: 20000234 Result: Down-regulated in Transcription
  misc_feature: MA Experiment 20000234 PARAMETER Experiment Name: At_Siliques_P Parameter: Age (day) Value: 21
  misc_feature: MA Experiment 20000234 PARAMETER Experiment Name: At_Siliques_P Parameter: Organism Value: A. thaliana
  misc_feature: MA Experiment 20000234 PARAMETER Experiment Name: At_Siliques_P Parameter: Plant Line Value: WS
  misc_feature: MA Experiment 20000234 PARAMETER Experiment Name: At_Siliques_P Parameter: Tissue Value: Less Than 5mm Siliques vs. Whole Plant
  misc_feature: MA Experiment ID: 20000235 Result: Down-regulated in Transcription
  misc_feature: MA Experiment 20000235 PARAMETER Experiment Name: At_Siliques_P Parameter: Age (day) Value: 21
  misc_feature: MA Experiment 20000235 PARAMETER Experiment Name: At_Siliques_P Parameter: Organism Value: A. thaliana
  misc_feature: MA Experiment 20000235 PARAMETER Experiment Name: At_Siliques_P Parameter: Plant Line Value: WS
  misc_feature: MA Experiment 20000235 PARAMETER Experiment Name: At_Siliques_P Parameter: Tissue Value: 5-10mm Siliques vs. Whole Plant
  misc_feature: MA Experiment ID: 20000268 Result: Down-regulated in Transcription
  misc_feature: MA Experiment 20000268 PARAMETER Experiment Name: At_100mM_NaCl__P Parameter: Age (day) Value: 14
  misc_feature: MA Experiment 20000268 PARAMETER Experiment Name: At_100mM_NaCl__P Parameter: Organism Value: A. thaliana
  misc_feature: MA Experiment 20000268 PARAMETER Experiment Name: At_100mM_NaCl__P Parameter: Plant Line Value: WS
  misc_feature: MA Experiment 20000268 PARAMETER Experiment Name: At_100mM_NaCl__P Parameter: Timepoint (hr) Value: 6
  misc_feature: MA Experiment 20000268 PARAMETER Experiment Name: At_100mM_NaCl__P Parameter: Tissue Value: Whole Plant
  misc_feature: MA Experiment 20000268 PARAMETER Experiment Name: At_100mM_NaCl__P Parameter: Treatment Value: 100mM NaCl vs. No Treatment
  misc_feature: MA Experiment ID: 20000286 Result: Down-regulated in Transcription
  misc_feature: MA Experiment 20000286 PARAMETER Experiment Name: At_Open_Flower_P Parameter: Age (day) Value: 21
  misc_feature: MA Experiment 20000286 PARAMETER Experiment Name: At_Open_Flower_P Parameter: Plant Line Value: WS
  misc_feature: MA Experiment 20000286 PARAMETER Experiment Name: At_Open_Flower_P Parameter: Tissue Value: Half Open vs. Whole Plant
  misc_feature: MA Experiment ID: 20000436 Result: Down-regulated in Transcription
  misc_feature: MA Experiment 20000436 PARAMETER Experiment Name: At_Drought_P Parameter: Age (day) Value: 7
  misc_feature: MA Experiment 20000436 PARAMETER Experiment Name: At_Drought_P Parameter: Organism Value: A. thaliana
  misc_feature: MA Experiment 20000436 PARAMETER Experiment Name: At_Drought_P Parameter: Plant Line Value: WS
  misc_feature: MA Experiment 20000436 PARAMETER Experiment Name: At_Drought_P Parameter: Timepoint (hr) Value: 12
  misc_feature: MA Experiment 20000436 PARAMETER Experiment Name: At_Drought_P Parameter: Tissue Value: Whole Plant
  misc_feature: MA Experiment 20000436 PARAMETER Experiment Name: At_Drought_P Parameter: Treatment Value: Drought vs. No Drought
  misc_feature: MA Experiment ID: 20000438 Result: Down-regulated in Transcription
  misc_feature: MA Experiment 20000438 PARAMETER Experiment Name: At_Shoots__P Parameter: Age (day) Value: 14
  misc_feature: MA Experiment 20000438 PARAMETER Experiment Name: At_Shoots__P Parameter: Tissue Value: Shoots vs. Whole Plant
  misc_feature: MA Experiment ID: 20000441 Result: Up-regulated in Transcription
  misc_feature: MA Experiment 20000441 PARAMETER Experiment Name: At_1uM_BR-BRZ__P Parameter: Tissue Value: Shoot Apices
  misc_feature: MA Experiment 20000441 PARAMETER Experiment Name: At_1uM_BR-BRZ__P Parameter: Treatment Value: 1uM BR vs. No Treatment
  misc_feature: MA Experiment ID: 20000443 Result: Up-regulated in Transcription
  misc_feature: MA Experiment 20000443 PARAMETER Experiment Name: At_1uM_BR-BRZ__P Parameter: Tissue Value: Shoot Apices
  misc_feature: MA Experiment 20000443 PARAMETER Experiment Name: At_1uM_BR-BRZ__P Parameter: Treatment Value: 1uM BRZ vs. No Treatment
  misc_feature: MA Experiment ID: 20000453 Result: Down-regulated in Transcription
  misc_feature: MA Experiment 20000453 PARAMETER Experiment Name: At_100uM_ABA_P Parameter: Age (day) Value: 15
  misc_feature: MA Experiment 20000453 PARAMETER Experiment Name: At_100uM_ABA_P Parameter: Organism Value: A. thaliana
  misc_feature: MA Experiment 20000453 PARAMETER Experiment Name: At_100uM_ABA_P Parameter: Plant Line Value: WS
  misc_feature: MA Experiment 20000453 PARAMETER Experiment Name: At_100uM_ABA_P Parameter: Timepoint (hr) Value: 24
  misc_feature: MA Experiment 20000453 PARAMETER Experiment Name: At_100uM_ABA_P Parameter: Tissue Value: Aerial
  misc_feature: MA Experiment 20000453 PARAMETER Experiment Name: At_100uM_ABA_P Parameter: Treatment Value: 100uM ABA vs. No Treatment
  misc_feature: MA Experiment ID: 20000455 Result: Down-regulated in Transcription
  misc_feature: MA Experiment 20000455 PARAMETER Experiment Name: At_100uM_ABA_P Parameter: Age (day) Value: 16
  misc_feature: MA Experiment 20000455 PARAMETER Experiment Name: At_100uM_ABA_P Parameter: Organism Value: A. thaliana
  misc_feature: MA Experiment 20000455 PARAMETER Experiment Name: At_100uM_ABA_P Parameter: Plant Line Value: WS
  misc_feature: MA Experiment 20000455 PARAMETER Experiment Name: At_100uM_ABA_P Parameter: Timepoint (hr) Value: 48
  misc_feature: MA Experiment 20000455 PARAMETER Experiment Name: At_100uM_ABA_P Parameter: Tissue Value: Aerial
  misc_feature: MA Experiment 20000455 PARAMETER Experiment Name: At_100uM_ABA_P Parameter: Treatment Value: 100uM ABA vs. No Treatment
  misc_feature: MA Experiment ID: 20000573 Result: Up-regulated in Transcription
  misc_feature: MA Experiment 20000573 PARAMETER Experiment Name: At_100uM_ABA_Mutants__P Parameter: Organism Value: A. thaliana
  misc_feature: MA Experiment 20000573 PARAMETER Experiment Name: At_100uM_ABA_Mutants__P Parameter: Plant Line Value: CS22 vs. Ler wt
  misc_feature: MA Experiment 20000573 PARAMETER Experiment Name: At_100uM_ABA_Mutants__P Parameter: Timepoint (hr) Value: N/A
  misc_feature: MA Experiment 20000573 PARAMETER Experiment Name: At_100uM_ABA_Mutants__P Parameter: Tissue Value: Whole Plant
  misc_feature: MA Experiment 20000573 PARAMETER Experiment Name: At_100uM_ABA_Mutants__P Parameter: Treatment Value: None
  misc_feature: MA Experiment ID: 20000575 Result: Down-regulated in Transcription
  misc_feature: MA Experiment 20000575 PARAMETER Experiment Name: At_100uM_ABA_Mutants__P Parameter: Organism Value: A. thaliana
  misc_feature: MA Experiment 20000575 PARAMETER Experiment Name: At_100uM_ABA_Mutants__P Parameter: Plant Line Value: CS22
  misc_feature: MA Experiment 20000575 PARAMETER Experiment Name: At_100uM_ABA_Mutants__P Parameter: Timepoint (hr) Value: 6
  misc_feature: MA Experiment 20000575 PARAMETER Experiment Name: At_100uM_ABA_Mutants__P Parameter: Tissue Value: Whole Plant
  misc_feature: MA Experiment 20000575 PARAMETER Experiment Name: At_100uM_ABA_Mutants__P Parameter: Treatment Value: 1uM ABA vs. No Treatment
  misc_feature: MA Experiment ID: 20000576 Result: Down-regulated in Transcription
  misc_feature: MA Experiment 20000576 PARAMETER Experiment Name: At_100uM_ABA_Mutants__P Parameter: Organism Value: A. thaliana
  misc_feature: MA Experiment 20000576 PARAMETER Experiment Name: At_100uM_ABA_Mutants__P Parameter: Plant Line Value: CS23
  misc_feature: MA Experiment 20000576 PARAMETER Experiment Name: At_100uM_ABA_Mutants__P Parameter: Timepoint (hr) Value: 6
  misc_feature: MA Experiment 20000576 PARAMETER Experiment Name: At_100uM_ABA_Mutants__P Parameter: Tissue Value: Whole Plant
  misc_feature: MA Experiment 20000576 PARAMETER Experiment Name: At_100uM_ABA_Mutants__P Parameter: Treatment Value: 1uM ABA vs. No Treatment
  misc_feature: MA Experiment ID: 20000606 Result: Up-regulated in Transcription
  misc_feature: MA Experiment 20000606 PARAMETER Experiment Name: At_CS8548_Mutant_P Parameter: Age (day) Value: 14
  misc_feature: MA Experiment 20000606 PARAMETER Experiment Name: At_CS8548_Mutant_P Parameter: Plant Line Value: CS8548 vs. wt
  misc_feature: MA Experiment 20000606 PARAMETER Experiment Name: At_CS8548_Mutant_P Parameter: Tissue Value: Whole Plant
  misc_feature: MA Experiment ID: 20001247 Result: Up-regulated in Transcription
  misc_feature: MA Experiment 20001247 PARAMETER Experiment Name: At_Far-red-induction_P Parameter: Age (day) Value: 7
  misc_feature: MA Experiment 20001247 PARAMETER Experiment Name: At_Far-red-induction_P Parameter: Light Value: Far-red vs. White
  misc_feature: MA Experiment 20001247 PARAMETER Experiment Name: At_Far-red-induction_P Parameter: Organism Value: A. thaliana
  misc_feature: MA Experiment 20001247 PARAMETER Experiment Name: At_Far-red-induction_P Parameter: Plant Line Value: Columbia
  misc_feature: MA Experiment 20001247 PARAMETER Experiment Name: At_Far-red-induction_P Parameter: Timepoint (hr) Value: 1
  misc_feature: MA Experiment 20001247 PARAMETER Experiment Name: At_Far-red-induction_P Parameter: Tissue Value: Whole Plant
  misc_feature: MA Experiment ID: 20001248 Result: Up-regulated in Transcription
  misc_feature: MA Experiment 20001248 PARAMETER Experiment Name: At_Far-red-induction_P Parameter: Age (day) Value: 7
  misc_feature: MA Experiment 20001248 PARAMETER Experiment Name: At_Far-red-induction_P Parameter: Light Value: Far-red vs. White
  misc_feature: MA Experiment 20001248 PARAMETER Experiment Name: At_Far-red-induction_P Parameter: Organism Value: A. thaliana
  misc_feature: MA Experiment 20001248 PARAMETER Experiment Name: At_Far-red-induction_P Parameter: Plant Line Value: Columbia
  misc_feature: MA Experiment 20001248 PARAMETER Experiment Name: At_Far-red-induction_P Parameter: Timepoint (hr) Value: 4
  misc_feature: MA Experiment 20001248 PARAMETER Experiment Name: At_Far-red-induction_P Parameter: Tissue Value: Whole Plant
  misc_feature: MA Experiment ID: 20001554 Result: Down-regulated in Transcription
  misc_feature: MA Experiment 20001554 PARAMETER Experiment Name: At_Drought_Soil_Dry_P Parameter: Age (day) Value: 21
  misc_feature: MA Experiment 20001554 PARAMETER Experiment Name: At_Drought_Soil_Dry_P Parameter: Organism Value: A. thaliana
  misc_feature: MA Experiment 20001554 PARAMETER Experiment Name: At_Drought_Soil_Dry_P Parameter: Plant Line Value: WS
  misc_feature: MA Experiment 20001554 PARAMETER Experiment Name: At_Drought_Soil_Dry_P Parameter: Post Timepoint (hr) Value: None
  misc_feature: MA Experiment 20001554 PARAMETER Experiment Name: At_Drought_Soil_Dry_P Parameter: Post-Treatment Value: None
  misc_feature: MA Experiment 20001554 PARAMETER Experiment Name: At_Drought_Soil_Dry_P Parameter: Timepoint (day) Value: 7
  misc_feature: MA Experiment 20001554 PARAMETER Experiment Name: At_Drought_Soil_Dry_P Parameter: Treatment Value: Drought vs. No Drought
  misc_feature: MA Experiment ID: 20001555 Result: Down-regulated in Transcription
  misc_feature: MA Experiment 20001555 PARAMETER Experiment Name: At_Drought_Soil_Dry_P Parameter: Age (day) Value: 24
  misc_feature: MA Experiment 20001555 PARAMETER Experiment Name: At_Drought_Soil_Dry_P Parameter: Organism Value: A. thaliana
  misc_feature: MA Experiment 20001555 PARAMETER Experiment Name: At_Drought_Soil_Dry_P Parameter: Plant Line Value: WS
  misc_feature: MA Experiment 20001555 PARAMETER Experiment Name: At_Drought_Soil_Dry_P Parameter: Post Timepoint (hr) Value: None
  misc_feature: MA Experiment 20001555 PARAMETER Experiment Name: At_Drought_Soil_Dry_P Parameter: Post-Treatment Value: None
  misc_feature: MA Experiment 20001555 PARAMETER Experiment Name: At_Drought_Soil_Dry_P Parameter: Timepoint (day) Value: 10
  misc_feature: MA Experiment 20001555 PARAMETER Experiment Name: At_Drought_Soil_Dry_P Parameter: Treatment Value: Drought vs. No Drought
  misc_feature: MA Experiment ID: 20001556 Result: Down-regulated in Transcription
  misc_feature: MA Experiment 20001556 PARAMETER Experiment Name: At_Drought_Soil_Dry_P Parameter: Age (day) Value: 26
  misc_feature: MA Experiment 20001556 PARAMETER Experiment Name: At_Drought_Soil_Dry_P Parameter: Organism Value: A. thaliana
  misc_feature: MA Experiment 20001556 PARAMETER Experiment Name: At_Drought_Soil_Dry_P Parameter: Plant Line Value: WS
  misc_feature: MA Experiment 20001556 PARAMETER Experiment Name: At_Drought_Soil_Dry_P Parameter: Post Timepoint (hr) Value: None
  misc_feature: MA Experiment 20001556 PARAMETER Experiment Name: At_Drought_Soil_Dry_P Parameter: Post-Treatment Value: None
  misc_feature: MA Experiment 20001556 PARAMETER Experiment Name: At_Drought_Soil_Dry_P Parameter: Timepoint (day) Value: 12
  misc_feature: MA Experiment 20001556 PARAMETER Experiment Name: At_Drought_Soil_Dry_P Parameter: Treatment Value: Drought vs. No Drought
  misc_feature: MA Experiment ID: 20001557 Result: Up-regulated in Transcription
  misc_feature: MA Experiment 20001557 PARAMETER Experiment Name: At_Drought_Soil_Dry_P Parameter: Age (day) Value: 27
  misc_feature: MA Experiment 20001557 PARAMETER Experiment Name: At_Drought_Soil_Dry_P Parameter: Organism Value: A. thaliana
  misc_feature: MA Experiment 20001557 PARAMETER Experiment Name: At_Drought_Soil_Dry_P Parameter: Plant Line Value: WS
  misc_feature: MA Experiment 20001557 PARAMETER Experiment Name: At_Drought_Soil_Dry_P Parameter: Post Timepoint (hr) Value: 3
  misc_feature: MA Experiment 20001557 PARAMETER Experiment Name: At_Drought_Soil_Dry_P Parameter: Post-Treatment Value: Re-Water vs. No Drought
  misc_feature: MA Experiment 20001557 PARAMETER Experiment Name: At_Drought_Soil_Dry_P Parameter: Timepoint (day) Value: 13
  misc_feature: MA Experiment 20001557 PARAMETER Experiment Name: At_Drought_Soil_Dry_P Parameter: Treatment Value: Drought vs. No Drought
  misc_feature: MA Experiment ID: 20001558 Result: Up-regulated in Transcription
  misc_feature: MA Experiment 20001558 PARAMETER Experiment Name: At_Drought_Soil_Dry_P Parameter: Age (day) Value: 27
  misc_feature: MA Experiment 20001558 PARAMETER Experiment Name: At_Drought_Soil_Dry_P Parameter: Organism Value: A. thaliana
  misc_feature: MA Experiment 20001558 PARAMETER Experiment Name: At_Drought_Soil_Dry_P Parameter: Plant Line Value: WS
  misc_feature: MA Experiment 20001558 PARAMETER Experiment Name: At_Drought_Soil_Dry_P Parameter: Post Timepoint (hr) Value: 6
  misc_feature: MA Experiment 20001558 PARAMETER Experiment Name: At_Drought_Soil_Dry_P Parameter: Post-Treatment Value: Re-Water vs. No Drought
  misc_feature: MA Experiment 20001558 PARAMETER Experiment Name: At_Drought_Soil_Dry_P Parameter: Timepoint (day) Value: 13
  misc_feature: MA Experiment 20001558 PARAMETER Experiment Name: At_Drought_Soil_Dry_P Parameter: Treatment Value: Drought vs. No Drought
  misc_feature: MA Experiment ID: 20001904 Result: Down-regulated in Transcription
  misc_feature: MA Experiment 20001904 PARAMETER Experiment Name: At_Drought_Reproduction_P Parameter: Age (day) Value: 37
  misc_feature: MA Experiment 20001904 PARAMETER Experiment Name: At_Drought_Reproduction_P Parameter: Organism Value: A. thaliana
  misc_feature: MA Experiment 20001904 PARAMETER Experiment Name: At_Drought_Reproduction_P Parameter: Plant Line Value: WS
  misc_feature: MA Experiment 20001904 PARAMETER Experiment Name: At_Drought_Reproduction_P Parameter: Timepoint (day) Value: 7
  misc_feature: MA Experiment 20001904 PARAMETER Experiment Name: At_Drought_Reproduction_P Parameter: Tissue Value: Rosettes
  misc_feature: MA Experiment 20001904 PARAMETER Experiment Name: At_Drought_Reproduction_P Parameter: Treatment Value: Drought vs. No Drought
  misc_feature: MA Experiment ID: 20001905 Result: Down-regulated in Transcription
  misc_feature: MA Experiment 20001905 PARAMETER Experiment Name: At_Drought_Reproduction_P Parameter: Age (day) Value: 40
  misc_feature: MA Experiment 20001905 PARAMETER Experiment Name: At_Drought_Reproduction_P Parameter: Organism Value: A. thaliana
  misc_feature: MA Experiment 20001905 PARAMETER Experiment Name: At_Drought_Reproduction_P Parameter: Plant Line Value: WS
  misc_feature: MA Experiment 20001905 PARAMETER Experiment Name: At_Drought_Reproduction_P Parameter: Timepoint (day) Value: 10
  misc_feature: MA Experiment 20001905 PARAMETER Experiment Name: At_Drought_Reproduction_P Parameter: Tissue Value: Rosettes
  misc_feature: MA Experiment 20001905 PARAMETER Experiment Name: At_Drought_Reproduction_P Parameter: Treatment Value: Drought vs. No Drought
  misc_feature: MA Experiment ID: 20001906 Result: Down-regulated in Transcription
  misc_feature: MA Experiment 20001906 PARAMETER Experiment Name: At_Drought_Reproduction_P Parameter: Age (day) Value: 35
  misc_feature: MA Experiment 20001906 PARAMETER Experiment Name: At_Drought_Reproduction_P Parameter: Organism Value: A. thaliana
  misc_feature: MA Experiment 20001906 PARAMETER Experiment Name: At_Drought_Reproduction_P Parameter: Plant Line Value: WS
  misc_feature: MA Experiment 20001906 PARAMETER Experiment Name: At_Drought_Reproduction_P Parameter: Timepoint (day) Value: 5
  misc_feature: MA Experiment 20001906 PARAMETER Experiment Name: At_Drought_Reproduction_P Parameter: Tissue Value: Siliques
  misc_feature: MA Experiment 20001906 PARAMETER Experiment Name: At_Drought_Reproduction_P Parameter: Treatment Value: Drought vs. No Drought
  misc_feature: MA Experiment ID: 20001907 Result: Down-regulated in Transcription
  misc_feature: MA Experiment 20001907 PARAMETER Experiment Name: At_Drought_Reproduction_P Parameter: Age (day) Value: 37
  misc_feature: MA Experiment 20001907 PARAMETER Experiment Name: At_Drought_Reproduction_P Parameter: Organism Value: A. thaliana
  misc_feature: MA Experiment 20001907 PARAMETER Experiment Name: At_Drought_Reproduction_P Parameter: Plant Line Value: WS
  misc_feature: MA Experiment 20001907 PARAMETER Experiment Name: At_Drought_Reproduction_P Parameter: Timepoint (day) Value: 7
  misc_feature: MA Experiment 20001907 PARAMETER Experiment Name: At_Drought_Reproduction_P Parameter: Tissue Value: Siliques
  misc_feature: MA Experiment 20001907 PARAMETER Experiment Name: At_Drought_Reproduction_P Parameter: Treatment Value: Drought vs. No Drought
  misc_feature: MA Experiment ID: 20001910 Result: Down-regulated in Transcription
  misc_feature: MA Experiment 20001910 PARAMETER Experiment Name: At_Drought_Reproduction_P Parameter: Age (day) Value: 37
  misc_feature: MA Experiment 20001910 PARAMETER Experiment Name: At_Drought_Reproduction_P Parameter: Organism Value: A. thaliana
  misc_feature: MA Experiment 20001910 PARAMETER Experiment Name: At_Drought_Reproduction_P Parameter: Plant Line Value: WS
  misc_feature: MA Experiment 20001910 PARAMETER Experiment Name: At_Drought_Reproduction_P Parameter: Timepoint (day) Value: 7
  misc_feature: MA Experiment 20001910 PARAMETER Experiment Name: At_Drought_Reproduction_P Parameter: Tissue Value: Flowers
  misc_feature: MA Experiment 20001910 PARAMETER Experiment Name: At_Drought_Reproduction_P Parameter: Treatment Value: Drought vs. No Drought
  misc_feature: MA Experiment ID: 20001911 Result: Down-regulated in Transcription
  misc_feature: MA Experiment 20001911 PARAMETER Experiment Name: At_Drought_Reproduction_P Parameter: Age (day) Value: 40
  misc_feature: MA Experiment 20001911 PARAMETER Experiment Name: At_Drought_Reproduction_P Parameter: Organism Value: A. thaliana
  misc_feature: MA Experiment 20001911 PARAMETER Experiment Name: At_Drought_Reproduction_P Parameter: Plant Line Value: WS
  misc_feature: MA Experiment 20001911 PARAMETER Experiment Name: At_Drought_Reproduction_P Parameter: Timepoint (day) Value: 10
  misc_feature: MA Experiment 20001911 PARAMETER Experiment Name: At_Drought_Reproduction_P Parameter: Tissue Value: Flowers
  misc_feature: MA Experiment 20001911 PARAMETER Experiment Name: At_Drought_Reproduction_P Parameter: Treatment Value: Drought vs. No Drought
gacagcgaacaagatcaaaaagctagctctcttcttttctcatcaaacttatttctctctcgatcgcaatatatacgattccataaattctcccaaaaacaaattaagagatagaggagagatcatgaggtcaccggtgcaactccaacacggctcagacgccactaacggtttccacacgctgcagcctcacgatcagaccgatggtccgatcaagagagtgtgtctcacgcgcggtatgcatgtccctgaacacgttgcgatgcaccacacacacgacgttggtccggaccagtgttgctcctcggtggtgcagatgatccacgcgccgcctgagtccgtgtgggctcttgtgcggcgtttcgataatccgaaggtttacaagaacttcatcagacagtgccgtatcgtccaaggcgatggactacacgtcggcgatctccgggaggtcatggtggtctctggactcccggcggtctcgagcaccgagaggctcgagatcttggacgaggagcgtcacgtgataagctttagtgtcgttggtggggaccacaggctcaagaactaccgatcggtgacgacactacacgcgtcggacgacgaaggtaccgtggtggtggagtcttacatcgttgatgtgccgccgggaaacacggaggaggaaactctaagcttcgttgatactatcgtccggtgcaaccttcagtctctggctcgaagtaccaaccggcaataatctcatctttcttatataaattgcaattatgtatctaattttttttgttgttctatttcttttagatgttcgatcttctttacaaggaagaaaatttcgagtaccttttctttctttttaaatagatatatcggcttagaaagaattgtaatttaatggggatttctttgggagatttatgttggaaatttcgaagtactgttgggggattcacaaaactttggatttggagggtgttagtactggtacataaaacattttaaggtgaatctgttaaatgaattaatccatttgttgttttgtacatggtatcattctttgtgacattgtttaatttcttgtactcttttaaatgttactcttaaccgtttttttcttttgtggtttgtaaatgaatatttgatgcatcggtattgttaatgatagacttattaatttatttcttcatagtatgtaacatt

SEQ ID NO: 40891 - protein, 244 aa, Arabidopsis thaliana
  peptide (1)..(244): Ceres Seq. ID no. 13497436
  misc_feature (98)..(239): Pfam Name: Pathogenesis-related protein Bet v I family Pfam Description: Pathogenesis-related protein Bet v I family
  misc_feature (84)..(241): Homolog of NCBI NO: 9758515 NR Description: gene_id:MZA15.21~pir||T05073~similar to unknown
  misc_feature (86)..(237): Homolog of NCBI NO: 37537066 NR Description: unknown protein [Oryza sativa (japonica
  misc_feature (86)..(237): Homolog of NCBI NO: 15225245 NR Description: Bet v I allergen family [Arabidopsis thaliana]
  misc_feature (40)..(241): Homolog of NCBI NO: 22327625 NR Description: expressed protein [Arabidopsis thaliana]
  misc_feature (86)..(238): Homolog of NCBI NO: 15236689 NR Description: expressed protein [Arabidopsis thaliana]
  misc_feature (82)..(239): Homolog of NCBI NO: 25348262 NR Description: hypothetical protein At2g40330 [imported] -
  misc_feature (82)..(243): Homolog of NCBI NO: 34907924 NR Description: B1088C09.9 [Oryza sativa (japonica
  misc_feature (42)..(239): Homolog of NCBI NO: 18405351 NR Description: Bet v I allergen family [Arabidopsis thaliana]
  misc_feature (87)..(239): Homolog of NCBI NO: 18404709 NR Description: expressed protein [Arabidopsis thaliana]
  misc_feature (42)..(244): Homolog of NCBI NO: 15239114 NR Description: expressed protein [Arabidopsis thaliana]
TANKIKKLALFFSHQTYFSLDRNIYDSINSPKNKLRDRGEIMRSPVQLQHGSDATNGFHTLQPHDQTDGPIKRVCLTRGMHVPEHVAMHHTHDVGPDQCCSSVVQMIHAPPESVWALVRRFDNPKVYKNFIRQCRIVQGDGLHVGDLREVMVVSGLPAVSSTERLEILDEERHVISFSVVGGDHRLKNYRSVTTLHASDDEGTVVVESYIVDVPPGNTEEETLSFVDTIVRCNLQSLARSTNRQ

SEQ ID NO: 40892 - protein, 203 aa, Arabidopsis thaliana
  peptide (1)..(203): Ceres Seq. ID no. 13497437
  misc_feature (57)..(198): Pfam Name: Pathogenesis-related protein Bet v I family Pfam Description: Pathogenesis-related protein Bet v I family
  misc_feature (43)..(200): Homolog of NCBI NO: 9758515 NR Description: gene_id:MZA15.21~pir||T05073~similar to unknown
  misc_feature (45)..(196): Homolog of NCBI NO: 37537066 NR Description: unknown protein [Oryza sativa (japonica
  misc_feature (45)..(196): Homolog of NCBI NO: 15225245 NR Description: Bet v I allergen family [Arabidopsis thaliana]
  misc_feature (1)..(200): Homolog of NCBI NO: 22327625 NR Description: expressed protein [Arabidopsis thaliana]
  misc_feature (45)..(197): Homolog of NCBI NO: 15236689 NR Description: expressed protein [Arabidopsis thaliana]
  misc_feature (41)..(198): Homolog of NCBI NO: 25348262 NR Description: hypothetical protein At2g40330 [imported] -
  misc_feature (41)..(202): Homolog of NCBI NO: 34907924 NR Description: B1088C09.9 [Oryza sativa (japonica
  misc_feature (1)..(198): Homolog of NCBI NO: 18405351 NR Description: Bet v I allergen family [Arabidopsis thaliana]
  misc_feature (46)..(198): Homolog of NCBI NO: 18404709 NR Description: expressed protein [Arabidopsis thaliana]
  misc_feature (1)..(203): Homolog of NCBI NO: 15239114 NR Description: expressed protein [Arabidopsis thaliana]
MRSPVQLQHGSDATNGFHTLQPHDQTDGPIKRVCLTRGMHVPEHVAMHHTHDVGPDQCCSSVVQMIHAPPESVWALVRRFDNPKVYKNFIRQCRIVQGDGLHVGDLREVMVVSGLPAVSSTERLEILDEERHVISFSVVGGDHRLKNYRSVTTLHASDDEGTVVVESYIVDVPPGNTEEETLSFVDTIVRCNLQSLARSTNRQ

SEQ ID NO: 40893 - protein, 165 aa, Arabidopsis thaliana
  peptide (1)..(165): Ceres Seq. ID no. 13497438
  misc_feature (19)..(160): Pfam Name: Pathogenesis-related protein Bet v I family Pfam Description: Pathogenesis-related protein Bet v I family
  misc_feature (5)..(162): Homolog of NCBI NO: 9758515 NR Description: gene_id:MZA15.21~pir||T05073~similar to unknown
  misc_feature (7)..(158): Homolog of NCBI NO: 37537066 NR Description: unknown protein [Oryza sativa (japonica
  misc_feature (7)..(158): Homolog of NCBI NO: 15225245 NR Description: Bet v I allergen family [Arabidopsis thaliana]
  misc_feature (1)..(162): Homolog of NCBI NO: 22327625 NR Description: expressed protein [Arabidopsis thaliana]
  misc_feature (7)..(159): Homolog of NCBI NO: 15236689 NR Description: expressed protein [Arabidopsis thaliana]
  misc_feature (3)..(160): Homolog of NCBI NO: 25348262 NR Description: hypothetical protein At2g40330 [imported] -
  misc_feature (3)..(164): Homolog of NCBI NO: 34907924 NR Description: B1088C09.9 [Oryza sativa (japonica
  misc_feature (1)..(160): Homolog of NCBI NO: 18405351 NR Description: Bet v I allergen family [Arabidopsis thaliana]
  misc_feature (8)..(160): Homolog of NCBI NO: 18404709 NR Description: expressed protein [Arabidopsis thaliana]
  misc_feature (1)..(165): Homolog of NCBI NO: 15239114 NR Description: expressed protein [Arabidopsis thaliana]
MHVPEHVAMHHTHDVGPDQCCSSVVQMIHAPPESVWALVRRFDNPKVYKNFIRQCRIVQGDGLHVGDLREVMVVSGLPAVSSTERLEILDEERHVISFSVVGGDHRLKNYRSVTTLHASDDEGTVVVESYIVDVPPGNTEEETLSFVDTIVRCNLQSLARSTNRQ

SEQ ID NO: 40894 - DNA, 959 bp, Arabidopsis thaliana; identical to SEQ ID NO: 38103
  misc_feature (1)..(959): Ceres Seq. ID no. 13591405
  misc_feature: MA Experiment ID: 108434 Result: Up-regulated in Transcription
  misc_feature: MA Experiment 108434 PARAMETER Experiment Name: At_Root_Tips_cDNA_P Parameter: Tissue Value: Root Tips
  misc_feature: MA Experiment ID: 108461 Result: Up-regulated in Transcription
  misc_feature: MA Experiment 108461 PARAMETER Experiment Name: At_Germinating_Seeds_cDNA_P Parameter: Age (day) Value: 1 vs. 0
  misc_feature: MA Experiment 108461 PARAMETER Experiment Name: At_Germinating_Seeds_cDNA_P Parameter: Tissue Value: Germinating Seeds
  misc_feature: MA Experiment ID: 108463 Result: Up-regulated in Transcription
  misc_feature: MA Experiment 108463 PARAMETER Experiment Name: At_Germinating_Seeds_cDNA_P Parameter: Age (day) Value: 3 vs. 0
  misc_feature: MA Experiment 108463 PARAMETER Experiment Name: At_Germinating_Seeds_cDNA_P Parameter: Tissue Value: Germinating Seeds
  misc_feature: MA Experiment ID: 108464 Result: Up-regulated in Transcription
  misc_feature: MA Experiment 108464 PARAMETER Experiment Name: At_Germinating_Seeds_cDNA_P Parameter: Age (day) Value: 4 vs. 0
  misc_feature: MA Experiment 108464 PARAMETER Experiment Name: At_Germinating_Seeds_cDNA_P Parameter: Tissue Value: Germinating Seeds
  misc_feature: MA Experiment ID: 108473 Result: Down-regulated in Transcription
  misc_feature: MA Experiment 108473 PARAMETER Experiment Name: At_Drought_Flowers_cDNA_P Parameter: Timepoint (hr) Value: 7 d
  misc_feature: MA Experiment 108473 PARAMETER Experiment Name: At_Drought_Flowers_cDNA_P Parameter: Tissue Value: Flower
  misc_feature: MA Experiment 108473 PARAMETER Experiment Name: At_Drought_Flowers_cDNA_P Parameter: Treatment Value: Drought vs. No Drought
  misc_feature: MA Experiment ID: 108474 Result: Down-regulated in Transcription
  misc_feature: MA Experiment 108474 PARAMETER Experiment Name: At_Drought_Flowers_cDNA_P Parameter: Timepoint (hr) Value: null
  misc_feature: MA Experiment 108474 PARAMETER Experiment Name: At_Drought_Flowers_cDNA_P Parameter: Treatment Value: Drought vs. No Drought
  misc_feature: MA Experiment ID: 108561 Result: Down-regulated in Transcription
  misc_feature: MA Experiment 108561 PARAMETER Experiment Name: At_100uM_ABA_cDNA_P Parameter: Timepoint (hr) Value: 6
  misc_feature: MA Experiment 108561 PARAMETER Experiment Name: At_100uM_ABA_cDNA_P Parameter: Tissue Value: Aerial
  misc_feature: MA Experiment 108561 PARAMETER Experiment Name: At_100uM_ABA_cDNA_P Parameter: Treatment Value: 100uM ABA vs. No Treatment
  misc_feature: MA Experiment ID: 108574 Result: Up-regulated in Transcription
  misc_feature: MA Experiment 108574 PARAMETER Experiment Name: At_Wounding__cDNA_P Parameter: Timepoint (hr) Value: 1
  misc_feature: MA Experiment 108574 PARAMETER Experiment Name: At_Wounding__cDNA_P Parameter: Tissue Value: Aerial
  misc_feature: MA Experiment 108574 PARAMETER Experiment Name: At_Wounding__cDNA_P Parameter: Treatment Value: Wounding vs. No Wounding
  misc_feature: MA Experiment ID: 108577 Result: Down-regulated in Transcription
  misc_feature: MA Experiment 108577 PARAMETER Experiment Name: At_42deg_Heat_cDNA_P Parameter: Temperature (deg C) Value: 42 vs. 22
  misc_feature: MA Experiment 108577 PARAMETER Experiment Name: At_42deg_Heat_cDNA_P Parameter: Timepoint (hr) Value: 6
  misc_feature: MA Experiment 108577 PARAMETER Experiment Name: At_42deg_Heat_cDNA_P Parameter: Tissue Value: Aerial
  misc_feature: MA Experiment ID: 108579 Result: Up-regulated in Transcription
  misc_feature: MA Experiment 108579 PARAMETER Experiment Name: At_4deg_Cold_cDNA_P Parameter: Temperature (deg C) Value: 4 vs. 22
  misc_feature: MA Experiment 108579 PARAMETER Experiment Name: At_4deg_Cold_cDNA_P Parameter: Timepoint (hr) Value: 6
  misc_feature: MA Experiment 108579 PARAMETER Experiment Name: At_4deg_Cold_cDNA_P Parameter: Tissue Value: Aerial
  misc_feature: MA Experiment ID: 108595 Result: Down-regulated in Transcription
  misc_feature: MA Experiment 108595 PARAMETER Experiment Name: At_Ler-pi_Ovule_cDNA_P Parameter: Plant Line Value: null
  misc_feature: MA Experiment ID: 20000069 Result: Down-regulated in Transcription
  misc_feature: MA Experiment 20000069 PARAMETER Experiment Name: At_100uM_ABA_Mutants_cDNA_P Parameter: Plant Line Value: CS23
  misc_feature: MA Experiment 20000069 PARAMETER Experiment Name: At_100uM_ABA_Mutants_cDNA_P Parameter: Timepoint (hr) Value: 6
  misc_feature: MA Experiment 20000069 PARAMETER Experiment Name: At_100uM_ABA_Mutants_cDNA_P Parameter: Tissue Value: Aerial
  misc_feature: MA Experiment 20000069 PARAMETER Experiment Name: At_100uM_ABA_Mutants_cDNA_P Parameter: Treatment Value: 100uM ABA vs. No Treatment
  misc_feature: MA Experiment ID: 20000070 Result: Down-regulated in Transcription
  misc_feature: MA Experiment 20000070 PARAMETER Experiment Name: At_100uM_ABA_Mutants_cDNA_P Parameter: Plant Line Value: CS24
  misc_feature: MA Experiment 20000070 PARAMETER Experiment Name: At_100uM_ABA_Mutants_cDNA_P Parameter: Timepoint (hr) Value: 6
  misc_feature: MA Experiment 20000070 PARAMETER Experiment Name: At_100uM_ABA_Mutants_cDNA_P Parameter: Tissue Value: Aerial
  misc_feature: MA Experiment 20000070 PARAMETER Experiment Name: At_100uM_ABA_Mutants_cDNA_P Parameter: Treatment Value: 100uM ABA vs. No Treatment
  misc_feature: MA Experiment ID: 20000087 Result: Down-regulated in Transcription
  misc_feature: MA Experiment 20000087 PARAMETER Experiment Name: At_100uM_ABA_Mutants_cDNA_P Parameter: Plant Line Value: WS
  misc_feature: MA Experiment 20000087 PARAMETER Experiment Name: At_100uM_ABA_Mutants_cDNA_P Parameter: Timepoint (hr) Value: 6
  misc_feature: MA Experiment 20000087 PARAMETER Experiment Name: At_100uM_ABA_Mutants_cDNA_P Parameter: Tissue Value: Aerial
  misc_feature: MA Experiment 20000087 PARAMETER Experiment Name: At_100uM_ABA_Mutants_cDNA_P Parameter: Treatment Value: 100uM ABA vs. No Treatment
  misc_feature: MA Experiment ID: 20000180 Result: Up-regulated in Transcription
  misc_feature: MA Experiment 20000180 PARAMETER Experiment Name: At_Germinating_Seeds_P Parameter: Age (hr) Value: 24 vs. 0
  misc_feature: MA Experiment 20000180 PARAMETER Experiment Name: At_Germinating_Seeds_P Parameter: Tissue Value: Germinating Seeds
  misc_feature: MA Experiment ID: 20000185 Result: Down-regulated in Transcription
  misc_feature: MA Experiment 20000185 PARAMETER Experiment Name: At_Roots__P Parameter: Age (day) Value: 7 vs. 21
  misc_feature: MA Experiment 20000185 PARAMETER Experiment Name: At_Roots__P Parameter: Organism Value: A. thaliana
  misc_feature: MA Experiment 20000185 PARAMETER Experiment Name: At_Roots__P Parameter: Tissue Value: Roots vs. Whole Plant
  misc_feature: MA Experiment ID: 20000439 Result: Down-regulated in Transcription
  misc_feature: MA Experiment 20000439 PARAMETER Experiment Name: At_Roots__P Parameter: Age (day) Value: 14 vs. 21
  misc_feature: MA Experiment 20000439 PARAMETER Experiment Name: At_Roots__P Parameter: Organism Value: A. thaliana
  misc_feature: MA Experiment 20000439 PARAMETER Experiment Name: At_Roots__P Parameter: Tissue Value: Roots vs. Whole Plant
  misc_feature: MA Experiment ID: 20000444 Result: Up-regulated in Transcription
  misc_feature: MA Experiment 20000444 PARAMETER Experiment Name: At_100uM_NAA__P Parameter: Age (day) Value: 14
  misc_feature: MA Experiment 20000444 PARAMETER Experiment Name: At_100uM_NAA__P Parameter: Organism Value: A. thaliana
  misc_feature: MA Experiment 20000444 PARAMETER Experiment Name: At_100uM_NAA__P Parameter: Plant Line Value: WS
  misc_feature: MA Experiment 20000444 PARAMETER Experiment Name: At_100uM_NAA__P Parameter: Timepoint (hr) Value: 1
  misc_feature: MA Experiment 20000444 PARAMETER Experiment Name: At_100uM_NAA__P Parameter: Tissue Value: Aerial
  misc_feature: MA Experiment 20000444 PARAMETER Experiment Name: At_100uM_NAA__P Parameter: Treatment Value: 100uM NAA vs. No Treatment
  misc_feature: MA Experiment ID: 20000445 Result: Up-regulated in Transcription
  misc_feature: MA Experiment 20000445 PARAMETER Experiment Name: At_100uM_NAA__P Parameter: Age (day) Value: 14
  misc_feature: MA Experiment 20000445 PARAMETER Experiment Name: At_100uM_NAA__P Parameter: Organism Value: A. thaliana
  misc_feature: MA Experiment 20000445 PARAMETER Experiment Name: At_100uM_NAA__P Parameter: Plant Line Value: WS
  misc_feature: MA Experiment 20000445 PARAMETER Experiment Name: At_100uM_NAA__P Parameter: Timepoint (hr) Value: 6
  misc_feature: MA Experiment 20000445 PARAMETER Experiment Name: At_100uM_NAA__P Parameter: Tissue Value: Aerial
  misc_feature: MA Experiment 20000445 PARAMETER Experiment Name: At_100uM_NAA__P Parameter: Treatment Value: 100uM NAA vs. No Treatment
  misc_feature: MA Experiment ID: 20000453 Result: Down-regulated in Transcription
  misc_feature: MA Experiment 20000453 PARAMETER Experiment Name: At_100uM_ABA_P Parameter: Age (day) Value: 15
  misc_feature: MA Experiment 20000453 PARAMETER Experiment Name: At_100uM_ABA_P Parameter: Organism Value: A. thaliana
  misc_feature: MA Experiment 20000453 PARAMETER Experiment Name: At_100uM_ABA_P Parameter: Plant Line Value: WS
  misc_feature: MA Experiment 20000453 PARAMETER Experiment Name: At_100uM_ABA_P Parameter: Timepoint (hr) Value: 24
  misc_feature: MA Experiment 20000453 PARAMETER Experiment Name: At_100uM_ABA_P Parameter: Tissue Value: Aerial
  misc_feature: MA Experiment 20000453 PARAMETER Experiment Name: At_100uM_ABA_P Parameter: Treatment Value: 100uM ABA vs. No Treatment
  misc_feature: MA Experiment ID: 20000495 Result: Down-regulated in Transcription
  misc_feature: MA Experiment 20000495 PARAMETER Experiment Name: At_Guard_Cells_P Parameter: Harvest Date Value: 8/2/2002
  misc_feature: MA Experiment 20000495 PARAMETER Experiment Name: At_Guard_Cells_P Parameter: Organism Value: A. thaliana
  misc_feature: MA Experiment 20000495 PARAMETER Experiment Name: At_Guard_Cells_P Parameter: Tissue Value: Guard Cells vs. Leaves
  misc_feature: MA Experiment ID: 20000496 Result: Down-regulated in Transcription
  misc_feature: MA Experiment 20000496 PARAMETER Experiment Name: At_Guard_Cells_P Parameter: Harvest Date Value: 7/19/2002
  misc_feature: MA Experiment 20000496 PARAMETER Experiment Name: At_Guard_Cells_P Parameter: Organism Value: Canola
  misc_feature: MA Experiment 20000496 PARAMETER Experiment Name: At_Guard_Cells_P Parameter: Tissue Value: Guard Cells vs. Leaves
  misc_feature: MA Experiment ID: 20000606 Result: Up-regulated in Transcription
  misc_feature: MA Experiment 20000606 PARAMETER Experiment Name: At_CS8548_Mutant_P Parameter: Age (day) Value: 14
  misc_feature: MA Experiment 20000606 PARAMETER Experiment Name: At_CS8548_Mutant_P Parameter: Plant Line Value: CS8548 vs. wt
  misc_feature: MA Experiment 20000606 PARAMETER Experiment Name: At_CS8548_Mutant_P Parameter: Tissue Value: Whole Plant
  misc_feature: MA Experiment ID: 20001248 Result: Up-regulated in Transcription
  misc_feature: MA Experiment 20001248 PARAMETER Experiment Name: At_Far-red-induction_P Parameter: Age (day) Value: 7
  misc_feature: MA Experiment 20001248 PARAMETER Experiment Name: At_Far-red-induction_P Parameter: Light Value: Far-red vs. White
  misc_feature: MA Experiment 20001248 PARAMETER Experiment Name: At_Far-red-induction_P Parameter: Organism Value: A. thaliana
  misc_feature: MA Experiment 20001248 PARAMETER Experiment Name: At_Far-red-induction_P Parameter: Plant Line Value: Columbia
  misc_feature: MA Experiment 20001248 PARAMETER Experiment Name: At_Far-red-induction_P Parameter: Timepoint (hr) Value: 4
  misc_feature: MA Experiment 20001248 PARAMETER Experiment Name: At_Far-red-induction_P Parameter: Tissue Value: Whole Plant
  misc_feature: MA Experiment ID: 20001450 Result: Up-regulated in Transcription
  misc_feature: MA Experiment 20001450 PARAMETER Experiment Name: At_Far-red-induction_P Parameter: Age (day) Value: 7
  misc_feature: MA Experiment 20001450 PARAMETER Experiment Name: At_Far-red-induction_P Parameter: Light Value: Far-red vs. White
  misc_feature: MA Experiment 20001450 PARAMETER Experiment Name: At_Far-red-induction_P Parameter: Organism Value: A. thaliana
  misc_feature: MA Experiment 20001450 PARAMETER Experiment Name: At_Far-red-induction_P Parameter: Plant Line Value: Columbia
  misc_feature: MA Experiment 20001450 PARAMETER Experiment Name: At_Far-red-induction_P Parameter: Timepoint (hr) Value: 8
  misc_feature: MA Experiment 20001450 PARAMETER Experiment Name: At_Far-red-induction_P Parameter: Tissue Value: Whole Plant
  misc_feature: MA Experiment ID: 20001554 Result: Down-regulated in Transcription
  misc_feature: MA Experiment 20001554 PARAMETER Experiment Name: At_Drought_Soil_Dry_P Parameter: Age (day) Value: 21
  misc_feature: MA Experiment 20001554 PARAMETER Experiment Name: At_Drought_Soil_Dry_P Parameter: Organism Value: A. thaliana
  misc_feature: MA Experiment 20001554 PARAMETER Experiment Name: At_Drought_Soil_Dry_P Parameter: Plant Line Value: WS
  misc_feature: MA Experiment 20001554 PARAMETER Experiment Name: At_Drought_Soil_Dry_P Parameter: Post Timepoint (hr) Value: None
  misc_feature: MA Experiment 20001554 PARAMETER Experiment Name: At_Drought_Soil_Dry_P Parameter: Post-Treatment Value: None
  misc_feature: MA Experiment 20001554 PARAMETER Experiment Name: At_Drought_Soil_Dry_P Parameter: Timepoint (day) Value: 7
  misc_feature: MA Experiment 20001554 PARAMETER Experiment Name: At_Drought_Soil_Dry_P Parameter: Treatment Value: Drought vs. No Drought
  misc_feature: MA Experiment ID: 20001555 Result: Down-regulated in Transcription
  misc_feature: MA Experiment 20001555 PARAMETER Experiment Name: At_Drought_Soil_Dry_P Parameter: Age (day) Value: 24
  misc_feature: MA Experiment 20001555 PARAMETER Experiment Name: At_Drought_Soil_Dry_P Parameter: Organism Value: A. thaliana
  misc_feature: MA Experiment 20001555 PARAMETER Experiment Name: At_Drought_Soil_Dry_P Parameter: Plant Line Value: WS
  misc_feature: MA Experiment 20001555 PARAMETER Experiment Name: At_Drought_Soil_Dry_P Parameter: Post Timepoint (hr) Value: None
  misc_feature: MA Experiment 20001555 PARAMETER Experiment Name: At_Drought_Soil_Dry_P Parameter: Post-Treatment Value: None
  misc_feature: MA Experiment 20001555 PARAMETER Experiment Name: At_Drought_Soil_Dry_P Parameter: Timepoint (day) Value: 10
  misc_feature: MA Experiment 20001555 PARAMETER Experiment Name: At_Drought_Soil_Dry_P Parameter: Treatment Value: Drought vs. No Drought
  misc_feature: MA Experiment ID: 20001556 Result: Down-regulated in Transcription
  misc_feature: MA Experiment 20001556 PARAMETER Experiment Name: At_Drought_Soil_Dry_P Parameter: Age (day) Value: 26
  misc_feature: MA Experiment 20001556 PARAMETER Experiment Name: At_Drought_Soil_Dry_P Parameter: Organism Value: A. thaliana
  misc_feature: MA Experiment 20001556 PARAMETER Experiment Name: At_Drought_Soil_Dry_P Parameter: Plant Line Value: WS
  misc_feature: MA Experiment 20001556 PARAMETER Experiment Name: At_Drought_Soil_Dry_P Parameter: Post Timepoint (hr) Value: None
  misc_feature: MA Experiment 20001556 PARAMETER Experiment Name: At_Drought_Soil_Dry_P Parameter: Post-Treatment Value: None
  misc_feature: MA Experiment 20001556 PARAMETER Experiment Name: At_Drought_Soil_Dry_P Parameter: Timepoint (day) Value: 12
  misc_feature: MA Experiment 20001556 PARAMETER Experiment Name: At_Drought_Soil_Dry_P Parameter: Treatment Value: Drought vs. No Drought
  misc_feature: MA Experiment ID: 20001558 Result: Down-regulated in Transcription
  misc_feature: MA Experiment 20001558 PARAMETER Experiment Name: At_Drought_Soil_Dry_P Parameter: Age (day) Value: 27
  misc_feature: MA Experiment 20001558 PARAMETER Experiment Name: At_Drought_Soil_Dry_P Parameter: Organism Value: A. thaliana
  misc_feature: MA Experiment 20001558 PARAMETER Experiment Name: At_Drought_Soil_Dry_P Parameter: Plant Line Value: WS
  misc_feature: MA Experiment 20001558 PARAMETER Experiment Name: At_Drought_Soil_Dry_P Parameter: Post Timepoint (hr) Value: 6
  misc_feature: MA Experiment 20001558 PARAMETER Experiment Name: At_Drought_Soil_Dry_P Parameter: Post-Treatment Value: Re-Water vs. No Drought
  misc_feature: MA Experiment 20001558 PARAMETER Experiment Name: At_Drought_Soil_Dry_P Parameter: Timepoint (day) Value: 13
  misc_feature: MA Experiment 20001558 PARAMETER Experiment Name: At_Drought_Soil_Dry_P Parameter: Treatment Value: Drought vs. No Drought
  misc_feature: MA Experiment ID: 20001768 Result: Up-regulated in Transcription
  misc_feature: MA Experiment 20001768 PARAMETER Experiment Name: At_Far-red-enriched-adult_P Parameter: Age (day) Value: 28
  misc_feature: MA Experiment 20001768 PARAMETER Experiment Name: At_Far-red-enriched-adult_P Parameter: Light Value: Far-red enriched vs. White
  misc_feature: MA Experiment 20001768 PARAMETER Experiment Name: At_Far-red-enriched-adult_P Parameter: Organism Value: A. thaliana
  misc_feature: MA Experiment 20001768 PARAMETER Experiment Name: At_Far-red-enriched-adult_P Parameter: Plant Line Value: Columbia
  misc_feature: MA Experiment 20001768 PARAMETER Experiment Name: At_Far-red-enriched-adult_P Parameter: Timepoint (hr) Value: 1
  misc_feature: MA Experiment 20001768 PARAMETER Experiment Name: At_Far-red-enriched-adult_P Parameter: Tissue Value: Aerial
  misc_feature: MA Experiment ID: 20001772 Result: Up-regulated in Transcription
  misc_feature: MA Experiment 20001772 PARAMETER Experiment Name: At_Far-red-enriched-adult_P Parameter: Age (day) Value: 29
  misc_feature: MA Experiment 20001772 PARAMETER Experiment Name: At_Far-red-enriched-adult_P Parameter: Light Value: Far-red enriched vs. White
  misc_feature: MA Experiment 20001772 PARAMETER Experiment Name: At_Far-red-enriched-adult_P Parameter: Organism Value: A. thaliana
  misc_feature: MA Experiment 20001772 PARAMETER Experiment Name: At_Far-red-enriched-adult_P Parameter: Plant Line Value: Columbia
  misc_feature: MA Experiment 20001772 PARAMETER Experiment Name: At_Far-red-enriched-adult_P Parameter: Timepoint (hr) Value: 24
  misc_feature: MA Experiment 20001772 PARAMETER Experiment Name: At_Far-red-enriched-adult_P Parameter: Tissue Value: Aerial
  misc_feature: MA Experiment ID: 20001773 Result: Up-regulated in Transcription
  misc_feature: MA Experiment 20001773 PARAMETER Experiment Name: At_Far-red-enriched-adult_P Parameter: Age (day) Value: 30
  misc_feature: MA Experiment 20001773 PARAMETER Experiment Name: At_Far-red-enriched-adult_P Parameter: Light Value: Far-red enriched vs. White
  misc_feature: MA Experiment 20001773 PARAMETER Experiment Name: At_Far-red-enriched-adult_P Parameter: Organism Value: A. thaliana
  misc_feature: MA Experiment 20001773 PARAMETER Experiment Name: At_Far-red-enriched-adult_P Parameter: Plant Line Value: Columbia
  misc_feature: MA Experiment 20001773 PARAMETER Experiment Name: At_Far-red-enriched-adult_P Parameter: Timepoint (hr) Value: 48
  misc_feature: MA Experiment 20001773 PARAMETER Experiment Name: At_Far-red-enriched-adult_P Parameter: Tissue Value: Aerial
  misc_feature: MA Experiment ID: 20001904 Result: Down-regulated in Transcription
  misc_feature: MA Experiment 20001904 PARAMETER Experiment Name: At_Drought_Reproduction_P Parameter: Age (day) Value: 37
  misc_feature: MA Experiment 20001904 PARAMETER Experiment Name: At_Drought_Reproduction_P Parameter: Organism Value: A. thaliana
  misc_feature: MA Experiment 20001904 PARAMETER Experiment Name: At_Drought_Reproduction_P Parameter: Plant Line Value: WS
  misc_feature: MA Experiment 20001904 PARAMETER Experiment Name: At_Drought_Reproduction_P Parameter: Timepoint (day) Value: 7
  misc_feature: MA Experiment 20001904 PARAMETER Experiment Name: At_Drought_Reproduction_P Parameter: Tissue Value: Rosettes
  misc_feature: MA Experiment 20001904 PARAMETER Experiment Name: At_Drought_Reproduction_P Parameter: Treatment Value: Drought vs. No Drought
  misc_feature: MA Experiment ID: 20001905 Result: Down-regulated in Transcription
  misc_feature: MA Experiment 20001905 PARAMETER Experiment Name: At_Drought_Reproduction_P Parameter: Age (day) Value: 40
  misc_feature: MA Experiment 20001905 PARAMETER Experiment Name: At_Drought_Reproduction_P Parameter: Organism Value: A. thaliana
  misc_feature: MA Experiment 20001905 PARAMETER Experiment Name: At_Drought_Reproduction_P Parameter: Plant Line Value: WS
  misc_feature: MA Experiment 20001905 PARAMETER Experiment Name: At_Drought_Reproduction_P Parameter: Timepoint (day) Value: 10
  misc_feature: MA Experiment 20001905 PARAMETER Experiment Name: At_Drought_Reproduction_P Parameter: Tissue Value: Rosettes
  misc_feature: MA Experiment 20001905 PARAMETER Experiment Name: At_Drought_Reproduction_P Parameter: Treatment Value: Drought vs. No Drought
  misc_feature: MA Experiment ID: 20001906 Result: Down-regulated in Transcription
  misc_feature: MA Experiment 20001906 PARAMETER Experiment Name: At_Drought_Reproduction_P Parameter: Age (day) Value: 35
  misc_feature: MA Experiment 20001906 PARAMETER Experiment Name: At_Drought_Reproduction_P Parameter: Organism Value: A. thaliana
  misc_feature: MA Experiment 20001906 PARAMETER Experiment Name: At_Drought_Reproduction_P Parameter: Plant Line Value: WS
  misc_feature: MA Experiment 20001906 PARAMETER Experiment Name: At_Drought_Reproduction_P Parameter: Timepoint (day) Value: 5
  misc_feature: MA Experiment 20001906 PARAMETER Experiment Name: At_Drought_Reproduction_P Parameter: Tissue Value: Siliques
  misc_feature: MA Experiment 20001906 PARAMETER Experiment Name: At_Drought_Reproduction_P Parameter: Treatment Value: Drought vs. No Drought
  misc_feature: MA Experiment ID: 20001907 Result: Down-regulated in Transcription
  misc_feature: MA Experiment 20001907 PARAMETER Experiment Name: At_Drought_Reproduction_P Parameter: Age (day) Value: 37
  misc_feature: MA Experiment 20001907 PARAMETER Experiment Name: At_Drought_Reproduction_P Parameter: Organism Value: A. thaliana
  misc_feature: MA Experiment 20001907 PARAMETER Experiment Name: At_Drought_Reproduction_P Parameter: Plant Line Value: WS
  misc_feature: MA Experiment 20001907 PARAMETER Experiment Name: At_Drought_Reproduction_P Parameter: Timepoint (day) Value: 7
  misc_feature: MA Experiment 20001907 PARAMETER Experiment Name: At_Drought_Reproduction_P Parameter: Tissue Value: Siliques
  misc_feature: MA Experiment 20001907 PARAMETER Experiment Name: At_Drought_Reproduction_P Parameter: Treatment Value: Drought vs. No Drought
  misc_feature: MA Experiment ID: 20001910 Result: Down-regulated in Transcription
  misc_feature: MA Experiment 20001910 PARAMETER Experiment Name: At_Drought_Reproduction_P Parameter: Age (day) Value: 37
  misc_feature: MA Experiment 20001910 PARAMETER Experiment Name: At_Drought_Reproduction_P Parameter: Organism Value: A. thaliana
  misc_feature: MA Experiment 20001910 PARAMETER Experiment Name: At_Drought_Reproduction_P Parameter: Plant Line Value: WS
  misc_feature: MA Experiment 20001910 PARAMETER Experiment Name: At_Drought_Reproduction_P Parameter: Timepoint (day) Value: 7
  misc_feature: MA Experiment 20001910 PARAMETER Experiment Name: At_Drought_Reproduction_P Parameter: Tissue Value: Flowers
  misc_feature: MA Experiment 20001910 PARAMETER Experiment Name: At_Drought_Reproduction_P Parameter: Treatment Value: Drought vs. No Drought
  misc_feature: MA Experiment ID: 20001911 Result: Down-regulated in Transcription
  misc_feature: MA Experiment 20001911 PARAMETER Experiment Name: At_Drought_Reproduction_P Parameter: Age (day) Value: 40
  misc_feature: MA Experiment 20001911 PARAMETER Experiment Name: At_Drought_Reproduction_P Parameter: Organism Value: A. thaliana
  misc_feature: MA Experiment 20001911 PARAMETER Experiment Name: At_Drought_Reproduction_P Parameter: Plant Line Value: WS
  misc_feature: MA Experiment 20001911 PARAMETER Experiment Name: At_Drought_Reproduction_P Parameter: Timepoint (day) Value: 10
  misc_feature: MA Experiment 20001911 PARAMETER Experiment Name: At_Drought_Reproduction_P Parameter: Tissue Value: Flowers
  misc_feature: MA Experiment 20001911 PARAMETER Experiment Name: At_Drought_Reproduction_P Parameter: Treatment Value: Drought vs. No Drought
  misc_feature: Phenotype: ROSETTE LEAVES Curled-Curled 1
  misc_feature: Phenotype: CAULINE LEAVES Curled-Curled 5
  misc_feature: Phenotype: WHOLE PLANT Color-Dark Green
  misc_feature: Phenotype: INFLORESCENCE Flowering Time-Late Flowering
  misc_feature: Phenotype: INFLORESCENCE Height-Short
  misc_feature: Phenotype: INFLORESCENCE Strength-Strong
  misc_feature: Phenotype: INFLORESCENCE Other
  misc_feature: Phenotype: ROSETTE LEAVES Other
  misc_feature: Phenotype: WHOLE PLANT Color-Dark Green
  misc_feature: Phenotype: INFLORESCENCE Flowering Time-Late Flowering
  misc_feature: Phenotype: INFLORESCENCE Height-Short
  misc_feature: Phenotype: INFLORESCENCE Height-Short
  misc_feature: Phenotype: INFLORESCENCE Strength-Strong
  misc_feature: Phenotype: INFLORESCENCE Other
  misc_feature: Phenotype: ROSETTE LEAVES Curled-Curled 5
  misc_feature: Phenotype: WHOLE PLANT Size-Small

SEQ ID NO: 40895 - protein, 197 aa, Arabidopsis thaliana; identical to SEQ ID NO: 38104
  peptide (1)..(197): Ceres Seq. ID no. 13591406
  misc_feature (6)..(191): Pfam Name: AUX/IAA family Pfam Description: AUX/IAA family
  misc_feature (6)..(191): Pfam Name: AUX/IAA family Pfam Description: AUX/IAA family
  misc_feature (46)..(194): Homolog of NCBI NO: 1352058 NR Description: AUXIN-INDUCED PROTEIN IAA6
  misc_feature (43)..(194): Homolog of NCBI NO: 11131101 NR Description: Auxin-induced protein 22C (Indole-3-acetic acid
  misc_feature (1)..(194): Homolog of NCBI NO: 416640 NR Description: Auxin-induced protein 22A (Indole-3-acetic acid
  misc_feature (1)..(191): Homolog of NCBI NO: 1363486 NR Description: auxin-induced protein IAA6 - Arabidopsis thaliana
  misc_feature (1)..(191): Homolog of NCBI NO: 21553490 NR Description: putative IAA6 protein [Arabidopsis thaliana]
  misc_feature (46)..(194): Homolog of NCBI NO: 1352058 NR Description: AUXIN-INDUCED PROTEIN IAA6
  misc_feature (1)..(194): Homolog of NCBI NO: 416640 NR Description: Auxin-induced protein 22A (Indole-3-acetic acid
  misc_feature (1)..(191): Homolog of NCBI NO: 21553490 NR Description: putative IAA6 protein [Arabidopsis thaliana]
  misc_feature (1)..(197): Homolog of NCBI NO: 15232612 NR Description: auxin-responsive protein IAA19 (Indoleacetic
  misc_feature (1)..(197): Homolog of NCBI NO: 21618019 NR Description: early auxin-induced protein IAA19 [Arabidopsis
  misc_feature (53)..(197): Homolog of NCBI NO: 2618727 NR Description: IAA19 [Arabidopsis thaliana]
  misc_feature (1)..(194): Homolog of NCBI NO: 114733 NR Description: AUXIN-INDUCED PROTEIN AUX22
  misc_feature (1)..(191): Homolog of NCBI NO: 15219101 NR Description: auxin-responsive protein IAA6 (Indoleacetic
  misc_feature (1)..(191): Homolog of NCBI NO: 1363486 NR Description: auxin-induced protein IAA6 - Arabidopsis thaliana
  misc_feature (43)..(194): Homolog of NCBI NO: 11131101 NR Description: Auxin-induced protein 22C (Indole-3-acetic acid
  misc_feature (1)..(191): Homolog of NCBI NO: 15219101 NR Description: auxin-responsive protein IAA6 (Indoleacetic
  misc_feature (1)..(194): Homolog of NCBI NO: 114733 NR Description: AUXIN-INDUCED PROTEIN AUX22
  misc_feature (53)..(197): Homolog of NCBI NO: 2618727 NR Description: IAA19 [Arabidopsis thaliana]
  misc_feature (1)..(197): Homolog of NCBI NO: 21618019 NR Description: early auxin-induced protein IAA19 [Arabidopsis
  misc_feature (1)..(197): Homolog of NCBI NO: 15232612 NR Description: auxin-responsive protein IAA19 (Indoleacetic

SEQ ID NO: 40896 - protein, 172 aa, Arabidopsis thaliana; identical to SEQ ID NO: 38105
  peptide (1)..(172): Ceres Seq. ID no. 13591407
  misc_feature (1)..(166): Pfam Name: AUX/IAA family Pfam Description: AUX/IAA family
  misc_feature (1)..(166): Pfam Name: AUX/IAA family Pfam Description: AUX/IAA family
  misc_feature (21)..(169): Homolog of NCBI NO: 1352058 NR Description: AUXIN-INDUCED PROTEIN IAA6
  misc_feature (18)..(169): Homolog of NCBI NO: 11131101 NR Description: Auxin-induced protein 22C (Indole-3-acetic acid
  misc_feature (1)..(169): Homolog of NCBI NO: 416640 NR Description: Auxin-induced protein 22A (Indole-3-acetic acid
  misc_feature (1)..(166): Homolog of NCBI NO: 1363486 NR Description: auxin-induced protein IAA6 - Arabidopsis thaliana
  misc_feature (1)..(166): Homolog of NCBI NO: 21553490 NR Description: putative IAA6 protein [Arabidopsis thaliana]
  misc_feature (21)..(169): Homolog of NCBI NO: 1352058 NR Description: AUXIN-INDUCED PROTEIN IAA6
  misc_feature (1)..(169): Homolog of NCBI NO: 416640 NR Description: Auxin-induced protein 22A (Indole-3-acetic acid
  misc_feature (1)..(166): Homolog of NCBI NO: 21553490 NR Description: putative IAA6 protein [Arabidopsis thaliana]
  misc_feature (1)..(172): Homolog of NCBI NO: 15232612 NR Description: auxin-responsive protein IAA19 (Indoleacetic
  misc_feature (1)..(172): Homolog of NCBI NO: 21618019 NR Description: early auxin-induced protein IAA19 [Arabidopsis
  misc_feature (28)..(172): Homolog of NCBI NO: 2618727 NR Description: IAA19 [Arabidopsis thaliana]
  misc_feature (1)..(169): Homolog of NCBI NO: 114733 NR Description: AUXIN-INDUCED PROTEIN AUX22
  misc_feature (1)..(166): Homolog of NCBI NO: 15219101 NR Description: auxin-responsive protein IAA6 (Indoleacetic
  misc_feature (1)..(166): Homolog of NCBI NO: 1363486 NR Description: auxin-induced protein IAA6 - Arabidopsis thaliana
  misc_feature (18)..(169): Homolog of NCBI NO: 11131101 NR Description: Auxin-induced protein 22C (Indole-3-acetic acid
  misc_feature (1)..(166): Homolog of NCBI NO: 15219101 NR Description: auxin-responsive protein IAA6 (Indoleacetic
  misc_feature (1)..(169): Homolog of NCBI NO: 114733 NR Description: AUXIN-INDUCED PROTEIN AUX22
  misc_feature (28)..(172): Homolog of NCBI NO: 2618727 NR Description: IAA19 [Arabidopsis thaliana]
  misc_feature (1)..(172): Homolog of NCBI NO: 21618019 NR Description: early auxin-induced protein IAA19 [Arabidopsis
  misc_feature (1)..(172): Homolog of NCBI NO: 15232612 NR Description: auxin-responsive protein IAA19 (Indoleacetic

SEQ ID NO: 40897 - protein, 171 aa, Arabidopsis thaliana; identical to SEQ ID NO: 38106
  peptide (1)..(171): Ceres Seq. ID no. 13591408
  misc_feature (1)..(165): Pfam Name: AUX/IAA family Pfam Description: AUX/IAA family
  misc_feature (1)..(165): Pfam Name: AUX/IAA family Pfam Description: AUX/IAA family
  misc_feature (20)..(168): Homolog of NCBI NO: 1352058 NR Description: AUXIN-INDUCED PROTEIN IAA6
  misc_feature (17)..(168): Homolog of NCBI NO: 11131101 NR Description: Auxin-induced protein 22C (Indole-3-acetic acid
  misc_feature (1)..(168): Homolog of NCBI NO: 416640 NR Description: Auxin-induced protein 22A (Indole-3-acetic acid
  misc_feature (1)..(165): Homolog of NCBI NO: 1363486 NR Description: auxin-induced protein IAA6 - Arabidopsis thaliana
  misc_feature (1)..(165): Homolog of NCBI NO: 21553490 NR Description: putative IAA6 protein [Arabidopsis thaliana]
  misc_feature (20)..(168): Homolog of NCBI NO: 1352058 NR Description: AUXIN-INDUCED PROTEIN IAA6
  misc_feature (1)..(168): Homolog of NCBI NO: 416640 NR Description: Auxin-induced protein 22A (Indole-3-acetic acid
  misc_feature (1)..(165): Homolog of NCBI NO: 21553490 NR Description: putative IAA6 protein [Arabidopsis thaliana]
  misc_feature (1)..(171): Homolog of NCBI NO: 15232612 NR Description: auxin-responsive protein IAA19 (Indoleacetic
  misc_feature (1)..(171): Homolog of NCBI NO: 21618019 NR Description: early auxin-induced protein IAA19 [Arabidopsis
  misc_feature (27)..(171): Homolog of NCBI NO: 2618727 NR Description: IAA19 [Arabidopsis thaliana]
  misc_feature (1)..(168): Homolog of NCBI NO: 114733 NR Description: AUXIN-INDUCED PROTEIN AUX22
  misc_feature (1)..(165): Homolog of NCBI NO: 15219101 NR Description: auxin-responsive protein IAA6 (Indoleacetic
  misc_feature (1)..(165): Homolog of NCBI NO: 1363486 NR Description: auxin-induced protein IAA6 - Arabidopsis thaliana
  misc_feature (17)..(168): Homolog of NCBI NO: 11131101 NR Description: Auxin-induced protein 22C (Indole-3-acetic acid
  misc_feature (1)..(165): Homolog of NCBI NO: 15219101 NR Description: auxin-responsive protein IAA6 (Indoleacetic
  misc_feature (1)..(168): Homolog of NCBI NO: 114733 NR Description: AUXIN-INDUCED PROTEIN AUX22
  misc_feature (27)..(171): Homolog of NCBI NO: 2618727 NR Description: IAA19 [Arabidopsis thaliana]
  misc_feature (1)..(171): Homolog of NCBI NO: 21618019 NR Description: early auxin-induced protein IAA19 [Arabidopsis
  misc_feature (1)..(171): Homolog of NCBI NO: 15232612 NR Description: auxin-responsive protein IAA19 (Indoleacetic

SEQ ID NO: 40898 - DNA, 1390 bp, Arabidopsis thaliana
  misc_feature (1)..(1390): Ceres Seq. ID no. 12328010
  misc_feature: MA Experiment ID: 20000184 Result: Down-regulated in Transcription
  misc_feature: MA Experiment 20000184 PARAMETER Experiment Name: At_Shoots__P Parameter: Age (day) Value: 7
  misc_feature: MA Experiment 20000184 PARAMETER Experiment Name: At_Shoots__P Parameter: Tissue Value: Shoots vs. Whole Plant
  misc_feature: MA Experiment ID: 20000794 Result: Up-regulated in Transcription
  misc_feature: MA Experiment 20000794 PARAMETER Experiment Name: At_Petals_P Parameter: Age (day) Value: 23-25 days
  misc_feature: MA Experiment 20000794 PARAMETER Experiment Name: At_Petals_P Parameter: Plant Line Value: WS
  misc_feature: MA Experiment 20000794 PARAMETER Experiment Name: At_Petals_P Parameter: Tissue Value: Petals vs. Whole plant
agtttactgactacagagaggatttgaactgagaatcgaagaaagtctctgagggttcatctatggaaccggttataatcggtgcgctgattttggatgttcacgccaagccttcgaccacaccaatctcaggaaccactgtccctggccaggtcttatttgcgccgggtggtgtagcaagaaatgtagctgattgcatcttcaagcttggaattacaccttttatgattggtactttagggcttgatggtccagccaatgttttattgaaagagtggaagctctctatgaaaggaatcttgagacgtgaagacattagtactcccattgtgtcccttgtatatgacactaatggagaagttgccgctggtgttgctggcgtggatgccgttgaaaattttttaacacctgagtggatccagcggtttgaatacaacataagctctgctcgtcttcttatggtagatgcaaatcttagctctcttgctttggaagcatcttgcaaattggctgcagagtccagtgttcctgtatggtttgagccagtgtcagtcactaagtcacagaggatcgcctcaattgccaagtatgtaacaatagtgtccccaaaccaagacgaactcatagcaatggcaaacgctctctgcgccaagaatttgtttcatccctttagatcagacgaaaataagctttctattgaagatatgttccgtgcactaaagccagctattttggttctccttaaaaatggtgttaaagtagttatcgtaactctcggctccaatggagctctcctatgttccaagggaaacccgaaaaaggctctgaacatagacagaaagtttctaagaagtggagaggtcttcaaaagagtacagtctgtatgttcaccaaaccggttttctgaattgggatcgaatcgcagcccgagtcttttcgcaatgcatttcccaaccatcccagccaaagtcaagaagctgactggtgcaggtgattgtctggtaggcgggacagttgcatcgctaagcgatgggttagatctaatccagagtttagcggttggcattgcgtcggcgaaagcagcggttgagtcagatgataatgtgcctcctgagttcaagttggatcttatatctggtgatgcagagttggtatacaatggcgctaagatgttgatggttcaccagtcgatgctatgaactgtgaaggagtttagtggtttacctagtagtctagtcttatcaaataaagtattgctagcaaaaaaaaataatgtccaaaatattccctagtgtttagaaatcaatttagagattttatttttggtgcgcaagggtacaactaaatagttgcaagggtttttcaaataaagtaagggttacagttgttc

SEQ ID NO: 40899 - protein, 378 aa, Arabidopsis thaliana
  peptide (1)..(378): Ceres Seq. ID no. 12328011
  misc_feature (1)..(116): Pfam Name: pfkB family carbohydrate kinase Pfam Description: pfkB family carbohydrate kinase
  misc_feature (1)..(250): Homolog of NCBI NO: 21064807 NR Description: RH71315p [Drosophila melanogaster]
  misc_feature (307)..(350): Homolog of NCBI NO: 20806843 NR Description: Sugar kinases, ribokinase family
  misc_feature (5)..(248): Homolog of NCBI NO: 20806843 NR Description: Sugar kinases, ribokinase family
  misc_feature (279)..(351): Homolog of NCBI NO: 15807303 NR Description: carbohydrate kinase, PfkB family [Deinococcus
  misc_feature (4)..(190): Homolog of NCBI NO: 15807303 NR Description: carbohydrate kinase, PfkB family [Deinococcus
  misc_feature (22)..(367): Homolog of NCBI NO: 13699076 NR Description: TMV response-related gene product [Nicotiana
  misc_feature (1)..(116): Homolog of NCBI NO: 25405294 NR Description: hypothetical protein F13F21.22 [imported] -
  misc_feature (170)..(359): Homolog of NCBI NO: 25405294 NR Description: hypothetical protein F13F21.22 [imported] -
  misc_feature (1)..(378): Homolog of NCBI NO: 21536998 NR Description: unknown [Arabidopsis thaliana]
  misc_feature (1)..(378): Homolog of NCBI NO: 18402606 NR Description: expressed protein
MEPVIIGALILDVHAKPSTTPISGTTVPGQVLFAPGGVARNVADCIFKLGITPFMIGTLGLDGPANVLLKEWKLSMKGILRREDISTPIVSLVYDTNGEVAAGVAGVDAVENFLTPEWIQRFEYNISSARLLMVDANLSSLALEASCKLAAESSVPVWFEPVSVTKSQRIASIAKYVTIVSPNQDELIAMANALCAKNLFHPFRSDENKLSIEDMFRALKPAILVLLKNGVKVVIVTLGSNGALLCSKGNPKKALNIDRKFLRSGEVFKRVQSVCSPNRFSELGSNRSPSLFAMHFPTIPAKVKKLTGAGDCLVGGTVASLSDGLDLIQSLAVGIASAKAAVESDDNVPPEFKLDLISGDAELVYNGAKMLMVHQSML

SEQ ID NO: 40900 - protein, 324 aa, Arabidopsis thaliana
  peptide (1)..(324): Ceres Seq. ID no. 12328012
  misc_feature (1)..(62): Pfam Name: pfkB family carbohydrate kinase Pfam Description: pfkB family carbohydrate kinase
  misc_feature (1)..(196): Homolog of NCBI NO: 21064807 NR Description: RH71315p [Drosophila melanogaster]
  misc_feature (253)..(296): Homolog of NCBI NO: 20806843 NR Description: Sugar kinases, ribokinase family
  misc_feature (1)..(194): Homolog of NCBI NO: 20806843 NR Description: Sugar kinases, ribokinase family
  misc_feature (225)..(297): Homolog of NCBI NO: 15807303 NR Description: carbohydrate kinase, PfkB family [Deinococcus
  misc_feature (1)..(136): Homolog of NCBI NO: 15807303 NR Description: carbohydrate kinase, PfkB family [Deinococcus
  misc_feature (1)..(313): Homolog of NCBI NO: 13699076 NR Description: TMV response-related gene product [Nicotiana
  misc_feature (1)..(62): Homolog of NCBI NO: 25405294 NR Description: hypothetical protein F13F21.22 [imported] -
  misc_feature (116)..(305): Homolog of NCBI NO: 25405294 NR Description: hypothetical protein F13F21.22 [imported] -
  misc_feature (1)..(324): Homolog of NCBI NO: 21536998 NR Description: unknown [Arabidopsis thaliana]
  misc_feature (1)..(324): Homolog of NCBI NO: 18402606 NR Description: expressed protein
MIGTLGLDGPANVLLKEWKLSMKGILRREDISTPIVSLVYDTNGEVAAGVAGVDAVENFLTPEWIQRFEYNISSARLLMVDANLSSLALEASCKLAAESSVPVWFEPVSVTKSQRIASIAKYVTIVSPNQDELIAMANALCAKNLFHPFRSDENKLSIEDMFRALKPAILVLLKNGVKVVIVTLGSNGALLCSKGNPKKALNIDRKFLRSGEVFKRVQSVCSPNRFSELGSNRSPSLFAMHFPTIPAKVKKLTGAGDCLVGGTVASLSDGLDLIQSLAVGIASAKAAVESDDNVPPEFKLDLISGDAELVYNGAKMLMVHQSML

SEQ ID NO: 40901 - protein, 303 aa, Arabidopsis thaliana
  peptide (1)..(303): Ceres Seq. ID no. 12328013
  misc_feature (95)..(276): Pfam Name: pfkB family carbohydrate kinase Pfam Description: pfkB family carbohydrate kinase
  misc_feature (1)..(175): Homolog of NCBI NO: 21064807 NR Description: RH71315p [Drosophila melanogaster]
  misc_feature (232)..(275): Homolog of NCBI NO: 20806843 NR Description: Sugar kinases, ribokinase family
  misc_feature (1)..(173): Homolog of NCBI NO: 20806843 NR Description: Sugar kinases, ribokinase family
  misc_feature (204)..(276): Homolog of NCBI NO: 15807303 NR Description: carbohydrate kinase, PfkB family [Deinococcus
  misc_feature (1)..(115): Homolog of NCBI NO: 15807303 NR Description: carbohydrate kinase, PfkB family [Deinococcus
  misc_feature (1)..(292): Homolog of NCBI NO: 13699076 NR Description: TMV response-related gene product [Nicotiana
  misc_feature (1)..(41): Homolog of NCBI NO: 25405294 NR Description: hypothetical protein F13F21.22 [imported] -
  misc_feature (95)..(284): Homolog of NCBI NO: 25405294 NR Description: hypothetical protein F13F21.22 [imported] -
  misc_feature (1)..(303): Homolog of NCBI NO: 21536998 NR Description: unknown [Arabidopsis thaliana]
  misc_feature (1)..(303): Homolog of NCBI NO: 18402606 NR Description: expressed protein
MKGILRREDISTPIVSLVYDTNGEVAAGVAGVDAVENFLTPEWIQRFEYNISSARLLMVDANLSSLALEASCKLAAESSVPVWFEPVSVTKSQRIASIAKYVTIVSPNQDELIAMANALCAKNLFHPFRSDENKLSIEDMFRALKPAILVLLKNGVKVVIVTLGSNGALLCSKGNPKKALNIDRKFLRSGEVFKRVQSVCSPNRFSELGSNRSPSLFAMHFPTIPAKVKKLTGAGDCLVGGTVASLSDGLDLIQSLAVGIASAKAAVESDDNVPPEFKLDLISGDAELVYNGAKMLMVHQSML

SEQ ID NO: 40902 - DNA, 1647 bp, Arabidopsis thaliana
  misc_feature (1)..(1647): Ceres Seq. ID no. 13489302
  misc_feature: MA Experiment ID: 108595 Result: Down-regulated in Transcription
  misc_feature: MA Experiment 108595 PARAMETER Experiment Name: At_Ler-pi_Ovule_cDNA_P Parameter: Plant Line Value: null
  misc_feature: MA Experiment ID: 20000072 Result: Up-regulated in Transcription
  misc_feature: MA Experiment 20000072 PARAMETER Experiment Name: At_100uM_ABA_Mutants_cDNA_P Parameter: Plant Line Value: CS8105
  misc_feature: MA Experiment 20000072 PARAMETER Experiment Name: At_100uM_ABA_Mutants_cDNA_P Parameter: Timepoint (hr) Value: 6
  misc_feature: MA Experiment 20000072 PARAMETER Experiment Name: At_100uM_ABA_Mutants_cDNA_P Parameter: Tissue Value: Aerial
  misc_feature: MA Experiment 20000072 PARAMETER Experiment Name: At_100uM_ABA_Mutants_cDNA_P Parameter: Treatment Value: 100uM ABA vs. No Treatment
  misc_feature: MA Experiment ID: 20000086 Result: Up-regulated in Transcription
  misc_feature: MA Experiment 20000086 PARAMETER Experiment Name: At_100uM_ABA_Mutants_cDNA_P Parameter: Plant Line Value: CS22
  misc_feature: MA Experiment 20000086 PARAMETER Experiment Name: At_100uM_ABA_Mutants_cDNA_P Parameter: Timepoint (hr) Value: 6
  misc_feature: MA Experiment 20000086 PARAMETER Experiment Name: At_100uM_ABA_Mutants_cDNA_P Parameter: Tissue Value: Aerial
  misc_feature: MA Experiment 20000086 PARAMETER Experiment Name: At_100uM_ABA_Mutants_cDNA_P Parameter: Treatment Value: 100uM ABA vs. No Treatment
  misc_feature: MA Experiment ID: 20000087 Result: Up-regulated in Transcription
  misc_feature: MA Experiment 20000087 PARAMETER Experiment Name: At_100uM_ABA_Mutants_cDNA_P Parameter: Plant Line Value: WS
  misc_feature: MA Experiment 20000087 PARAMETER Experiment Name: At_100uM_ABA_Mutants_cDNA_P Parameter: Timepoint (hr) Value: 6
  misc_feature: MA Experiment 20000087 PARAMETER Experiment Name: At_100uM_ABA_Mutants_cDNA_P Parameter: Tissue Value: Aerial
  misc_feature: MA Experiment 20000087 PARAMETER Experiment Name: At_100uM_ABA_Mutants_cDNA_P Parameter: Treatment Value: 100uM ABA vs. No Treatment
  misc_feature: MA Experiment ID: 20000088 Result: Up-regulated in Transcription
  misc_feature: MA Experiment 20000088 PARAMETER Experiment Name: At_100uM_ABA_Mutants_cDNA_P Parameter: Plant Line Value: Landsberg
  misc_feature: MA Experiment 20000088 PARAMETER Experiment Name: At_100uM_ABA_Mutants_cDNA_P Parameter: Timepoint (hr) Value: 6
  misc_feature: MA Experiment 20000088 PARAMETER Experiment Name: At_100uM_ABA_Mutants_cDNA_P Parameter: Tissue Value: Aerial
  misc_feature: MA Experiment 20000088 PARAMETER Experiment Name: At_100uM_ABA_Mutants_cDNA_P Parameter: Treatment Value: 100uM ABA vs. No Treatment
  misc_feature: MA Experiment ID: 20000090 Result: Up-regulated in Transcription
atatattcaatattcctaacgaaaaaatggccaaagcataaataccttatagcgatatttgagtatttaccataaaaccattcgaatactgtcacggttctaaatttctaatattgttcttttgttattaaaggaaagagtgaagggtgttttcgtcatttaacatatccatcgggtcaataacggagattacctatccggtgaccttatcccctcgccggtgagcgaatctcagatccaaaattttgcaaaatcctcagatcgtcttaccttctccgaatcgatcgatttttcatggaggacgacgacgagattcagtcaattccatctccgggagattcttccctttcaccacaagctcctccttctccgccgattttgccaacaaacgacgtgacggtggccgtcgtgaagaaaccacaaccggggctttcttctcaatctccgtccatgaacgctttagcgttagtggttcatactccttctgtaaccggtggtggtggtagcggaaacagaaacggacgaggaggaggaggaggaagcggtggtggtggaggaggaagagatgattgttggagcgaagaagctacaaaggttctaatcgaagcttggggagatcgattctctgaaccaggtaaaggaactttgaagcaacaacattggaaagaagtagctgagattgtgaacaagagtcgtcaatgcaaataccctaaaactgatattcagtgtaagaacagaattgatacggtgaagaagaagtataagcaagagaaagctaagattgcttctggtgatggacctagtaaatgggttttcttcaagaagcttgagagtttgattggtggtactacaacattcattgcttcttcaaaagcttcagagaaggctcctatgggaggagctcttgggaatagccgttcgagtatgtttaaacggcaaactaaaggtaatcagattgtgcagcaacaacaagagaagagaggctctgattcgatgcggtggcattttaggaaacgtagtgcttctgagactgagtctgagtctgatcctgaacctgaggcttctcctgaggaatctgctgagagtctcccacctttgcaaccgattcaaccgctttcgtttcatatgccaaagcggttgaaggtggataagagtggaggtggagggagtggagttggagatgtggcgagggcgatacttggatttacggaagcttatgagaaggcggaaactgctaagcttaagttaatggcggaactggaaaaggagaggatgaaatttgctaaagagatggagttgcagagaatgcagttcttgaaaactcaattggagataacacagaacaatcaagaagaggaagagaggagcaggcagcgaggagaaaggaggatcgttgatgatgatgatgatcgcaatggcaagaataacggcaatgtaagtagctgacaattgaacacacaaatgttcctatgatatttgctatgataagctggattttaggttttgatgttgttgttgttgttattgttactgccttgtgggatgtgtaaatgtagagaagttatgactctgattatcatcatgttgttgttattgttatccatcttcttgtcttaaacatgggcaaattaaaaagctttgaacttg

SEQ ID NO: 40903 - protein, 383 aa, Arabidopsis thaliana
  peptide (1)..(383): Ceres Seq. ID no. 13489303
  misc_feature (279)..(364): Homolog of NCBI NO: 18414919 NR Description: expressed protein [Arabidopsis thaliana]
  misc_feature (89)..(183): Homolog of NCBI NO: 18414919 NR Description: expressed protein [Arabidopsis thaliana]
  misc_feature (279)..(364): Homolog of NCBI NO: 10178132 NR Description: gb|AAF01512.1~gene_id:MOP10.9~similar to unknown
  misc_feature (279)..(367): Homolog of NCBI NO: 30680994 NR Description: expressed protein [Arabidopsis thaliana]
  misc_feature (89)..(183): Homolog of NCBI NO: 30680994 NR Description: expressed protein [Arabidopsis thaliana]
  misc_feature (89)..(183): Homolog of NCBI NO: 10178132 NR Description: gb|AAF01512.1~gene_id:MOP10.9~similar to unknown
  misc_feature (90)..(363): Homolog of NCBI NO: 18149189 NR Description: 6b-interacting protein 1 [Nicotiana tabacum]
  misc_feature (48)..(349): Homolog of NCBI NO: 38344545 NR Description: OSJNBa0027P08.13 [Oryza sativa (japonica
  misc_feature (1)..(217): Homolog of NCBI NO: 15231799 NR Description: expressed protein [Arabidopsis thaliana]
  misc_feature (1)..(383): Homolog of NCBI NO: 18404771 NR Description: expressed protein [Arabidopsis thaliana]
MEDDDEIQSIPSPGDSSLSPQAPPSPPILPTNDVTVAVVKKPQPGLSSQSPSMNALALVVHTPSVTGGGGSGNRNGRGGGGGSGGGGGGRDDCWSEEATKVLIEAWGDRFSEPGKGTLKQQHWKEVAEIVNKSRQCKYPKTDIQCKNRIDTVKKKYKQEKAKIASGDGPSKWVFFKKLESLIGGTTTFIASSKASEKAPMGGALGNSRSSMFKRQTKGNQIVQQQQEKRGSDSMRWHFRKRSASETESESDPEPEASPEESAESLPPLQPIQPLSFHMPKRLKVDKSGGGGSGVGDVARAILGFTEAYEKAETAKLKLMAELEKERMKFAKEMELQRMQFLKTQLEITQNNQEEEERSRQRGERRIVDDDDDRNGKNNGNVSS

SEQ ID NO: 40904 - protein, 331 aa, Arabidopsis thaliana
  peptide (1)..(331): Ceres Seq. ID no. 13489304
  misc_feature (227)..(312): Homolog of NCBI NO: 18414919 NR Description: expressed protein [Arabidopsis thaliana]
  misc_feature (37)..(131): Homolog of NCBI NO: 18414919 NR Description: expressed protein [Arabidopsis thaliana]
  misc_feature (227)..(312): Homolog of NCBI NO: 10178132 NR Description: gb|AAF01512.1~gene_id:MOP10.9~similar to unknown
  misc_feature (227)..(315): Homolog of NCBI NO: 30680994 NR Description: expressed protein [Arabidopsis thaliana]
  misc_feature (37)..(131): Homolog of NCBI NO: 30680994 NR Description: expressed protein [Arabidopsis thaliana]
  misc_feature (37)..(131): Homolog of NCBI NO: 10178132 NR Description: gb|AAF01512.1~gene_id:MOP10.9~similar to unknown
  misc_feature (38)..(311): Homolog of NCBI NO: 18149189 NR Description: 6b-interacting protein 1 [Nicotiana tabacum]
  misc_feature (1)..(297): Homolog of NCBI NO: 38344545 NR Description: OSJNBa0027P08.13 [Oryza sativa (japonica
  misc_feature (1)..(165): Homolog of NCBI NO: 15231799 NR Description: expressed protein [Arabidopsis thaliana]
  misc_feature (1)..(331): Homolog of NCBI NO: 18404771 NR Description: expressed protein [Arabidopsis thaliana]
MNALALVVHTPSVTGGGGSGNRNGRGGGGGSGGGGGGRDDCWSEEATKVLIEAWGDRFSEPGKGTLKQQHWKEVAEIVNKSRQCKYPKTDIQCKNRIDTVKKKYKQEKAKIASGDGPSKWVFFKKLESLIGGTTTFIASSKASEKAPMGGALGNSRSSMFKRQTKGNQIVQQQQEKRGSDSMRWHFRKRSASETESESDPEPEASPEESAESLPPLQPIQPLSFHMPKRLKVDKSGGGGSGVGDVARAILGFTEAYEKAETAKLKLMAELEKERMKFAKEMELQRMQFLKTQLEITQNNQEEEERSRQRGERRIVDDDDDRNGKNNGNVSS

SEQ ID NO: 40905 - DNA, 1039 bp, Arabidopsis thaliana
  misc_feature (1)..(1039): Ceres Seq. ID no. 12327569
  misc_feature: MA Experiment ID: 108434 Result: Down-regulated in Transcription
  misc_feature: MA Experiment 108434 PARAMETER Experiment Name: At_Root_Tips_cDNA_P Parameter: Tissue Value: Root Tips
  misc_feature: MA Experiment ID: 108462 Result: Up-regulated in Transcription
  misc_feature: MA Experiment 108462 PARAMETER Experiment Name: At_Germinating_Seeds_cDNA_P Parameter: Age (day) Value: 2 vs. 0
  misc_feature: MA Experiment 108462 PARAMETER Experiment Name: At_Germinating_Seeds_cDNA_P Parameter: Tissue Value: Germinating Seeds
  misc_feature: MA Experiment ID: 108464 Result: Up-regulated in Transcription
  misc_feature: MA Experiment 108464 PARAMETER Experiment Name: At_Germinating_Seeds_cDNA_P Parameter: Age (day) Value: 4 vs. 0
  misc_feature: MA Experiment 108464 PARAMETER Experiment Name: At_Germinating_Seeds_cDNA_P Parameter: Tissue Value: Germinating Seeds
  misc_feature: MA Experiment ID: 108501 Result: Up-regulated in Transcription
  misc_feature: MA Experiment 108501 PARAMETER Experiment Name: At_ap2_floral_buds_cDNA_P Parameter: Plant Line Value: ap2 (Ler.)
  misc_feature: MA Experiment 108501 PARAMETER Experiment Name: At_ap2_floral_buds_cDNA_P Parameter: Tissue Value: Closed Flower
  misc_feature: MA Experiment ID: 20000306 Result: Up-regulated in Transcription
  misc_feature: MA Experiment 20000306 PARAMETER Experiment Name: At_Germinating_Seeds_Sub_P Parameter: Age (hr) Value: 6 vs. 0
  misc_feature: MA Experiment 20000306 PARAMETER Experiment Name: At_Germinating_Seeds_Sub_P Parameter: Organism Value: A. thaliana
  misc_feature: MA Experiment 20000306 PARAMETER Experiment Name: At_Germinating_Seeds_Sub_P Parameter: Plant Line Value: WS
  misc_feature: MA Experiment 20000306 PARAMETER Experiment Name: At_Germinating_Seeds_Sub_P Parameter: Tissue Value: Germinating Seeds
  misc_feature: MA Experiment ID: 20000307 Result: Up-regulated in Transcription
  misc_feature: MA Experiment 20000307 PARAMETER Experiment Name: At_Germinating_Seeds_Sub_P Parameter: Age (hr) Value: 24 vs. 0
  misc_feature: MA Experiment 20000307 PARAMETER Experiment Name: At_Germinating_Seeds_Sub_P Parameter: Organism Value: A. thaliana
  misc_feature: MA Experiment 20000307 PARAMETER Experiment Name: At_Germinating_Seeds_Sub_P Parameter: Plant Line Value: WS
  misc_feature: MA Experiment 20000307 PARAMETER Experiment Name: At_Germinating_Seeds_Sub_P Parameter: Tissue Value: Germinating Seeds
  misc_feature: MA Experiment ID: 20000314 Result: Up-regulated in Transcription
  misc_feature: MA Experiment 20000314 PARAMETER Experiment Name: At_14day_Shoots-Roots_Sub_P Parameter: Age (day) Value: 14
  misc_feature: MA Experiment 20000314 PARAMETER Experiment Name: At_14day_Shoots-Roots_Sub_P Parameter: Organism Value: A. thaliana
  misc_feature: MA Experiment 20000314 PARAMETER Experiment Name: At_14day_Shoots-Roots_Sub_P Parameter: Plant Line Value: WS
  misc_feature: MA Experiment 20000314 PARAMETER Experiment Name: At_14day_Shoots-Roots_Sub_P Parameter: Tissue Value: Roots vs. Whole Plant
  misc_feature: MA Experiment ID: 20000355 Result: Up-regulated in Transcription
  misc_feature: MA Experiment 20000355 PARAMETER Experiment Name: At_Siliques_Sub_P Parameter: Age (day) Value: 21
  misc_feature: MA Experiment 20000355 PARAMETER Experiment Name: At_Siliques_Sub_P Parameter: Organism Value: A. thaliana
  misc_feature: MA Experiment 20000355 PARAMETER Experiment Name: At_Siliques_Sub_P Parameter: Plant Line Value: WS
  misc_feature: MA Experiment 20000355 PARAMETER Experiment Name: At_Siliques_Sub_P Parameter: Tissue Value: Less Than 5mm Siliques vs. Whole Plant
atttttgtctgaactgaaaccaagaaaaaatggctgaaaaatcagtaagttctggcttttgtagatatgctatagttactggagggaatagaggaattggatttgagatatgcagacaattagcaaacaaagggattagggttattttgacatctagagatgagaaacaagggcttgaagctgttgagacattgaagaaagagcttgagatttctgatcaaagcattgtctttcatcagcttgatgtctctgatccttctagtgtcacttctcttgctaagtttgtgaaaacccatttcggaaaactcgatatcttgatcaataatgctggggttggtggtgtaatcactgatgttgatgctcttagagctgggacagggaaagaaggtttcaagtgggaggaaactatcactgagacttataagttagctgaagaatgcataaagattaactattatggaccaaagagaatgtgtgaggcttttattcatcttctgcagttatctaattctccaagaatcgttaatgtatcatccttcatgggtcaagtaaagaatttactaaacgaatgggcaaaagggatcctgagtgacgcagagaatctaacggaggtaagaattgaccaagtgatcaaccaacttctcaatgatctgaaagaagatacggctaagacaaaagattgggctaaagtcatgtcggcttacgttgtttcgaaagccggtttgaatgcttacacgaggatcttagcgaagaaacatcccgagattcgcgttaactcggtttgtcctggatttgtgaagactgatatgaattttaaaactggaattttatctgtggaagaaggagcatcaagtcctgtgagattagctttgcttccacatcaagaatctccttctggttgtttctttgatcgcaaacaagtttcatagttctgaaatctttgtgtggagatagataagccaaagttttattcatgtaatgagaattattgtttgaaagctaaacagaaagtatcgactattcaataaacagaaacatt

SEQ ID NO: 40906 - protein, 299 aa, Arabidopsis thaliana
  peptide (1)..(299): Ceres Seq. ID no. 12327570
  misc_feature (1)..(294): Homolog of NCBI NO: 38346772 NR Description: OSJNBa0081C01.23 [Oryza sativa (japonica
  misc_feature (12)..(299): Homolog of NCBI NO: 38346769 NR Description: OSJNBa0081C01.20 [Oryza sativa (japonica
  misc_feature (12)..(295): Homolog of NCBI NO: 38346767 NR Description: OSJNBa0081C01.18 [Oryza sativa (japonica
  misc_feature (12)..(298): Homolog of NCBI NO: 33146492 NR Description: carbonyl reductase -like protein
  misc_feature (12)..(105): Homolog of NCBI NO: 34559416 NR Description: (-)-isopiperitenone reductase [Mentha x piperita]
  misc_feature (94)..(295): Homolog of NCBI NO: 34559416 NR Description: (-)-isopiperitenone reductase [Mentha x piperita]
  misc_feature (12)..(299): Homolog of NCBI NO: 25518668 NR Description: hypothetical protein T1N6.22 - Arabidopsis
  misc_feature (12)..(299): Homolog of NCBI NO: 18378884 NR Description: carbonyl reductase, putative; protein id:
  misc_feature (12)..(299): Homolog of NCBI NO: 15233062 NR Description: putative protein
  misc_feature (12)..(299): Homolog of NCBI NO: 15224100 NR Description: putative carbonyl reductase; protein id:
MAEKSVSSGFCRYAIVTGGNRGIGFEICRQLANKGIRVILTSRDEKQGLEAVETLKKELEISDQSIVFHQLDVSDPSSVTSLAKFVKTHFGKLDILINNAGVGGVITDVDALRAGTGKEGFKWEETITETYKLAEECIKINYYGPKRMCEAFIHLLQLSNSPRIVNVSSFMGQVKNLLNEWAKGILSDAENLTEVRIDQVINQLLNDLKEDTAKTKDWAKVMSAYVVSKAGLNAYTRILAKKHPEIRVNSVCPGFVKTDMNFKTGILSVEEGASSPVRLALLPHQESPSGCFFDRKQVS

SEQ ID NO: 40907 - protein, 152 aa, Arabidopsis thaliana
  peptide (1)..(152): Ceres Seq. ID no. 12327571
  misc_feature (1)..(152): Homolog of NCBI NO: 38346774 NR Description: OSJNBa0081C01.25 [Oryza sativa (japonica
  misc_feature (1)..(147): Homolog of NCBI NO: 38346772 NR Description: OSJNBa0081C01.23 [Oryza sativa (japonica
  misc_feature (1)..(152): Homolog of NCBI NO: 38346769 NR Description: OSJNBa0081C01.20 [Oryza sativa (japonica
  misc_feature (1)..(148): Homolog of NCBI NO: 38346767 NR Description: OSJNBa0081C01.18 [Oryza sativa (japonica
  misc_feature (1)..(151): Homolog of NCBI NO: 33146492 NR Description: carbonyl reductase -like protein
  misc_feature (1)..(148): Homolog of NCBI NO: 34559416 NR Description: (-)-isopiperitenone reductase [Mentha x piperita]
  misc_feature (1)..(152): Homolog of NCBI NO: 25518668 NR Description: hypothetical protein T1N6.22 - Arabidopsis
  misc_feature (1)..(152): Homolog of NCBI NO: 18378884 NR Description: carbonyl reductase, putative; protein id:
  misc_feature (1)..(152): Homolog of NCBI NO: 15233062 NR Description: putative protein
  misc_feature (1)..(152): Homolog of NCBI NO: 15224100 NR Description: putative carbonyl reductase; protein id:
MCEAFIHLLQLSNSPRIVNVSSFMGQVKNLLNEWAKGILSDAENLTEVRIDQVINQLLNDLKEDTAKTKDWAKVMSAYVVSKAGLNAYTRILAKKHPEIRVNSVCPGFVKTDMNFKTGILSVEEGASSPVRLALLPHQESPSGCFFDRKQVS

SEQ ID NO: 40908 - DNA, 1093 bp, Arabidopsis thaliana
  misc_feature (1)..(1093): Ceres Seq. ID no. 13580537
  misc_feature: MA Experiment ID: 108576 Result: Up-regulated in Transcription
  misc_feature: MA Experiment 108576 PARAMETER Experiment Name: At_42deg_Heat_cDNA_P Parameter: Temperature (deg C) Value: 42 vs. 22
  misc_feature: MA Experiment 108576 PARAMETER Experiment Name: At_42deg_Heat_cDNA_P Parameter: Timepoint (hr) Value: 1
  misc_feature: MA Experiment 108576 PARAMETER Experiment Name: At_42deg_Heat_cDNA_P Parameter: Tissue Value: Aerial
  misc_feature: MA Experiment ID: 20000306 Result: Up-regulated in Transcription
  misc_feature: MA Experiment 20000306 PARAMETER Experiment Name: At_Germinating_Seeds_Sub_P Parameter: Age (hr) Value: 6 vs. 0
  misc_feature: MA Experiment 20000306 PARAMETER Experiment Name: At_Germinating_Seeds_Sub_P Parameter: Organism Value: A. thaliana
  misc_feature: MA Experiment 20000306 PARAMETER Experiment Name: At_Germinating_Seeds_Sub_P Parameter: Plant Line Value: WS
  misc_feature: MA Experiment 20000306 PARAMETER Experiment Name: At_Germinating_Seeds_Sub_P Parameter: Tissue Value: Germinating Seeds
  misc_feature: MA Experiment ID: 20000307 Result: Up-regulated in Transcription
  misc_feature: MA Experiment 20000307 PARAMETER Experiment Name: At_Germinating_Seeds_Sub_P Parameter: Age (hr) Value: 24 vs. 0
  misc_feature: MA Experiment 20000307 PARAMETER Experiment Name: At_Germinating_Seeds_Sub_P Parameter: Organism Value: A. thaliana
  misc_feature: MA Experiment 20000307 PARAMETER Experiment Name: At_Germinating_Seeds_Sub_P Parameter: Plant Line Value: WS
  misc_feature: MA Experiment 20000307 PARAMETER Experiment Name: At_Germinating_Seeds_Sub_P Parameter: Tissue Value: Germinating Seeds
  misc_feature: MA Experiment ID: 20000314 Result: Up-regulated in Transcription
  misc_feature: MA Experiment 20000314 PARAMETER Experiment Name: At_14day_Shoots-Roots_Sub_P Parameter: Age (day) Value: 14
  misc_feature: MA Experiment 20000314 PARAMETER Experiment Name: At_14day_Shoots-Roots_Sub_P Parameter: Organism Value: A. thaliana
  misc_feature: MA Experiment 20000314 PARAMETER Experiment Name: At_14day_Shoots-Roots_Sub_P Parameter: Plant Line Value: WS
  misc_feature: MA Experiment 20000314 PARAMETER Experiment Name: At_14day_Shoots-Roots_Sub_P Parameter: Tissue Value: Roots vs. Whole Plant
  misc_feature: MA Experiment ID: 20000315 Result: Down-regulated in Transcription
  misc_feature: MA Experiment 20000315 PARAMETER Experiment Name: At_14day_Shoots-Roots_Sub_P Parameter: Age (day) Value: 14
  misc_feature: MA Experiment 20000315 PARAMETER Experiment Name: At_14day_Shoots-Roots_Sub_P Parameter: Organism Value: A. thaliana
  misc_feature: MA Experiment 20000315 PARAMETER Experiment Name: At_14day_Shoots-Roots_Sub_P Parameter: Plant Line Value: WS
  misc_feature: MA Experiment 20000315 PARAMETER Experiment Name: At_14day_Shoots-Roots_Sub_P Parameter: Tissue Value: Shoots vs. Whole Plant
  misc_feature: MA Experiment ID: 20000440 Result: Up-regulated in Transcription
  misc_feature: MA Experiment 20000440 PARAMETER Experiment Name: At_Closed-Flower__Sub_P Parameter: Tissue Value: Closed Flower vs. Whole Plant
gtttctcaaaaatcaaaatcccttcctctctctctctcaccgagccggcgagcccgttctctcggtgtttttaaagatgcttatgatgatgatggggagtgagtaatatcagaaatcaagctttttcacaatctcagaaattgtagtagagtttggcgattttatcaacctccggaacaagcttcttcttcttcgttttactcttgtcatccgtaaatgggttgtttccattccacggctgccagagaatttcccgatcacgaaaaccctgtgaagcttgcttctgagactgcttttagtgttagtgaagttgaagcattgtatgaattgttcaagagcataagcagctcggttgttgacgatggcttgataaacaaggaagagtttcaacttgctttgttcaagaacagaaagaaagaaaatttgtttgccaataggatatttgatttatttgatgttaaacgaaaaggcgtaattgattttggagactttgtgagatcactcaatgttttccatcctaatgcttccctagaggagaaaacagactttacctttaggctttacgacatggactgcacaggcttcattgagcgccaagaggtgaagcagatgttgattgcacttctctgcgaatctgaaatgaaactggctgatgatacaatagagatgatacttgatcagacatttgaggacgcagatgtggatcgggatggaaagattgataagacagaatggagcaatttcgttatcaaaaacccatctttgcttaaaatcatgactcttccgtatctcagggatataacgacgacatttccgagtttcgtatttaactcggaggtggacgagattgcgacgtgaaagagacaagacaagctggtttatagagaccaagtcgtaggctggaccaagaataaaaagaagattgattccaacaatgttatatagcaggatcgagctctatttcctttggaatttttagtctattggatttcaatttcatgtattgcgattacttttggctctctttctttaacagttttgaatactcaagttgtagttctacgaaaagattaatataaaaccacaatttctg

SEQ ID NO: 40909 - protein, 213 aa, Arabidopsis thaliana
  peptide (1)..(213): Ceres Seq. ID no. 13580538
  misc_feature (152)..(180): Pfam Name: EF hand Pfam Description: EF hand
  misc_feature (1)..(211): Homolog of NCBI NO: 15237928 NR Description: calcineurin B-like protein, putative [Arabidopsis
  misc_feature (1)..(210): Homolog of NCBI NO: 30687272 NR Description: calcineurin B-like protein 3 (CBL3) [Arabidopsis
  misc_feature (54)..(213): Homolog of NCBI NO: 37536918 NR Description: putative calcineurin [Oryza sativa (japonica
  misc_feature (1)..(210): Homolog of NCBI NO: 21593228 NR Description: calcineurin B-like protein 2 [Arabidopsis
  misc_feature (1)..(210): Homolog of NCBI NO: 15241101 NR Description: calcineurin B-like protein 2 (gb|AAC26009.1)
  misc_feature (1)..(210): Homolog of NCBI NO: 15236778 NR Description: calcineurin B-like protein 3 (CBL3) [Arabidopsis
  misc_feature (16)..(210): Homolog of NCBI NO: 22137326 NR Description: calcineurin B [Pisum sativum]
  misc_feature (16)..(210): Homolog of NCBI NO: 16924116 NR Description: putative calcineurin B-like protein [Oryza sativa]
  misc_feature (1)..(213): Homolog of NCBI NO: 18414931 NR Description: calcineurin B-like protein 1 (CBL1) [Arabidopsis
  misc_feature (1)..(213): Homolog of NCBI NO: 15238015 NR Description: calcineurin B-like protein 9 (CBL9) [Arabidopsis
MGCFHSTAAREFPDHENPVKLASETAFSVSEVEALYELFKSISSSVVDDGLINKEEFQLALFKNRKKENLFANRIFDLFDVKRKGVIDFGDFVRSLNVFHPNASLEEKTDFTFRLYDMDCTGFIERQEVKQMLIALLCESEMKLADDTIEMILDQTFEDADVDRDGKIDKTEWSNFVIKNPSLLKIMTLPYLRDITTTFPSFVFNSEVDEIAT

SEQ ID NO: 40910 - DNA, 2059 bp, Arabidopsis thaliana
  misc_feature (1)..(2059): Ceres Seq. ID no. 13489068
  misc_feature: MA Experiment ID: 108434 Result: Down-regulated in Transcription
  misc_feature: MA Experiment 108434 PARAMETER Experiment Name: At_Root_Tips_cDNA_P Parameter: Tissue Value: Root Tips
  misc_feature: MA Experiment ID: 108461 Result: Down-regulated in Transcription
  misc_feature: MA Experiment 108461 PARAMETER Experiment Name: At_Germinating_Seeds_cDNA_P Parameter: Age (day) Value: 1 vs. 0
  misc_feature: MA Experiment 108461 PARAMETER Experiment Name: At_Germinating_Seeds_cDNA_P Parameter: Tissue Value: Germinating Seeds
  misc_feature: MA Experiment ID: 108488 Result: Down-regulated in Transcription
  misc_feature: MA Experiment ID: 108569 Result: Up-regulated in Transcription
  misc_feature: MA Experiment 108569 PARAMETER Experiment Name: At_0.001%_MeJA__cDNA_P Parameter: Timepoint (hr) Value: 6
  misc_feature: MA Experiment 108569 PARAMETER Experiment Name: At_0.001%_MeJA__cDNA_P Parameter: Tissue Value: Aerial
  misc_feature: MA Experiment 108569 PARAMETER Experiment Name: At_0.001%_MeJA__cDNA_P Parameter: Treatment Value: 0.001% MeJA vs. No Treatment
  misc_feature: MA Experiment ID: 108573 Result: Up-regulated in Transcription
  misc_feature: MA Experiment 108573 PARAMETER Experiment Name: At_Drought_cDNA_P Parameter: Timepoint (hr) Value: 6
  misc_feature: MA Experiment 108573 PARAMETER Experiment Name: At_Drought_cDNA_P Parameter: Tissue Value: Aerial
  misc_feature: MA Experiment 108573 PARAMETER Experiment Name: At_Drought_cDNA_P Parameter: Treatment Value: Drought vs. No Drought
  misc_feature: MA Experiment ID: 108585 Result: Up-regulated in Transcription
  misc_feature: MA Experiment 108585 PARAMETER Experiment Name: At_5mM_NaNP_cDNA_P Parameter: Timepoint (hr) Value: 6
  misc_feature: MA Experiment 108585 PARAMETER Experiment Name: At_5mM_NaNP_cDNA_P Parameter: Tissue Value: Aerial
  misc_feature: MA Experiment 108585 PARAMETER Experiment Name: At_5mM_NaNP_cDNA_P Parameter: Treatment Value: null
  misc_feature: MA Experiment ID: 20000087 Result: Down-regulated in Transcription
  misc_feature: MA Experiment 20000087 PARAMETER Experiment Name: At_100uM_ABA_Mutants_cDNA_P Parameter: Plant Line Value: WS
  misc_feature: MA Experiment 20000087 PARAMETER Experiment Name: At_100uM_ABA_Mutants_cDNA_P Parameter: Timepoint (hr) Value: 6
  misc_feature: MA Experiment 20000087 PARAMETER Experiment Name: At_100uM_ABA_Mutants_cDNA_P Parameter: Tissue Value: Aerial
  misc_feature: MA Experiment 20000087 PARAMETER Experiment Name: At_100uM_ABA_Mutants_cDNA_P Parameter: Treatment Value: 100uM ABA vs. No Treatment
  misc_feature: MA Experiment ID: 20000111 Result: Down-regulated in Transcription
  misc_feature: MA Experiment 20000111 PARAMETER Experiment Name: At_42deg_Heat_cDNA_P Parameter: Temperature (deg C) Value: 42 vs. 22
  misc_feature: MA Experiment 20000111 PARAMETER Experiment Name: At_42deg_Heat_cDNA_P Parameter: Timepoint (hr) Value: 6
  misc_feature: MA Experiment 20000111 PARAMETER Experiment Name: At_42deg_Heat_cDNA_P Parameter: Tissue Value: Aerial
aagtcttttttataagctcatgctcattattactccgacaagtgccgtgtaattcctcgccctcggctactcttttctcttcttgcctctcgtctccgccgctgattcagctgccgccgacaaaggaatatggaagaaaaagatgtgtatacgcaagatggaactgttgatattcacaaaaatcctgcaaacaaggagaaaaccggaaattggaaagcttgccgcttcattctcggaaatgagtgctgtgaaagattggcctactatggcatgggcactaaccttgtgaattatcttgagagccgtctgaatcaaggcaatgctacggctgcaaataacgtcacgaattggtctggaacatgttatataactcctttgattggagcctttatagctgatgcttaccttggacgatattggactattgcaacttttgttttcatctatgtctccggtatgactcttttgacattatcagcttcagttcctggacttaaaccaggtaactgcaatgctgatacttgtcatccaaattctagtcagactgctgttttctttgtcgcgctttatatgattgctcttggaactggcggtataaagccgtgtgtttcgtcctttggagctgatcagtttgatgagaatgatgagaatgagaagatcaagaaaagttctttcttcaactggttttacttctccattaatgttggagctctcattgctgcaactgttctcgtctggatacaaatgaatgttggttggggatggggtttcggtgttccaacagtcgcgatggttatcgcggtttgctttttcttcttcggaagccgtttttacagacttcagagacctggagggagtccacttactaggatctttcaggttatagtagcggcttttcggaagataagtgttaaggttccagaggacaagtctctgctctttgaaactgcagatgatgagagtaacatcaaaggtagccggaaacttgtgcacacagataacttaaagttttttgacaaggcagcggttgagagtcaatctgatagcatcaaagacggggaagtcaatccatggagactatgttctgttactcaagttgaagaacttaagtcaataatcacacttcttccagtttgggccacaggaatagtcttcgccacagtgtacagccaaatgagcacaatgtttgtgttacaaggaaacacaatggaccaacacatgggaaaaaactttgaaatcccatcagcttcactctcacttttcgacactgtcagtgtactcttctggactcctgtctatgaccagttcattatcccgctggcaagaaagttcacacgcaatgaacgaggcttcactcagcttcaacgtatgggtataggtcttgtggtctccatctttgccatgatcactgcaggagtcttggaggttgtcaggcttgattatgtcaaaactcacaatgcatatgaccaaaaacagatccatatgtcgatattctggcagataccgcagtatttacttatcggttgtgcagaagttttcacctttataggtcagcttgagtttttctatgatcaggctcctgatgccatgagaagtctctgctctgctttgtcgttgaccacggttgcgttggggaactatttgagcacagttcttgtgacggttgtgatgaagataacgaagaagaacggtaaaccgggttggataccggataacttgaaccgaggccatcttgattactttttctacttgttggcaactctcagtttcctcaacttcttagtgtacctctggatttcaaaacgctacaaatacaagaaagctgttggtcgagcacattgatcaagaaactggtgtggaagatatttggagttaacagtatttgtttgaaaagtgttttgcttgtaaatgttttttgtatgtggtctagttgttgttggtgtgttaggtttgttttggttttgcttatgtatttctgaatacttccagtcttccacttatatgtaaaaggctattggtaactattttatgagctttttgcttaaagctttttgaccgc

SEQ ID NO: 40911 - protein, 570 aa, Arabidopsis thaliana
  peptide (1)..(570): Ceres Seq. ID no. 13489069
  misc_feature (96)..(499): Pfam Name: POT family Pfam Description: POT family
  misc_feature (1)..(565): Homolog of NCBI NO: 30685529 NR Description: peptide transporter - like protein [Arabidopsis
  misc_feature (2)..(565): Homolog of NCBI NO: 31088360 NR Description: peptide transporter 1 [Vicia faba]
  misc_feature (1)..(565): Homolog of NCBI NO: 1076331 NR Description: histidine transport protein - Arabidopsis
  misc_feature (1)..(565): Homolog of NCBI NO: 15226861 NR Description: histidine transport protein (PTR2-B) [Arabidopsis
  misc_feature (7)..(565): Homolog of NCBI NO: 15076661 NR Description: peptide transporter [Oryza sativa (japonica
  misc_feature (2)..(565): Homolog of NCBI NO: 4102839 NR Description: LeOPT1 [Lycopersicon esculentum]
  misc_feature (59)..(569): Homolog of NCBI NO: 28973642 NR Description: putative oligopeptide transporter protein
  misc_feature (5)..(567): Homolog of NCBI NO: 7489404 NR Description: peptide transport protein - barley
  misc_feature (2)..(569): Homolog of NCBI NO: 15240905 NR Description: oligopeptide transporter - like protein
  misc_feature (1)..(570): Homolog of NCBI NO: 15232435 NR Description: peptide transport - like protein [Arabidopsis
MEEKDVYTQDGTVDIHKNPANKEKTGNWKACRFILGNECCERLAYYGMGTNLVNYLESRLNQGNATAANNVTNWSGTCYITPLIGAFIADAYLGRYWTIATFVFIYVSGMTLLTLSASVPGLKPGNCNADTCHPNSSQTAVFFVALYMIALGTGGIKPCVSSFGADQFDENDENEKIKKSSFFNWFYFSINVGALIAATVLVWIQMNVGWGWGFGVPTVAMVIAVCFFFFGSRFYRLQRPGGSPLTRIFQVIVAAFRKISVKVPEDKSLLFETADDESNIKGSRKLVHTDNLKFFDKAAVESQSDSIKDGEVNPWRLCSVTQVEELKSIITLLPVWATGIVFATVYSQMSTMFVLQGNTMDQHMGKNFEIPSASLSLFDTVSVLFWTPVYDQFIIPLARKFTRNERGFTQLQRMGIGLVVSIFAMITAGVLEVVRLDYVKTHNAYDQKQIHMSIFWQIPQYLLIGCAEVFTFIGQLEFFYDQAPDAMRSLCSALSLTTVALGNYLSTVLVTVVMKITKKNGKPGWIPDNLNRGHLDYFFYLLATLSFLNFLVYLWISKRYKYKKAVGRAH

SEQ ID NO: 40912 - protein, 523 aa, Arabidopsis thaliana
  peptide (1)..(523): Ceres Seq. ID no. 13489070
  misc_feature (49)..(452): Pfam Name: POT family Pfam Description: POT family
  misc_feature (1)..(518): Homolog of NCBI NO: 30685529 NR Description: peptide transporter - like protein [Arabidopsis
  misc_feature (1)..(518): Homolog of NCBI NO: 31088360 NR Description: peptide transporter 1 [Vicia faba]
  misc_feature (1)..(518): Homolog of NCBI NO: 1076331 NR Description: histidine transport protein - Arabidopsis
  misc_feature (1)..(518): Homolog of NCBI NO: 15226861 NR Description: histidine transport protein (PTR2-B) [Arabidopsis
  misc_feature (1)..(518): Homolog of NCBI NO: 15076661 NR Description: peptide transporter [Oryza sativa (japonica
  misc_feature (1)..(518): Homolog of NCBI NO: 4102839 NR Description: LeOPT1 [Lycopersicon esculentum]
  misc_feature (12)..(522): Homolog of NCBI NO: 28973642 NR Description: putative oligopeptide transporter protein
  misc_feature (1)..(520): Homolog of NCBI NO: 7489404 NR Description: peptide transport protein - barley
  misc_feature (1)..(522): Homolog of NCBI NO: 15240905 NR Description: oligopeptide transporter - like protein
  misc_feature (1)..(523): Homolog of NCBI NO: 15232435 NR Description: peptide transport - like protein [Arabidopsis
MGTNLVNYLESRLNQGNATAANNVTNWSGTCYITPLIGAFIADAYLGRYWTIATFVFIYVSGMTLLTLSASVPGLKPGNCNADTCHPNSSQTAVFFVALYMIALGTGGIKPCVSSFGADQFDENDENEKIKKSSFFNWFYFSINVGALIAATVLVWIQMNVGWGWGFGVPTVAMVIAVCFFFFGSRFYRLQRPGGSPLTRIFQVIVAAFRKISVKVPEDKSLLFETADDESNIKGSRKLVHTDNLKFFDKAAVESQSDSIKDGEVNPWRLCSVTQVEELKSIITLLPVWATGIVFATVYSQMSTMFVLQGNTMDQHMGKNFEIPSASLSLFDTVSVLFWTPVYDQFIIPLARKFTRNERGFTQLQRMGIGLVVSIFAMITAGVLEVVRLDYVKTHNAYDQKQIHMSIFWQIPQYLLIGCAEVFTFIGQLEFFYDQAPDAMRSLCSALSLTTVALGNYLSTVLVTVVMKITKKNGKPGWIPDNLNRGHLDYFFYLLATLSFLNFLVYLWISKRYKYKKAVGRAH

SEQ ID NO: 40913 - protein, 461 aa, Arabidopsis thaliana
  peptide (1)..(461): Ceres Seq. ID no. 13489071
  misc_feature (1)..(390): Pfam Name: POT family Pfam Description: POT family
  misc_feature (1)..(456): Homolog of NCBI NO: 30685529 NR Description: peptide transporter - like protein [Arabidopsis
  misc_feature (1)..(456): Homolog of NCBI NO: 31088360 NR Description: peptide transporter 1 [Vicia faba]
  misc_feature (1)..(456): Homolog of NCBI NO: 1076331 NR Description: histidine transport protein - Arabidopsis
  misc_feature (1)..(456): Homolog of NCBI NO: 15226861 NR Description: histidine transport protein (PTR2-B) [Arabidopsis
  misc_feature (1)..(456): Homolog of NCBI NO: 15076661 NR Description: peptide transporter [Oryza sativa (japonica
  misc_feature (1)..(456): Homolog of NCBI NO: 4102839 NR Description: LeOPT1 [Lycopersicon esculentum]
  misc_feature (1)..(460): Homolog of NCBI NO: 28973642 NR Description: putative oligopeptide transporter protein
  misc_feature (1)..(458): Homolog of NCBI NO: 7489404 NR Description: peptide transport protein - barley
  misc_feature (1)..(460): Homolog of NCBI NO: 15240905 NR Description: oligopeptide transporter - like protein
  misc_feature (1)..(461): Homolog of NCBI NO: 15232435 NR Description: peptide transport - like protein [Arabidopsis
MTLLTLSASVPGLKPGNCNADTCHPNSSQTAVFFVALYMIALGTGGIKPCVSSFGADQFDENDENEKIKKSSFFNWFYFSINVGALIAATVLVWIQMNVGWGWGFGVPTVAMVIAVCFFFFGSRFYRLQRPGGSPLTRIFQVIVAAFRKISVKVPEDKSLLFETADDESNIKGSRKLVHTDNLKFFDKAAVESQSDSIKDGEVNPWRLCSVTQVEELKSIITLLPVWATGIVFATVYSQMSTMFVLQGNTMDQHMGKNFEIPSASLSLFDTVSVLFWTPVYDQFIIPLARKFTRNERGFTQLQRMGIGLVVSIFAMITAGVLEVVRLDYVKTHNAYDQKQIHMSIFWQIPQYLLIGCAEVFTFIGQLEFFYDQAPDAMRSLCSALSLTTVALGNYLSTVLVTVVMKITKKNGKPGWIPDNLNRGHLDYFFYLLATLSFLNFLVYLWISKRYKYKKAVGRAH

SEQ ID NO: 40914 - DNA, 1083 bp, Arabidopsis thaliana
  misc_feature (1)..(1083): Ceres Seq. ID no. 12327708
  misc_feature: MA Experiment ID: 108434 Result: Down-regulated in Transcription
  misc_feature: MA Experiment 108434 PARAMETER Experiment Name: At_Root_Tips_cDNA_P Parameter: Tissue Value: Root Tips
  misc_feature: MA Experiment ID: 108435 Result: Down-regulated in Transcription
  misc_feature: MA Experiment 108435 PARAMETER Experiment Name: At_stm_Mutants_cDNA_P Parameter: Plant Line Value: wt Landsburg vs stm
  misc_feature: MA Experiment 108435 PARAMETER Experiment Name: At_stm_Mutants_cDNA_P Parameter: Tissue Value: Shoot Apical Meristem Region
  misc_feature: MA Experiment ID: 108461 Result: Up-regulated in Transcription
  misc_feature: MA Experiment 108461 PARAMETER Experiment Name: At_Germinating_Seeds_cDNA_P Parameter: Age (day) Value: 1 vs. 0
  misc_feature: MA Experiment 108461 PARAMETER Experiment Name: At_Germinating_Seeds_cDNA_P Parameter: Tissue Value: Germinating Seeds
  misc_feature: MA Experiment ID: 108462 Result: Up-regulated in Transcription
  misc_feature: MA Experiment 108462 PARAMETER Experiment Name: At_Germinating_Seeds_cDNA_P Parameter: Age (day) Value: 2 vs. 0
  misc_feature: MA Experiment 108462 PARAMETER Experiment Name: At_Germinating_Seeds_cDNA_P Parameter: Tissue Value: Germinating Seeds
  misc_feature: MA Experiment ID: 108463 Result: Up-regulated in Transcription
  misc_feature: MA Experiment 108463 PARAMETER Experiment Name: At_Germinating_Seeds_cDNA_P Parameter: Age (day) Value: 3 vs. 0
  misc_feature: MA Experiment 108463 PARAMETER Experiment Name: At_Germinating_Seeds_cDNA_P Parameter: Tissue Value: Germinating Seeds
  misc_feature: MA Experiment ID: 108488 Result: Down-regulated in Transcription
  misc_feature: MA Experiment ID: 108573 Result: Up-regulated in Transcription
  misc_feature: MA Experiment 108573 PARAMETER Experiment Name: At_Drought_cDNA_P Parameter: Timepoint (hr) Value: 6
  misc_feature: MA Experiment 108573 PARAMETER Experiment Name: At_Drought_cDNA_P Parameter: Tissue Value: Aerial
  misc_feature: MA Experiment 108573 PARAMETER Experiment Name: At_Drought_cDNA_P Parameter: Treatment Value: Drought vs. No Drought
  misc_feature: MA Experiment ID: 108579 Result: Down-regulated in Transcription
  misc_feature: MA Experiment 108579 PARAMETER Experiment Name: At_4deg_Cold_cDNA_P Parameter: Temperature (deg C) Value: 4 vs. 22
  misc_feature: MA Experiment 108579 PARAMETER Experiment Name: At_4deg_Cold_cDNA_P Parameter: Timepoint (hr) Value: 6
  misc_feature: MA Experiment 108579 PARAMETER Experiment Name: At_4deg_Cold_cDNA_P Parameter: Tissue Value: Aerial
  misc_feature: MA Experiment ID: 108585 Result: Up-regulated in Transcription
  misc_feature: MA Experiment 108585 PARAMETER Experiment Name: At_5mM_NaNP_cDNA_P Parameter: Timepoint (hr) Value: 6
  misc_feature: MA Experiment 108585 PARAMETER Experiment Name: At_5mM_NaNP_cDNA_P Parameter: Tissue Value: Aerial
  misc_feature: MA Experiment 108585 PARAMETER Experiment Name: At_5mM_NaNP_cDNA_P Parameter: Treatment Value: null
  misc_feature: MA Experiment ID: 20000111 Result: Up-regulated in Transcription
  misc_feature: MA Experiment 20000111 PARAMETER Experiment Name: At_42deg_Heat_cDNA_P Parameter: Temperature (deg C) Value: 42 vs. 22
  misc_feature: MA Experiment 20000111 PARAMETER Experiment Name: At_42deg_Heat_cDNA_P Parameter: Timepoint (hr) Value: 6
  misc_feature: MA Experiment 20000111 PARAMETER Experiment Name: At_42deg_Heat_cDNA_P Parameter: Tissue Value: Aerial
  misc_feature: MA Experiment ID: 20000112 Result: Up-regulated in Transcription
  misc_feature: MA Experiment 20000112 PARAMETER Experiment Name: At_42deg_Heat_cDNA_P Parameter: Temperature (deg C) Value: 42 vs. 22
  misc_feature: MA Experiment 20000112 PARAMETER Experiment Name: At_42deg_Heat_cDNA_P Parameter: Timepoint (hr) Value: 2
  misc_feature: MA Experiment 20000112 PARAMETER Experiment Name: At_42deg_Heat_cDNA_P Parameter: Tissue Value: Aerial
  misc_feature: MA Experiment ID: 20000113 Result: Up-regulated in Transcription
  misc_feature: MA Experiment 20000113 PARAMETER Experiment Name: At_42deg_Heat_cDNA_P Parameter: Temperature (deg C) Value: 42 vs. 22
  misc_feature: MA Experiment 20000113 PARAMETER Experiment Name: At_42deg_Heat_cDNA_P Parameter: Timepoint (hr) Value: 8
  misc_feature: MA Experiment 20000113 PARAMETER Experiment Name: At_42deg_Heat_cDNA_P Parameter: Tissue Value: Aerial
  misc_feature: MA Experiment ID: 20000173 Result: Up-regulated in Transcription
  misc_feature: MA Experiment 20000173 PARAMETER Experiment Name: At_42deg_Heat_P Parameter: Age (day) Value: 14
  misc_feature: MA Experiment 20000173 PARAMETER Experiment Name: At_42deg_Heat_P Parameter: Organism Value: A. thaliana
  misc_feature: MA Experiment 20000173 PARAMETER Experiment Name: At_42deg_Heat_P Parameter: Plant Line Value: WS
  misc_feature: MA Experiment 20000173 PARAMETER Experiment Name: At_42deg_Heat_P Parameter: Temperature (deg C) Value: 42 vs. 22
  misc_feature: MA Experiment 20000173 PARAMETER Experiment Name: At_42deg_Heat_P Parameter: Timepoint (hr) Value: 6
  misc_feature: MA Experiment 20000173 PARAMETER Experiment Name: At_42deg_Heat_P Parameter: Tissue Value: Aerial
  misc_feature: MA Experiment ID: 20000180 Result: Up-regulated in Transcription
  misc_feature: MA Experiment 20000180 PARAMETER Experiment Name: At_Germinating_Seeds_P Parameter: Age (hr) Value: 24 vs. 0
  misc_feature: MA Experiment 20000180 PARAMETER Experiment Name: At_Germinating_Seeds_P Parameter: Tissue Value: Germinating Seeds
  misc_feature: MA Experiment ID: 20000214 Result: Down-regulated in Transcription
  misc_feature: MA Experiment 20000214 PARAMETER Experiment Name: At_4deg_Cold_P Parameter: Timepoint (hr) Value: 6
  misc_feature: MA Experiment ID: 20000234 Result: Down-regulated in Transcription
  misc_feature: MA Experiment 20000234 PARAMETER Experiment Name: At_Siliques_P Parameter: Age (day) Value: 21
  misc_feature: MA Experiment 20000234 PARAMETER Experiment Name: At_Siliques_P Parameter: Organism Value: A. thaliana
  misc_feature: MA Experiment 20000234 PARAMETER Experiment Name: At_Siliques_P Parameter: Plant Line Value: WS
  misc_feature: MA Experiment 20000234 PARAMETER Experiment Name: At_Siliques_P Parameter: Tissue Value: Less Than 5mm Siliques vs. Whole Plant
  misc_feature: MA Experiment ID: 20000437 Result: Up-regulated in Transcription
  misc_feature: MA Experiment 20000437 PARAMETER Experiment Name: At_Drought_P Parameter: Age (day) Value: 8
  misc_feature: MA Experiment 20000437 PARAMETER Experiment Name: At_Drought_P Parameter: Organism Value: A. thaliana
  misc_feature: MA Experiment 20000437 PARAMETER Experiment Name: At_Drought_P Parameter: Plant Line Value: WS
  misc_feature: MA Experiment 20000437 PARAMETER Experiment Name: At_Drought_P Parameter: Timepoint (hr) Value: 24
  misc_feature: MA Experiment 20000437 PARAMETER Experiment Name: At_Drought_P Parameter: Tissue Value: Whole Plant
  misc_feature: MA Experiment 20000437 PARAMETER Experiment Name: At_Drought_P Parameter: Treatment Value: Drought vs. No Drought
  misc_feature: MA Experiment ID: 20001450 Result: Up-regulated in Transcription
  misc_feature: MA Experiment 20001450 PARAMETER Experiment Name: At_Far-red-induction_P Parameter: Age (day) Value: 7
  misc_feature: MA Experiment 20001450 PARAMETER Experiment Name: At_Far-red-induction_P Parameter: Light Value: Far-red vs. White
  misc_feature: MA Experiment 20001450 PARAMETER Experiment Name: At_Far-red-induction_P Parameter: Organism Value: A. thaliana
  misc_feature: MA Experiment 20001450 PARAMETER Experiment Name: At_Far-red-induction_P Parameter: Plant Line Value: Columbia
  misc_feature: MA Experiment 20001450 PARAMETER Experiment Name: At_Far-red-induction_P Parameter: Timepoint (hr) Value: 8
  misc_feature: MA Experiment 20001450 PARAMETER Experiment Name: At_Far-red-induction_P Parameter: Tissue Value: Whole Plant
  misc_feature: MA Experiment ID: 20001911 Result: Up-regulated in Transcription
  misc_feature: MA Experiment 20001911 PARAMETER Experiment Name: At_Drought_Reproduction_P Parameter: Age (day) Value: 40
  misc_feature: MA Experiment 20001911 PARAMETER Experiment Name: At_Drought_Reproduction_P Parameter: Organism Value: A. thaliana
  misc_feature: MA Experiment 20001911 PARAMETER Experiment Name: At_Drought_Reproduction_P Parameter: Plant Line Value: WS
  misc_feature: MA Experiment 20001911 PARAMETER Experiment Name: At_Drought_Reproduction_P Parameter: Timepoint (day) Value: 10
  misc_feature: MA Experiment 20001911 PARAMETER Experiment Name: At_Drought_Reproduction_P Parameter: Tissue Value: Flowers
  misc_feature: MA Experiment 20001911 PARAMETER Experiment Name: At_Drought_Reproduction_P Parameter: Treatment Value: Drought vs. No Drought
ccttaacgacaaaggaaagaaagcatggagattgaaaacggaagccatttctagcaaaacaattctctcttttgtcttgaagataagtttcacaaaaaggtctgcttcgcctcttctacgacgttgcagaaactaagaagagatgggtcttctctccaacagaatcgatagatcgagtttgaaacctggagatcatatctactcctggaggactgcttacatctatgcccatcacggcatctatgttggagatgatagagtcatccatttcactagacgaggccaagaagttggaaccgggactgttctagatctcatactagtcagctcaggtccatcccgaaaccacacccactgtccaacctgtgttccacctaacgaaggtcacggtgttgtttcctcatgccttaactgtttcctagccggtggtgtcttgtaccggtttgagtactcagtcaacgctgctcacttcctcgtcaaagccagaggaggaacttgcacactcgctgtcgctgaccctaatgagattgttgttcaccgggccaaacacctccttcaaaacggatttggatgttatgacgttttcaagaacaactgtgaggatttcgctatatattgcaaaaccgcattgctggttcttgagggaaggacaatgggacagagcggtcaggcggtttcgattataggtgggccgattgctgcggttttgtccacgccaatgcggcttctgactacaaacgtgtatgggatggctgctacagcgattggtgtgtattgtgcgagtagatacgctactgatatcggaatgagagctgacgtcgcgaaagttgaagcagaggacctcacaagaaggctgtcttcaggacttttccaagtacttgatcctccattggcagccatagctttaccaagcacgagttgataagcttaagcttcaccagcttatcccactgttgtattttctatttgtcccttagcttctataaatgttctaataagaacactccttgcacaattgatctcggtgtgattcaaacttatataattatgtacaataataggtaaaaaagggtaccagttacc

SEQ ID NO: 40915 - protein, 259 aa, Arabidopsis thaliana
  peptide (1)..(259): Ceres Seq. ID no. 12327709
  misc_feature (101)..(172): Pfam Name: NC domain Pfam Description: NC domain
  misc_feature (1)..(189): Homolog of NCBI NO: 15237330 NR Description: putative protein; protein id: At5g16360.1
  misc_feature (1)..(237): Homolog of NCBI NO: 15237327 NR Description: putative protein; protein id: At5g16330.1
  misc_feature (1)..(238): Homolog of NCBI NO: 21592684 NR Description: unknown [Arabidopsis thaliana]
  misc_feature (1)..(238): Homolog of NCBI NO: 22328196 NR Description: unknown protein; protein id: At4g00905.1
  misc_feature (1)..(238): Homolog of NCBI NO: 18378812 NR Description: Expressed protein
  misc_feature (1)..(234): Homolog of NCBI NO: 21594170 NR Description: unknown [Arabidopsis thaliana]
  misc_feature (1)..(234): Homolog of NCBI NO: 18396282 NR Description: expressed protein
  misc_feature (32)..(259): Homolog of NCBI NO: 9758417 NR Description: gb|AAF32477.1~gene_id:MHF15.11~similar to unknown
  misc_feature (1)..(259): Homolog of NCBI NO: 18415178 NR Description: putative protein
MGLLSNRIDRSSLKPGDHIYSWRTAYIYAHHGIYVGDDRVIHFTRRGQEVGTGTVLDLILVSSGPSRNHTHCPTCVPPNEGHGVVSSCLNCFLAGGVLYRFEYSVNAAHFLVKARGGTCTLAVADPNEIVVHRAKHLLQNGFGCYDVFKNNCEDFAIYCKTALLVLEGRTMGQSGQAVSIIGGPIAAVLSTPMRLLTTNVYGMAATAIGVYCASRYATDIGMRADVAKVEAEDLTRRLSSGLFQVLDPPLAAIALPSTS

SEQ ID NO: 40916 - DNA, 1080 bp, Arabidopsis thaliana
  misc_feature (1)..(1080): Ceres Seq. ID no. 13492124
  misc_feature: MA Experiment ID: 20000171 Result: Up-regulated in Transcription
  misc_feature: MA Experiment 20000171 PARAMETER Experiment Name: At_42deg_Heat_P Parameter: Age (day) Value: 14
  misc_feature: MA Experiment 20000171 PARAMETER Experiment Name: At_42deg_Heat_P Parameter: Organism Value: A. thaliana
  misc_feature: MA Experiment 20000171 PARAMETER Experiment Name: At_42deg_Heat_P Parameter: Plant Line Value: WS
  misc_feature: MA Experiment 20000171 PARAMETER Experiment Name: At_42deg_Heat_P Parameter: Temperature (deg C) Value: 42 vs. 22
  misc_feature: MA Experiment 20000171 PARAMETER Experiment Name: At_42deg_Heat_P Parameter: Timepoint (hr) Value: 1
  misc_feature: MA Experiment 20000171 PARAMETER Experiment Name: At_42deg_Heat_P Parameter: Tissue Value: Aerial
  misc_feature: MA Experiment ID: 20000173 Result: Up-regulated in Transcription
  misc_feature: MA Experiment 20000173 PARAMETER Experiment Name: At_42deg_Heat_P Parameter: Age (day) Value: 14
  misc_feature: MA Experiment 20000173 PARAMETER Experiment Name: At_42deg_Heat_P Parameter: Organism Value: A. thaliana
  misc_feature: MA Experiment 20000173 PARAMETER Experiment Name: At_42deg_Heat_P Parameter: Plant Line Value: WS
  misc_feature: MA Experiment 20000173 PARAMETER Experiment Name: At_42deg_Heat_P Parameter: Temperature (deg C) Value: 42 vs. 22
  misc_feature: MA Experiment 20000173 PARAMETER Experiment Name: At_42deg_Heat_P Parameter: Timepoint (hr) Value: 6
  misc_feature: MA Experiment 20000173 PARAMETER Experiment Name: At_42deg_Heat_P Parameter: Tissue Value: Aerial
  misc_feature: MA Experiment ID: 20000184 Result: Down-regulated in Transcription
  misc_feature: MA Experiment 20000184 PARAMETER Experiment Name: At_Shoots__P Parameter: Age (day) Value: 7
  misc_feature: MA Experiment 20000184 PARAMETER Experiment Name: At_Shoots__P Parameter: Tissue Value: Shoots vs. Whole Plant
  misc_feature: MA Experiment ID: 20001248 Result: Up-regulated in Transcription
  misc_feature: MA Experiment 20001248 PARAMETER Experiment Name: At_Far-red-induction_P Parameter: Age (day) Value: 7
  misc_feature: MA Experiment 20001248 PARAMETER Experiment Name: At_Far-red-induction_P Parameter: Light Value: Far-red vs. White
  misc_feature: MA Experiment 20001248 PARAMETER Experiment Name: At_Far-red-induction_P Parameter: Organism Value: A. thaliana
  misc_feature: MA Experiment 20001248 PARAMETER Experiment Name: At_Far-red-induction_P Parameter: Plant Line Value: Columbia
  misc_feature: MA Experiment 20001248 PARAMETER Experiment Name: At_Far-red-induction_P Parameter: Timepoint (hr) Value: 4
  misc_feature: MA Experiment 20001248 PARAMETER Experiment Name: At_Far-red-induction_P Parameter: Tissue Value: Whole Plant
  misc_feature: MA Experiment ID: 20001450 Result: Up-regulated in Transcription
  misc_feature: MA Experiment 20001450 PARAMETER Experiment Name: At_Far-red-induction_P Parameter: Age (day) Value: 7
  misc_feature: MA Experiment 20001450 PARAMETER Experiment Name: At_Far-red-induction_P Parameter: Light Value: Far-red vs. White
  misc_feature: MA Experiment 20001450 PARAMETER Experiment Name: At_Far-red-induction_P Parameter: Organism Value: A. thaliana
  misc_feature: MA Experiment 20001450 PARAMETER Experiment Name: At_Far-red-induction_P Parameter: Plant Line Value: Columbia
  misc_feature: MA Experiment 20001450 PARAMETER Experiment Name: At_Far-red-induction_P Parameter: Timepoint (hr) Value: 8
  misc_feature: MA Experiment 20001450 PARAMETER Experiment Name: At_Far-red-induction_P Parameter: Tissue Value: Whole Plant
gtcgacccacgcgtccgagaagaaaaccctagatttctccgtctctctaatttcctttctctctcaagcttctcagaaagtctgacactttcgagaatctaatctccaaatttcttgtctttttggagaaggaatcgaattatgtacaaggaacgtagtggaggaggtggtggtgggtcatcgagatcagagatcctcggtggagctattgatcggaaacgaatcaacgatgcactcaataagaaactagagaaatcttcaacttccaccaccacatctagggttttctcttctaaagacaaagatcccttttccttcacatctactaaaactcagcttcctgatgtggaatcggaaactgatagtgaagggtctgatgtgagtggatcggagggtgatgatacgtcgtggatctcttggttttgtaatttgagagggaatgatttcttctgtgaagtcgatgaagattatattcaagatgatttcaatctttgtggtttaagtggtcaagtcccttactatgattatgcacttgatctcattttagatgttgatgcttccaacagtgagatgtttactgatgaacagcatgaaatggtggaatcagctgctgagatgctatatggtcttattcatgttcgttacattttgactactaaaggaatggctgcaatgactgagaagtacaagaactgtgatttcgggagatgcccgagagttttctgttgcggtcagtcttgtcttccagttggacaatccgatatcccgagatcgagtactgtgaagatatactgccctaaatgcgaggatatatcttacccgcgatctaaattccaaggcaatattgatggagcgtactttggaaccacattccctcacttgttcttgatgacttacgggaacttaaagccgcagaagcctactcaaagctatgtcccaaaaatctttggcttcaaggtacacaaaccatgatactagtgctctgcattctcaatggtgatacatttagtggctctgtaattgcatccggatgagcaactgaaacgatagctgcggtgactggagcatacatcaaccatt

SEQ ID NO: 40917 - protein, 276 aa, Arabidopsis thaliana
  peptide (1)..(276): Ceres Seq. ID no. 13492125
  misc_feature (86)..(264): Pfam Name: Casein kinase II regulatory subunit Pfam Description: Casein kinase II regulatory subunit
  misc_feature (1)..(276): Homolog of NCBI NO: 15238013 NR Description: casein kinase II beta chain, putative
  misc_feature (1)..(276): Homolog of NCBI NO: 15236597 NR Description: casein kinase II beta chain, putative
  misc_feature (23)..(276): Homolog of NCBI NO: 11527002 NR Description: protein kinase CK2 regulatory subunit CK2B2 [Zea
  misc_feature (12)..(275): Homolog of NCBI NO: 37536920 NR Description: putative casein kinase II beta subunit
  misc_feature (1)..(276): Homolog of NCBI NO: 11527004 NR Description: protein kinase CK2 regulatory subunit CK2B3 [Zea
  misc_feature (1)..(276): Homolog of NCBI NO: 34901776 NR Description: OJ1058_B11.17 [Oryza sativa (japonica
  misc_feature (1)..(275): Homolog of NCBI NO: 21261784 NR Description: protein kinase Ck2 regulatory subunit 2
  misc_feature (1)..(274): Homolog of NCBI NO: 30689795 NR Description: casein kinase II beta chain, putative
  misc_feature (1)..(274): Homolog of NCBI NO: 15224934 NR Description: casein kinase II beta chain, putative
  misc_feature (1)..(276): Homolog of NCBI NO: 15232283 NR Description: casein kinase II beta chain, putative
MYKERSGGGGGGSSRSEILGGAIDRKRINDALNKKLEKSSTSTTTSRVFSSKDKDPFSFTSTKTQLPDVESETDSEGSDVSGSEGDDTSWISWFCNLRGNDFFCEVDEDYIQDDFNLCGLSGQVPYYDYALDLILDVDASNSEMFTDEQHEMVESAAEMLYGLIHVRYILTTKGMAAMTEKYKNCDFGRCPRVFCCGQSCLPVGQSDIPRSSTVKIYCPKCEDISYPRSKFQGNIDGAYFGTTFPHLFLMTYGNLKPQKPTQSYVPKIFGFKVHKP

SEQ ID NO: 40918 - DNA, 1334 bp, Arabidopsis thaliana
  misc_feature (1)..(1334): Ceres Seq. ID no. 12562248
  misc_feature: MA Experiment ID: 108501 Result: Up-regulated in Transcription
  misc_feature: MA Experiment 108501 PARAMETER Experiment Name: At_ap2_floral_buds_cDNA_P Parameter: Plant Line Value: ap2 (Ler.)
  misc_feature: MA Experiment 108501 PARAMETER Experiment Name: At_ap2_floral_buds_cDNA_P Parameter: Tissue Value: Closed Flower
  misc_feature: MA Experiment ID: 108577 Result: Down-regulated in Transcription
  misc_feature: MA Experiment 108577 PARAMETER Experiment Name: At_42deg_Heat_cDNA_P Parameter: Temperature (deg C) Value: 42 vs. 22
  misc_feature: MA Experiment 108577 PARAMETER Experiment Name: At_42deg_Heat_cDNA_P Parameter: Timepoint (hr) Value: 6
  misc_feature: MA Experiment 108577 PARAMETER Experiment Name: At_42deg_Heat_cDNA_P Parameter: Tissue Value: Aerial
  misc_feature: MA Experiment ID: 108579 Result: Up-regulated in Transcription
  misc_feature: MA Experiment 108579 PARAMETER Experiment Name: At_4deg_Cold_cDNA_P Parameter: Temperature (deg C) Value: 4 vs. 22
  misc_feature: MA Experiment 108579 PARAMETER Experiment Name: At_4deg_Cold_cDNA_P Parameter: Timepoint (hr) Value: 6
  misc_feature: MA Experiment 108579 PARAMETER Experiment Name: At_4deg_Cold_cDNA_P Parameter: Tissue Value: Aerial
  misc_feature: MA Experiment ID: 108585 Result: Up-regulated in Transcription
  misc_feature: MA Experiment 108585 PARAMETER Experiment Name: At_5mM_NaNP_cDNA_P Parameter: Timepoint (hr) Value: 6
  misc_feature: MA Experiment 108585 PARAMETER Experiment Name: At_5mM_NaNP_cDNA_P Parameter: Tissue Value: Aerial
  misc_feature: MA Experiment 108585 PARAMETER Experiment Name: At_5mM_NaNP_cDNA_P Parameter: Treatment Value: null
  misc_feature: MA Experiment ID: 20000112 Result: Down-regulated in Transcription
  misc_feature: MA Experiment 20000112 PARAMETER Experiment Name: At_42deg_Heat_cDNA_P Parameter: Temperature (deg C) Value: 42 vs. 22
  misc_feature: MA Experiment 20000112 PARAMETER Experiment Name: At_42deg_Heat_cDNA_P Parameter: Timepoint (hr) Value: 2
  misc_feature: MA Experiment 20000112 PARAMETER Experiment Name: At_42deg_Heat_cDNA_P Parameter: Tissue Value: Aerial
  misc_feature: MA Experiment ID: 20000113 Result: Down-regulated in Transcription
  misc_feature: MA Experiment 20000113 PARAMETER Experiment Name: At_42deg_Heat_cDNA_P Parameter: Temperature (deg C) Value: 42 vs. 22
  misc_feature: MA Experiment 20000113 PARAMETER Experiment Name: At_42deg_Heat_cDNA_P Parameter: Timepoint (hr) Value: 8
  misc_feature: MA Experiment 20000113 PARAMETER Experiment Name: At_42deg_Heat_cDNA_P Parameter: Tissue Value: Aerial
  misc_feature: MA Experiment ID: 20000184 Result: Up-regulated in Transcription
  misc_feature: MA Experiment 20000184 PARAMETER Experiment Name: At_Shoots__P Parameter: Age (day) Value: 7
  misc_feature: MA Experiment 20000184 PARAMETER Experiment Name: At_Shoots__P Parameter: Tissue Value: Shoots vs. Whole Plant
  misc_feature: MA Experiment ID: 20000185 Result: Down-regulated in Transcription
  misc_feature: MA Experiment 20000185 PARAMETER Experiment Name: At_Roots__P Parameter: Age (day) Value: 7 vs. 21
  misc_feature: MA Experiment 20000185 PARAMETER Experiment Name: At_Roots__P Parameter: Organism Value: A. thaliana
  misc_feature: MA Experiment 20000185 PARAMETER Experiment Name: At_Roots__P Parameter: Tissue Value: Roots vs. Whole Plant
  misc_feature: MA Experiment ID: 20000214 Result: Up-regulated in Transcription
  misc_feature: MA Experiment 20000214 PARAMETER Experiment Name: At_4deg_Cold_P Parameter: Timepoint (hr) Value: 6
  misc_feature: MA Experiment ID: 20000234 Result: Up-regulated in Transcription
  misc_feature: MA Experiment 20000234 PARAMETER Experiment Name: At_Siliques_P Parameter: Age (day) Value: 21
  misc_feature: MA Experiment 20000234 PARAMETER Experiment Name: At_Siliques_P Parameter: Organism Value: A. thaliana
  misc_feature: MA Experiment 20000234 PARAMETER Experiment Name: At_Siliques_P Parameter: Plant Line Value: WS
  misc_feature: MA Experiment 20000234 PARAMETER Experiment Name: At_Siliques_P Parameter: Tissue Value: Less Than 5mm Siliques vs. Whole Plant
  misc_feature: MA Experiment ID: 20000235 Result: Up-regulated in Transcription
  misc_feature: MA Experiment 20000235 PARAMETER Experiment Name: At_Siliques_P Parameter: Age (day) Value: 21
  misc_feature: MA Experiment 20000235 PARAMETER Experiment Name: At_Siliques_P Parameter: Organism Value: A. thaliana
  misc_feature: MA Experiment 20000235 PARAMETER Experiment Name: At_Siliques_P Parameter: Plant Line Value: WS
  misc_feature: MA Experiment 20000235 PARAMETER Experiment Name: At_Siliques_P Parameter: Tissue Value: 5-10mm Siliques vs. Whole Plant
  misc_feature: MA Experiment ID: 20000264 Result: Up-regulated in Transcription
  misc_feature: MA Experiment 20000264 PARAMETER Experiment Name: At_Open_Flower_P Parameter: Age (day) Value: 21
  misc_feature: MA Experiment 20000264 PARAMETER Experiment Name: At_Open_Flower_P Parameter: Plant Line Value: WS
  misc_feature: MA Experiment 20000264 PARAMETER Experiment Name: At_Open_Flower_P Parameter: Tissue Value: Open Flower vs. Whole Plant
  misc_feature: MA Experiment ID: 20000265 Result: Up-regulated in Transcription
  misc_feature: MA Experiment 20000265 PARAMETER Experiment Name: At_Open_Flower_P Parameter: Age (day) Value: 21
  misc_feature: MA Experiment 20000265 PARAMETER Experiment Name: At_Open_Flower_P Parameter: Plant Line Value: WS
  misc_feature: MA Experiment 20000265 PARAMETER Experiment Name: At_Open_Flower_P Parameter: Tissue Value: Closed Flower vs. Whole Plant
  misc_feature: MA Experiment ID: 20000286 Result: Up-regulated in Transcription
  misc_feature: MA Experiment 20000286 PARAMETER Experiment Name: At_Open_Flower_P Parameter: Age (day) Value: 21
  misc_feature: MA Experiment 20000286 PARAMETER Experiment Name: At_Open_Flower_P Parameter: Plant Line Value: WS
  misc_feature: MA Experiment 20000286 PARAMETER Experiment Name: At_Open_Flower_P Parameter: Tissue Value: Half Open vs. Whole Plant
  misc_feature: MA Experiment ID: 20000438 Result: Up-regulated in Transcription
  misc_feature: MA Experiment 20000438 PARAMETER Experiment Name: At_Shoots__P Parameter: Age (day) Value: 14
  misc_feature: MA Experiment 20000438 PARAMETER Experiment Name: At_Shoots__P Parameter: Tissue Value: Shoots vs. Whole Plant
  misc_feature: MA Experiment ID: 20000439 Result: Down-regulated in Transcription
  misc_feature: MA Experiment 20000439 PARAMETER Experiment Name: At_Roots__P Parameter: Age (day) Value: 14 vs. 21
  misc_feature: MA Experiment 20000439 PARAMETER Experiment Name: At_Roots__P Parameter: Organism Value: A. thaliana
  misc_feature: MA Experiment 20000439 PARAMETER Experiment Name: At_Roots__P Parameter: Tissue Value: Roots vs. Whole Plant
  misc_feature: MA Experiment ID: 20000441 Result: Up-regulated in Transcription
  misc_feature: MA Experiment 20000441 PARAMETER Experiment Name: At_1uM_BR-BRZ__P Parameter: Tissue Value: Shoot Apices
  misc_feature: MA Experiment 20000441 PARAMETER Experiment Name: At_1uM_BR-BRZ__P Parameter: Treatment Value: 1uM BR vs. No Treatment
  misc_feature: MA Experiment ID: 20000451 Result: Up-regulated in Transcription
  misc_feature: MA Experiment 20000451 PARAMETER Experiment Name: At_CS6879_Shoots-Roots_P Parameter: Age (day) Value: 14
  misc_feature: MA Experiment 20000451 PARAMETER Experiment Name: At_CS6879_Shoots-Roots_P Parameter: Organism Value: A. thaliana
  misc_feature: MA Experiment 20000451 PARAMETER Experiment Name: At_CS6879_Shoots-Roots_P Parameter: Plant Line Value: CS6879 vs. WS
  misc_feature: MA Experiment 20000451 PARAMETER Experiment Name: At_CS6879_Shoots-Roots_P Parameter: Tissue Value: Roots
  misc_feature: MA Experiment ID: 20000495 Result: Up-regulated in Transcription
  misc_feature: MA Experiment 20000495 PARAMETER Experiment Name: At_Guard_Cells_P Parameter: Harvest Date Value: 8/2/2002
  misc_feature: MA Experiment 20000495 PARAMETER Experiment Name: At_Guard_Cells_P Parameter: Organism Value: A. thaliana
  misc_feature: MA Experiment 20000495 PARAMETER Experiment Name: At_Guard_Cells_P Parameter: Tissue Value: Guard Cells vs. Leaves
  misc_feature: MA Experiment ID: 20000573 Result: Up-regulated in Transcription
  misc_feature: MA Experiment 20000573 PARAMETER Experiment Name: At_100uM_ABA_Mutants__P Parameter: Organism Value: A. thaliana
  misc_feature: MA Experiment 20000573 PARAMETER Experiment Name: At_100uM_ABA_Mutants__P Parameter: Plant Line Value: CS22 vs. Ler wt
  misc_feature: MA Experiment 20000573 PARAMETER Experiment Name: At_100uM_ABA_Mutants__P Parameter: Timepoint (hr) Value: N/A
  misc_feature: MA Experiment 20000573 PARAMETER Experiment Name: At_100uM_ABA_Mutants__P Parameter: Tissue Value: Whole Plant
  misc_feature: MA Experiment 20000573 PARAMETER Experiment Name: At_100uM_ABA_Mutants__P Parameter: Treatment Value: None
  misc_feature: MA Experiment ID: 20000574 Result: Up-regulated in Transcription
  misc_feature: MA Experiment 20000574 PARAMETER Experiment Name: At_100uM_ABA_Mutants__P Parameter: Organism Value: A. thaliana
  misc_feature: MA Experiment 20000574 PARAMETER Experiment Name: At_100uM_ABA_Mutants__P Parameter: Plant Line Value: CS23 vs. Ler wt
  misc_feature: MA Experiment 20000574 PARAMETER Experiment Name: At_100uM_ABA_Mutants__P Parameter: Timepoint (hr) Value: N/A
  misc_feature: MA Experiment 20000574 PARAMETER Experiment Name: At_100uM_ABA_Mutants__P Parameter: Tissue Value: Whole Plant
  misc_feature: MA Experiment 20000574 PARAMETER Experiment Name: At_100uM_ABA_Mutants__P Parameter: Treatment Value: None
  misc_feature: MA Experiment ID: 20001555 Result: Down-regulated in Transcription
  misc_feature: MA Experiment 20001555 PARAMETER Experiment Name: At_Drought_Soil_Dry_P Parameter: Age (day) Value: 24
  misc_feature: MA Experiment 20001555 PARAMETER Experiment Name: At_Drought_Soil_Dry_P Parameter: Organism Value: A. thaliana
  misc_feature: MA Experiment 20001555 PARAMETER Experiment Name: At_Drought_Soil_Dry_P Parameter: Plant Line Value: WS
  misc_feature: MA Experiment 20001555 PARAMETER Experiment Name: At_Drought_Soil_Dry_P Parameter: Post Timepoint (hr) Value: None
  misc_feature: MA Experiment 20001555 PARAMETER Experiment Name: At_Drought_Soil_Dry_P Parameter: Post-Treatment Value: None
  misc_feature: MA Experiment 20001555 PARAMETER Experiment Name: At_Drought_Soil_Dry_P Parameter: Timepoint (day) Value: 10
  misc_feature: MA Experiment 20001555 PARAMETER Experiment Name: At_Drought_Soil_Dry_P Parameter: Treatment Value: Drought vs. No Drought
  misc_feature: MA Experiment ID: 20001557 Result: Up-regulated in Transcription
  misc_feature: MA Experiment 20001557 PARAMETER Experiment Name: At_Drought_Soil_Dry_P Parameter: Age (day) Value: 27
  misc_feature: MA Experiment 20001557 PARAMETER Experiment Name: At_Drought_Soil_Dry_P Parameter: Organism Value: A. thaliana
  misc_feature: MA Experiment 20001557 PARAMETER Experiment Name: At_Drought_Soil_Dry_P Parameter: Plant Line Value: WS
  misc_feature: MA Experiment 20001557 PARAMETER Experiment Name: At_Drought_Soil_Dry_P Parameter: Post Timepoint (hr) Value: 3
  misc_feature: MA Experiment 20001557 PARAMETER Experiment Name: At_Drought_Soil_Dry_P Parameter: Post-Treatment Value: Re-Water vs. No Drought
  misc_feature: MA Experiment 20001557 PARAMETER Experiment Name: At_Drought_Soil_Dry_P Parameter: Timepoint (day) Value: 13
  misc_feature: MA Experiment 20001557 PARAMETER Experiment Name: At_Drought_Soil_Dry_P Parameter: Treatment Value: Drought vs. No Drought
  misc_feature: MA Experiment ID: 20001558 Result: Up-regulated in Transcription
  misc_feature: MA Experiment 20001558 PARAMETER Experiment Name: At_Drought_Soil_Dry_P Parameter: Age (day) Value: 27
  misc_feature: MA Experiment 20001558 PARAMETER Experiment Name: At_Drought_Soil_Dry_P Parameter: Organism Value: A. thaliana
  misc_feature: MA Experiment 20001558 PARAMETER Experiment Name: At_Drought_Soil_Dry_P Parameter: Plant Line Value: WS
  misc_feature: MA Experiment 20001558 PARAMETER Experiment Name: At_Drought_Soil_Dry_P Parameter: Post Timepoint (hr) Value: 6
  misc_feature: MA Experiment 20001558 PARAMETER Experiment Name: At_Drought_Soil_Dry_P Parameter: Post-Treatment Value: Re-Water vs. No Drought
  misc_feature: MA Experiment 20001558 PARAMETER Experiment Name: At_Drought_Soil_Dry_P Parameter: Timepoint (day) Value: 13
  misc_feature: MA Experiment 20001558 PARAMETER Experiment Name: At_Drought_Soil_Dry_P Parameter: Treatment Value: Drought vs. No Drought
  misc_feature: MA Experiment ID: 20001560 Result: Up-regulated in Transcription
  misc_feature: MA Experiment 20001560 PARAMETER Experiment Name: At_Drought_Soil_Dry_P Parameter: Age (day) Value: 28
  misc_feature: MA Experiment 20001560 PARAMETER Experiment Name: At_Drought_Soil_Dry_P Parameter: Organism Value: A. thaliana
  misc_feature: MA Experiment 20001560 PARAMETER Experiment Name: At_Drought_Soil_Dry_P Parameter: Plant Line Value: WS
  misc_feature: MA Experiment 20001560 PARAMETER Experiment Name: At_Drought_Soil_Dry_P Parameter: Post Timepoint (hr) Value: None
  misc_feature: MA Experiment 20001560 PARAMETER Experiment Name: At_Drought_Soil_Dry_P Parameter: Post-Treatment Value: None
  misc_feature: MA Experiment 20001560 PARAMETER Experiment Name: At_Drought_Soil_Dry_P Parameter: Timepoint (day) Value: 14
  misc_feature: MA Experiment 20001560 PARAMETER Experiment Name: At_Drought_Soil_Dry_P Parameter: Treatment Value: Drought vs. No Drought
  misc_feature: MA Experiment ID: 20001904 Result: Down-regulated in Transcription
  misc_feature: MA Experiment 20001904 PARAMETER Experiment Name: At_Drought_Reproduction_P Parameter: Age (day) Value: 37
  misc_feature: MA Experiment 20001904 PARAMETER Experiment Name: At_Drought_Reproduction_P Parameter: Organism Value: A. thaliana
  misc_feature: MA Experiment 20001904 PARAMETER Experiment Name: At_Drought_Reproduction_P Parameter: Plant Line Value: WS
  misc_feature: MA Experiment 20001904 PARAMETER Experiment Name: At_Drought_Reproduction_P Parameter: Timepoint (day) Value: 7
  misc_feature: MA Experiment 20001904 PARAMETER Experiment Name: At_Drought_Reproduction_P Parameter: Tissue Value: Rosettes
  misc_feature: MA Experiment 20001904 PARAMETER Experiment Name: At_Drought_Reproduction_P Parameter: Treatment Value: Drought vs. No Drought
  misc_feature: MA Experiment ID: 20001905 Result: Down-regulated in Transcription
  misc_feature: MA Experiment 20001905 PARAMETER Experiment Name: At_Drought_Reproduction_P Parameter: Age (day) Value: 40
  misc_feature: MA Experiment 20001905 PARAMETER Experiment Name: At_Drought_Reproduction_P Parameter: Organism Value: A. thaliana
  misc_feature: MA Experiment 20001905 PARAMETER Experiment Name: At_Drought_Reproduction_P Parameter: Plant Line Value: WS
  misc_feature: MA Experiment 20001905 PARAMETER Experiment Name: At_Drought_Reproduction_P Parameter: Timepoint (day) Value: 10
  misc_feature: MA Experiment 20001905 PARAMETER Experiment Name: At_Drought_Reproduction_P Parameter: Tissue Value: Rosettes
  misc_feature: MA Experiment 20001905 PARAMETER Experiment Name: At_Drought_Reproduction_P Parameter: Treatment Value: Drought vs. No Drought
  misc_feature: MA Experiment ID: 20001906 Result: Down-regulated in Transcription
  misc_feature: MA Experiment 20001906 PARAMETER Experiment Name: At_Drought_Reproduction_P Parameter: Age (day) Value: 35
  misc_feature: MA Experiment 20001906 PARAMETER Experiment Name: At_Drought_Reproduction_P Parameter: Organism Value: A. thaliana
  misc_feature: MA Experiment 20001906 PARAMETER Experiment Name: At_Drought_Reproduction_P Parameter: Plant Line Value: WS
  misc_feature: MA Experiment 20001906 PARAMETER Experiment Name: At_Drought_Reproduction_P Parameter: Timepoint (day) Value: 5
  misc_feature: MA Experiment 20001906 PARAMETER Experiment Name: At_Drought_Reproduction_P Parameter: Tissue Value: Siliques
  misc_feature: MA Experiment 20001906 PARAMETER Experiment Name: At_Drought_Reproduction_P Parameter: Treatment Value: Drought vs. No Drought
tttttttctataaaaggtacacgtacactcatgtatctacttactcactcctttcagaaacccaaaccctcattccaaaaaatggggtctcgctctcaaaacctctcctttctcgtcctcctcctccttggcttcgttgccgtctcctatgcttgcgactgtacccctcctaaaccatcaccggcgcctcacaaaccaccaaaacatcctgtcaaaccgcctaaacctcctgccgtcaaaccacctaaaccacgggcagtaaaaccacctaccccaaaaccgcccaccgtcaaaccccatcctaaaccaccaaccgtcaaaccccaccctaagccacccaccgtcaaaccaccacaccctaaaccacccaccaaatctcacccccacccaaaacctcccatagtaaagccaccaaccaagcctcctccgtccacccctaaacctcccaccaaacctcccccgtccactcctaaacctcccacgaccaagcctcctccctctactccgaaaccgccccaccacaagcctccacctacaccatgcccaccaccaacaccaacaccgactccaccagttgtaacaccgccaacaccaaccccacccgtcataactccaccaacaccaaccccacccgtcgtaacaccgccaacgccaactccacccgtcattacaccaccaacaccaactccacccgtcattacaccaccaacaccaacaccacccgtcgtgacacctccaacaccaacaccacccgtagtaacaccaccaacaccaactcctcctacgcctattccagagacttgcccaattgacacgaagaagctaggcgcttgtgtggacgttcttggaggtttgattcacatcggacttggaaaaagccacgccaaggcagaatgttgtccggttttaggaggtttacttgacctagacgcagccgtttgtctatgtaccaccattaagctcaaacttctcaacatcgaccttgttctccccattgctcttgagcttcttctcgactgtggaaaaactccaccatctgacttcaaatgtcccgcttaatcgatgtagaacgttgagagtctctggacgactccaaaagtttcgtttcttcaagaaatttgttagtttcatgatctatttggtaatgggaggttaatctgcatatgtgcgacctttagttacatgtttcatttgatacaataaaaggcgttgtaatttgggtttgagatctcaatttctttgggttttcttgttatgttgtacttttaagaagaagaaaaaaaactgttaaacgatataactttttttttaatatgaacaagtttgtatctgtc

SEQ ID NO: 40919 - protein, 352 aa, Arabidopsis thaliana
  peptide (1)..(352): Ceres Seq. ID no. 12562249
  misc_feature (268)..(350): Pfam Name: Protease inhibitor/seed storage/LTP family Pfam Description: Protease inhibitor/seed storage/LTP family
  misc_feature (56)..(352): Homolog of NCBI NO: 15022163 NR Description: putative proline-rich protein [Solanum brevidens]
  misc_feature (56)..(352): Homolog of NCBI NO: 1076501 NR Description: cell wall protein - alfalfa
  misc_feature (63)..(352): Homolog of NCBI NO: 19521 NR Description: proline rich protein [Lycopersicon esculentum]
  misc_feature (56)..(352): Homolog of NCBI NO: 1709767 NR Description: 36.4 KD PROLINE-RICH PROTEIN
  misc_feature (28)..(272): Homolog of NCBI NO: 7446482 NR Description: probable cell wall-plasma membrane linker protein
  misc_feature (28)..(257): Homolog of NCBI NO: 25453525 NR Description: cell wall-plasma membrane linker protein homolog
  misc_feature (56)..(352): Homolog of NCBI NO: 7446482 NR Description: probable cell wall-plasma membrane linker protein
  misc_feature (63)..(352): Homolog of NCBI NO: 25453525 NR Description: cell wall-plasma membrane linker protein homolog
  misc_feature (28)..(352): Homolog of NCBI NO: 11994732 NR Description: contains similarity to cell wall-plasma membrane
  misc_feature (11)..(352): Homolog of NCBI NO: 15233282 NR Description: unknown protein; protein id: At3g22120.1
FFSIKGTRTLMYLLTHSFQKPKPSFQKMGSRSQNLSFLVLLLLGFVAVSYACDCTPPKPSPAPHKPPKHPVKPPKPPAVKPPKPRAVKPPTPKPPTVKPHPKPPTVKPHPKPPTVKPPHPKPPTKSHPHPKPPIVKPPTKPPPSTPKPPTKPPPSTPKPPTTKPPPSTPKPPHHKPPPTPCPPPTPTPTPPVVTPPTPTPPVITPPTPTPPVVTPPTPTPPVITPPTPTPPVITPPTPTPPVVTPPTPTPPVVTPPTPTPPTPIPETCPIDTKKLGACVDVLGGLIHIGLGKSHAKAECCPVLGGLLDLDAAVCLCTTIKLKLLNIDLVLPIALELLLDCGKTPPSDFKCPA

SEQ ID NO: 40920 - protein, 342 aa, Arabidopsis thaliana
  peptide (1)..(342): Ceres Seq. ID no. 12562250
  misc_feature (258)..(340): Pfam Name: Protease inhibitor/seed storage/LTP family Pfam Description: Protease inhibitor/seed storage/LTP family
  misc_feature (46)..(342): Homolog of NCBI NO: 15022163 NR Description: putative proline-rich protein [Solanum brevidens]
  misc_feature (46)..(342): Homolog of NCBI NO: 1076501 NR Description: cell wall protein - alfalfa
  misc_feature (53)..(342): Homolog of NCBI NO: 19521 NR Description: proline rich protein [Lycopersicon esculentum]
  misc_feature (46)..(342): Homolog of NCBI NO: 1709767 NR Description: 36.4 KD PROLINE-RICH PROTEIN
  misc_feature (18)..(262): Homolog of NCBI NO: 7446482 NR Description: probable cell wall-plasma membrane linker protein
  misc_feature (18)..(247): Homolog of NCBI NO: 25453525 NR Description: cell wall-plasma membrane linker protein homolog
  misc_feature (46)..(342): Homolog of NCBI NO: 7446482 NR Description: probable cell wall-plasma membrane linker protein
  misc_feature (53)..(342): Homolog of NCBI NO: 25453525 NR Description: cell wall-plasma membrane linker protein homolog
  misc_feature (18)..(342): Homolog of NCBI NO: 11994732 NR Description: contains similarity to cell wall-plasma membrane
  misc_feature (1)..(342): Homolog of NCBI NO: 15233282 NR Description: unknown protein; protein id: At3g22120.1
MYLLTHSFQKPKPSFQKMGSRSQNLSFLVLLLLGFVAVSYACDCTPPKPSPAPHKPPKHPVKPPKPPAVKPPKPRAVKPPTPKPPTVKPHPKPPTVKPHPKPPTVKPPHPKPPTKSHPHPKPPIVKPPTKPPPSTPKPPTKPPPSTPKPPTTKPPPSTPKPPHHKPPPTPCPPPTPTPTPPVVTPPTPTPPVITPPTPTPPVVTPPTPTPPVITPPTPTPPVITPPTPTPPVVTPPTPTPPVVTPPTPTPPTPIPETCPIDTKKLGACVDVLGGLIHIGLGKSHAKAECCPVLGGLLDLDAAVCLCTTIKLKLLNIDLVLPIALELLLDCGKTPPSDFKCPA

SEQ ID NO: 40921 - protein, 325 aa, Arabidopsis thaliana
  peptide (1)..(325): Ceres Seq. ID no. 12562251
  misc_feature (241)..(323): Pfam Name: Protease inhibitor/seed storage/LTP family Pfam Description: Protease inhibitor/seed storage/LTP family
  misc_feature (29)..(325): Homolog of NCBI NO: 15022163 NR Description: putative proline-rich protein [Solanum brevidens]
  misc_feature (29)..(325): Homolog of NCBI NO: 1076501 NR Description: cell wall protein - alfalfa
  misc_feature (36)..(325): Homolog of NCBI NO: 19521 NR Description: proline rich protein [Lycopersicon esculentum]
  misc_feature (29)..(325): Homolog of NCBI NO: 1709767 NR Description: 36.4 KD PROLINE-RICH PROTEIN
  misc_feature (1)..(245): Homolog of NCBI NO: 7446482 NR Description: probable cell wall-plasma membrane linker protein
  misc_feature (1)..(230): Homolog of NCBI NO: 25453525 NR Description: cell wall-plasma membrane linker protein homolog
  misc_feature (29)..(325): Homolog of NCBI NO: 7446482 NR Description: probable cell wall-plasma membrane linker protein
  misc_feature (36)..(325): Homolog of NCBI NO: 25453525 NR Description: cell wall-plasma membrane linker protein homolog
  misc_feature (1)..(325): Homolog of NCBI NO: 11994732 NR Description: contains similarity to cell wall-plasma membrane
  misc_feature (1)..(325): Homolog of NCBI NO: 15233282 NR Description: unknown protein; protein id: At3g22120.1
MGSRSQNLSFLVLLLLGFVAVSYACDCTPPKPSPAPHKPPKHPVKPPKPPAVKPPKPRAVKPPTPKPPTVKPHPKPPTVKPHPKPPTVKPPHPKPPTKSHPHPKPPIVKPPTKPPPSTPKPPTKPPPSTPKPPTTKPPPSTPKPPHHKPPPTPCPPPTPTPTPPVVTPPTPTPPVITPPTPTPPVVTPPTPTPPVITPPTPTPPVITPPTPTPPVVTPPTPTPPVVTPPTPTPPTPIPETCPIDTKKLGACVDVLGGLIHIGLGKSHAKAECCPVLGGLLDLDAAVCLCTTIKLKLLNIDLVLPIALELLLDCGKTPPSDFKCPA

SEQ ID NO: 40922 - DNA, 839 bp, Arabidopsis thaliana
  misc_feature (1)..(839): Ceres Seq. ID no. 12371460
  misc_feature: MA Experiment ID: 108434 Result: Up-regulated in Transcription
  misc_feature: MA Experiment 108434 PARAMETER Experiment Name: At_Root_Tips_cDNA_P Parameter: Tissue Value: Root Tips
  misc_feature: MA Experiment ID: 108595 Result: Down-regulated in Transcription
  misc_feature: MA Experiment 108595 PARAMETER Experiment Name: At_Ler-pi_Ovule_cDNA_P Parameter: Plant Line Value: null
  misc_feature: MA Experiment ID: 20000069 Result: Up-regulated in Transcription
  misc_feature: MA Experiment 20000069 PARAMETER Experiment Name: At_100uM_ABA_Mutants_cDNA_P Parameter: Plant Line Value: CS23
  misc_feature: MA Experiment 20000069 PARAMETER Experiment Name: At_100uM_ABA_Mutants_cDNA_P Parameter: Timepoint (hr) Value: 6
  misc_feature: MA Experiment 20000069 PARAMETER Experiment Name: At_100uM_ABA_Mutants_cDNA_P Parameter: Tissue Value: Aerial
  misc_feature: MA Experiment 20000069 PARAMETER Experiment Name: At_100uM_ABA_Mutants_cDNA_P Parameter: Treatment Value: 100uM ABA vs. No Treatment
  misc_feature: MA Experiment ID: 20000070 Result: Up-regulated in Transcription
  misc_feature: MA Experiment 20000070 PARAMETER Experiment Name: At_100uM_ABA_Mutants_cDNA_P Parameter: Plant Line Value: CS24
  misc_feature: MA Experiment 20000070 PARAMETER Experiment Name: At_100uM_ABA_Mutants_cDNA_P Parameter: Timepoint (hr) Value: 6
  misc_feature: MA Experiment 20000070 PARAMETER Experiment Name: At_100uM_ABA_Mutants_cDNA_P Parameter: Tissue Value: Aerial
  misc_feature: MA Experiment 20000070 PARAMETER Experiment Name: At_100uM_ABA_Mutants_cDNA_P Parameter: Treatment Value: 100uM ABA vs. No Treatment
  misc_feature: MA Experiment ID: 20000071 Result: Up-regulated in Transcription
  misc_feature: MA Experiment 20000071 PARAMETER Experiment Name: At_100uM_ABA_Mutants_cDNA_P Parameter: Plant Line Value: CS8104
  misc_feature: MA Experiment 20000071 PARAMETER Experiment Name: At_100uM_ABA_Mutants_cDNA_P Parameter: Timepoint (hr) Value: 6
  misc_feature: MA Experiment 20000071 PARAMETER Experiment Name: At_100uM_ABA_Mutants_cDNA_P Parameter: Tissue Value: Aerial
  misc_feature: MA Experiment 20000071 PARAMETER Experiment Name: At_100uM_ABA_Mutants_cDNA_P Parameter: Treatment Value: 100uM ABA vs. No Treatment
  misc_feature: MA Experiment ID: 20000072 Result: Up-regulated in Transcription
  misc_feature: MA Experiment 20000072 PARAMETER Experiment Name: At_100uM_ABA_Mutants_cDNA_P Parameter: Plant Line Value: CS8105
  misc_feature: MA Experiment 20000072 PARAMETER Experiment Name: At_100uM_ABA_Mutants_cDNA_P Parameter: Timepoint (hr) Value: 6
  misc_feature: MA Experiment 20000072 PARAMETER Experiment Name: At_100uM_ABA_Mutants_cDNA_P Parameter: Tissue Value: Aerial
  misc_feature: MA Experiment 20000072 PARAMETER Experiment Name: At_100uM_ABA_Mutants_cDNA_P Parameter: Treatment Value: 100uM ABA vs. No Treatment
  misc_feature: MA Experiment ID: 20000086 Result: Up-regulated in Transcription
  misc_feature: MA Experiment 20000086 PARAMETER Experiment Name: At_100uM_ABA_Mutants_cDNA_P Parameter: Plant Line Value: CS22
  misc_feature: MA Experiment 20000086 PARAMETER Experiment Name: At_100uM_ABA_Mutants_cDNA_P Parameter: Timepoint (hr) Value: 6
  misc_feature: MA Experiment 20000086 PARAMETER Experiment Name: At_100uM_ABA_Mutants_cDNA_P Parameter: Tissue Value: Aerial
  misc_feature: MA Experiment 20000086 PARAMETER Experiment Name: At_100uM_ABA_Mutants_cDNA_P Parameter: Treatment Value: 100uM ABA vs. No Treatment
  misc_feature: MA Experiment ID: 20000087 Result: Up-regulated in Transcription
  misc_feature: MA Experiment 20000087 PARAMETER Experiment Name: At_100uM_ABA_Mutants_cDNA_P Parameter: Plant Line Value: WS
  misc_feature: MA Experiment 20000087 PARAMETER Experiment Name: At_100uM_ABA_Mutants_cDNA_P Parameter: Timepoint (hr) Value: 6
  misc_feature: MA Experiment 20000087 PARAMETER Experiment Name: At_100uM_ABA_Mutants_cDNA_P Parameter: Tissue Value: Aerial
  misc_feature: MA Experiment 20000087 PARAMETER Experiment Name: At_100uM_ABA_Mutants_cDNA_P Parameter: Treatment Value: 100uM ABA vs. No Treatment
  misc_feature: MA Experiment ID: 20000088 Result: Up-regulated in Transcription
  misc_feature: MA Experiment 20000088 PARAMETER Experiment Name: At_100uM_ABA_Mutants_cDNA_P Parameter: Plant Line Value: Landsberg
  misc_feature: MA Experiment 20000088 PARAMETER Experiment Name: At_100uM_ABA_Mutants_cDNA_P Parameter: Timepoint (hr) Value: 6
  misc_feature: MA Experiment 20000088 PARAMETER Experiment Name: At_100uM_ABA_Mutants_cDNA_P Parameter: Tissue Value: Aerial
  misc_feature: MA Experiment 20000088 PARAMETER Experiment Name: At_100uM_ABA_Mutants_cDNA_P Parameter: Treatment Value: 100uM ABA vs. No Treatment
  misc_feature: MA Experiment ID: 20000089 Result: Up-regulated in Transcription
  misc_feature: MA Experiment ID: 20000090 Result: Up-regulated in Transcription
  misc_feature: MA Experiment ID: 20000111 Result: Down-regulated in Transcription
  misc_feature: MA Experiment 20000111 PARAMETER Experiment Name: At_42deg_Heat_cDNA_P Parameter: Temperature (deg C) Value: 42 vs. 22
  misc_feature: MA Experiment 20000111 PARAMETER Experiment Name: At_42deg_Heat_cDNA_P Parameter: Timepoint (hr) Value: 6
  misc_feature: MA Experiment 20000111 PARAMETER Experiment Name: At_42deg_Heat_cDNA_P Parameter: Tissue Value: Aerial
  misc_feature: MA Experiment ID: 20000113 Result: Down-regulated in Transcription
  misc_feature: MA Experiment 20000113 PARAMETER Experiment Name: At_42deg_Heat_cDNA_P Parameter: Temperature (deg C) Value: 42 vs. 22
  misc_feature: MA Experiment 20000113 PARAMETER Experiment Name: At_42deg_Heat_cDNA_P Parameter: Timepoint (hr) Value: 8
  misc_feature: MA Experiment 20000113 PARAMETER Experiment Name: At_42deg_Heat_cDNA_P Parameter: Tissue Value: Aerial
  misc_feature: MA Experiment ID: 20000117 Result: Up-regulated in Transcription
  misc_feature: MA Experiment 20000117 PARAMETER Experiment Name: At_100uM_ABA_Mutants_cDNA_P Parameter: Plant Line Value: Columbia
  misc_feature: MA Experiment 20000117 PARAMETER Experiment Name: At_100uM_ABA_Mutants_cDNA_P Parameter: Timepoint (hr) Value: 6
  misc_feature: MA Experiment 20000117 PARAMETER Experiment Name: At_100uM_ABA_Mutants_cDNA_P Parameter: Tissue Value: Aerial
  misc_feature: MA Experiment 20000117 PARAMETER Experiment Name: At_100uM_ABA_Mutants_cDNA_P Parameter: Treatment Value: 100uM ABA vs. No Treatment
  misc_feature: MA Experiment ID: 20000173 Result: Down-regulated in Transcription
  misc_feature: MA Experiment 20000173 PARAMETER Experiment Name: At_42deg_Heat_P Parameter: Age (day) Value: 14
  misc_feature: MA Experiment 20000173 PARAMETER Experiment Name: At_42deg_Heat_P Parameter: Organism Value: A. thaliana
  misc_feature: MA Experiment 20000173 PARAMETER Experiment Name: At_42deg_Heat_P Parameter: Plant Line Value: WS
  misc_feature: MA Experiment 20000173 PARAMETER Experiment Name: At_42deg_Heat_P Parameter: Temperature (deg C) Value: 42 vs. 22
  misc_feature: MA Experiment 20000173 PARAMETER Experiment Name: At_42deg_Heat_P Parameter: Timepoint (hr) Value: 6
  misc_feature: MA Experiment 20000173 PARAMETER Experiment Name: At_42deg_Heat_P Parameter: Tissue Value: Aerial
  misc_feature: MA Experiment ID: 20000184 Result: Down-regulated in Transcription
  misc_feature: MA Experiment 20000184 PARAMETER Experiment Name: At_Shoots__P Parameter: Age (day) Value: 7
  misc_feature: MA Experiment 20000184 PARAMETER Experiment Name: At_Shoots__P Parameter: Tissue Value: Shoots vs. Whole Plant
  misc_feature: MA Experiment ID: 20000794 Result: Down-regulated in Transcription
  misc_feature: MA Experiment 20000794 PARAMETER Experiment Name: At_Petals_P Parameter: Age (day) Value: 23-25 days
  misc_feature: MA Experiment 20000794 PARAMETER Experiment Name: At_Petals_P Parameter: Plant Line Value: WS
  misc_feature: MA Experiment 20000794 PARAMETER Experiment Name: At_Petals_P Parameter: Tissue Value: Petals vs. Whole plant
  misc_feature: MA Experiment ID: 20001248 Result: Up-regulated in Transcription
  misc_feature: MA Experiment 20001248 PARAMETER Experiment Name: At_Far-red-induction_P Parameter: Age (day) Value: 7
  misc_feature: MA Experiment 20001248 PARAMETER Experiment Name: At_Far-red-induction_P Parameter: Light Value: Far-red vs. White
  misc_feature: MA Experiment 20001248 PARAMETER Experiment Name: At_Far-red-induction_P Parameter: Organism Value: A. thaliana
  misc_feature: MA Experiment 20001248 PARAMETER Experiment Name: At_Far-red-induction_P Parameter: Plant Line Value: Columbia
  misc_feature: MA Experiment 20001248 PARAMETER Experiment Name: At_Far-red-induction_P Parameter: Timepoint (hr) Value: 4
  misc_feature: MA Experiment 20001248 PARAMETER Experiment Name: At_Far-red-induction_P Parameter: Tissue Value: Whole Plant
atttttctcaacgtgaaagagagaaaagagaatctctcagaaggtgagcctaacaaagcgtgaatctctctttctctctctatctctctatctctctgtctccgagatcgcatcaccggaaatctccttctacggtggtggtggtgacagttgaccagagatggcggcggagaatgagagaaaatctccttcagcagtctccgatatgggagcttgggcaatgaatgtaataagctccgttggaatcatcatggcgaataaacaacttatgtcctcttctggattcgcatttagtttcgctacaactctcaccggattccacttcgctttaaccgcattggtcggtatggtatcaaacgctaccggattctctgcttcgaagcatgttcctatgtgggagcttatttggttctccattgttgggatggtaatctatagttgggcaatggaattggagaaacagtcgattattgcagcaaaggctttaaacagtgtgaaacatagcttaacagaggaagagtttgaacttttgaaggaaggtgtagaaactacacaatcaaaagatgttgaacttggccgcacaaaagattagagacagatggatagagaaagaaacatagtcttcaggtacaatttgttctgctataatttttgtatgttttgtgttatctaaaccaagagatcggatcctcggagattagtgtctaggcttcgatctaaagtttccttggttatacaaatgttttgtgttatttatatctttttacccaattccatggaaataacttcaatgaccacatgttcttgttttacgtagcactcaaagagtatattccttt

SEQ ID NO: 40923 - protein, 143 aa, Arabidopsis thaliana
  peptide (1)..(143): Ceres Seq. ID no. 12371461
  misc_feature (37)..(90): Homolog of NCBI NO: 26450366 NR Description: unknown protein [Arabidopsis thaliana]
  misc_feature (85)..(142): Homolog of NCBI NO: 26450366 NR Description: unknown protein [Arabidopsis thaliana]
  misc_feature (85)..(142): Homolog of NCBI NO: 18411172 NR Description: expressed protein
  misc_feature (4)..(90): Homolog of NCBI NO: 18411172 NR Description: expressed protein
  misc_feature (85)..(142): Homolog of NCBI NO: 21536703 NR Description: unknown [Arabidopsis thaliana]
  misc_feature (3)..(90): Homolog of NCBI NO: 21536703 NR Description: unknown [Arabidopsis thaliana]
  misc_feature (85)..(142): Homolog of NCBI NO: 18394949 NR Description: expressed protein
  misc_feature (3)..(90): Homolog of NCBI NO: 18394949 NR Description: expressed protein
  misc_feature (85)..(143): Homolog of NCBI NO: 15238957 NR Description: putative protein; protein id: At5g42420.1
  misc_feature (1)..(90): Homolog of NCBI NO: 15238957 NR Description: putative protein; protein id: At5g42420.1
MAAENERKSPSAVSDMGAWAMNVISSVGIIMANKQLMSSSGFAFSFATTLTGFHFALTALVGMVSNATGFSASKHVPMWELIWFSIVGMVIYSWAMELEKQSIIAAKALNSVKHSLTEEEFELLKEGVETTQSKDVELGRTKD

SEQ ID NO: 40924 - protein, 128 aa, Arabidopsis thaliana
  peptide (1)..(128): Ceres Seq. ID no. 12371462
  misc_feature (22)..(75): Homolog of NCBI NO: 26450366 NR Description: unknown protein [Arabidopsis thaliana]
  misc_feature (70)..(127): Homolog of NCBI NO: 26450366 NR Description: unknown protein [Arabidopsis thaliana]
  misc_feature (70)..(127): Homolog of NCBI NO: 18411172 NR Description: expressed protein
  misc_feature (1)..(75): Homolog of NCBI NO: 18411172 NR Description: expressed protein
  misc_feature (70)..(127): Homolog of NCBI NO: 21536703 NR Description: unknown [Arabidopsis thaliana]
  misc_feature (1)..(75): Homolog of NCBI NO: 21536703 NR Description: unknown [Arabidopsis thaliana]
  misc_feature (70)..(127): Homolog of NCBI NO: 18394949 NR Description: expressed protein
  misc_feature (1)..(75): Homolog of NCBI NO: 18394949 NR Description: expressed protein
  misc_feature (70)..(128): Homolog of NCBI NO: 15238957 NR Description: putative protein; protein id: At5g42420.1
  misc_feature (1)..(75): Homolog of NCBI NO: 15238957 NR Description: putative protein; protein id: At5g42420.1
MGAWAMNVISSVGIIMANKQLMSSSGFAFSFATTLTGFHFALTALVGMVSNATGFSASKHVPMWELIWFSIVGMVIYSWAMELEKQSIIAAKALNSVKHSLTEEEFELLKEGVETTQSKDVELGRTKD

SEQ ID NO: 40925 - protein, 123 aa, Arabidopsis thaliana
  peptide (1)..(123): Ceres Seq. ID no. 12371463
  misc_feature (17)..(70): Homolog of NCBI NO: 26450366 NR Description: unknown protein [Arabidopsis thaliana]
  misc_feature (65)..(122): Homolog of NCBI NO: 26450366 NR Description: unknown protein [Arabidopsis thaliana]
  misc_feature (65)..(122): Homolog of NCBI NO: 18411172 NR Description: expressed protein
  misc_feature (1)..(70): Homolog of NCBI NO: 18411172 NR Description: expressed protein
  misc_feature (65)..(122): Homolog of NCBI NO: 21536703 NR Description: unknown [Arabidopsis thaliana]
  misc_feature (1)..(70): Homolog of NCBI NO: 21536703 NR Description: unknown [Arabidopsis thaliana]
  misc_feature (65)..(122): Homolog of NCBI NO: 18394949 NR Description: expressed protein
  misc_feature (1)..(70): Homolog of NCBI NO: 18394949 NR Description: expressed protein
  misc_feature (65)..(123): Homolog of NCBI NO: 15238957 NR Description: putative protein; protein id: At5g42420.1
  misc_feature (1)..(70): Homolog of NCBI NO: 15238957 NR Description: putative protein; protein id: At5g42420.1
MNVISSVGIIMANKQLMSSSGFAFSFATTLTGFHFALTALVGMVSNATGFSASKHVPMWELIWFSIVGMVIYSWAMELEKQSIIAAKALNSVKHSLTEEEFELLKEGVETTQSKDVELGRTKD

SEQ ID NO: 40926 - DNA, 1466 bp, Arabidopsis thaliana
  misc_feature (1)..(1466): Ceres Seq. ID no. 13504682
  misc_feature: MA Experiment ID: 20000185 Result: Up-regulated in Transcription
  misc_feature: MA Experiment 20000185 PARAMETER Experiment Name: At_Roots__P Parameter: Age (day) Value: 7 vs. 21
  misc_feature: MA Experiment 20000185 PARAMETER Experiment Name: At_Roots__P Parameter: Organism Value: A. thaliana
  misc_feature: MA Experiment 20000185 PARAMETER Experiment Name: At_Roots__P Parameter: Tissue Value: Roots vs. Whole Plant
  misc_feature: MA Experiment ID: 20000227 Result: Up-regulated in Transcription
  misc_feature: MA Experiment 20000227 PARAMETER Experiment Name: At_Root-Tips-vs-Tops_P Parameter: Tissue Value: Root Tips vs. Root Tops
  misc_feature: MA Experiment ID: 20000286 Result: Up-regulated in Transcription
  misc_feature: MA Experiment 20000286 PARAMETER Experiment Name: At_Open_Flower_P Parameter: Age (day) Value: 21
  misc_feature: MA Experiment 20000286 PARAMETER Experiment Name: At_Open_Flower_P Parameter: Plant Line Value: WS
  misc_feature: MA Experiment 20000286 PARAMETER Experiment Name: At_Open_Flower_P Parameter: Tissue Value: Half Open vs. Whole Plant
  misc_feature: MA Experiment ID: 20000439 Result: Up-regulated in Transcription
  misc_feature: MA Experiment 20000439 PARAMETER Experiment Name: At_Roots__P Parameter: Age (day) Value: 14 vs. 21
  misc_feature: MA Experiment 20000439 PARAMETER Experiment Name: At_Roots__P Parameter: Organism Value: A. thaliana
  misc_feature: MA Experiment 20000439 PARAMETER Experiment Name: At_Roots__P Parameter: Tissue Value: Roots vs. Whole Plant
  misc_feature: MA Experiment ID: 20000794 Result: Up-regulated in Transcription
  misc_feature: MA Experiment 20000794 PARAMETER Experiment Name: At_Petals_P Parameter: Age (day) Value: 23-25 days
  misc_feature: MA Experiment 20000794 PARAMETER Experiment Name: At_Petals_P Parameter: Plant Line Value: WS
  misc_feature: MA Experiment 20000794 PARAMETER Experiment Name: At_Petals_P Parameter: Tissue Value: Petals vs. Whole plant
gcgttctcgacttgggttcgtcttcttcttctttctattcagattcacaataattgccaagcgaacaagtctttgcctctttggtttactttcctctgttttcgatccatttagaaaatgttattcacgaggagtgttgctcggatttcttctaagtttctgagaaaccgtagcttctatggctcctctcaatctctcgcctctcatcggttcgcaatcattcccgatcagggtcactcttgttctgactctccacacaagggttacgtttgcagaacaacttattcattgaaatctccggtttttggtggatttagtcatcaactctatcaccagagtagctccttggttgaggaggagcttgacccattttcgcttgttgccgatgagctgtcacttcttagtaataagttgagagagatggtacttgccgaggttccaaagcttgcctctgctgctgagtacttcttcaaaaggggtgtgcaaggaaaacagtttcgttcaactattttgctgctgatggcgacagctctgaatgtacgagttccagaagcattgattggggaatcaacagatatagtcacatcagaattacgcgtaaggcaacggggtattgctgaaatcactgaaatgatacacgtcgcaagtctactgcacgatgatgtcttggatgatgccgatacaaggcgtggtgttggttccttaaatgttgtaatgggtaacaagatgtcggtattagcaggagacttcttgctctcccgggcttgtggggctctcgctgctttaaagaacacagaggttgtagcattacttgcaactgctgtagaacatcttgttaccggtgaaaccatggagataactagttcaaccgagcagcgttatagtatggactactacatgcagaagacatattataagacagcatcgctaatctctaacagctgcaaagctgttgccgttctcactggacaaacagcagaagttgccgtgttagcttttgagtatgggaggaatctgggtttagcattccaattaatagacgacattcttgatttcacgggcacatctgcctctctcggaaagggatcgttgtcagatattcgccatggagtcataacagccccaatcctctttgccatggaagagtttcctcaactacgcgaagttgttgatcaagttgaaaaagatcctaggaatgttgacattgctttagagtatcttgggaagagcaagggaatacagagggcaagagaattagccatggaacatgcgaatctagcagcagctgcaatcgggtctctacctgaaacagacaatgaagatgtcaaaagatcgaggcgggcacttattgacttgacccatagagtcatcaccagaaacaagtgagattaagtaatgtttctctctatacaccaaaacattcctcatttcatttgtaggattttgttggtccaattcgtttcacg

SEQ ID NO: 40927 - protein, 422 aa, Arabidopsis thaliana
  peptide (1)..(422): Ceres Seq. ID no. 13504683
  misc_feature (109)..(373): Pfam Name: Polyprenyl synthetase Pfam Description: Polyprenyl synthetase
  misc_feature (66)..(422): Homolog of NCBI NO: 29165656 NR Description: Similar to trans-prenyltransferase [Homo sapiens]
  misc_feature (66)..(422): Homolog of NCBI NO: 7657653 NR Description: trans-prenyltransferase; polyprenyl pyrophosphate
  misc_feature (79)..(422): Homolog of NCBI NO: 9507201 NR Description: trans-prenyltransferase [Mus musculus]
  misc_feature (190)..(422): Homolog of NCBI NO: 25314274 NR Description: probable trans-prenyltransferase
  misc_feature (102)..(422): Homolog of NCBI NO: 11322972 NR Description: geranyl diphosphate synthase [Citrus sinensis]
  misc_feature (1)..(422): Homolog of NCBI NO: 12055493 NR Description: geranyl diphosphat synthase [Quercus robur]
  misc_feature (1)..(422): Homolog of NCBI NO: 27261729 NR Description: geranylgeranyl diphosphate synthase [Citrus
  misc_feature (102)..(422): Homolog of NCBI NO: 30686146 NR Description: geranyl diphosphate synthase
  misc_feature (1)..(422): Homolog of NCBI NO: 20260214 NR Description: putative trans-prenyltransferase [Arabidopsis
  misc_feature (1)..(422): Homolog of NCBI NO: 11322965 NR Description: geranyl diphosphate synthase [Arabidopsis
MLFTRSVARISSKFLRNRSFYGSSQSLASHRFAIIPDQGHSCSDSPHKGYVCRTTYSLKSPVFGGFSHQLYHQSSSLVEEELDPFSLVADELSLLSNKLREMVLAEVPKLASAAEYFFKRGVQGKQFRSTILLLMATALNVRVPEALIGESTDIVTSELRVRQRGIAEITEMIHVASLLHDDVLDDADTRRGVGSLNVVMGNKMSVLAGDFLLSRACGALAALKNTEVVALLATAVEHLVTGETMEITSSTEQRYSMDYYMQKTYYKTASLISNSCKAVAVLTGQTAEVAVLAFEYGRNLGLAFQLIDDILDFTGTSASLGKGSLSDIRHGVITAPILFAMEEFPQLREVVDQVEKDPRNVDIALEYLGKSKGIQRARELAMEHANLAAAAIGSLPETDNEDVKRSRRALIDLTHRVITRNK

SEQ ID NO: 40928 - protein, 321 aa, Arabidopsis thaliana
  peptide (1)..(321): Ceres Seq. ID no. 13504684
  misc_feature (8)..(272): Pfam Name: Polyprenyl synthetase Pfam Description: Polyprenyl synthetase
  misc_feature (1)..(321): Homolog of NCBI NO: 29165656 NR Description: Similar to trans-prenyltransferase [Homo sapiens]
  misc_feature (1)..(321): Homolog of NCBI NO: 7657653 NR Description: trans-prenyltransferase; polyprenyl pyrophosphate
  misc_feature (1)..(321): Homolog of NCBI NO: 9507201 NR Description: trans-prenyltransferase [Mus musculus]
  misc_feature (89)..(321): Homolog of NCBI NO: 25314274 NR Description: probable trans-prenyltransferase
  misc_feature (1)..(321): Homolog of NCBI NO: 11322972 NR Description: geranyl diphosphate synthase [Citrus sinensis]
  misc_feature (1)..(321): Homolog of NCBI NO: 12055493 NR Description: geranyl diphosphat synthase [Quercus robur]
  misc_feature (1)..(321): Homolog of NCBI NO: 27261729 NR Description: geranylgeranyl diphosphate synthase [Citrus
  misc_feature (1)..(321): Homolog of NCBI NO: 30686146 NR Description: geranyl diphosphate synthase
  misc_feature (1)..(321): Homolog of NCBI NO: 20260214 NR Description: putative trans-prenyltransferase [Arabidopsis
  misc_feature (1)..(321): Homolog of NCBI NO: 11322965 NR Description: geranyl diphosphate synthase [Arabidopsis
MVLAEVPKLASAAEYFFKRGVQGKQFRSTILLLMATALNVRVPEALIGESTDIVTSELRVRQRGIAEITEMIHVASLLHDDVLDDADTRRGVGSLNVVMGNKMSVLAGDFLLSRACGALAALKNTEVVALLATAVEHLVTGETMEITSSTEQRYSMDYYMQKTYYKTASLISNSCKAVAVLTGQTAEVAVLAFEYGRNLGLAFQLIDDILDFTGTSASLGKGSLSDIRHGVITAPILFAMEEFPQLREVVDQVEKDPRNVDIALEYLGKSKGIQRARELAMEHANLAAAAIGSLPETDNEDVKRSRRALIDLTHRVITRNK

SEQ ID NO: 40929 - protein, 288 aa, Arabidopsis thaliana
  peptide (1)..(288): Ceres Seq. ID no. 13504685
  misc_feature (1)..(239): Pfam Name: Polyprenyl synthetase Pfam Description: Polyprenyl synthetase
  misc_feature (1)..(288): Homolog of NCBI NO: 29165656 NR Description: Similar to trans-prenyltransferase [Homo sapiens]
  misc_feature (1)..(288): Homolog of NCBI NO: 7657653 NR Description: trans-prenyltransferase; polyprenyl pyrophosphate
  misc_feature (1)..(288): Homolog of NCBI NO: 9507201 NR Description: trans-prenyltransferase [Mus musculus]
  misc_feature (56)..(288): Homolog of NCBI NO: 25314274 NR Description: probable trans-prenyltransferase
  misc_feature (1)..(288): Homolog of NCBI NO: 11322972 NR Description: geranyl diphosphate synthase [Citrus sinensis]
  misc_feature (1)..(288): Homolog of NCBI NO: 12055493 NR Description: geranyl diphosphat synthase [Quercus robur]
  misc_feature (1)..(288): Homolog of NCBI NO: 27261729 NR Description: geranylgeranyl diphosphate synthase [Citrus
  misc_feature (1)..(288): Homolog of NCBI NO: 30686146 NR Description: geranyl diphosphate synthase
  misc_feature (1)..(288): Homolog of NCBI NO: 20260214 NR Description: putative trans-prenyltransferase [Arabidopsis
  misc_feature (1)..(288): Homolog of NCBI NO: 11322965 NR Description: geranyl diphosphate synthase [Arabidopsis
MATALNVRVPEALIGESTDIVTSELRVRQRGIAEITEMIHVASLLHDDVLDDADTRRGVGSLNVVMGNKMSVLAGDFLLSRACGALAALKNTEVVALLATAVEHLVTGETMEITSSTEQRYSMDYYMQKTYYKTASLISNSCKAVAVLTGQTAEVAVLAFEYGRNLGLAFQLIDDILDFTGTSASLGKGSLSDIRHGVITAPILFAMEEFPQLREVVDQVEKDPRNVDIALEYLGKSKGIQRARELAMEHANLAAAAIGSLPETDNEDVKRSRRALIDLTHRVITRNK

SEQ ID NO: 40930 - DNA, 1791 bp, Arabidopsis thaliana
  misc_feature (1)..(1791): Ceres Seq. ID no. 13489502
  misc_feature: MA Experiment ID: 108461 Result: Up-regulated in Transcription
  misc_feature: MA Experiment 108461 PARAMETER Experiment Name: At_Germinating_Seeds_cDNA_P Parameter: Age (day) Value: 1 vs. 0
  misc_feature: MA Experiment 108461 PARAMETER Experiment Name: At_Germinating_Seeds_cDNA_P Parameter: Tissue Value: Germinating Seeds
  misc_feature: MA Experiment ID: 108462 Result: Up-regulated in Transcription
  misc_feature: MA Experiment 108462 PARAMETER Experiment Name: At_Germinating_Seeds_cDNA_P Parameter: Age (day) Value: 2 vs. 0
  misc_feature: MA Experiment 108462 PARAMETER Experiment Name: At_Germinating_Seeds_cDNA_P Parameter: Tissue Value: Germinating Seeds
  misc_feature: MA Experiment ID: 108573 Result: Up-regulated in Transcription
  misc_feature: MA Experiment 108573 PARAMETER Experiment Name: At_Drought_cDNA_P Parameter: Timepoint (hr) Value: 6
  misc_feature: MA Experiment 108573 PARAMETER Experiment Name: At_Drought_cDNA_P Parameter: Tissue Value: Aerial
  misc_feature: MA Experiment 108573 PARAMETER Experiment Name: At_Drought_cDNA_P Parameter: Treatment Value: Drought vs. No Drought
  misc_feature: MA Experiment ID: 108595 Result: Down-regulated in Transcription
  misc_feature: MA Experiment 108595 PARAMETER Experiment Name: At_Ler-pi_Ovule_cDNA_P Parameter: Plant Line Value: null
  misc_feature: MA Experiment ID: 20000087 Result: Down-regulated in Transcription
  misc_feature: MA Experiment 20000087 PARAMETER Experiment Name: At_100uM_ABA_Mutants_cDNA_P Parameter: Plant Line Value: WS
  misc_feature: MA Experiment 20000087 PARAMETER Experiment Name: At_100uM_ABA_Mutants_cDNA_P Parameter: Timepoint (hr) Value: 6
  misc_feature: MA Experiment 20000087 PARAMETER Experiment Name: At_100uM_ABA_Mutants_cDNA_P Parameter: Tissue Value: Aerial
  misc_feature: MA Experiment 20000087 PARAMETER Experiment Name: At_100uM_ABA_Mutants_cDNA_P Parameter: Treatment Value: 100uM ABA vs. No Treatment
  misc_feature: MA Experiment ID: 20000180 Result: Up-regulated in Transcription
  misc_feature: MA Experiment 20000180 PARAMETER Experiment Name: At_Germinating_Seeds_P Parameter: Age (hr) Value: 24 vs. 0
  misc_feature: MA Experiment 20000180 PARAMETER Experiment Name: At_Germinating_Seeds_P Parameter: Tissue Value: Germinating Seeds
  misc_feature: MA Experiment ID: 20000185 Result: Down-regulated in Transcription
  misc_feature: MA Experiment 20000185 PARAMETER Experiment Name: At_Roots__P Parameter: Age (day) Value: 7 vs. 21
  misc_feature: MA Experiment 20000185 PARAMETER Experiment Name: At_Roots__P Parameter: Organism Value: A. thaliana
  misc_feature: MA Experiment 20000185 PARAMETER Experiment Name: At_Roots__P Parameter: Tissue Value: Roots vs. Whole Plant
  misc_feature: MA Experiment ID: 20000438 Result: Up-regulated in Transcription
  misc_feature: MA Experiment 20000438 PARAMETER Experiment Name: At_Shoots__P Parameter: Age (day) Value: 14
  misc_feature: MA Experiment 20000438 PARAMETER Experiment Name: At_Shoots__P Parameter: Tissue Value: Shoots vs. Whole Plant
  misc_feature: MA Experiment ID: 20001248 Result: Down-regulated in Transcription
  misc_feature: MA Experiment 20001248 PARAMETER Experiment Name: At_Far-red-induction_P Parameter: Age (day) Value: 7
  misc_feature: MA Experiment 20001248 PARAMETER Experiment Name: At_Far-red-induction_P Parameter: Light Value: Far-red vs. White
  misc_feature: MA Experiment 20001248 PARAMETER Experiment Name: At_Far-red-induction_P Parameter: Organism Value: A. thaliana
  misc_feature: MA Experiment 20001248 PARAMETER Experiment Name: At_Far-red-induction_P Parameter: Plant Line Value: Columbia
  misc_feature: MA Experiment 20001248 PARAMETER Experiment Name: At_Far-red-induction_P Parameter: Timepoint (hr) Value: 4
  misc_feature: MA Experiment 20001248 PARAMETER Experiment Name: At_Far-red-induction_P Parameter: Tissue Value: Whole Plant
  misc_feature: MA Experiment ID: 20001905 Result: Down-regulated in Transcription
  misc_feature: MA Experiment 20001905 PARAMETER Experiment Name: At_Drought_Reproduction_P Parameter: Age (day) Value: 40
  misc_feature: MA Experiment 20001905 PARAMETER Experiment Name: At_Drought_Reproduction_P Parameter: Organism Value: A. thaliana
  misc_feature: MA Experiment 20001905 PARAMETER Experiment Name: At_Drought_Reproduction_P Parameter: Plant Line Value: WS
  misc_feature: MA Experiment 20001905 PARAMETER Experiment Name: At_Drought_Reproduction_P Parameter: Timepoint (day) Value: 10
  misc_feature: MA Experiment 20001905 PARAMETER Experiment Name: At_Drought_Reproduction_P Parameter: Tissue Value: Rosettes
  misc_feature: MA Experiment 20001905 PARAMETER Experiment Name: At_Drought_Reproduction_P Parameter: Treatment Value: Drought vs. No Drought
agaatccagattcctttcttatcatcatctctctctctcacactgtttatctgattcgtcttctctgataatcaagagtagtagtgcggttctctggaaaatattcgatttttaaaagactctgatgatgacattaaactcactatctccagctgaatccaaagctatttctttcttggatacctccaggttcaatccaatccctaaactctcaggtgggtttagtttgaggaggaggaatcaagggagaggttttggaaaaggtgttaagtgttcagtgaaagtgcagcagcaacaacaacctcctccagcatggcctgggagagctgtccctgaggcgcctcgtcaatcttgggatggaccaaaacccatctctatcgttggatctactggttctattggcactcagacattggatattgtggctgagaatcctgacaaattcagagttgtggctctagctgctggttcgaatgttactctacttgctgatcaggtaaggagatttaagcctgcattggttgctgttagaaacgagtcactgattaatgagcttaaagaggctttagctgatttggactataaactcgagattattccaggagagcaaggagtgattgaggttgcccgacatcctgaagctgtaaccgttgttaccggaatagtaggttgtgcgggactaaagcctacggttgctgcaattgaagcaggaaaggacattgctcttgcaaacaaagagacattaatcgcaggtggtcctttcgtgcttccgcttgccaacaaacataatgtaaagattcttccggcagattcagaacattctgccatatttcagtgtattcaaggtttgcctgaaggcgctctgcgcaagataatcttgactgcatctggtggagcttttagggattggcctgtcgaaaagctaaaggaagttaaagtagcggatgcgttgaagcatccaaactggaacatgggaaagaaaatcactgtggactctgctacgcttttcaacaagggtcttgaggtcattgaagcgcattatttgtttggagctgagtatgacgatatagagattgtcattcatccgcaaagtatcatacattccatgattgaaacacaggattcatctgtgcttgctcaattgggttggcctgatatgcgtttaccgattctctacaccatgtcatggcccgatagagttccttgttctgaagtaacttggccaagacttgacctttgcaaactcggttcattgactttcaagaaaccagacaatgtgaaatacccatccatggatcttgcttatgctgctggacgagctggaggcacaatgactggagttctcagcgccgccaatgagaaagctgttgaaatgttcattgatgaaaagataagctatttggatatcttcaaggttgtggaattaacatgcgataaacatcgaaacgagttggtaacatcaccgtctcttgaagagattgttcactatgacttgtgggcacgtgaatatgccgcgaatgtgcagctttcttctggtgctaggccagttcatgcatgaagaattggttgttggaagaacataaggaagcttctgaggaaatgttgaaagaagattagtgtagagaatggggtactacttaatagcgtttttggcaaggattatggattgtgtagctaatttatctgtgatccgaacaagccaaactgataatttgaaaccatttttaccaataaaaccgagcttaattgtttcacattatatgattaattacattcatctaagggttcttg

SEQ ID NO: 40931 - protein, 477 aa, Arabidopsis thaliana
  peptide (1)..(477): Ceres Seq. ID no. 13489503
  misc_feature (83)..(463): Pfam Name: 1-deoxy-D-xylulose 5-phosphate reductoisomerase Pfam Description: 1-deoxy-D-xylulose 5-phosphate reductoisomerase
  misc_feature (2)..(474): Homolog of NCBI NO: 9800656 NR Description: 1-deoxy-D-xylulose-5-phosphate reductoisomerase
  misc_feature (33)..(477): Homolog of NCBI NO: 34996397 NR Description: putative 1-deoxy-D-xylulose 5-phosphate
  misc_feature (2)..(475): Homolog of NCBI NO: 22797429 NR Description: 1-deoxy-D-xylulose 5-phosphate reductoisomerase
  misc_feature (1)..(477): Homolog of NCBI NO: 9801280 NR Description: putative 1-deoxy-D-xylulose 5-phosphate
  misc_feature (2)..(474): Homolog of NCBI NO: 7621710 NR Description: 1-deoxy-D-xylulose-5-phosphate reductoisomerase
  misc_feature (2)..(475): Homolog of NCBI NO: 17225989 NR Description: 1-deoxy-D-xylulose 5-phosphate reductoisomerase
  misc_feature (2)..(475): Homolog of NCBI NO: 34894108 NR Description: 1-deoxy-d-xylulose-5-phosphate reductoisomerase
  misc_feature (2)..(474): Homolog of NCBI NO: 15679908 NR Description: 1-deoxy-D-xylulose-5-phosphate reductoisomerase
  misc_feature (72)..(477): Homolog of NCBI NO: 25323805 NR Description: 1-deoxy-d-xylulose-5-phosphate reductoisomerase
  misc_feature (1)..(477): Homolog of NCBI NO: 15241970 NR Description: 1-deoxy-D-xylulose 5-phosphate reductoisomerase
MMTLNSLSPAESKAISFLDTSRFNPIPKLSGGFSLRRRNQGRGFGKGVKCSVKVQQQQQPPPAWPGRAVPEAPRQSWDGPKPISIVGSTGSIGTQTLDIVAENPDKFRVVALAAGSNVTLLADQVRRFKPALVAVRNESLINELKEALADLDYKLEIIPGEQGVIEVARHPEAVTVVTGIVGCAGLKPTVAAIEAGKDIALANKETLIAGGPFVLPLANKHNVKILPADSEHSAIFQCIQGLPEGALRKIILTASGGAFRDWPVEKLKEVKVADALKHPNWNMGKKITVDSATLFNKGLEVIEAHYLFGAEYDDIEIVIHPQSIIHSMIETQDSSVLAQLGWPDMRLPILYTMSWPDRVPCSEVTWPRLDLCKLGSLTFKKPDNVKYPSMDLAYAAGRAGGTMTGVLSAANEKAVEMFIDEKISYLDIFKVVELTCDKHRNELVTSPSLEEIVHYDLWAREYAANVQLSSGARPVHA

SEQ ID NO: 40932 - protein, 476 aa, Arabidopsis thaliana
  peptide (1)..(476): Ceres Seq. ID no. 13489504
  misc_feature (82)..(462): Pfam Name: 1-deoxy-D-xylulose 5-phosphate reductoisomerase Pfam Description: 1-deoxy-D-xylulose 5-phosphate reductoisomerase
  misc_feature (1)..(473): Homolog of NCBI NO: 9800656 NR Description: 1-deoxy-D-xylulose-5-phosphate reductoisomerase
  misc_feature (32)..(476): Homolog of NCBI NO: 34996397 NR Description: putative 1-deoxy-D-xylulose 5-phosphate
  misc_feature (1)..(474): Homolog of NCBI NO: 22797429 NR Description: 1-deoxy-D-xylulose 5-phosphate reductoisomerase
  misc_feature (1)..(476): Homolog of NCBI NO: 9801280 NR Description: putative 1-deoxy-D-xylulose 5-phosphate
  misc_feature (1)..(473): Homolog of NCBI NO: 7621710 NR Description: 1-deoxy-D-xylulose-5-phosphate reductoisomerase
  misc_feature (1)..(474): Homolog of NCBI NO: 17225989 NR Description: 1-deoxy-D-xylulose 5-phosphate reductoisomerase
  misc_feature (1)..(474): Homolog of NCBI NO: 34894108 NR Description: 1-deoxy-d-xylulose-5-phosphate reductoisomerase
  misc_feature (1)..(473): Homolog of NCBI NO: 15679908 NR Description: 1-deoxy-D-xylulose-5-phosphate reductoisomerase
  misc_feature (71)..(476): Homolog of NCBI NO: 25323805 NR Description: 1-deoxy-d-xylulose-5-phosphate reductoisomerase
  misc_feature (1)..(476): Homolog of NCBI NO: 15241970 NR Description: 1-deoxy-D-xylulose 5-phosphate reductoisomerase
MTLNSLSPAESKAISFLDTSRFNPIPKLSGGFSLRRRNQGRGFGKGVKCSVKVQQQQQPPPAWPGRAVPEAPRQSWDGPKPISIVGSTGSIGTQTLDIVAENPDKFRVVALAAGSNVTLLADQVRRFKPALVAVRNESLINELKEALADLDYKLEIIPGEQGVIEVARHPEAVTVVTGIVGCAGLKPTVAAIEAGKDIALANKETLIAGGPFVLPLANKHNVKILPADSEHSAIFQCIQGLPEGALRKIILTASGGAFRDWPVEKLKEVKVADALKHPNWNMGKKITVDSATLFNKGLEVIEAHYLFGAEYDDIEIVIHPQSIIHSMIETQDSSVLAQLGWPDMRLPILYTMSWPDRVPCSEVTWPRLDLCKLGSLTFKKPDNVKYPSMDLAYAAGRAGGTMTGVLSAANEKAVEMFIDEKISYLDIFKVVELTCDKHRNELVTSPSLEEIVHYDLWAREYAANVQLSSGARPVHA

SEQ ID NO: 40933 - DNA, 1178 bp, Arabidopsis thaliana
  misc_feature (1)..(1178): Ceres Seq. ID no. 12325769
  misc_feature: MA Experiment ID: 108434 Result: Up-regulated in Transcription
  misc_feature: MA Experiment 108434 PARAMETER Experiment Name: At_Root_Tips_cDNA_P Parameter: Tissue Value: Root Tips
  misc_feature: MA Experiment ID: 108464 Result: Up-regulated in Transcription
  misc_feature: MA Experiment 108464 PARAMETER Experiment Name: At_Germinating_Seeds_cDNA_P Parameter: Age (day) Value: 4 vs. 0
  misc_feature: MA Experiment 108464 PARAMETER Experiment Name: At_Germinating_Seeds_cDNA_P Parameter: Tissue Value: Germinating Seeds
  misc_feature: MA Experiment ID: 108573 Result: Up-regulated in Transcription
  misc_feature: MA Experiment 108573 PARAMETER Experiment Name: At_Drought_cDNA_P Parameter: Timepoint (hr) Value: 6
  misc_feature: MA Experiment 108573 PARAMETER Experiment Name: At_Drought_cDNA_P Parameter: Tissue Value: Aerial
  misc_feature: MA Experiment 108573 PARAMETER Experiment Name: At_Drought_cDNA_P Parameter: Treatment Value: Drought vs. No Drought
  misc_feature: MA Experiment ID: 108574 Result: Down-regulated in Transcription
  misc_feature: MA Experiment 108574 PARAMETER Experiment Name: At_Wounding__cDNA_P Parameter: Timepoint (hr) Value: 1
  misc_feature: MA Experiment 108574 PARAMETER Experiment Name: At_Wounding__cDNA_P Parameter: Tissue Value: Aerial
  misc_feature: MA Experiment 108574 PARAMETER Experiment Name: At_Wounding__cDNA_P Parameter: Treatment Value: Wounding vs. No Wounding
  misc_feature: MA Experiment ID: 108576 Result: Down-regulated in Transcription
  misc_feature: MA Experiment 108576 PARAMETER Experiment Name: At_42deg_Heat_cDNA_P Parameter: Temperature (deg C) Value: 42 vs. 22
  misc_feature: MA Experiment 108576 PARAMETER Experiment Name: At_42deg_Heat_cDNA_P Parameter: Timepoint (hr) Value: 1
  misc_feature: MA Experiment 108576 PARAMETER Experiment Name: At_42deg_Heat_cDNA_P Parameter: Tissue Value: Aerial
  misc_feature: MA Experiment ID: 108595 Result: Down-regulated in Transcription
  misc_feature: MA Experiment 108595 PARAMETER Experiment Name: At_Ler-pi_Ovule_cDNA_P Parameter: Plant Line Value: null
  misc_feature: MA Experiment ID: 20000087 Result: Down-regulated in Transcription
  misc_feature: MA Experiment 20000087 PARAMETER Experiment Name: At_100uM_ABA_Mutants_cDNA_P Parameter: Plant Line Value: WS
  misc_feature: MA Experiment 20000087 PARAMETER Experiment Name: At_100uM_ABA_Mutants_cDNA_P Parameter: Timepoint (hr) Value: 6
  misc_feature: MA Experiment 20000087 PARAMETER Experiment Name: At_100uM_ABA_Mutants_cDNA_P Parameter: Tissue Value: Aerial
  misc_feature: MA Experiment 20000087 PARAMETER Experiment Name: At_100uM_ABA_Mutants_cDNA_P Parameter: Treatment Value: 100uM ABA vs. No Treatment
  misc_feature: MA Experiment ID: 20000185 Result: Up-regulated in Transcription
  misc_feature: MA Experiment 20000185 PARAMETER Experiment Name: At_Roots__P Parameter: Age (day) Value: 7 vs. 21
  misc_feature: MA Experiment 20000185 PARAMETER Experiment Name: At_Roots__P Parameter: Organism Value: A. thaliana
  misc_feature: MA Experiment 20000185 PARAMETER Experiment Name: At_Roots__P Parameter: Tissue Value: Roots vs. Whole Plant
  misc_feature: MA Experiment ID: 20000214 Result: Up-regulated in Transcription
  misc_feature: MA Experiment 20000214 PARAMETER Experiment Name: At_4deg_Cold_P Parameter: Timepoint (hr) Value: 6
  misc_feature: MA Experiment ID: 20000224 Result: Down-regulated in Transcription
  misc_feature: MA Experiment ID: 20000227 Result: Down-regulated in Transcription
  misc_feature: MA Experiment 20000227 PARAMETER Experiment Name: At_Root-Tips-vs-Tops_P Parameter: Tissue Value: Root Tips vs. Root Tops
  misc_feature: MA Experiment ID: 20000234 Result: Down-regulated in Transcription
  misc_feature: MA Experiment 20000234 PARAMETER Experiment Name: At_Siliques_P Parameter: Age (day) Value: 21
  misc_feature: MA Experiment 20000234 PARAMETER Experiment Name: At_Siliques_P Parameter: Organism Value: A. thaliana
  misc_feature: MA Experiment 20000234 PARAMETER Experiment Name: At_Siliques_P Parameter: Plant Line Value: WS
  misc_feature: MA Experiment 20000234 PARAMETER Experiment Name: At_Siliques_P Parameter: Tissue Value: Less Than 5mm Siliques vs. Whole Plant
  misc_feature: MA Experiment ID: 20000264 Result: Down-regulated in Transcription
  misc_feature: MA Experiment 20000264 PARAMETER Experiment Name: At_Open_Flower_P Parameter: Age (day) Value: 21
  misc_feature: MA Experiment 20000264 PARAMETER Experiment Name: At_Open_Flower_P Parameter: Plant Line Value: WS
  misc_feature: MA Experiment 20000264 PARAMETER Experiment Name: At_Open_Flower_P Parameter: Tissue Value: Open Flower vs. Whole Plant
  misc_feature: MA Experiment ID: 20000286 Result: Down-regulated in Transcription
  misc_feature: MA Experiment 20000286 PARAMETER Experiment Name: At_Open_Flower_P Parameter: Age (day) Value: 21
  misc_feature: MA Experiment 20000286 PARAMETER Experiment Name: At_Open_Flower_P Parameter: Plant Line Value: WS
  misc_feature: MA Experiment 20000286 PARAMETER Experiment Name: At_Open_Flower_P Parameter: Tissue Value: Half Open vs. Whole Plant
  misc_feature: MA Experiment ID: 20000439 Result: Up-regulated in Transcription
  misc_feature: MA Experiment 20000439 PARAMETER Experiment Name: At_Roots__P Parameter: Age (day) Value: 14 vs. 21
  misc_feature: MA Experiment 20000439 PARAMETER Experiment Name: At_Roots__P Parameter: Organism Value: A. thaliana
  misc_feature: MA Experiment 20000439 PARAMETER Experiment Name: At_Roots__P Parameter: Tissue Value: Roots vs. Whole Plant
  misc_feature: MA Experiment ID: 20001248 Result: Up-regulated in Transcription
  misc_feature: MA Experiment 20001248 PARAMETER Experiment Name: At_Far-red-induction_P Parameter: Age (day) Value: 7
  misc_feature: MA Experiment 20001248 PARAMETER Experiment Name: At_Far-red-induction_P Parameter: Light Value: Far-red vs. White
  misc_feature: MA Experiment 20001248 PARAMETER Experiment Name: At_Far-red-induction_P Parameter: Organism Value: A. thaliana
  misc_feature: MA Experiment 20001248 PARAMETER Experiment Name: At_Far-red-induction_P Parameter: Plant Line Value: Columbia
  misc_feature: MA Experiment 20001248 PARAMETER Experiment Name: At_Far-red-induction_P Parameter: Timepoint (hr) Value: 4
  misc_feature: MA Experiment 20001248 PARAMETER Experiment Name: At_Far-red-induction_P Parameter: Tissue Value: Whole Plant
  misc_feature: MA Experiment ID: 20001450 Result: Up-regulated in Transcription
  misc_feature: MA Experiment 20001450 PARAMETER Experiment Name: At_Far-red-induction_P Parameter: Age (day) Value: 7
  misc_feature: MA Experiment 20001450 PARAMETER Experiment Name: At_Far-red-induction_P Parameter: Light Value: Far-red vs. White
  misc_feature: MA Experiment 20001450 PARAMETER Experiment Name: At_Far-red-induction_P Parameter: Organism Value: A. thaliana
  misc_feature: MA Experiment 20001450 PARAMETER Experiment Name: At_Far-red-induction_P Parameter: Plant Line Value: Columbia
  misc_feature: MA Experiment 20001450 PARAMETER Experiment Name: At_Far-red-induction_P Parameter: Timepoint (hr) Value: 8
  misc_feature: MA Experiment 20001450 PARAMETER Experiment Name: At_Far-red-induction_P Parameter: Tissue Value: Whole Plant
  misc_feature: MA Experiment ID: 20001558 Result: Down-regulated in Transcription
  misc_feature: MA Experiment 20001558 PARAMETER Experiment Name: At_Drought_Soil_Dry_P Parameter: Age (day) Value: 27
  misc_feature: MA Experiment 20001558 PARAMETER Experiment Name: At_Drought_Soil_Dry_P Parameter: Organism Value: A. thaliana
  misc_feature: MA Experiment 20001558 PARAMETER Experiment Name: At_Drought_Soil_Dry_P Parameter: Plant Line Value: WS
  misc_feature: MA Experiment 20001558 PARAMETER Experiment Name: At_Drought_Soil_Dry_P Parameter: Post Timepoint (hr) Value: 6
  misc_feature: MA Experiment 20001558 PARAMETER Experiment Name: At_Drought_Soil_Dry_P Parameter: Post-Treatment Value: Re-Water vs. No Drought
  misc_feature: MA Experiment 20001558 PARAMETER Experiment Name: At_Drought_Soil_Dry_P Parameter: Timepoint (day) Value: 13
  misc_feature: MA Experiment 20001558 PARAMETER Experiment Name: At_Drought_Soil_Dry_P Parameter: Treatment Value: Drought vs. No Drought
  misc_feature: MA Experiment ID: 20001560 Result: Down-regulated in Transcription
  misc_feature: MA Experiment 20001560 PARAMETER Experiment Name: At_Drought_Soil_Dry_P Parameter: Age (day) Value: 28
  misc_feature: MA Experiment 20001560 PARAMETER Experiment Name: At_Drought_Soil_Dry_P Parameter: Organism Value: A. thaliana
  misc_feature: MA Experiment 20001560 PARAMETER Experiment Name: At_Drought_Soil_Dry_P Parameter: Plant Line Value: WS
  misc_feature: MA Experiment 20001560 PARAMETER Experiment Name: At_Drought_Soil_Dry_P Parameter: Post Timepoint (hr) Value: None
  misc_feature: MA Experiment 20001560 PARAMETER Experiment Name: At_Drought_Soil_Dry_P Parameter: Post-Treatment Value: None
  misc_feature: MA Experiment 20001560 PARAMETER Experiment Name: At_Drought_Soil_Dry_P Parameter: Timepoint (day) Value: 14
  misc_feature: MA Experiment 20001560 PARAMETER Experiment Name: At_Drought_Soil_Dry_P Parameter: Treatment Value: Drought vs. No Drought
aactcacaccactccattgcccattgctctgtgtactttgcttctttaggagaaagaaagcacaaggggcaaaatcggaaagattatcatggccgacggtagtactagttcttcggagtccactaccgcctgcgctggaagcggcacaagaagagagattatgctgttcggagtcagggttgtgcttgacccgatgagaaagtgcgtgagtttgaacaatctgtctgactatgaacagacggcggagactccaaagatcgacggcgaagatagagatgaacaagatatgaacaaaaccccggccggttacgcctcggcggatgaagctcttcccatgtcttcttctaacggcaaaatcgagaggaaacgaggagttccatggactgaagaagaacacaagctgttcttgcttgggctgcagagagtcggtaaaggagattggaaaggaatatcaagaaactttgtcaagaccagaacctctacacaagttgctagtcatgctcagaaatacttcctcaggcgaagtaatcttaaccgtcgccgccgaagatctagcctttttgacatgactactgatacggtcatacccatggaagaagatcaccaagtgcttatacaggagaacacatctcaatcatcttctcctgtaccggaaatcaacaacttctctatacatccggttatgcaagtctttcccgagttcccggtaccaacagggaatcaatcatacggacagcttacttcatcgaatctcatcaatttggttccattaacttttcagtcaagtccagcaccgctttctctcaacctctcactagcttcatctaatcttaatgaaccatctccttcaatgcatccagcattcaacacgattggagtcgcttagagcttatcctaaaggtgaaaatctgcaacacaccctgtttgtttctttgctgtacagataggtcttgactttgttataaaaaaattcgtcaaatttatgtatttggctaaaaaaaatctgttgaaaagaagaataataaacagagtttggagataggacttaagtggggttttagggttcataatcatcctgtgtttttccttccatgtttggaagttgttgtaatactctctaagttcattcgtgtggatctatcaaaacttataaatcatattaacgttatgtttgtttc

SEQ ID NO: 40934 - protein, 265 aa, Arabidopsis thaliana
  peptide (1)..(265): Ceres Seq. ID no. 12325770
  misc_feature (95)..(142): Pfam Name: Myb-like DNA-binding domain Pfam Description: Myb-like DNA-binding domain
  misc_feature (5)..(163): Homolog of NCBI NO: 7705206 NR Description: MybSt1 [Solanum tuberosum]
  misc_feature (8)..(194): Homolog of NCBI NO: 34906364 NR Description: unnamed protein product [Oryza sativa (japonica
  misc_feature (22)..(163): Homolog of NCBI NO: 24850307 NR Description: transcription factor MYBS3
  misc_feature (22)..(163): Homolog of NCBI NO: 37536856 NR Description: putative Myb-related protein
  misc_feature (22)..(220): Homolog of NCBI NO: 15238083 NR Description: Myb-related transcription activator-like
  misc_feature (19)..(188): Homolog of NCBI NO: 15222521 NR Description: DNA binding protein MybSt1, putative; protein id:
  misc_feature (6)..(188): Homolog of NCBI NO: 28629811 NR Description: transcription factor Myb1 [Malus xiaojinensis]
  misc_feature (5)..(259): Homolog of NCBI NO: 21593684 NR Description: Myb-related transcription activator, putative
  misc_feature (5)..(259): Homolog of NCBI NO: 15221922 NR Description: myb family transcription factor
  misc_feature (1)..(265): Homolog of NCBI NO: 15221408 NR Description: myb family transcription factor
MADGSTSSSESTTACAGSGTRREIMLFGVRVVLDPMRKCVSLNNLSDYEQTAETPKIDGEDRDEQDMNKTPAGYASADEALPMSSSNGKIERKRGVPWTEEEHKLFLLGLQRVGKGDWKGISRNFVKTRTSTQVASHAQKYFLRRSNLNRRRRRSSLFDMTTDTVIPMEEDHQVLIQENTSQSSSPVPEINNFSIHPVMQVFPEFPVPTGNQSYGQLTSSNLINLVPLTFQSSPAPLSLNLSLASSNLNEPSPSMHPAFNTIGVA

SEQ ID NO: 40935 - protein, 241 aa, Arabidopsis thaliana
  peptide (1)..(241): Ceres Seq. ID no. 12325771
  misc_feature (71)..(118): Pfam Name: Myb-like DNA-binding domain Pfam Description: Myb-like DNA-binding domain
  misc_feature (1)..(139): Homolog of NCBI NO: 7705206 NR Description: MybSt1 [Solanum tuberosum]
  misc_feature (1)..(170): Homolog of NCBI NO: 34906364 NR Description: unnamed protein product [Oryza sativa (japonica
  misc_feature (1)..(139): Homolog of NCBI NO: 24850307 NR Description: transcription factor MYBS3
  misc_feature (1)..(139): Homolog of NCBI NO: 37536856 NR Description: putative Myb-related protein
  misc_feature (1)..(196): Homolog of NCBI NO: 15238083 NR Description: Myb-related transcription activator-like
  misc_feature (1)..(164): Homolog of NCBI NO: 15222521 NR Description: DNA binding protein MybSt1, putative; protein id:
  misc_feature (1)..(164): Homolog of NCBI NO: 28629811 NR Description: transcription factor Myb1 [Malus xiaojinensis]
  misc_feature (1)..(235): Homolog of NCBI NO: 21593684 NR Description: Myb-related transcription activator, putative
  misc_feature (1)..(235): Homolog of NCBI NO: 15221922 NR Description: myb family transcription factor
  misc_feature (1)..(241): Homolog of NCBI NO: 15221408 NR Description: myb family transcription factor
MLFGVRVVLDPMRKCVSLNNLSDYEQTAETPKIDGEDRDEQDMNKTPAGYASADEALPMSSSNGKIERKRGVPWTEEEHKLFLLGLQRVGKGDWKGISRNFVKTRTSTQVASHAQKYFLRRSNLNRRRRRSSLFDMTTDTVIPMEEDHQVLIQENTSQSSSPVPEINNFSIHPVMQVFPEFPVPTGNQSYGQLTSSNLINLVPLTFQSSPAPLSLNLSLASSNLNEPSPSMHPAFNTIGVA

SEQ ID NO: 40936 - protein, 230 aa, Arabidopsis thaliana
  peptide (1)..(230): Ceres Seq. ID no. 12325772
  misc_feature (60)..(107): Pfam Name: Myb-like DNA-binding domain Pfam Description: Myb-like DNA-binding domain
  misc_feature (1)..(128): Homolog of NCBI NO: 7705206 NR Description: MybSt1 [Solanum tuberosum]
  misc_feature (1)..(159): Homolog of NCBI NO: 34906364 NR Description: unnamed protein product [Oryza sativa (japonica
  misc_feature (1)..(128): Homolog of NCBI NO: 24850307 NR Description: transcription factor MYBS3
  misc_feature (1)..(128): Homolog of NCBI NO: 37536856 NR Description: putative Myb-related protein
  misc_feature (1)..(185): Homolog of NCBI NO: 15238083 NR Description: Myb-related transcription activator-like
  misc_feature (1)..(153): Homolog of NCBI NO: 15222521 NR Description: DNA binding protein MybSt1, putative; protein id:
  misc_feature (1)..(153): Homolog of NCBI NO: 28629811 NR Description: transcription factor Myb1 [Malus xiaojinensis]
  misc_feature (1)..(224): Homolog of NCBI NO: 21593684 NR Description: Myb-related transcription activator, putative
  misc_feature (1)..(224): Homolog of NCBI NO: 15221922 NR Description: myb family transcription factor
  misc_feature (1)..(230): Homolog of NCBI NO: 15221408 NR Description: myb family transcription factor
MRKCVSLNNLSDYEQTAETPKIDGEDRDEQDMNKTPAGYASADEALPMSSSNGKIERKRGVPWTEEEHKLFLLGLQRVGKGDWKGISRNFVKTRTSTQVASHAQKYFLRRSNLNRRRRRSSLFDMTTDTVIPMEEDHQVLIQENTSQSSSPVPEINNFSIHPVMQVFPEFPVPTGNQSYGQLTSSNLINLVPLTFQSSPAPLSLNLSLASSNLNEPSPSMHPAFNTIGVA

SEQ ID NO: 40937 - DNA, 1108 bp, Arabidopsis thaliana; identical to SEQ ID NO: 38081
  misc_feature (1)..(1108): Ceres Seq. ID no. 12371248
  misc_feature: MA Experiment ID: 20000185 Result: Up-regulated in Transcription
  misc_feature: MA Experiment 20000185 PARAMETER Experiment Name: At_Roots__P Parameter: Age (day) Value: 7 vs. 21
  misc_feature: MA Experiment 20000185 PARAMETER Experiment Name: At_Roots__P Parameter: Organism Value: A. thaliana
  misc_feature: MA Experiment 20000185 PARAMETER Experiment Name: At_Roots__P Parameter: Tissue Value: Roots vs. Whole Plant
  misc_feature: MA Experiment ID: 20000227 Result: Up-regulated in Transcription
  misc_feature: MA Experiment 20000227 PARAMETER Experiment Name: At_Root-Tips-vs-Tops_P Parameter: Tissue Value: Root Tips vs. Root Tops
  misc_feature: MA Experiment ID: 20000437 Result: Down-regulated in Transcription
  misc_feature: MA Experiment 20000437 PARAMETER Experiment Name: At_Drought_P Parameter: Age (day) Value: 8
  misc_feature: MA Experiment 20000437 PARAMETER Experiment Name: At_Drought_P Parameter: Organism Value: A. thaliana
  misc_feature: MA Experiment 20000437 PARAMETER Experiment Name: At_Drought_P Parameter: Plant Line Value: WS
  misc_feature: MA Experiment 20000437 PARAMETER Experiment Name: At_Drought_P Parameter: Timepoint (hr) Value: 24
  misc_feature: MA Experiment 20000437 PARAMETER Experiment Name: At_Drought_P Parameter: Tissue Value: Whole Plant
  misc_feature: MA Experiment 20000437 PARAMETER Experiment Name: At_Drought_P Parameter: Treatment Value: Drought vs. No Drought
  misc_feature: MA Experiment ID: 20000794 Result: Down-regulated in Transcription
  misc_feature: MA Experiment 20000794 PARAMETER Experiment Name: At_Petals_P Parameter: Age (day) Value: 23-25 days
  misc_feature: MA Experiment 20000794 PARAMETER Experiment Name: At_Petals_P Parameter: Plant Line Value: WS
  misc_feature: MA Experiment 20000794 PARAMETER Experiment Name: At_Petals_P Parameter: Tissue Value: Petals vs. Whole plant
  misc_feature: MA Experiment ID: 20001451 Result: Down-regulated in Transcription
  misc_feature: MA Experiment 20001451 PARAMETER Experiment Name: At_Far-red-induction_P Parameter: Age (day) Value: 7
  misc_feature: MA Experiment 20001451 PARAMETER Experiment Name: At_Far-red-induction_P Parameter: Light Value: Far-red vs. White
  misc_feature: MA Experiment 20001451 PARAMETER Experiment Name: At_Far-red-induction_P Parameter: Organism Value: A. thaliana
  misc_feature: MA Experiment 20001451 PARAMETER Experiment Name: At_Far-red-induction_P Parameter: Plant Line Value: Columbia
  misc_feature: MA Experiment 20001451 PARAMETER Experiment Name: At_Far-red-induction_P Parameter: Timepoint (hr) Value: 24
  misc_feature: MA Experiment 20001451 PARAMETER Experiment Name: At_Far-red-induction_P Parameter: Tissue Value: Whole Plant
  misc_feature: MA Experiment ID: 20001557 Result: Up-regulated in Transcription
  misc_feature: MA Experiment 20001557 PARAMETER Experiment Name: At_Drought_Soil_Dry_P Parameter: Age (day) Value: 27
  misc_feature: MA Experiment 20001557 PARAMETER Experiment Name: At_Drought_Soil_Dry_P Parameter: Organism Value: A. thaliana
  misc_feature: MA Experiment 20001557 PARAMETER Experiment Name: At_Drought_Soil_Dry_P Parameter: Plant Line Value: WS
  misc_feature: MA Experiment 20001557 PARAMETER Experiment Name: At_Drought_Soil_Dry_P Parameter: Post Timepoint (hr) Value: 3
  misc_feature: MA Experiment 20001557 PARAMETER Experiment Name: At_Drought_Soil_Dry_P Parameter: Post-Treatment Value: Re-Water vs. No Drought
  misc_feature: MA Experiment 20001557 PARAMETER Experiment Name: At_Drought_Soil_Dry_P Parameter: Timepoint (day) Value: 13
  misc_feature: MA Experiment 20001557 PARAMETER Experiment Name: At_Drought_Soil_Dry_P Parameter: Treatment Value: Drought vs. No Drought
  misc_feature: MA Experiment ID: 20001558 Result: Up-regulated in Transcription
  misc_feature: MA Experiment 20001558 PARAMETER Experiment Name: At_Drought_Soil_Dry_P Parameter: Age (day) Value: 27
  misc_feature: MA Experiment 20001558 PARAMETER Experiment Name: At_Drought_Soil_Dry_P Parameter: Organism Value: A. thaliana
  misc_feature: MA Experiment 20001558 PARAMETER Experiment Name: At_Drought_Soil_Dry_P Parameter: Plant Line Value: WS
  misc_feature: MA Experiment 20001558 PARAMETER Experiment Name: At_Drought_Soil_Dry_P Parameter: Post Timepoint (hr) Value: 6
  misc_feature: MA Experiment 20001558 PARAMETER Experiment Name: At_Drought_Soil_Dry_P Parameter: Post-Treatment Value: Re-Water vs. No Drought
  misc_feature: MA Experiment 20001558 PARAMETER Experiment Name: At_Drought_Soil_Dry_P Parameter: Timepoint (day) Value: 13
  misc_feature: MA Experiment 20001558 PARAMETER Experiment Name: At_Drought_Soil_Dry_P Parameter: Treatment Value: Drought vs. No Drought
  misc_feature: MA Experiment ID: 20001560 Result: Up-regulated in Transcription
  misc_feature: MA Experiment 20001560 PARAMETER Experiment Name: At_Drought_Soil_Dry_P Parameter: Age (day) Value: 28
  misc_feature: MA Experiment 20001560 PARAMETER Experiment Name: At_Drought_Soil_Dry_P Parameter: Organism Value: A. thaliana
  misc_feature: MA Experiment 20001560 PARAMETER Experiment Name: At_Drought_Soil_Dry_P Parameter: Plant Line Value: WS
  misc_feature: MA Experiment 20001560 PARAMETER Experiment Name: At_Drought_Soil_Dry_P Parameter: Post Timepoint (hr) Value: None
  misc_feature: MA Experiment 20001560 PARAMETER Experiment Name: At_Drought_Soil_Dry_P Parameter: Post-Treatment Value: None
  misc_feature: MA Experiment 20001560 PARAMETER Experiment Name: At_Drought_Soil_Dry_P Parameter: Timepoint (day) Value: 14
  misc_feature: MA Experiment 20001560 PARAMETER Experiment Name: At_Drought_Soil_Dry_P Parameter: Treatment Value: Drought vs. No Drought
  misc_feature: MA Experiment ID: 20001757 Result: Up-regulated in Transcription
  misc_feature: MA Experiment 20001757 PARAMETER Experiment Name: At_50mM_NH4NO3_L-to-H_P Parameter: Timepoint (hr) Value: 6
  misc_feature: MA Experiment 20001757 PARAMETER Experiment Name: At_50mM_NH4NO3_L-to-H_P Parameter: Tissue Value: Leaf
  misc_feature: MA Experiment 20001757 PARAMETER Experiment Name: At_50mM_NH4NO3_L-to-H_P Parameter: Treatment Value: 50mM NH4NO3 vs 100mM Mannitol

SEQ ID NO: 40938 - protein, 284 aa, Arabidopsis thaliana; identical to SEQ ID NO: 38082
  peptide (1)..(284): Ceres Seq. ID no. 12371249
  misc_feature (177)..(250): Pfam Name: Ribosomal protein S5, C-terminal domain Pfam Description: Ribosomal protein S5, C-terminal domain
  misc_feature (177)..(250): Pfam Name: Ribosomal protein S5, C-terminal domain Pfam Description: Ribosomal protein S5, C-terminal domain
  misc_feature (1)..(267): Homolog of NCBI NO: 34393314 NR Description: putative 40S ribosomal protein S2
  misc_feature (1)..(231): Homolog of NCBI NO: 8979936 NR Description: Identical to gene XW6 from Arabidopsis thaliana and contains a Ribosomal protein S5 PF|00333 domain. ESTs
  misc_feature (1)..(279): Homolog of NCBI NO: 15230312 NR Description: 40S ribosomal protein S2 homolog
  misc_feature (1)..(284): Homolog of NCBI NO: 21553851 NR Description: 40S ribosomal protein S2 [Arabidopsis thaliana]
  misc_feature (1)..(284): Homolog of NCBI NO: 15227443 NR Description: 40S ribosomal protein S2
  misc_feature (1)..(267): Homolog of NCBI NO: 34393314 NR Description: putative 40S ribosomal protein S2
  misc_feature (1)..(279): Homolog of NCBI NO: 15230312 NR Description: 40S ribosomal protein S2 homolog
  misc_feature (1)..(284): Homolog of NCBI NO: 15227443 NR Description: 40S ribosomal protein S2
  misc_feature (1)..(284): Homolog of NCBI NO: 15217951 NR Description: ribosomal protein S2, putative; protein id:
  misc_feature (1)..(284): Homolog of NCBI NO: 21618011 NR Description: ribosomal protein S2, putative [Arabidopsis
  misc_feature (1)..(284): Homolog of NCBI NO: 18406325 NR Description: ribosomal protein S2, putative
  misc_feature (1)..(284): Homolog of NCBI NO: 21539457 NR Description: ribosomal protein S2, putative [Arabidopsis
  misc_feature (3)..(284): Homolog of NCBI NO: 25294520 NR Description: hypothetical protein RF12
  misc_feature (1)..(284): Homolog of NCBI NO: 21553851 NR Description: 40S ribosomal protein S2 [Arabidopsis thaliana]
  misc_feature (1)..(231): Homolog of NCBI NO: 8979936 NR Description: Identical to gene XW6 from Arabidopsis thaliana and contains a Ribosomal protein S5 PF|00333 domain. ESTs
  misc_feature (3)..(284): Homolog of NCBI NO: 25294520 NR Description: hypothetical protein RF12
  misc_feature (1)..(284): Homolog of NCBI NO: 21539457 NR Description: ribosomal protein S2, putative [Arabidopsis
  misc_feature (1)..(284): Homolog of NCBI NO: 18406325 NR Description: ribosomal protein S2, putative
  misc_feature (1)..(284): Homolog of NCBI NO: 21618011 NR Description: ribosomal protein S2, putative [Arabidopsis
  misc_feature (1)..(284): Homolog of NCBI NO: 15217951 NR Description: ribosomal protein S2, putative; protein id:

SEQ ID NO: 40939 - protein, 185 aa, Arabidopsis thaliana; identical to SEQ ID NO: 38083
  peptide (1)..(185): Ceres Seq. ID no. 12371250
  misc_feature (78)..(151): Pfam Name: Ribosomal protein S5, C-terminal domain Pfam Description: Ribosomal protein S5, C-terminal domain
  misc_feature (78)..(151): Pfam Name: Ribosomal protein S5, C-terminal domain Pfam Description: Ribosomal protein S5, C-terminal domain
  misc_feature (1)..(168): Homolog of NCBI NO: 34393314 NR Description: putative 40S ribosomal protein S2
  misc_feature (1)..(132): Homolog of NCBI NO: 8979936 NR Description: Identical to gene XW6 from Arabidopsis thaliana and contains a Ribosomal protein S5 PF|00333 domain. ESTs
  misc_feature (1)..(180): Homolog of NCBI NO: 15230312 NR Description: 40S ribosomal protein S2 homolog
  misc_feature (1)..(185): Homolog of NCBI NO: 21553851 NR Description: 40S ribosomal protein S2 [Arabidopsis thaliana]
  misc_feature (1)..(185): Homolog of NCBI NO: 15227443 NR Description: 40S ribosomal protein S2
  misc_feature (1)..(168): Homolog of NCBI NO: 34393314 NR Description: putative 40S ribosomal protein S2
  misc_feature (1)..(180): Homolog of NCBI NO: 15230312 NR Description: 40S ribosomal protein S2 homolog
  misc_feature (1)..(185): Homolog of NCBI NO: 15227443 NR Description: 40S ribosomal protein S2
  misc_feature (1)..(185): Homolog of NCBI NO: 15217951 NR Description: ribosomal protein S2, putative; protein id:
  misc_feature (1)..(185): Homolog of NCBI NO: 21618011 NR Description: ribosomal protein S2, putative [Arabidopsis
  misc_feature (1)..(185): Homolog of NCBI NO: 18406325 NR Description: ribosomal protein S2, putative
  misc_feature (1)..(185): Homolog of NCBI NO: 21539457 NR Description: ribosomal protein S2, putative [Arabidopsis
  misc_feature (1)..(185): Homolog of NCBI NO: 25294520 NR Description: hypothetical protein RF12
  misc_feature (1)..(185): Homolog of NCBI NO: 21553851 NR Description: 40S ribosomal protein S2 [Arabidopsis thaliana]
  misc_feature (1)..(132): Homolog of NCBI NO: 8979936 NR Description: Identical to gene XW6 from Arabidopsis thaliana and contains a Ribosomal protein S5 PF|00333 domain. ESTs
  misc_feature (1)..(185): Homolog of NCBI NO: 25294520 NR Description: hypothetical protein RF12
  misc_feature (1)..(185): Homolog of NCBI NO: 21539457 NR Description: ribosomal protein S2, putative [Arabidopsis
  misc_feature (1)..(185): Homolog of NCBI NO: 18406325 NR Description: ribosomal protein S2, putative
  misc_feature (1)..(185): Homolog of NCBI NO: 21618011 NR Description: ribosomal protein S2, putative [Arabidopsis
  misc_feature (1)..(185): Homolog of NCBI NO: 15217951 NR Description: ribosomal protein S2, putative; protein id:

SEQ ID NO: 40940 - protein, 182 aa, Arabidopsis thaliana; identical to SEQ ID NO: 38084
  peptide (1)..(182): Ceres Seq. ID no. 12371251
  misc_feature (75)..(148): Pfam Name: Ribosomal protein S5, C-terminal domain Pfam Description: Ribosomal protein S5, C-terminal domain
  misc_feature (75)..(148): Pfam Name: Ribosomal protein S5, C-terminal domain Pfam Description: Ribosomal protein S5, C-terminal domain
  misc_feature (1)..(165): Homolog of NCBI NO: 34393314 NR Description: putative 40S ribosomal protein S2
  misc_feature (1)..(129): Homolog of NCBI NO: 8979936 NR Description: Identical to gene XW6 from Arabidopsis thaliana and contains a Ribosomal protein S5 PF|00333 domain. ESTs
  misc_feature (1)..(177): Homolog of NCBI NO: 15230312 NR Description: 40S ribosomal protein S2 homolog
  misc_feature (1)..(182): Homolog of NCBI NO: 21553851 NR Description: 40S ribosomal protein S2 [Arabidopsis thaliana]
  misc_feature (1)..(182): Homolog of NCBI NO: 15227443 NR Description: 40S ribosomal protein S2
  misc_feature (1)..(165): Homolog of NCBI NO: 34393314 NR Description: putative 40S ribosomal protein S2
  misc_feature (1)..(177): Homolog of NCBI NO: 15230312 NR Description: 40S ribosomal protein S2 homolog
  misc_feature (1)..(182): Homolog of NCBI NO: 15227443 NR Description: 40S ribosomal protein S2
  misc_feature (1)..(182): Homolog of NCBI NO: 15217951 NR Description: ribosomal protein S2, putative; protein id:
  misc_feature (1)..(182): Homolog of NCBI NO: 21618011 NR Description: ribosomal protein S2, putative [Arabidopsis
  misc_feature (1)..(182): Homolog of NCBI NO: 18406325 NR Description: ribosomal protein S2, putative
  misc_feature (1)..(182): Homolog of NCBI NO: 21539457 NR Description: ribosomal protein S2, putative [Arabidopsis
  misc_feature (1)..(182): Homolog of NCBI NO: 25294520 NR Description: hypothetical protein RF12
  misc_feature (1)..(182): Homolog of NCBI NO: 21553851 NR Description: 40S ribosomal protein S2 [Arabidopsis thaliana]
  misc_feature (1)..(129): Homolog of NCBI NO: 8979936 NR Description: Identical to gene XW6 from Arabidopsis thaliana and contains a Ribosomal protein S5 PF|00333 domain. ESTs
  misc_feature (1)..(182): Homolog of NCBI NO: 25294520 NR Description: hypothetical protein RF12
  misc_feature (1)..(182): Homolog of NCBI NO: 21539457 NR Description: ribosomal protein S2, putative [Arabidopsis
  misc_feature (1)..(182): Homolog of NCBI NO: 18406325 NR Description: ribosomal protein S2, putative
  misc_feature (1)..(182): Homolog of NCBI NO: 21618011 NR Description: ribosomal protein S2, putative [Arabidopsis
  misc_feature (1)..(182): Homolog of NCBI NO: 15217951 NR Description: ribosomal protein S2, putative; protein id:

SEQ ID NO: 40941 - DNA, 1793 bp, Arabidopsis thaliana
  misc_feature (1)..(1793): Ceres Seq. ID no. 12338267
  misc_feature: MA Experiment ID: 20000169 Result: Up-regulated in Transcription
  misc_feature: MA Experiment 20000169 PARAMETER Experiment Name: At_100uM_ABA_P Parameter: Age (day) Value: 14
  misc_feature: MA Experiment 20000169 PARAMETER Experiment Name: At_100uM_ABA_P Parameter: Organism Value: A. thaliana
  misc_feature: MA Experiment 20000169 PARAMETER Experiment Name: At_100uM_ABA_P Parameter: Plant Line Value: WS
  misc_feature: MA Experiment 20000169 PARAMETER Experiment Name: At_100uM_ABA_P Parameter: Timepoint (hr) Value: 6
  misc_feature: MA Experiment 20000169 PARAMETER Experiment Name: At_100uM_ABA_P Parameter: Tissue Value: Aerial
  misc_feature: MA Experiment 20000169 PARAMETER Experiment Name: At_100uM_ABA_P Parameter: Treatment Value: 100uM ABA vs. No Treatment
  misc_feature: MA Experiment ID: 20000173 Result: Down-regulated in Transcription
  misc_feature: MA Experiment 20000173 PARAMETER Experiment Name: At_42deg_Heat_P Parameter: Age (day) Value: 14
  misc_feature: MA Experiment 20000173 PARAMETER Experiment Name: At_42deg_Heat_P Parameter: Organism Value: A. thaliana
  misc_feature: MA Experiment 20000173 PARAMETER Experiment Name: At_42deg_Heat_P Parameter: Plant Line Value: WS
  misc_feature: MA Experiment 20000173 PARAMETER Experiment Name: At_42deg_Heat_P Parameter: Temperature (deg C) Value: 42 vs. 22
  misc_feature: MA Experiment 20000173 PARAMETER Experiment Name: At_42deg_Heat_P Parameter: Timepoint (hr) Value: 6
  misc_feature: MA Experiment 20000173 PARAMETER Experiment Name: At_42deg_Heat_P Parameter: Tissue Value: Aerial
  misc_feature: MA Experiment ID: 20000180 Result: Up-regulated in Transcription
  misc_feature: MA Experiment 20000180 PARAMETER Experiment Name: At_Germinating_Seeds_P Parameter: Age (hr) Value: 24 vs. 0
  misc_feature: MA Experiment 20000180 PARAMETER Experiment Name: At_Germinating_Seeds_P Parameter: Tissue Value: Germinating Seeds
  misc_feature: MA Experiment ID: 20000184 Result: Down-regulated in Transcription
  misc_feature: MA Experiment 20000184 PARAMETER Experiment Name: At_Shoots__P Parameter: Age (day) Value: 7
  misc_feature: MA Experiment 20000184 PARAMETER Experiment Name: At_Shoots__P Parameter: Tissue Value: Shoots vs. Whole Plant
  misc_feature: MA Experiment ID: 20000185 Result: Down-regulated in Transcription
  misc_feature: MA Experiment 20000185 PARAMETER Experiment Name: At_Roots__P Parameter: Age (day) Value: 7 vs. 21
  misc_feature: MA Experiment 20000185 PARAMETER Experiment Name: At_Roots__P Parameter: Organism Value: A. thaliana
  misc_feature: MA Experiment 20000185 PARAMETER Experiment Name: At_Roots__P Parameter: Tissue Value: Roots vs. Whole Plant
  misc_feature: MA Experiment ID: 20000234 Result: Down-regulated in Transcription
  misc_feature: MA Experiment 20000234 PARAMETER Experiment Name: At_Siliques_P Parameter: Age (day) Value: 21
  misc_feature: MA Experiment 20000234 PARAMETER Experiment Name: At_Siliques_P Parameter: Organism Value: A. thaliana
  misc_feature: MA Experiment 20000234 PARAMETER Experiment Name: At_Siliques_P Parameter: Plant Line Value: WS
  misc_feature: MA Experiment 20000234 PARAMETER Experiment Name: At_Siliques_P Parameter: Tissue Value: Less Than 5mm Siliques vs. Whole Plant
  misc_feature: MA Experiment ID: 20000264 Result: Up-regulated in Transcription
  misc_feature: MA Experiment 20000264 PARAMETER Experiment Name: At_Open_Flower_P Parameter: Age (day) Value: 21
  misc_feature: MA Experiment 20000264 PARAMETER Experiment Name: At_Open_Flower_P Parameter: Plant Line Value: WS
  misc_feature: MA Experiment 20000264 PARAMETER Experiment Name: At_Open_Flower_P Parameter: Tissue Value: Open Flower vs. Whole Plant
  misc_feature: MA Experiment ID: 20000438 Result: Down-regulated in Transcription
  misc_feature: MA Experiment 20000438 PARAMETER Experiment Name: At_Shoots__P Parameter: Age (day) Value: 14
  misc_feature: MA Experiment 20000438 PARAMETER Experiment Name: At_Shoots__P Parameter: Tissue Value: Shoots vs. Whole Plant
  misc_feature: MA Experiment ID: 20000439 Result: Down-regulated in Transcription
  misc_feature: MA Experiment 20000439 PARAMETER Experiment Name: At_Roots__P Parameter: Age (day) Value: 14 vs. 21
  misc_feature: MA Experiment 20000439 PARAMETER Experiment Name: At_Roots__P Parameter: Organism Value: A. thaliana
  misc_feature: MA Experiment 20000439 PARAMETER Experiment Name: At_Roots__P Parameter: Tissue Value: Roots vs. Whole Plant
  misc_feature: MA Experiment ID: 20000453 Result: Up-regulated in Transcription
  misc_feature: MA Experiment 20000453 PARAMETER Experiment Name: At_100uM_ABA_P Parameter: Age (day) Value: 15
  misc_feature: MA Experiment 20000453 PARAMETER Experiment Name: At_100uM_ABA_P Parameter: Organism Value: A. thaliana
  misc_feature: MA Experiment 20000453 PARAMETER Experiment Name: At_100uM_ABA_P Parameter: Plant Line Value: WS
  misc_feature: MA Experiment 20000453 PARAMETER Experiment Name: At_100uM_ABA_P Parameter: Timepoint (hr) Value: 24
  misc_feature: MA Experiment 20000453 PARAMETER Experiment Name: At_100uM_ABA_P Parameter: Tissue Value: Aerial
  misc_feature: MA Experiment 20000453 PARAMETER Experiment Name: At_100uM_ABA_P Parameter: Treatment Value: 100uM ABA vs. No Treatment
  misc_feature: MA Experiment ID: 20000455 Result: Up-regulated in Transcription
  misc_feature: MA Experiment 20000455 PARAMETER Experiment Name: At_100uM_ABA_P Parameter: Age (day) Value: 16
  misc_feature: MA Experiment 20000455 PARAMETER Experiment Name: At_100uM_ABA_P Parameter: Organism Value: A. thaliana
  misc_feature: MA Experiment 20000455 PARAMETER Experiment Name: At_100uM_ABA_P Parameter: Plant Line Value: WS
  misc_feature: MA Experiment 20000455 PARAMETER Experiment Name: At_100uM_ABA_P Parameter: Timepoint (hr) Value: 48
  misc_feature: MA Experiment 20000455 PARAMETER Experiment Name: At_100uM_ABA_P Parameter: Tissue Value: Aerial
  misc_feature: MA Experiment 20000455 PARAMETER Experiment Name: At_100uM_ABA_P Parameter: Treatment Value: 100uM ABA vs. No Treatment
  misc_feature: MA Experiment ID: 20000456 Result: Down-regulated in Transcription
  misc_feature: MA Experiment 20000456 PARAMETER Experiment Name: At_100uM_BA_P Parameter: Age (day) Value: 14
  misc_feature: MA Experiment 20000456 PARAMETER Experiment Name: At_100uM_BA_P Parameter: Organism Value: A. thaliana
  misc_feature: MA Experiment 20000456 PARAMETER Experiment Name: At_100uM_BA_P Parameter: Plant Line Value: WS
  misc_feature: MA Experiment 20000456 PARAMETER Experiment Name: At_100uM_BA_P Parameter: Timepoint (hr) Value: 6
  misc_feature: MA Experiment 20000456 PARAMETER Experiment Name: At_100uM_BA_P Parameter: Tissue Value: Aerial
  misc_feature: MA Experiment 20000456 PARAMETER Experiment Name: At_100uM_BA_P Parameter: Treatment Value: 100uM BA vs. No Treatment
  misc_feature: MA Experiment ID: 20000460 Result: Down-regulated in Transcription
  misc_feature: MA Experiment 20000460 PARAMETER Experiment Name: At_10percent_PEG_P Parameter: Age (day) Value: 12
  misc_feature: MA Experiment 20000460 PARAMETER Experiment Name: At_10percent_PEG_P Parameter: Organism Value: A. thaliana
  misc_feature: MA Experiment 20000460 PARAMETER Experiment Name: At_10percent_PEG_P Parameter: Plant Line Value: WS
  misc_feature: MA Experiment 20000460 PARAMETER Experiment Name: At_10percent_PEG_P Parameter: Timepoint (day) Value: 12
  misc_feature: MA Experiment 20000460 PARAMETER Experiment Name: At_10percent_PEG_P Parameter: Tissue Value: Whole Plant
  misc_feature: MA Experiment 20000460 PARAMETER Experiment Name: At_10percent_PEG_P Parameter: Treatment Value: 10percent PEG vs. No Treatment
  misc_feature: MA Experiment ID: 20000527 Result: Down-regulated in Transcription
  misc_feature: MA Experiment 20000527 PARAMETER Experiment Name: At_10percent_PEG_P Parameter: Age (day) Value: 20
  misc_feature: MA Experiment 20000527 PARAMETER Experiment Name: At_10percent_PEG_P Parameter: Organism Value: A. thaliana
  misc_feature: MA Experiment 20000527 PARAMETER Experiment Name: At_10percent_PEG_P Parameter: Plant Line Value: WS
  misc_feature: MA Experiment 20000527 PARAMETER Experiment Name: At_10percent_PEG_P Parameter: Timepoint (day) Value: 20
  misc_feature: MA Experiment 20000527 PARAMETER Experiment Name: At_10percent_PEG_P Parameter: Tissue Value: Whole Plant
  misc_feature: MA Experiment 20000527 PARAMETER Experiment Name: At_10percent_PEG_P Parameter: Treatment Value: 10percent PEG vs. No Treatment
  misc_feature: MA Experiment ID: 20000794 Result: Up-regulated in Transcription
  misc_feature: MA Experiment 20000794 PARAMETER Experiment Name: At_Petals_P Parameter: Age (day) Value: 23-25 days
  misc_feature: MA Experiment 20000794 PARAMETER Experiment Name: At_Petals_P Parameter: Plant Line Value: WS
  misc_feature: MA Experiment 20000794 PARAMETER Experiment Name: At_Petals_P Parameter: Tissue Value: Petals vs. Whole plant
  misc_feature: MA Experiment ID: 20001247 Result: Down-regulated in Transcription
  misc_feature: MA Experiment 20001247 PARAMETER Experiment Name: At_Far-red-induction_P Parameter: Age (day) Value: 7
  misc_feature: MA Experiment 20001247 PARAMETER Experiment Name: At_Far-red-induction_P Parameter: Light Value: Far-red vs. White
  misc_feature: MA Experiment 20001247 PARAMETER Experiment Name: At_Far-red-induction_P Parameter: Organism Value: A. thaliana
  misc_feature: MA Experiment 20001247 PARAMETER Experiment Name: At_Far-red-induction_P Parameter: Plant Line Value: Columbia
  misc_feature: MA Experiment 20001247 PARAMETER Experiment Name: At_Far-red-induction_P Parameter: Timepoint (hr) Value: 1
  misc_feature: MA Experiment 20001247 PARAMETER Experiment Name: At_Far-red-induction_P Parameter: Tissue Value: Whole Plant
  misc_feature: MA Experiment ID: 20001904 Result: Up-regulated in Transcription
  misc_feature: MA Experiment 20001904 PARAMETER Experiment Name: At_Drought_Reproduction_P Parameter: Age (day) Value: 37
  misc_feature: MA Experiment 20001904 PARAMETER Experiment Name: At_Drought_Reproduction_P Parameter: Organism Value: A. thaliana
  misc_feature: MA Experiment 20001904 PARAMETER Experiment Name: At_Drought_Reproduction_P Parameter: Plant Line Value: WS
  misc_feature: MA Experiment 20001904 PARAMETER Experiment Name: At_Drought_Reproduction_P Parameter: Timepoint (day) Value: 7
  misc_feature: MA Experiment 20001904 PARAMETER Experiment Name: At_Drought_Reproduction_P Parameter: Tissue Value: Rosettes
  misc_feature: MA Experiment 20001904 PARAMETER Experiment Name: At_Drought_Reproduction_P Parameter: Treatment Value: Drought vs. No Drought
  misc_feature: MA Experiment ID: 20001905 Result: Up-regulated in Transcription
  misc_feature: MA Experiment 20001905 PARAMETER Experiment Name: At_Drought_Reproduction_P Parameter: Age (day) Value: 40
  misc_feature: MA Experiment 20001905 PARAMETER Experiment Name: At_Drought_Reproduction_P Parameter: Organism Value: A. thaliana
  misc_feature: MA Experiment 20001905 PARAMETER Experiment Name: At_Drought_Reproduction_P Parameter: Plant Line Value: WS
  misc_feature: MA Experiment 20001905 PARAMETER Experiment Name: At_Drought_Reproduction_P Parameter: Timepoint (day) Value: 10
  misc_feature: MA Experiment 20001905 PARAMETER Experiment Name: At_Drought_Reproduction_P Parameter: Tissue Value: Rosettes
  misc_feature: MA Experiment 20001905 PARAMETER Experiment Name: At_Drought_Reproduction_P Parameter: Treatment Value: Drought vs. No Drought
aaatatctaacaatctatcttttgggtccctaaaaaagctccttcctttatcttgttttctaagttatctttttgtatgagtttcaaagcttatcattatctcactcttcttccatagctatgactactttaacgaagattcaagtgtacccacaagtcttggagcaccgtctcttcttcagagatccgatacgggtcgggtcaagattgacttgtagagaacgtagtaatagggtttatgtgcatcggtgtgagaaaaaagttgaaagaaagagaaaagttgagaaatttaagggaaatgggtcgtgggattctttgaaatctgggtttttagggtttagtaaattagggttcttgtctaaagatgagtataatcagaaagttgaaaacttggagatggttttctcttcggttgctgttcaaattgcgagatacattgtgacgatgacaagtactggagctattcttttgattgggtttcaattatcaggtggagatagttcgatgaactcattggtttggtatagttggcttggtggaattatcattggaaccatgactggtgctaacatggttttggaagatcattatcgagccggtccacggaatgttgttataaccggaagcactaggggactagggaaagctcttgctagagagtttcttctctctggagacagagtcattgtcacatctcgcagttctgaatctgttgatatgactgtcaaagagctagagcaaaatctcaaagagattatgagtaacgctagcgagtcagctagaaagaaactgagtgatgctaaggtagttggtattgcctgtgatgtttgcaaacccgaagacgttgagaagctgtcgaatttcgctgtaaaagagcttggttccatcaacatatggataaacaatgctggtactaacaaaggttttagaccgctactcgagttcacggaagaagatatcacacagattgtctccacaaatttgattggatcaattctatgtacacgaggggctatagatgtgatgagcagacagcacagtggtggacacatttttaacatggatggtgctggctctggaggttcaagtactcctctcactgccgtatatggttcaacaaaatgtggacttaggcagtttcatgggtctatagtgaaagaaagccaaaaaacaaacgttggccttcacactgcatcccctggcatggttctgacagaacttcttctcagtggttcgagcattaaaaacaagcagatgtttaacataatctgtgagcttcctgagacagtagctagaactttggtaccacgaatgcgagttgtgaaaggttcgggaaaagccgtcaattacctaactcctcctcggatattgttagctattgtcacttcctggctaaggagaggccgatggtttgatgaccaaggacgggcgttatatgcagcagaagcagatagactaaggaactgggcagagaacaggacgaggttgtcgttaacagacgcgatggagatgtatacagagaatacttgggtctctgttttctctctttctgttgtttgcgctttcatcatcttacaaagcacaacacctagctcttttccaggcacataacaaacatcttcctcggatgtgttttaagaaaattgtaaacgtacatgttatgtataaaaaacatatatataacagaaccgatttgttcatgtaaacacttcttatagttgtagaatgtgtcgttgttgaaaacaatgaaaaaatagattgtaataaacttttatcagattgtagtattttct

SEQ ID NO: 40942 - protein, 496 aa, Arabidopsis thaliana
  peptide (1)..(496): Ceres Seq. ID no. 12338268
  misc_feature (162)..(227): Homolog of NCBI NO: 15672756 NR Description: 3-oxoacyl-acyl carrier protein reductase (EC
  misc_feature (228)..(391): Homolog of NCBI NO: 15672756 NR Description: 3-oxoacyl-acyl carrier protein reductase (EC
  misc_feature (164)..(436): Homolog of NCBI NO: 21673969 NR Description: oxidoreductase, short-chain
  misc_feature (140)..(401): Homolog of NCBI NO: 29244639 NR Description: putative oxidoreductase protein
  misc_feature (161)..(405): Homolog of NCBI NO: 18414726 NR Description: putative protein
  misc_feature (161)..(405): Homolog of NCBI NO: 10178029 NR Description: gene_id:MUG13.25~pir||T07705~similar to unknown
  misc_feature (83)..(169): Homolog of NCBI NO: 34904226 NR Description: P0443E07.30 [Oryza sativa (japonica
  misc_feature (165)..(488): Homolog of NCBI NO: 34904226 NR Description: P0443E07.30 [Oryza sativa (japonica
  misc_feature (70)..(496): Homolog of NCBI NO: 7485669 NR Description: hypothetical protein F17N18.140 - Arabidopsis
  misc_feature (1)..(496): Homolog of NCBI NO: 18413962 NR Description: putative protein
MTTLTKIQVYPQVLEHRLFFRDPIRVGSRLTCRERSNRVYVHRCEKKVERKRKVEKFKGNGSWDSLKSGFLGFSKLGFLSKDEYNQKVENLEMVFSSVAVQIARYIVTMTSTGAILLIGFQLSGGDSSMNSLVWYSWLGGIIIGTMTGANMVLEDHYRAGPRNVVITGSTRGLGKALAREFLLSGDRVIVTSRSSESVDMTVKELEQNLKEIMSNASESARKKLSDAKVVGIACDVCKPEDVEKLSNFAVKELGSINIWINNAGTNKGFRPLLEFTEEDITQIVSTNLIGSILCTRGAIDVMSRQHSGGHIFNMDGAGSGGSSTPLTAVYGSTKCGLRQFHGSIVKESQKTNVGLHTASPGMVLTELLLSGSSIKNKQMFNIICELPETVARTLVPRMRVVKGSGKAVNYLTPPRILLAIVTSWLRRGRWFDDQGRALYAAEADRLRNWAENRTRLSLTDAMEMYTENTWVSVFSLSVVCAFIILQSTTPSSFPGT

SEQ ID NO: 40943 - protein, 404 aa, Arabidopsis thaliana
  peptide (1)..(404): Ceres Seq. ID no. 12338269
  misc_feature (70)..(135): Homolog of NCBI NO: 15672756 NR Description: 3-oxoacyl-acyl carrier protein reductase (EC
  misc_feature (136)..(299): Homolog of NCBI NO: 15672756 NR Description: 3-oxoacyl-acyl carrier protein reductase (EC
  misc_feature (72)..(344): Homolog of NCBI NO: 21673969 NR Description: oxidoreductase, short-chain
  misc_feature (48)..(309): Homolog of NCBI NO: 29244639 NR Description: putative oxidoreductase protein
  misc_feature (69)..(313): Homolog of NCBI NO: 18414726 NR Description: putative protein
  misc_feature (69)..(313): Homolog of NCBI NO: 10178029 NR Description: gene_id:MUG13.25~pir||T07705~similar to unknown
  misc_feature (1)..(77): Homolog of NCBI NO: 34904226 NR Description: P0443E07.30 [Oryza sativa (japonica
  misc_feature (73)..(396): Homolog of NCBI NO: 34904226 NR Description: P0443E07.30 [Oryza sativa (japonica
  misc_feature (1)..(404): Homolog of NCBI NO: 7485669 NR Description: hypothetical protein F17N18.140 - Arabidopsis
  misc_feature (1)..(404): Homolog of NCBI NO: 18413962 NR Description: putative protein
MVFSSVAVQIARYIVTMTSTGAILLIGFQLSGGDSSMNSLVWYSWLGGIIIGTMTGANMVLEDHYRAGPRNVVITGSTRGLGKALAREFLLSGDRVIVTSRSSESVDMTVKELEQNLKEIMSNASESARKKLSDAKVVGIACDVCKPEDVEKLSNFAVKELGSINIWINNAGTNKGFRPLLEFTEEDITQIVSTNLIGSILCTRGAIDVMSRQHSGGHIFNMDGAGSGGSSTPLTAVYGSTKCGLRQFHGSIVKESQKTNVGLHTASPGMVLTELLLSGSSIKNKQMFNIICELPETVARTLVPRMRVVKGSGKAVNYLTPPRILLAIVTSWLRRGRWFDDQGRALYAAEADRLRNWAENRTRLSLTDAMEMYTENTWVSVFSLSVVCAFIILQSTTPSSFPGT

SEQ ID NO: 40944 - protein, 388 aa, Arabidopsis thaliana
  peptide (1)..(388): Ceres Seq. ID no. 12338270
  misc_feature (54)..(119): Homolog of NCBI NO: 15672756 NR Description: 3-oxoacyl-acyl carrier protein reductase (EC
  misc_feature (120)..(283): Homolog of NCBI NO: 15672756 NR Description: 3-oxoacyl-acyl carrier protein reductase (EC
  misc_feature (56)..(328): Homolog of NCBI NO: 21673969 NR Description: oxidoreductase, short-chain
  misc_feature (32)..(293): Homolog of NCBI NO: 29244639 NR Description: putative oxidoreductase protein
  misc_feature (53)..(297): Homolog of NCBI NO: 18414726 NR Description: putative protein
  misc_feature (53)..(297): Homolog of NCBI NO: 10178029 NR Description: gene_id:MUG13.25~pir||T07705~similar to unknown
  misc_feature (1)..(61): Homolog of NCBI NO: 34904226 NR Description: P0443E07.30 [Oryza sativa (japonica
  misc_feature (57)..(380): Homolog of NCBI NO: 34904226 NR Description: P0443E07.30 [Oryza sativa (japonica
  misc_feature (1)..(388): Homolog of NCBI NO: 7485669 NR Description: hypothetical protein F17N18.140 - Arabidopsis
  misc_feature (1)..(388): Homolog of NCBI NO: 18413962 NR Description: putative protein
MTSTGAILLIGFQLSGGDSSMNSLVWYSWLGGIIIGTMTGANMVLEDHYRAGPRNVVITGSTRGLGKALAREFLLSGDRVIVTSRSSESVDMTVKELEQNLKEIMSNASESARKKLSDAKVVGIACDVCKPEDVEKLSNFAVKELGSINIWINNAGTNKGFRPLLEFTEEDITQIVSTNLIGSILCTRGAIDVMSRQHSGGHIFNMDGAGSGGSSTPLTAVYGSTKCGLRQFHGSIVKESQKTNVGLHTASPGMVLTELLLSGSSIKNKQMFNIICELPETVARTLVPRMRVVKGSGKAVNYLTPPRILLAIVTSWLRRGRWFDDQGRALYAAEADRLRNWAENRTRLSLTDAMEMYTENTWVSVFSLSVVCAFIILQSTTPSSFPGT

SEQ ID NO: 40945 - DNA, 1287 bp, Arabidopsis thaliana
  misc_feature (1)..(1287): Ceres Seq. ID no. 12327890
  misc_feature: MA Experiment ID: 108434 Result: Down-regulated in Transcription
  misc_feature: MA Experiment 108434 PARAMETER Experiment Name: At_Root_Tips_cDNA_P Parameter: Tissue Value: Root Tips
  misc_feature: MA Experiment ID: 108435 Result: Down-regulated in Transcription
  misc_feature: MA Experiment 108435 PARAMETER Experiment Name: At_stm_Mutants_cDNA_P Parameter: Plant Line Value: wt Landsburg vs stm
  misc_feature: MA Experiment 108435 PARAMETER Experiment Name: At_stm_Mutants_cDNA_P Parameter: Tissue Value: Shoot Apical Meristem Region
  misc_feature: MA Experiment ID: 108462 Result: Up-regulated in Transcription
  misc_feature: MA Experiment 108462 PARAMETER Experiment Name: At_Germinating_Seeds_cDNA_P Parameter: Age (day) Value: 2 vs. 0
  misc_feature: MA Experiment 108462 PARAMETER Experiment Name: At_Germinating_Seeds_cDNA_P Parameter: Tissue Value: Germinating Seeds
  misc_feature: MA Experiment ID: 108464 Result: Up-regulated in Transcription
  misc_feature: MA Experiment 108464 PARAMETER Experiment Name: At_Germinating_Seeds_cDNA_P Parameter: Age (day) Value: 4 vs. 0
  misc_feature: MA Experiment 108464 PARAMETER Experiment Name: At_Germinating_Seeds_cDNA_P Parameter: Tissue Value: Germinating Seeds
  misc_feature: MA Experiment ID: 108488 Result: Up-regulated in Transcription
  misc_feature: MA Experiment ID: 108573 Result: Up-regulated in Transcription
  misc_feature: MA Experiment 108573 PARAMETER Experiment Name: At_Drought_cDNA_P Parameter: Timepoint (hr) Value: 6
  misc_feature: MA Experiment 108573 PARAMETER Experiment Name: At_Drought_cDNA_P Parameter: Tissue Value: Aerial
  misc_feature: MA Experiment 108573 PARAMETER Experiment Name: At_Drought_cDNA_P Parameter: Treatment Value: Drought vs. No Drought
  misc_feature: MA Experiment ID: 108594 Result: Up-regulated in Transcription
  misc_feature: MA Experiment 108594 PARAMETER Experiment Name: At_Ler-rhl_Root_cDNA_P Parameter: Plant Line Value: null
  misc_feature: MA Experiment ID: 108595 Result: Down-regulated in Transcription
  misc_feature: MA Experiment 108595 PARAMETER Experiment Name: At_Ler-pi_Ovule_cDNA_P Parameter: Plant Line Value: null
  misc_feature: MA Experiment ID: 20000069 Result: Down-regulated in Transcription
  misc_feature: MA Experiment 20000069 PARAMETER Experiment Name: At_100uM_ABA_Mutants_cDNA_P Parameter: Plant Line Value: CS23
  misc_feature: MA Experiment 20000069 PARAMETER Experiment Name: At_100uM_ABA_Mutants_cDNA_P Parameter: Timepoint (hr) Value: 6
  misc_feature: MA Experiment 20000069 PARAMETER Experiment Name: At_100uM_ABA_Mutants_cDNA_P Parameter: Tissue Value: Aerial
  misc_feature: MA Experiment 20000069 PARAMETER Experiment Name: At_100uM_ABA_Mutants_cDNA_P Parameter: Treatment Value: 100uM ABA vs. No Treatment
  misc_feature: MA Experiment ID: 20000070 Result: Down-regulated in Transcription
  misc_feature: MA Experiment 20000070 PARAMETER Experiment Name: At_100uM_ABA_Mutants_cDNA_P Parameter: Plant Line Value: CS24
  misc_feature: MA Experiment 20000070 PARAMETER Experiment Name: At_100uM_ABA_Mutants_cDNA_P Parameter: Timepoint (hr) Value: 6
  misc_feature: MA Experiment 20000070 PARAMETER Experiment Name: At_100uM_ABA_Mutants_cDNA_P Parameter: Tissue Value: Aerial
  misc_feature: MA Experiment 20000070 PARAMETER Experiment Name: At_100uM_ABA_Mutants_cDNA_P Parameter: Treatment Value: 100uM ABA vs. No Treatment
  misc_feature: MA Experiment ID: 20000071 Result: Down-regulated in Transcription
  misc_feature: MA Experiment 20000071 PARAMETER Experiment Name: At_100uM_ABA_Mutants_cDNA_P Parameter: Plant Line Value: CS8104
  misc_feature: MA Experiment 20000071 PARAMETER Experiment Name: At_100uM_ABA_Mutants_cDNA_P Parameter: Timepoint (hr) Value: 6
  misc_feature: MA Experiment 20000071 PARAMETER Experiment Name: At_100uM_ABA_Mutants_cDNA_P Parameter: Tissue Value: Aerial
  misc_feature: MA Experiment 20000071 PARAMETER Experiment Name: At_100uM_ABA_Mutants_cDNA_P Parameter: Treatment Value: 100uM ABA vs. No Treatment
  misc_feature: MA Experiment ID: 20000072 Result: Down-regulated in Transcription
  misc_feature: MA Experiment 20000072 PARAMETER Experiment Name: At_100uM_ABA_Mutants_cDNA_P Parameter: Plant Line Value: CS8105
  misc_feature: MA Experiment 20000072 PARAMETER Experiment Name: At_100uM_ABA_Mutants_cDNA_P Parameter: Timepoint (hr) Value: 6
  misc_feature: MA Experiment 20000072 PARAMETER Experiment Name: At_100uM_ABA_Mutants_cDNA_P Parameter: Tissue Value: Aerial
  misc_feature: MA Experiment 20000072 PARAMETER Experiment Name: At_100uM_ABA_Mutants_cDNA_P Parameter: Treatment Value: 100uM ABA vs. No Treatment
  misc_feature: MA Experiment ID: 20000086 Result: Down-regulated in Transcription
  misc_feature: MA Experiment 20000086 PARAMETER Experiment Name: At_100uM_ABA_Mutants_cDNA_P Parameter: Plant Line Value: CS22
  misc_feature: MA Experiment 20000086 PARAMETER Experiment Name: At_100uM_ABA_Mutants_cDNA_P Parameter: Timepoint (hr) Value: 6
  misc_feature: MA Experiment 20000086 PARAMETER Experiment Name: At_100uM_ABA_Mutants_cDNA_P Parameter: Tissue Value: Aerial
  misc_feature: MA Experiment 20000086 PARAMETER Experiment Name: At_100uM_ABA_Mutants_cDNA_P Parameter: Treatment Value: 100uM ABA vs. No Treatment
  misc_feature: MA Experiment ID: 20000087 Result: Down-regulated in Transcription
  misc_feature: MA Experiment 20000087 PARAMETER Experiment Name: At_100uM_ABA_Mutants_cDNA_P Parameter: Plant Line Value: WS
  misc_feature: MA Experiment 20000087 PARAMETER Experiment Name: At_100uM_ABA_Mutants_cDNA_P Parameter: Timepoint (hr) Value: 6
  misc_feature: MA Experiment 20000087 PARAMETER Experiment Name: At_100uM_ABA_Mutants_cDNA_P Parameter: Tissue Value: Aerial
  misc_feature: MA Experiment 20000087 PARAMETER Experiment Name: At_100uM_ABA_Mutants_cDNA_P Parameter: Treatment Value: 100uM ABA vs. No Treatment
  misc_feature: MA Experiment ID: 20000089 Result: Down-regulated in Transcription
  misc_feature: MA Experiment ID: 20000090 Result: Down-regulated in Transcription
  misc_feature: MA Experiment ID: 20000117 Result: Down-regulated in Transcription
  misc_feature: MA Experiment 20000117 PARAMETER Experiment Name: At_100uM_ABA_Mutants_cDNA_P Parameter: Plant Line Value: Columbia
  misc_feature: MA Experiment 20000117 PARAMETER Experiment Name: At_100uM_ABA_Mutants_cDNA_P Parameter: Timepoint (hr) Value: 6
  misc_feature: MA Experiment 20000117 PARAMETER Experiment Name: At_100uM_ABA_Mutants_cDNA_P Parameter: Tissue Value: Aerial
  misc_feature: MA Experiment 20000117 PARAMETER Experiment Name: At_100uM_ABA_Mutants_cDNA_P Parameter: Treatment Value: 100uM ABA vs. No Treatment
  misc_feature: MA Experiment ID: 20000224 Result: Down-regulated in Transcription
  misc_feature: MA Experiment ID: 20000227 Result: Down-regulated in Transcription
  misc_feature: MA Experiment 20000227 PARAMETER Experiment Name: At_Root-Tips-vs-Tops_P Parameter: Tissue Value: Root Tips vs. Root Tops
  misc_feature: MA Experiment ID: 20000451 Result: Down-regulated in Transcription
  misc_feature: MA Experiment 20000451 PARAMETER Experiment Name: At_CS6879_Shoots-Roots_P Parameter: Age (day) Value: 14
  misc_feature: MA Experiment 20000451 PARAMETER Experiment Name: At_CS6879_Shoots-Roots_P Parameter: Organism Value: A. thaliana
  misc_feature: MA Experiment 20000451 PARAMETER Experiment Name: At_CS6879_Shoots-Roots_P Parameter: Plant Line Value: CS6879 vs. WS
  misc_feature: MA Experiment 20000451 PARAMETER Experiment Name: At_CS6879_Shoots-Roots_P Parameter: Tissue Value: Roots
ctcgttgctgatgtgtcgctctgcttgagagagtcagagagtcaagagagaaaaggggtcgagaatggcggtcgcaatatctgggagtagtttgatatcgtcgactcttcagcattataataatcggatttatatccgagattatccgattccgtgtcactcttctaatccaatttgcaattcttttaatttcaaaagacgttcgttctctccttcttcccccaaatttaacgaccatgtcgttaacccttcctcttcttatttatcctccaagctttctccaattcgaacccattcctctttcgctgcgtgtggctgctcctggattcaagacaattcaatggttcatgattatgctacaacaactaatgggacgtccaagcgttgctcggcgttaccaacaacaaacacagtggatgtctcttcggtgtcagatctttttgaattcatatgctcgggtcctctcgtaaacaagattggtatcactcctcaaagagttggccagtctattgacaaatggttactctacggctcacaactttgtagactgtttcagcttaatgagcttaagcttacaattcctcagaaagctaggctataccactactacatacccgtttttatttgctgcgaagatcagattgctttgcataattccaagtttaaagatggagatgatgtacctaggtacaataagtctgcctatagtgggagaggtgacagagccgattcatcaacatggcctgaagttgaaggacctctatcggttattctctttgagggatggatgcttggttttaagcctcttccagctgacgttgttaaagcagttgacccacagctggaggttgtgaataagaaccttgaagcgtattacgacgcatgggacaagtacatcgatgcttgggtcgtcatcaaaatccaggacccaagttatgtataccggtggcgtcttcaggcggaaatcgccatgaggcaggatggccaagctgggatgtcggatgaggaggtgaatgactttgtgtcgcggtatttgccggcgtataaggcctatcttccaactctttacgcggaagggccaagcggctcagacccagaccgtgtccttgcgatagatatcgatgaagaaaggaacccgatactcgcaaactaatgcgatgctgtctccattgcctttatagtatatcatcattgtatgtaaaggagagtaacattacgttcttcttccttctatttgacattctttttcctacactatactttcacatatatacatattcttttctt

SEQ ID NO: 40946 - protein, 362 aa, Arabidopsis thaliana
  peptide (1)..(362): Ceres Seq. ID no. 12327891
  misc_feature (206)..(349): Pfam Name: Phosphoribulokinase / Uridine kinase family Pfam Description: Phosphoribulokinase / Uridine kinase family
  misc_feature (259)..(359): Homolog of NCBI NO: 34911206 NR Description: P0019E03.19 [Oryza sativa (japonica
  misc_feature (59)..(207): Homolog of NCBI NO: 34911206 NR Description: P0019E03.19 [Oryza sativa (japonica
  misc_feature (93)..(207): Homolog of NCBI NO: 25406658 NR Description: unknown protein F5I6.13 [imported] - Arabidopsis
  misc_feature (206)..(362): Homolog of NCBI NO: 25406658 NR Description: unknown protein F5I6.13 [imported] - Arabidopsis
  misc_feature (206)..(362): Homolog of NCBI NO: 30699506 NR Description: auxin-regulated protein [Arabidopsis thaliana]
  misc_feature (1)..(207): Homolog of NCBI NO: 30699506 NR Description: auxin-regulated protein [Arabidopsis thaliana]
  misc_feature (206)..(362): Homolog of NCBI NO: 16226442 NR Description: At1g80380/F5I6_13 [Arabidopsis thaliana]
  misc_feature (1)..(207): Homolog of NCBI NO: 16226442 NR Description: At1g80380/F5I6_13 [Arabidopsis thaliana]
  misc_feature (1)..(362): Homolog of NCBI NO: 18412831 NR Description: auxin-regulated protein
  misc_feature (1)..(362): Homolog of NCBI NO: 21537005 NR Description: unknown [Arabidopsis thaliana]
MAVAISGSSLISSTLQHYNNRIYIRDYPIPCHSSNPICNSFNFKRRSFSPSSPKFNDHVVNPSSSYLSSKLSPIRTHSSFAACGCSWIQDNSMVHDYATTTNGTSKRCSALPTTNTVDVSSVSDLFEFICSGPLVNKIGITPQRVGQSIDKWLLYGSQLCRLFQLNELKLTIPQKARLYHYYIPVFICCEDQIALHNSKFKDGDDVPRYNKSAYSGRGDRADSSTWPEVEGPLSVILFEGWMLGFKPLPADVVKAVDPQLEVVNKNLEAYYDAWDKYIDAWVVIKIQDPSYVYRWRLQAEIAMRQDGQAGMSDEEVNDFVSRYLPAYKAYLPTLYAEGPSGSDPDRVLAIDIDEERNPILAN

SEQ ID NO: 40947 - protein, 270 aa, Arabidopsis thaliana
  peptide (1)..(270): Ceres Seq. ID no. 12327892
  misc_feature (114)..(257): Pfam Name: Phosphoribulokinase / Uridine kinase family Pfam Description: Phosphoribulokinase / Uridine kinase family
  misc_feature (167)..(267): Homolog of NCBI NO: 34911206 NR Description: P0019E03.19 [Oryza sativa (japonica
  misc_feature (1)..(115): Homolog of NCBI NO: 34911206 NR Description: P0019E03.19 [Oryza sativa (japonica
  misc_feature (1)..(115): Homolog of NCBI NO: 25406658 NR Description: unknown protein F5I6.13 [imported] - Arabidopsis
  misc_feature (114)..(270): Homolog of NCBI NO: 25406658 NR Description: unknown protein F5I6.13 [imported] - Arabidopsis
  misc_feature (114)..(270): Homolog of NCBI NO: 30699506 NR Description: auxin-regulated protein [Arabidopsis thaliana]
  misc_feature (1)..(115): Homolog of NCBI NO: 30699506 NR Description: auxin-regulated protein [Arabidopsis thaliana]
  misc_feature (114)..(270): Homolog of NCBI NO: 16226442 NR Description: At1g80380/F5I6_13 [Arabidopsis thaliana]
  misc_feature (1)..(115): Homolog of NCBI NO: 16226442 NR Description: At1g80380/F5I6_13 [Arabidopsis thaliana]
  misc_feature (1)..(270): Homolog of NCBI NO: 18412831 NR Description: auxin-regulated protein
  misc_feature (1)..(270): Homolog of NCBI NO: 21537005 NR Description: unknown [Arabidopsis thaliana]
MVHDYATTTNGTSKRCSALPTTNTVDVSSVSDLFEFICSGPLVNKIGITPQRVGQSIDKWLLYGSQLCRLFQLNELKLTIPQKARLYHYYIPVFICCEDQIALHNSKFKDGDDVPRYNKSAYSGRGDRADSSTWPEVEGPLSVILFEGWMLGFKPLPADVVKAVDPQLEVVNKNLEAYYDAWDKYIDAWVVIKIQDPSYVYRWRLQAEIAMRQDGQAGMSDEEVNDFVSRYLPAYKAYLPTLYAEGPSGSDPDRVLAIDIDEERNPILAN

SEQ ID NO: 40948 - DNA, 1782 bp, Arabidopsis thaliana
  misc_feature (1)..(1782): Ceres Seq. ID no. 13575086
  misc_feature: MA Experiment ID: 20000182 Result: Down-regulated in Transcription
  misc_feature: MA Experiment 20000182 PARAMETER Experiment Name: At_2mM_SA_P Parameter: Age (day) Value: 14
  misc_feature: MA Experiment 20000182 PARAMETER Experiment Name: At_2mM_SA_P Parameter: Organism Value: A. thaliana
  misc_feature: MA Experiment 20000182 PARAMETER Experiment Name: At_2mM_SA_P Parameter: Plant Line Value: WS
  misc_feature: MA Experiment 20000182 PARAMETER Experiment Name: At_2mM_SA_P Parameter: Timepoint (hr) Value: 6
  misc_feature: MA Experiment 20000182 PARAMETER Experiment Name: At_2mM_SA_P Parameter: Tissue Value: Aerial
  misc_feature: MA Experiment 20000182 PARAMETER Experiment Name: At_2mM_SA_P Parameter: Treatment Value: 2mM SA vs. No Treatment
  misc_feature: MA Experiment ID: 20000185 Result: Down-regulated in Transcription
  misc_feature: MA Experiment 20000185 PARAMETER Experiment Name: At_Roots__P Parameter: Age (day) Value: 7 vs. 21
  misc_feature: MA Experiment 20000185 PARAMETER Experiment Name: At_Roots__P Parameter: Organism Value: A. thaliana
  misc_feature: MA Experiment 20000185 PARAMETER Experiment Name: At_Roots__P Parameter: Tissue Value: Roots vs. Whole Plant
  misc_feature: MA Experiment ID: 20000437 Result: Down-regulated in Transcription
  misc_feature: MA Experiment 20000437 PARAMETER Experiment Name: At_Drought_P Parameter: Age (day) Value: 8
  misc_feature: MA Experiment 20000437 PARAMETER Experiment Name: At_Drought_P Parameter: Organism Value: A. thaliana
  misc_feature: MA Experiment 20000437 PARAMETER Experiment Name: At_Drought_P Parameter: Plant Line Value: WS
  misc_feature: MA Experiment 20000437 PARAMETER Experiment Name: At_Drought_P Parameter: Timepoint (hr) Value: 24
  misc_feature: MA Experiment 20000437 PARAMETER Experiment Name: At_Drought_P Parameter: Tissue Value: Whole Plant
  misc_feature: MA Experiment 20000437 PARAMETER Experiment Name: At_Drought_P Parameter: Treatment Value: Drought vs. No Drought
  misc_feature: MA Experiment ID: 20000439 Result: Down-regulated in Transcription
  misc_feature: MA Experiment 20000439 PARAMETER Experiment Name: At_Roots__P Parameter: Age (day) Value: 14 vs. 21
  misc_feature: MA Experiment 20000439 PARAMETER Experiment Name: At_Roots__P Parameter: Organism Value: A. thaliana
  misc_feature: MA Experiment 20000439 PARAMETER Experiment Name: At_Roots__P Parameter: Tissue Value: Roots vs. Whole Plant
  misc_feature: MA Experiment ID: 20001757 Result: Up-regulated in Transcription
  misc_feature: MA Experiment 20001757 PARAMETER Experiment Name: At_50mM_NH4NO3_L-to-H_P Parameter: Timepoint (hr) Value: 6
  misc_feature: MA Experiment 20001757 PARAMETER Experiment Name: At_50mM_NH4NO3_L-to-H_P Parameter: Tissue Value: Leaf
  misc_feature: MA Experiment 20001757 PARAMETER Experiment Name: At_50mM_NH4NO3_L-to-H_P Parameter: Treatment Value: 50mM NH4NO3 vs 100mM Mannitol
  misc_feature: MA Experiment ID: 20001905 Result: Down-regulated in Transcription
  misc_feature: MA Experiment 20001905 PARAMETER Experiment Name: At_Drought_Reproduction_P Parameter: Age (day) Value: 40
  misc_feature: MA Experiment 20001905 PARAMETER Experiment Name: At_Drought_Reproduction_P Parameter: Organism Value: A. thaliana
  misc_feature: MA Experiment 20001905 PARAMETER Experiment Name: At_Drought_Reproduction_P Parameter: Plant Line Value: WS
  misc_feature: MA Experiment 20001905 PARAMETER Experiment Name: At_Drought_Reproduction_P Parameter: Timepoint (day) Value: 10
  misc_feature: MA Experiment 20001905 PARAMETER Experiment Name: At_Drought_Reproduction_P Parameter: Tissue Value: Rosettes
  misc_feature: MA Experiment 20001905 PARAMETER Experiment Name: At_Drought_Reproduction_P Parameter: Treatment Value: Drought vs. No Drought
atccgaaacctaacgagtaacgacgagagatgcttcttcaggcggcggtgcagaaccgcaatgttccactggcttcttccgcctcctactctcgtctccttcgctgcagatctcctgtcgtctccgtagctgctctctcgaagaagacggcagcaatcgtgtgctccatctcccaggtttatggctacggcacggtggactacgagagaaggccgattgtccagtggaatgccatctacaagaagatttcgctgatggagaagccagagcttggcgctgcttccgtcttgaatcagtgggagaaagccggccgcaagcttaccaagtgggagctctgtcgggtcgtcaaggagcttcgcaagtacaagcgtgccaaccaagctctcgaggtgtacgactggatgaacaacagaggcgaaaggtttcggttgtctgcaagtgatgctgcaatccagctcgacttaatcggcaaagtgcgtggcattccagacgccgaagagttcttcctccagctccctgagaattttaaggaccggagagtttatggttccctcctcaatgcctatgtgagggccaagtcgagagaaaaggctgaagccctgctcaacaccatgagggacaaaggttacgccctgcacccgcttcccttcaacgtcatgatgactctctacatgaacctcagggagtatgacaaagtcgacgctatggtcttcgagatgaagcagaaagatatacgtctcgacatttactcctacaacatctggctctcctcttgcggctccttaggatcagttgagaaaatggaactagtgtatcagcagatgaaatcggatgtttccatttatcccaactggaccacgtttagcacaatggccacaatgtacataaagatgggtgaaactgagaaagccgaagatgcactgaggaaggttgaagcaaggattactggtcgtaatcgcattccgtatcactacctcttgagtttgtatggcagccttggtaacaagaaagagctgtaccgagtctggcacgtctacaaatctgttgtcccgagcattcccaatttgggttaccatgccttggtctcgtcgctggtgaggatgggagacattgaaggggccgagaaggtatatgaggaatggcttccagtcaagtcttcttatgaccccaggataccaaatcttctgatgaatgcgtatgtcaaaaacgaccaactagagacagctgaggggttgttcgaccacatggttgaaatgggaggaaaaccaagttcaagtacgtgggagattctagctgttggtcataccagaaagaggtgtatttcagaggctttgacttgtcttagaaatgctttttcggctgaagggtccagcaattggaggcccaaggtgttgatgctgtctggtttcttcaagctctgtgaagaggaatcggatgttaccagtaaagaggccgttttggaattgttaaggcagtcgggggatcttgaagacaaatcttacctagctcttattgatgtggacgaaaacagaacagtaaacaacagtgaaatcgatgcccatgagaccgatgcgcttctaacacagctacaagatgatttgtaatctgatagtcctagatctttgctttaaaaaacgaatcttgtaaccggagtcaactgaggaaatgcgaaatatgtataatgtacacaagagactgcctagtgaaacatgaatgtaagagctgtgtccctttttgtgacagctatttggaattagtgttgcttagggaactggattagcc

SEQ ID NO: 40949 - protein, 524 aa, Arabidopsis thaliana
  peptide (1)..(524): Ceres Seq. ID no. 13575087
  misc_feature (240)..(274): Pfam Name: PPR repeat Pfam Description: PPR repeat
  misc_feature (62)..(486): Homolog of NCBI NO: 15225409 NR Description: pentatricopeptide (PPR) repeat-containing protein
  misc_feature (87)..(481): Homolog of NCBI NO: 34393591 NR Description: putative DNA-binding protein
  misc_feature (69)..(495): Homolog of NCBI NO: 17529324 NR Description: unknown protein [Arabidopsis thaliana]
  misc_feature (23)..(500): Homolog of NCBI NO: 15240937 NR Description: pentatricopeptide (PPR) repeat-containing protein
  misc_feature (69)..(495): Homolog of NCBI NO: 15217734 NR Description: pentatricopeptide (PPR) repeat-containing protein
  misc_feature (69)..(485): Homolog of NCBI NO: 15219808 NR Description: pentatricopeptide (PPR) repeat-containing protein
  misc_feature (83)..(517): Homolog of NCBI NO: 15235508 NR Description: pentatricopeptide (PPR) repeat-containing protein
  misc_feature (83)..(517): Homolog of NCBI NO: 17064738 NR Description: Unknown protein [Arabidopsis thaliana]
  misc_feature (1)..(524): Homolog of NCBI NO: 20453085 NR Description: At1g02150/T7I23.8 [Arabidopsis thaliana]
  misc_feature (1)..(524): Homolog of NCBI NO: 22329290 NR Description: pentatricopeptide (PPR) repeat-containing protein
MLLQAAVQNRNVPLASSASYSRLLRCRSPVVSVAALSKKTAAIVCSISQVYGYGTVDYERRPIVQWNAIYKKISLMEKPELGAASVLNQWEKAGRKLTKWELCRVVKELRKYKRANQALEVYDWMNNRGERFRLSASDAAIQLDLIGKVRGIPDAEEFFLQLPENFKDRRVYGSLLNAYVRAKSREKAEALLNTMRDKGYALHPLPFNVMMTLYMNLREYDKVDAMVFEMKQKDIRLDIYSYNIWLSSCGSLGSVEKMELVYQQMKSDVSIYPNWTTFSTMATMYIKMGETEKAEDALRKVEARITGRNRIPYHYLLSLYGSLGNKKELYRVWHVYKSVVPSIPNLGYHALVSSLVRMGDIEGAEKVYEEWLPVKSSYDPRIPNLLMNAYVKNDQLETAEGLFDHMVEMGGKPSSSTWEILAVGHTRKRCISEALTCLRNAFSAEGSSNWRPKVLMLSGFFKLCEEESDVTSKEAVLELLRQSGDLEDKSYLALIDVDENRTVNNSEIDAHETDALLTQLQDDL

SEQ ID NO: 40950 - protein, 449 aa, Arabidopsis thaliana
  peptide (1)..(449): Ceres Seq. ID no. 13575088
  misc_feature (165)..(199): Pfam Name: PPR repeat Pfam Description: PPR repeat
  misc_feature (1)..(411): Homolog of NCBI NO: 15225409 NR Description: pentatricopeptide (PPR) repeat-containing protein
  misc_feature (12)..(406): Homolog of NCBI NO: 34393591 NR Description: putative DNA-binding protein
  misc_feature (1)..(420): Homolog of NCBI NO: 17529324 NR Description: unknown protein [Arabidopsis thaliana]
  misc_feature (1)..(425): Homolog of NCBI NO: 15240937 NR Description: pentatricopeptide (PPR) repeat-containing protein
  misc_feature (1)..(420): Homolog of NCBI NO: 15217734 NR Description: pentatricopeptide (PPR) repeat-containing protein
  misc_feature (1)..(410): Homolog of NCBI NO: 15219808 NR Description: pentatricopeptide (PPR) repeat-containing protein
  misc_feature (8)..(442): Homolog of NCBI NO: 15235508 NR Description: pentatricopeptide (PPR) repeat-containing protein
  misc_feature (8)..(442): Homolog of NCBI NO: 17064738 NR Description: Unknown protein [Arabidopsis thaliana]
  misc_feature (1)..(449): Homolog of NCBI NO: 20453085 NR Description: At1g02150/T7I23.8 [Arabidopsis thaliana]
  misc_feature (1)..(449): Homolog of NCBI NO: 22329290 NR Description: pentatricopeptide (PPR) repeat-containing protein
MEKPELGAASVLNQWEKAGRKLTKWELCRVVKELRKYKRANQALEVYDWMNNRGERFRLSASDAAIQLDLIGKVRGIPDAEEFFLQLPENFKDRRVYGSLLNAYVRAKSREKAEALLNTMRDKGYALHPLPFNVMMTLYMNLREYDKVDAMVFEMKQKDIRLDIYSYNIWLSSCGSLGSVEKMELVYQQMKSDVSIYPNWTTFSTMATMYIKMGETEKAEDALRKVEARITGRNRIPYHYLLSLYGSLGNKKELYRVWHVYKSVVPSIPNLGYHALVSSLVRMGDIEGAEKVYEEWLPVKSSYDPRIPNLLMNAYVKNDQLETAEGLFDHMVEMGGKPSSSTWEILAVGHTRKRCISEALTCLRNAFSAEGSSNWRPKVLMLSGFFKLCEEESDVTSKEAVLELLRQSGDLEDKSYLALIDVDENRTVNNSEIDAHETDALLTQLQDDL

SEQ ID NO: 40951 - protein, 400 aa, Arabidopsis thaliana
  peptide (1)..(400): Ceres Seq. ID no. 13575089
  misc_feature (116)..(150): Pfam Name: PPR repeat Pfam Description: PPR repeat
  misc_feature (1)..(362): Homolog of NCBI NO: 15225409 NR Description: pentatricopeptide (PPR) repeat-containing protein
  misc_feature (1)..(357): Homolog of NCBI NO: 34393591 NR Description: putative DNA-binding protein
  misc_feature (1)..(371): Homolog of NCBI NO: 17529324 NR Description: unknown protein [Arabidopsis thaliana]
  misc_feature (1)..(376): Homolog of NCBI NO: 15240937 NR Description: pentatricopeptide (PPR) repeat-containing protein
  misc_feature (1)..(371): Homolog of NCBI NO: 15217734 NR Description: pentatricopeptide (PPR) repeat-containing protein
  misc_feature (1)..(361): Homolog of NCBI NO: 15219808 NR Description: pentatricopeptide (PPR) repeat-containing protein
  misc_feature (1)..(393): Homolog of NCBI NO: 15235508 NR Description: pentatricopeptide (PPR) repeat-containing protein
  misc_feature (1)..(393): Homolog of NCBI NO: 17064738 NR Description: Unknown protein [Arabidopsis thaliana]
  misc_feature (1)..(400): Homolog of NCBI NO: 20453085 NR Description: At1g02150/T7I23.8 [Arabidopsis thaliana]
  misc_feature (1)..(400): Homolog of NCBI NO: 22329290 NR Description: pentatricopeptide (PPR) repeat-containing protein
MNNRGERFRLSASDAAIQLDLIGKVRGIPDAEEFFLQLPENFKDRRVYGSLLNAYVRAKSREKAEALLNTMRDKGYALHPLPFNVMMTLYMNLREYDKVDAMVFEMKQKDIRLDIYSYNIWLSSCGSLGSVEKMELVYQQMKSDVSIYPNWTTFSTMATMYIKMGETEKAEDALRKVEARITGRNRIPYHYLLSLYGSLGNKKELYRVWHVYKSVVPSIPNLGYHALVSSLVRMGDIEGAEKVYEEWLPVKSSYDPRIPNLLMNAYVKNDQLETAEGLFDHMVEMGGKPSSSTWEILAVGHTRKRCISEALTCLRNAFSAEGSSNWRPKVLMLSGFFKLCEEESDVTSKEAVLELLRQSGDLEDKSYLALIDVDENRTVNNSEIDAHETDALLTQLQDDL

SEQ ID NO: 40952 - DNA, 1414 bp, Arabidopsis thaliana
  misc_feature (1)..(1414): Ceres Seq. ID no. 12395575
  misc_feature: MA Experiment ID: 108461 Result: Down-regulated in Transcription
  misc_feature: MA Experiment 108461 PARAMETER Experiment Name: At_Germinating_Seeds_cDNA_P Parameter: Age (day) Value: 1 vs. 0
  misc_feature: MA Experiment 108461 PARAMETER Experiment Name: At_Germinating_Seeds_cDNA_P Parameter: Tissue Value: Germinating Seeds
  misc_feature: MA Experiment ID: 108572 Result: Up-regulated in Transcription
  misc_feature: MA Experiment 108572 PARAMETER Experiment Name: At_Drought_cDNA_P Parameter: Timepoint (hr) Value: 1
  misc_feature: MA Experiment 108572 PARAMETER Experiment Name: At_Drought_cDNA_P Parameter: Tissue Value: Aerial
  misc_feature: MA Experiment 108572 PARAMETER Experiment Name: At_Drought_cDNA_P Parameter: Treatment Value: Drought vs. No Drought
  misc_feature: MA Experiment ID: 108573 Result: Up-regulated in Transcription
  misc_feature: MA Experiment 108573 PARAMETER Experiment Name: At_Drought_cDNA_P Parameter: Timepoint (hr) Value: 6
  misc_feature: MA Experiment 108573 PARAMETER Experiment Name: At_Drought_cDNA_P Parameter: Tissue Value: Aerial
  misc_feature: MA Experiment 108573 PARAMETER Experiment Name: At_Drought_cDNA_P Parameter: Treatment Value: Drought vs. No Drought
  misc_feature: MA Experiment ID: 108585 Result: Down-regulated in Transcription
  misc_feature: MA Experiment 108585 PARAMETER Experiment Name: At_5mM_NaNP_cDNA_P Parameter: Timepoint (hr) Value: 6
  misc_feature: MA Experiment 108585 PARAMETER Experiment Name: At_5mM_NaNP_cDNA_P Parameter: Tissue Value: Aerial
  misc_feature: MA Experiment 108585 PARAMETER Experiment Name: At_5mM_NaNP_cDNA_P Parameter: Treatment Value: null
  misc_feature: MA Experiment ID: 108595 Result: Down-regulated in Transcription
  misc_feature: MA Experiment 108595 PARAMETER Experiment Name: At_Ler-pi_Ovule_cDNA_P Parameter: Plant Line Value: null
  misc_feature: MA Experiment ID: 108668 Result: Down-regulated in Transcription
  misc_feature: MA Experiment 108668 PARAMETER Experiment Name: At_2mM_SA_cDNA_P Parameter: Plant Line Value: WS
  misc_feature: MA Experiment 108668 PARAMETER Experiment Name: At_2mM_SA_cDNA_P Parameter: Timepoint (hr) Value: 6
  misc_feature: MA Experiment 108668 PARAMETER Experiment Name: At_2mM_SA_cDNA_P Parameter: Treatment Value: 2mM SA vs. No Treatment
  misc_feature: MA Experiment ID: 20000227 Result: Down-regulated in Transcription
  misc_feature: MA Experiment 20000227 PARAMETER Experiment Name: At_Root-Tips-vs-Tops_P Parameter: Tissue Value: Root Tips vs. Root Tops
  misc_feature: MA Experiment ID: 20000234 Result: Down-regulated in Transcription
  misc_feature: MA Experiment 20000234 PARAMETER Experiment Name: At_Siliques_P Parameter: Age (day) Value: 21
  misc_feature: MA Experiment 20000234 PARAMETER Experiment Name: At_Siliques_P Parameter: Organism Value: A. thaliana
  misc_feature: MA Experiment 20000234 PARAMETER Experiment Name: At_Siliques_P Parameter: Plant Line Value: WS
  misc_feature: MA Experiment 20000234 PARAMETER Experiment Name: At_Siliques_P Parameter: Tissue Value: Less Than 5mm Siliques vs. Whole Plant
  misc_feature: MA Experiment ID: 20000264 Result: Down-regulated in Transcription
  misc_feature: MA Experiment 20000264 PARAMETER Experiment Name: At_Open_Flower_P Parameter: Age (day) Value: 21
  misc_feature: MA Experiment 20000264 PARAMETER Experiment Name: At_Open_Flower_P Parameter: Plant Line Value: WS
  misc_feature: MA Experiment 20000264 PARAMETER Experiment Name: At_Open_Flower_P Parameter: Tissue Value: Open Flower vs. Whole Plant
  misc_feature: MA Experiment ID: 20000286 Result: Down-regulated in Transcription
  misc_feature: MA Experiment 20000286 PARAMETER Experiment Name: At_Open_Flower_P Parameter: Age (day) Value: 21
  misc_feature: MA Experiment 20000286 PARAMETER Experiment Name: At_Open_Flower_P Parameter: Plant Line Value: WS
  misc_feature: MA Experiment 20000286 PARAMETER Experiment Name: At_Open_Flower_P Parameter: Tissue Value: Half Open vs. Whole Plant
  misc_feature: MA Experiment ID: 20000495 Result: Down-regulated in Transcription
  misc_feature: MA Experiment 20000495 PARAMETER Experiment Name: At_Guard_Cells_P Parameter: Harvest Date Value: 8/2/2002
  misc_feature: MA Experiment 20000495 PARAMETER Experiment Name: At_Guard_Cells_P Parameter: Organism Value: A. thaliana
  misc_feature: MA Experiment 20000495 PARAMETER Experiment Name: At_Guard_Cells_P Parameter: Tissue Value: Guard Cells vs. Leaves
  misc_feature: MA Experiment ID: 20001557 Result: Down-regulated in Transcription
  misc_feature: MA Experiment 20001557 PARAMETER Experiment Name: At_Drought_Soil_Dry_P Parameter: Age (day) Value: 27
  misc_feature: MA Experiment 20001557 PARAMETER Experiment Name: At_Drought_Soil_Dry_P Parameter: Organism Value: A. thaliana
  misc_feature: MA Experiment 20001557 PARAMETER Experiment Name: At_Drought_Soil_Dry_P Parameter: Plant Line Value: WS
  misc_feature: MA Experiment 20001557 PARAMETER Experiment Name: At_Drought_Soil_Dry_P Parameter: Post Timepoint (hr) Value: 3
  misc_feature: MA Experiment 20001557 PARAMETER Experiment Name: At_Drought_Soil_Dry_P Parameter: Post-Treatment Value: Re-Water vs. No Drought
  misc_feature: MA Experiment 20001557 PARAMETER Experiment Name: At_Drought_Soil_Dry_P Parameter: Timepoint (day) Value: 13
  misc_feature: MA Experiment 20001557 PARAMETER Experiment Name: At_Drought_Soil_Dry_P Parameter: Treatment Value: Drought vs. No Drought
  misc_feature: MA Experiment ID: 20001558 Result: Down-regulated in Transcription
  misc_feature: MA Experiment 20001558 PARAMETER Experiment Name: At_Drought_Soil_Dry_P Parameter: Age (day) Value: 27
  misc_feature: MA Experiment 20001558 PARAMETER Experiment Name: At_Drought_Soil_Dry_P Parameter: Organism Value: A. thaliana
  misc_feature: MA Experiment 20001558 PARAMETER Experiment Name: At_Drought_Soil_Dry_P Parameter: Plant Line Value: WS
  misc_feature: MA Experiment 20001558 PARAMETER Experiment Name: At_Drought_Soil_Dry_P Parameter: Post Timepoint (hr) Value: 6
  misc_feature: MA Experiment 20001558 PARAMETER Experiment Name: At_Drought_Soil_Dry_P Parameter: Post-Treatment Value: Re-Water vs. No Drought
  misc_feature: MA Experiment 20001558 PARAMETER Experiment Name: At_Drought_Soil_Dry_P Parameter: Timepoint (day) Value: 13
  misc_feature: MA Experiment 20001558 PARAMETER Experiment Name: At_Drought_Soil_Dry_P Parameter: Treatment Value: Drought vs. No Drought
  misc_feature: MA Experiment ID: 20001560 Result: Down-regulated in Transcription
  misc_feature: MA Experiment 20001560 PARAMETER Experiment Name: At_Drought_Soil_Dry_P Parameter: Age (day) Value: 28
  misc_feature: MA Experiment 20001560 PARAMETER Experiment Name: At_Drought_Soil_Dry_P Parameter: Organism Value: A. thaliana
  misc_feature: MA Experiment 20001560 PARAMETER Experiment Name: At_Drought_Soil_Dry_P Parameter: Plant Line Value: WS
  misc_feature: MA Experiment 20001560 PARAMETER Experiment Name: At_Drought_Soil_Dry_P Parameter: Post Timepoint (hr) Value: None
  misc_feature: MA Experiment 20001560 PARAMETER Experiment Name: At_Drought_Soil_Dry_P Parameter: Post-Treatment Value: None
  misc_feature: MA Experiment 20001560 PARAMETER Experiment Name: At_Drought_Soil_Dry_P Parameter: Timepoint (day) Value: 14
  misc_feature: MA Experiment 20001560 PARAMETER Experiment Name: At_Drought_Soil_Dry_P Parameter: Treatment Value: Drought vs. No Drought
  misc_feature: MA Experiment ID: 20001905 Result: Down-regulated in Transcription
  misc_feature: MA Experiment 20001905 PARAMETER Experiment Name: At_Drought_Reproduction_P Parameter: Age (day) Value: 40
  misc_feature: MA Experiment 20001905 PARAMETER Experiment Name: At_Drought_Reproduction_P Parameter: Organism Value: A. thaliana
  misc_feature: MA Experiment 20001905 PARAMETER Experiment Name: At_Drought_Reproduction_P Parameter: Plant Line Value: WS
  misc_feature: MA Experiment 20001905 PARAMETER Experiment Name: At_Drought_Reproduction_P Parameter: Timepoint (day) Value: 10
  misc_feature: MA Experiment 20001905 PARAMETER Experiment Name: At_Drought_Reproduction_P Parameter: Tissue Value: Rosettes
  misc_feature: MA Experiment 20001905 PARAMETER Experiment Name: At_Drought_Reproduction_P Parameter: Treatment Value: Drought vs. No Drought
aatccgctaaatcattcttcttcatctctctctcattcacaattcccgaaactctctcaaatcacagatccttttagggtttttccactgtttctaggttttttttattgctcaaatctgatcaatggatagttgtctctctaatcaaacggcgcttcagtttctcccgtcgcgttccaggagacagagcggcgatggaggcggtggttttgttattccggcgaagaggaagatccagtatagttcgatggttgtggttgcggcggcgggacagagtcggtgtgagcctggaagcagtctaaacgcgccgcttgagccacgatcggcgcaggggaggtttctgagaagcgtgttgctaaacaaacggcagctatttcattacgccgccgctgatgagctaaagcaactggctgatgatagggaagctgctttagctcgtatgtctctcagctctggttccgatgaggcttctctccacagaaggatagctgaactcaaggaacgctactgtaaaactgcagtccaagacataatgtacatgttaatcttttacaaatactccgagataagagtccctcttgttccaaagctatccagatgcatctataatggaagactcgagatctggccttcaaaagactgggagttagagtcaatttacagctgcgatacccttgagatcatcaaagaacacgttagcgcagtcatcggattacgggtcaactcatgtgtgactgacaattgggcaacaacgcagatacagaaactgcatctcaggaaagtatatgctgcctcgatcttgtacggttacttcttgaaatcagcttccctaaggcaccagcttgagtgttccttatcagatattcatggaagcggatatctgaaaagtcccatctttggatgctcattcacaacgggcactgcacagatctccaacaagcagcagctgagacattacatctcagactttgatcccgagacattgcagagatgcgcaaaaccaaggacagaggaggcaaggaatctgatagagaagcaaagtttggctctttttggcacggaagagagtgatgagaccatagtgacatcgttttcgagtctgaagcggttggttctcgaggctgtggcgtttgggacattcctgtgggacacggaattgtatgtagatggtgcatataagctgaaggagaatgggaatgcagaagaacaagaaggaaagaaaagcatatgatgaacaagtctggttagaagaaaagcttcatgatcttctggtagtgtatatatagagaaatgtttctgccgaatctctcaggcagttgttcagttcaatgtatagatcttgcttagaaatattttgatttctgaataagaatgtggtgtggttataaggaataagagatactgtagttgggtt

SEQ ID NO: 40953 - protein, 368 aa, Arabidopsis thaliana; identical to SEQ ID NO: 23835
  peptide (1)..(368): Ceres Seq. ID no. 12395576
  misc_feature (11)..(356): Pfam Name: Protein of unknown function (DUF760) Pfam Description: Protein of unknown function (DUF760)
  misc_feature (133)..(249): Homolog of NCBI NO: 13561930 NR Description: unknown [Brassica napus]
  misc_feature (270)..(351): Homolog of NCBI NO: 18398302 NR Description: expressed protein
  misc_feature (43)..(247): Homolog of NCBI NO: 18398302 NR Description: expressed protein
  misc_feature (261)..(356): Homolog of NCBI NO: 28301943 NR Description: unknown protein [Oryza sativa (japonica
  misc_feature (55)..(247): Homolog of NCBI NO: 28301943 NR Description: unknown protein [Oryza sativa (japonica
  misc_feature (259)..(351): Homolog of NCBI NO: 15221185 NR Description: unknown protein
  misc_feature (36)..(249): Homolog of NCBI NO: 15221185 NR Description: unknown protein
  misc_feature (273)..(362): Homolog of NCBI NO: 15239021 NR Description: putative protein
  misc_feature (1)..(250): Homolog of NCBI NO: 15239021 NR Description: putative protein
  misc_feature (1)..(368): Homolog of NCBI NO: 18397912 NR Description: expressed protein

SEQ ID NO: 40954 - protein, 327 aa, Arabidopsis thaliana; identical to SEQ ID NO: 23836
  peptide (1)..(327): Ceres Seq. ID no. 12395577
  misc_feature (1)..(315): Pfam Name: Protein of unknown function (DUF760) Pfam Description: Protein of unknown function (DUF760)
  misc_feature (92)..(208): Homolog of NCBI NO: 13561930 NR Description: unknown [Brassica napus]
  misc_feature (229)..(310): Homolog of NCBI NO: 18398302 NR Description: expressed protein
  misc_feature (2)..(206): Homolog of NCBI NO: 18398302 NR Description: expressed protein
  misc_feature (220)..(315): Homolog of NCBI NO: 28301943 NR Description: unknown protein [Oryza sativa (japonica
  misc_feature (14)..(206): Homolog of NCBI NO: 28301943 NR Description: unknown protein [Oryza sativa (japonica
  misc_feature (218)..(310): Homolog of NCBI NO: 15221185 NR Description: unknown protein
  misc_feature (1)..(208): Homolog of NCBI NO: 15221185 NR Description: unknown protein
  misc_feature (232)..(321): Homolog of NCBI NO: 15239021 NR Description: putative protein
  misc_feature (1)..(209): Homolog of NCBI NO: 15239021 NR Description: putative protein
  misc_feature (1)..(327): Homolog of NCBI NO: 18397912 NR Description: expressed protein

SEQ ID NO: 40955 - protein, 263 aa, Arabidopsis thaliana; identical to SEQ ID NO: 23837
  peptide (1)..(263): Ceres Seq. ID no. 12395578
  misc_feature (1)..(251): Pfam Name: Protein of unknown function (DUF760) Pfam Description: Protein of unknown function (DUF760)
  misc_feature (28)..(144): Homolog of NCBI NO: 13561930 NR Description: unknown [Brassica napus]
  misc_feature (165)..(246): Homolog of NCBI NO: 18398302 NR Description: expressed protein
  misc_feature (1)..(142): Homolog of NCBI NO: 18398302 NR Description: expressed protein
  misc_feature (156)..(251): Homolog of NCBI NO: 28301943 NR Description: unknown protein [Oryza sativa (japonica
  misc_feature (1)..(142): Homolog of NCBI NO: 28301943 NR Description: unknown protein [Oryza sativa (japonica
  misc_feature (154)..(246): Homolog of NCBI NO: 15221185 NR Description: unknown protein
  misc_feature (1)..(144): Homolog of NCBI NO: 15221185 NR Description: unknown protein
  misc_feature (168)..(257): Homolog of NCBI NO: 15239021 NR Description: putative protein
  misc_feature (1)..(145): Homolog of NCBI NO: 15239021 NR Description: putative protein
  misc_feature (1)..(263): Homolog of NCBI NO: 18397912 NR Description: expressed protein

SEQ ID NO: 40956 - DNA, 1140 bp, Arabidopsis thaliana
  misc_feature (1)..(1140): Ceres Seq. ID no. 12481838
  misc_feature: MA Experiment ID: 108579 Result: Down-regulated in Transcription
  misc_feature: MA Experiment 108579 PARAMETER Experiment Name: At_4deg_Cold_cDNA_P Parameter: Temperature (deg C) Value: 4 vs. 22
  misc_feature: MA Experiment 108579 PARAMETER Experiment Name: At_4deg_Cold_cDNA_P Parameter: Timepoint (hr) Value: 6
  misc_feature: MA Experiment 108579 PARAMETER Experiment Name: At_4deg_Cold_cDNA_P Parameter: Tissue Value: Aerial
aaagaaaaaaattatcagactttcagaagaagaaaaaacgaaggagaagaagaacaatttcgcggattcaagagacagagagcttcttctgcgtaaagtttgatcctttgaaaatgacggaagaaccagagaaggtgtcttcttcagtattacatcaaccttctggtgataagaaacctgaagatgttgggatcaaacctcaggatccagcgtcttcttctgggtttcgagcttatcctaatggtgattctccaatgtacccggttttttatccgggtcttgttcccggatccaatcctgtacagtacgaggaacaaatgaaccgtggagctgggatctatgcggttcctgttcatcaatttggaggacatgtcgctggtcttccctcaaattatcttatccctctcacttacaatgttccaacgactagaccaaataatgaagctgagactgggggagagaatcaagcgcaagctgggcagggtcagcagcagcagctacctgcaaatcaaaggcatgttgtggaaaggagatttcagatcgcgtttcagcttgatttgtttctcatactcaagcttgctgctgttatctttttgttcaaccaagatggatcaagacaaaggcttgctgttcttgtgattttcgctaccataatttacttataccaaactggagctcttgcaccgtttgtgcgatggctctcacaaggtatgcatagagcagcagtaccacctgctcgaccacatagacctgctgttagagctgataatgatcccgcagctgcagttccactaaacgaaaatgctgttctcgagggagaagagaatgaagctgataacggtaaccgagcaagagcaaatgcaaatgaaaatgaaaacgttgacgcaggaaaccaagggaatcaatggtgggggatagtgaaagagattcagatgatagtgttcggcttcataacttcattactccctggttttcacaacatagagtagaagtagactcttttctgcatactttcatcttctgcaactcaaaaaaagtgttgtgttctacttttagtctccttcgatctaatgtgtaagtacagaaaattttacccttcagactccaaaacttaatgtatgtgagccgcaatttttatgc

SEQ ID NO: 40957 - protein, 328 aa, Arabidopsis thaliana
  peptide (1)..(328): Ceres Seq. ID no. 12481839
  misc_feature (80)..(326): Homolog of NCBI NO: 38346554 NR Description: OSJNBa0035M09.15 [Oryza sativa (japonica
  misc_feature (38)..(328): Homolog of NCBI NO: 18417501 NR Description: expressed protein
RKKLSDFQKKKKRRRRRTISRIQETESFFCVKFDPLKMTEEPEKVSSSVLHQPSGDKKPEDVGIKPQDPASSSGFRAYPNGDSPMYPVFYPGLVPGSNPVQYEEQMNRGAGIYAVPVHQFGGHVAGLPSNYLIPLTYNVPTTRPNNEAETGGENQAQAGQGQQQQLPANQRHVVERRFQIAFQLDLFLILKLAAVIFLFNQDGSRQRLAVLVIFATIIYLYQTGALAPFVRWLSQGMHRAAVPPARPHRPAVRADNDPAAAVPLNENAVLEGEENEADNGNRARANANENENVDAGNQGNQWWGIVKEIQMIVFGFITSLLPGFHNIE

SEQ ID NO: 40958 - protein, 291 aa, Arabidopsis thaliana
  peptide (1)..(291): Ceres Seq. ID no. 12481840
  misc_feature (43)..(289): Homolog of NCBI NO: 38346554 NR Description: OSJNBa0035M09.15 [Oryza sativa (japonica
  misc_feature (1)..(291): Homolog of NCBI NO: 18417501 NR Description: expressed protein
MTEEPEKVSSSVLHQPSGDKKPEDVGIKPQDPASSSGFRAYPNGDSPMYPVFYPGLVPGSNPVQYEEQMNRGAGIYAVPVHQFGGHVAGLPSNYLIPLTYNVPTTRPNNEAETGGENQAQAGQGQQQQLPANQRHVVERRFQIAFQLDLFLILKLAAVIFLFNQDGSRQRLAVLVIFATIIYLYQTGALAPFVRWLSQGMHRAAVPPARPHRPAVRADNDPAAAVPLNENAVLEGEENEADNGNRARANANENENVDAGNQGNQWWGIVKEIQMIVFGFITSLLPGFHNIE

SEQ ID NO: 40959 - protein, 244 aa, Arabidopsis thaliana
  peptide (1)..(244): Ceres Seq. ID no. 12481841
  misc_feature (1)..(242): Homolog of NCBI NO: 38346554 NR Description: OSJNBa0035M09.15 [Oryza sativa (japonica
  misc_feature (1)..(244): Homolog of NCBI NO: 18417501 NR Description: expressed protein
MYPVFYPGLVPGSNPVQYEEQMNRGAGIYAVPVHQFGGHVAGLPSNYLIPLTYNVPTTRPNNEAETGGENQAQAGQGQQQQLPANQRHVVERRFQIAFQLDLFLILKLAAVIFLFNQDGSRQRLAVLVIFATIIYLYQTGALAPFVRWLSQGMHRAAVPPARPHRPAVRADNDPAAAVPLNENAVLEGEENEADNGNRARANANENENVDAGNQGNQWWGIVKEIQMIVFGFITSLLPGFHNIE

SEQ ID NO: 40960 - DNA, 1239 bp, Arabidopsis thaliana
  misc_feature (1)..(1239): Ceres Seq. ID no. 13592761
  misc_feature: MA Experiment ID: 20000314 Result: Up-regulated in Transcription
  misc_feature: MA Experiment 20000314 PARAMETER Experiment Name: At_14day_Shoots-Roots_Sub_P Parameter: Age (day) Value: 14
  misc_feature: MA Experiment 20000314 PARAMETER Experiment Name: At_14day_Shoots-Roots_Sub_P Parameter: Organism Value: A. thaliana
  misc_feature: MA Experiment 20000314 PARAMETER Experiment Name: At_14day_Shoots-Roots_Sub_P Parameter: Plant Line Value: WS
  misc_feature: MA Experiment 20000314 PARAMETER Experiment Name: At_14day_Shoots-Roots_Sub_P Parameter: Tissue Value: Roots vs. Whole Plant
  misc_feature: MA Experiment ID: 20000347 Result: Up-regulated in Transcription
  misc_feature: MA Experiment 20000347 PARAMETER Experiment Name: At_2mM_SA_Sub_P Parameter: Age (day) Value: 14
  misc_feature: MA Experiment 20000347 PARAMETER Experiment Name: At_2mM_SA_Sub_P Parameter: Organism Value: A. thaliana
  misc_feature: MA Experiment 20000347 PARAMETER Experiment Name: At_2mM_SA_Sub_P Parameter: Plant Line Value: WS
  misc_feature: MA Experiment 20000347 PARAMETER Experiment Name: At_2mM_SA_Sub_P Parameter: Timepoint (hr) Value: 6
  misc_feature: MA Experiment 20000347 PARAMETER Experiment Name: At_2mM_SA_Sub_P Parameter: Tissue Value: Aerial
  misc_feature: MA Experiment 20000347 PARAMETER Experiment Name: At_2mM_SA_Sub_P Parameter: Treatment Value: 2mM SA vs. No Treatment
  misc_feature: MA Experiment ID: 20000352 Result: Down-regulated in Transcription
  misc_feature: MA Experiment 20000352 PARAMETER Experiment Name: At_Drought_Sub_P Parameter: Age (day) Value: 7
  misc_feature: MA Experiment 20000352 PARAMETER Experiment Name: At_Drought_Sub_P Parameter: Organism Value: A. thaliana
  misc_feature: MA Experiment 20000352 PARAMETER Experiment Name: At_Drought_Sub_P Parameter: Plant Line Value: WS
  misc_feature: MA Experiment 20000352 PARAMETER Experiment Name: At_Drought_Sub_P Parameter: Timepoint (hr) Value: 6
  misc_feature: MA Experiment 20000352 PARAMETER Experiment Name: At_Drought_Sub_P Parameter: Tissue Value: Whole Plant
  misc_feature: MA Experiment 20000352 PARAMETER Experiment Name: At_Drought_Sub_P Parameter: Treatment Value: Drought vs. No Drought
  misc_feature: MA Experiment ID: 20000355 Result: Down-regulated in Transcription
  misc_feature: MA Experiment 20000355 PARAMETER Experiment Name: At_Siliques_Sub_P Parameter: Age (day) Value: 21
  misc_feature: MA Experiment 20000355 PARAMETER Experiment Name: At_Siliques_Sub_P Parameter: Organism Value: A. thaliana
  misc_feature: MA Experiment 20000355 PARAMETER Experiment Name: At_Siliques_Sub_P Parameter: Plant Line Value: WS
  misc_feature: MA Experiment 20000355 PARAMETER Experiment Name: At_Siliques_Sub_P Parameter: Tissue Value: Less Than 5mm Siliques vs. Whole Plant
  misc_feature: MA Experiment ID: 20000440 Result: Down-regulated in Transcription
  misc_feature: MA Experiment 20000440 PARAMETER Experiment Name: At_Closed-Flower__Sub_P Parameter: Tissue Value: Closed Flower vs. Whole Plant
atgcatctaaaacaaactctatctactaactcgaaacacacttgcggtcttatctaaaacacaaaccaacaaaaagaaaaaatgggcttggtccgatcatttgctttggtcatagtcttccttagttgtctcatcgccgtttatggccaaggtacgaggatcgggttctactcgactacgtgccctaatgccgagacaattgttcggaccactgtggcatctcactttggttcagatccaaaggttgcacccgggttactgagaatgcacaaccatgattgctttgtccaaggttgtgatggttcggtgcttttatcgggacctaactctgaaagaaccgctggcgcaaacgttaacctccatggttttgaggtcattgacgatgccaagaggcagctcgaggcagcatgtcctggtgttgtctcttgtgctgatatcttggccttagcggctcgtgattcggtttctctcacaaacggacaaagttggcaagttccaacaggacgtagagatggaagagtttccttggcatcgaacgttaacaatcttccttctccaagtgactctctagccattcaacaaaggaaattctccgcttttcgcctcaacactcgcgatctcgtcactcttgttggaggaggacacacgatcggaacagctgcatgtgggtttatcacgaacaggatattcaactcgagcggaaacacagcagatccaacaatggaccaaacatttgtaccacaacttcaaagactttgtccccaaaacggcgacggatcagcacgtgttgatcttgacaccggaagtggaaacacttttgacacatcttatttcatcaatctcagccgtaacagaggaattcttcaatccgatcacgttctttggactagtccggccacaagatccatagtgcaagagtttatggcacctagaggcaacttcaatgtccagttcgcaaggtcaatggttaaaatgagtaatattggtgtgaagacggggacaaatggagaaattcgtagggtttgctctgcggttaattaatcagtgattaagtttttatggctaaaaaaaagtgtttatggctaactcttgttcaagggcattttttttatagtttgatttaaatttaaacccaatagaatagaaaggatatgagagaaacccaaaagtgggttgctgataaatgtatttcatttctttcggtttgacttggtggaataaataaagttcaatttcgtt

SEQ ID NO: 40961 - protein, 319 aa, Arabidopsis thaliana
  peptide (1)..(319): Ceres Seq. ID no. 13592762
  misc_feature (41)..(283): Pfam Name: Peroxidase Pfam Description: Peroxidase
  misc_feature (7)..(319): Homolog of NCBI NO: 5381255 NR Description: peroxidase [Nicotiana tabacum]
  misc_feature (6)..(319): Homolog of NCBI NO: 17066703 NR Description: peroxidase [Capsicum annuum]
  misc_feature (9)..(319): Homolog of NCBI NO: 19698452 NR Description: bacterial-induced gaiacol peroxidase [Gossypium
  misc_feature (7)..(319): Homolog of NCBI NO: 7433065 NR Description: peroxidase (EC 1.11.1.7) precursor,
  misc_feature (5)..(319): Homolog of NCBI NO: 129808 NR Description: Cationic peroxidase 2 precursor (PNPC2)
  misc_feature (7)..(319): Homolog of NCBI NO: 18558997 NR Description: bacterial-induced peroxidase [Gossypium hirsutum]
  misc_feature (1)..(319): Homolog of NCBI NO: 21592403 NR Description: peroxidase [Arabidopsis thaliana]
  misc_feature (1)..(319): Homolog of NCBI NO: 15237615 NR Description: peroxidase, putative [Arabidopsis thaliana]
  misc_feature (63)..(319): Homolog of NCBI NO: 1890313 NR Description: peroxidase ATP24a [Arabidopsis thaliana]
  misc_feature (1)..(319): Homolog of NCBI NO: 15241812 NR Description: peroxidase, putative [Arabidopsis thaliana]
MGLVRSFALVIVFLSCLIAVYGQGTRIGFYSTTCPNAETIVRTTVASHFGSDPKVAPGLLRMHNHDCFVQGCDGSVLLSGPNSERTAGANVNLHGFEVIDDAKRQLEAACPGVVSCADILALAARDSVSLTNGQSWQVPTGRRDGRVSLASNVNNLPSPSDSLAIQQRKFSAFRLNTRDLVTLVGGGHTIGTAACGFITNRIFNSSGNTADPTMDQTFVPQLQRLCPQNGDGSARVDLDTGSGNTFDTSYFINLSRNRGILQSDHVLWTSPATRSIVQEFMAPRGNFNVQFARSMVKMSNIGVKTGTNGEIRRVCSAVN

SEQ ID NO: 40962 - protein, 258 aa, Arabidopsis thaliana
  peptide (1)..(258): Ceres Seq. ID no. 13592763
  misc_feature (1)..(222): Pfam Name: Peroxidase Pfam Description: Peroxidase
  misc_feature (1)..(258): Homolog of NCBI NO: 5381255 NR Description: peroxidase [Nicotiana tabacum]
  misc_feature (1)..(258): Homolog of NCBI NO: 17066703 NR Description: peroxidase [Capsicum annuum]
  misc_feature (1)..(258): Homolog of NCBI NO: 19698452 NR Description: bacterial-induced gaiacol peroxidase [Gossypium
  misc_feature (1)..(258): Homolog of NCBI NO: 7433065 NR Description: peroxidase (EC 1.11.1.7) precursor,
  misc_feature (1)..(258): Homolog of NCBI NO: 129808 NR Description: Cationic peroxidase 2 precursor (PNPC2)
  misc_feature (1)..(258): Homolog of NCBI NO: 18558997 NR Description: bacterial-induced peroxidase [Gossypium hirsutum]
  misc_feature (1)..(258): Homolog of NCBI NO: 21592403 NR Description: peroxidase [Arabidopsis thaliana]
  misc_feature (1)..(258): Homolog of NCBI NO: 15237615 NR Description: peroxidase, putative [Arabidopsis thaliana]
  misc_feature (2)..(258): Homolog of NCBI NO: 1890313 NR Description: peroxidase ATP24a [Arabidopsis thaliana]
  misc_feature (1)..(258): Homolog of NCBI NO: 15241812 NR Description: peroxidase, putative [Arabidopsis thaliana]
MHNHDCFVQGCDGSVLLSGPNSERTAGANVNLHGFEVIDDAKRQLEAACPGVVSCADILALAARDSVSLTNGQSWQVPTGRRDGRVSLASNVNNLPSPSDSLAIQQRKFSAFRLNTRDLVTLVGGGHTIGTAACGFITNRIFNSSGNTADPTMDQTFVPQLQRLCPQNGDGSARVDLDTGSGNTFDTSYFINLSRNRGILQSDHVLWTSPATRSIVQEFMAPRGNFNVQFARSMVKMSNIGVKTGTNGEIRRVCSAVN

SEQ ID NO: 40963 - DNA, 2156 bp, Arabidopsis thaliana
  misc_feature (1)..(2156): Ceres Seq. ID no. 13497092
  misc_feature: MA Experiment ID: 108434 Result: Up-regulated in Transcription
  misc_feature: MA Experiment 108434 PARAMETER Experiment Name: At_Root_Tips_cDNA_P Parameter: Tissue Value: Root Tips
  misc_feature: MA Experiment ID: 108576 Result: Down-regulated in Transcription
  misc_feature: MA Experiment 108576 PARAMETER Experiment Name: At_42deg_Heat_cDNA_P Parameter: Temperature (deg C) Value: 42 vs. 22
  misc_feature: MA Experiment 108576 PARAMETER Experiment Name: At_42deg_Heat_cDNA_P Parameter: Timepoint (hr) Value: 1
  misc_feature: MA Experiment 108576 PARAMETER Experiment Name: At_42deg_Heat_cDNA_P Parameter: Tissue Value: Aerial
  misc_feature: MA Experiment ID: 108595 Result: Down-regulated in Transcription
  misc_feature: MA Experiment 108595 PARAMETER Experiment Name: At_Ler-pi_Ovule_cDNA_P Parameter: Plant Line Value: null
  misc_feature: MA Experiment ID: 20000087 Result: Down-regulated in Transcription
  misc_feature: MA Experiment 20000087 PARAMETER Experiment Name: At_100uM_ABA_Mutants_cDNA_P Parameter: Plant Line Value: WS
  misc_feature: MA Experiment 20000087 PARAMETER Experiment Name: At_100uM_ABA_Mutants_cDNA_P Parameter: Timepoint (hr) Value: 6
  misc_feature: MA Experiment 20000087 PARAMETER Experiment Name: At_100uM_ABA_Mutants_cDNA_P Parameter: Tissue Value: Aerial
  misc_feature: MA Experiment 20000087 PARAMETER Experiment Name: At_100uM_ABA_Mutants_cDNA_P Parameter: Treatment Value: 100uM ABA vs. No Treatment
  misc_feature: MA Experiment ID: 20000171 Result: Down-regulated in Transcription
  misc_feature: MA Experiment 20000171 PARAMETER Experiment Name: At_42deg_Heat_P Parameter: Age (day) Value: 14
  misc_feature: MA Experiment 20000171 PARAMETER Experiment Name: At_42deg_Heat_P Parameter: Organism Value: A. thaliana
  misc_feature: MA Experiment 20000171 PARAMETER Experiment Name: At_42deg_Heat_P Parameter: Plant Line Value: WS
  misc_feature: MA Experiment 20000171 PARAMETER Experiment Name: At_42deg_Heat_P Parameter: Temperature (deg C) Value: 42 vs. 22
  misc_feature: MA Experiment 20000171 PARAMETER Experiment Name: At_42deg_Heat_P Parameter: Timepoint (hr) Value: 1
  misc_feature: MA Experiment 20000171 PARAMETER Experiment Name: At_42deg_Heat_P Parameter: Tissue Value: Aerial
  misc_feature: MA Experiment ID: 20000173 Result: Down-regulated in Transcription
  misc_feature: MA Experiment 20000173 PARAMETER Experiment Name: At_42deg_Heat_P Parameter: Age (day) Value: 14
  misc_feature: MA Experiment 20000173 PARAMETER Experiment Name: At_42deg_Heat_P Parameter: Organism Value: A. thaliana
  misc_feature: MA Experiment 20000173 PARAMETER Experiment Name: At_42deg_Heat_P Parameter: Plant Line Value: WS
  misc_feature: MA Experiment 20000173 PARAMETER Experiment Name: At_42deg_Heat_P Parameter: Temperature (deg C) Value: 42 vs. 22
  misc_feature: MA Experiment 20000173 PARAMETER Experiment Name: At_42deg_Heat_P Parameter: Timepoint (hr) Value: 6
  misc_feature: MA Experiment 20000173 PARAMETER Experiment Name: At_42deg_Heat_P Parameter: Tissue Value: Aerial
  misc_feature: MA Experiment ID: 20000437 Result: Down-regulated in Transcription
  misc_feature: MA Experiment 20000437 PARAMETER Experiment Name: At_Drought_P Parameter: Age (day) Value: 8
  misc_feature: MA Experiment 20000437 PARAMETER Experiment Name: At_Drought_P Parameter: Organism Value: A. thaliana
  misc_feature: MA Experiment 20000437 PARAMETER Experiment Name: At_Drought_P Parameter: Plant Line Value: WS
  misc_feature: MA Experiment 20000437 PARAMETER Experiment Name: At_Drought_P Parameter: Timepoint (hr) Value: 24
  misc_feature: MA Experiment 20000437 PARAMETER Experiment Name: At_Drought_P Parameter: Tissue Value: Whole Plant
  misc_feature: MA Experiment 20000437 PARAMETER Experiment Name: At_Drought_P Parameter: Treatment Value: Drought vs. No Drought
  misc_feature: MA Experiment ID: 20001247 Result: Up-regulated in Transcription
  misc_feature: MA Experiment 20001247 PARAMETER Experiment Name: At_Far-red-induction_P Parameter: Age (day) Value: 7
  misc_feature: MA Experiment 20001247 PARAMETER Experiment Name: At_Far-red-induction_P Parameter: Light Value: Far-red vs. White
  misc_feature: MA Experiment 20001247 PARAMETER Experiment Name: At_Far-red-induction_P Parameter: Organism Value: A. thaliana
  misc_feature: MA Experiment 20001247 PARAMETER Experiment Name: At_Far-red-induction_P Parameter: Plant Line Value: Columbia
  misc_feature: MA Experiment 20001247 PARAMETER Experiment Name: At_Far-red-induction_P Parameter: Timepoint (hr) Value: 1
  misc_feature: MA Experiment 20001247 PARAMETER Experiment Name: At_Far-red-induction_P Parameter: Tissue Value: Whole Plant
  misc_feature: MA Experiment ID: 20001905 Result: Down-regulated in Transcription
  misc_feature: MA Experiment 20001905 PARAMETER Experiment Name: At_Drought_Reproduction_P Parameter: Age (day) Value: 40
  misc_feature: MA Experiment 20001905 PARAMETER Experiment Name: At_Drought_Reproduction_P Parameter: Organism Value: A. thaliana
  misc_feature: MA Experiment 20001905 PARAMETER Experiment Name: At_Drought_Reproduction_P Parameter: Plant Line Value: WS
  misc_feature: MA Experiment 20001905 PARAMETER Experiment Name: At_Drought_Reproduction_P Parameter: Timepoint (day) Value: 10
  misc_feature: MA Experiment 20001905 PARAMETER Experiment Name: At_Drought_Reproduction_P Parameter: Tissue Value: Rosettes
  misc_feature: MA Experiment 20001905 PARAMETER Experiment Name: At_Drought_Reproduction_P Parameter: Treatment Value: Drought vs. No Drought
  misc_feature: MA Experiment ID: 20001911 Result: Down-regulated in Transcription
  misc_feature: MA Experiment 20001911 PARAMETER Experiment Name: At_Drought_Reproduction_P Parameter: Age (day) Value: 40
  misc_feature: MA Experiment 20001911 PARAMETER Experiment Name: At_Drought_Reproduction_P Parameter: Organism Value: A. thaliana
  misc_feature: MA Experiment 20001911 PARAMETER Experiment Name: At_Drought_Reproduction_P Parameter: Plant Line Value: WS
  misc_feature: MA Experiment 20001911 PARAMETER Experiment Name: At_Drought_Reproduction_P Parameter: Timepoint (day) Value: 10
  misc_feature: MA Experiment 20001911 PARAMETER Experiment Name: At_Drought_Reproduction_P Parameter: Tissue Value: Flowers
  misc_feature: MA Experiment 20001911 PARAMETER Experiment Name: At_Drought_Reproduction_P Parameter: Treatment Value: Drought vs. No Drought
ggacctcgagggaatctactgtagctctcacactatccactcttcatcggcagctagatttccgggtcctcagtatcgggtcagatctagatccggatccggagacgctgagaatgaaacacttcagaactgagcgagtccgtgcgactccgaagctcttcacctacgttctcgtcggtttcatcgctctactcggcttgacttgcctctactacggctcttcgttcgctcccggatccagaaagtccgatgagttcgatggatctaataaccgcgttcgcaccggaatcggatccttgaggaatcgagatattgtgcttgcagtgagccgtttcgaagttcctaaaagtgttccgatatgtgattcgagacactcggagttgataccgtgtttggatcggaaccttcattaccagttgaaattgaaactcaatttatcgttaatggagcactatgagcatcattgtcctccatcagaacggcgtttcaattgccttgttccgcctcctgttggttataagatcccgttaaggtggcctgtgagtagagacgaggtgtggaaggcgaatatcccgcacacacaccttgctcaagagaagtctgatcagaattggatggttgttaatggtgataagatcaattttcctggtggaggaacacatttccacaacggagctgacaaatacattgtttccctggctcagatgctgaaattccctggtgacaaactcaacaatgggggaagcattcggaatgttcttgacgttggttgtggggtagctagcttcggagcctatcttctttcacatgacatcatagccatgtctcttgcccctaatgatgtccaccagaaccagatccagtttgctctagaacgagggattccatcaacacttggtgttcttgggacaaagcggcttccatacccaagcagatcatttgaacttgctcactgctctagatgtcggatagattggcttcaaagagatgggatcttgttactggaacttgataggttgctcagacctggtggctactttgtatactcgtcgcctgaagcttatgcacacgacccagagaacagaaagattgggaatgcaatgcatgatctctttaagagaatgtgttggaaggtcgtggccaaacgagaccaatctgttatatggggaaaaccgatatccaacagctgttacttgaagagggatccgggtgtcctgcctccgctttgtccttctggagatgacccagatgcaacttggaatgtctcaatgaaggcttgcatatcaccttactcagtgaggatgcacaaagaaagatggagtggactcgttccctggccacggaggctgacagctcctccaccacgtcttgaagaaattggtgtcactcctgagcaattccgtgaagatacggaaacatggcggcttagagtgatagaatactggaaactgctgaaaccaatggtgcaaaagaactccataagaaacgtgatggacatgagctcaaaccttggcggtttcgcagctgctctaaacgataaagatgtatgggtaatgaatgtcatgcccgttcaatcctctccaagaatgaagatcatttacgaccgtggccttatcggagccactcatgattggtgtgaagcctttgacacatacccacgaacgtttgatcttatccacgcatggaacaccttcacagaaacccaagcacgtggatgcagctttgaagatctgcttatcgagatggatcggatactacgcccagaaggatttgtcataattcgtgacacaactgacaatattagctatatcaagaagtatctgacattattgaaatgggataaatggtccacagagacaactccaaaaggtgatcctctgtcgaccaaagacgagatagttttgatcgccagaaagaaactttggagcttgcccgccatttcagtgtcctgaaatctaacagtcaacaggcgaatgaatgagatttacagcatcagaggcgcgtagctgaggaaaatactcagcaatggagaagtgtaaattacacgacattcatacatagttgttaacttgttatgcatttgttgtaggaaactgcaaaatcttcttattttgcgattttcatgttcctctttataattaaaatctgcttttgtg

SEQ ID NO: 40964 - protein, 649 aa, Arabidopsis thaliana
  peptide (1)..(649): Ceres Seq. ID no. 13497093
  misc_feature (126)..(638): Pfam Name: Putative methyltransferase Pfam Description: Putative methyltransferase
  misc_feature (109)..(629): Homolog of NCBI NO: 34908262 NR Description: ankyrin-like protein [Oryza sativa (japonica
  misc_feature (435)..(641): Homolog of NCBI NO: 25406781 NR Description: hypothetical protein [imported] - Arabidopsis
  misc_feature (119)..(434): Homolog of NCBI NO: 25406781 NR Description: hypothetical protein [imported] - Arabidopsis
  misc_feature (57)..(641): Homolog of NCBI NO: 14423548 NR Description: Unknown protein [Arabidopsis thaliana]
  misc_feature (57)..(641): Homolog of NCBI NO: 21536697 NR Description: ankyrin-like protein [Arabidopsis thaliana]
  misc_feature (57)..(641): Homolog of NCBI NO: 18390392 NR Description: dehydration-induced protein-related [Arabidopsis
  misc_feature (114)..(641): Homolog of NCBI NO: 7488052 NR Description: probable ankyrin - Arabidopsis thaliana
  misc_feature (114)..(641): Homolog of NCBI NO: 22331280 NR Description: dehydration-induced protein-related [Arabidopsis
  misc_feature (114)..(641): Homolog of NCBI NO: 18414198 NR Description: dehydration-induced protein-related [Arabidopsis
  misc_feature (52)..(641): Homolog of NCBI NO: 37535372 NR Description: hypothetical protein [Oryza sativa (japonica
TSRESTVALTLSTLHRQLDFRVLSIGSDLDPDPETLRMKHFRTERVRATPKLFTYVLVGFIALLGLTCLYYGSSFAPGSRKSDEFDGSNNRVRTGIGSLRNRDIVLAVSRFEVPKSVPICDSRHSELIPCLDRNLHYQLKLKLNLSLMEHYEHHCPPSERRFNCLVPPPVGYKIPLRWPVSRDEVWKANIPHTHLAQEKSDQNWMVVNGDKINFPGGGTHFHNGADKYIVSLAQMLKFPGDKLNNGGSIRNVLDVGCGVASFGAYLLSHDIIAMSLAPNDVHQNQIQFALERGIPSTLGVLGTKRLPYPSRSFELAHCSRCRIDWLQRDGILLLELDRLLRPGGYFVYSSPEAYAHDPENRKIGNAMHDLFKRMCWKVVAKRDQSVIWGKPISNSCYLKRDPGVLPPLCPSGDDPDATWNVSMKACISPYSVRMHKERWSGLVPWPRRLTAPPPRLEEIGVTPEQFREDTETWRLRVIEYWKLLKPMVQKNSIRNVMDMSSNLGGFAAALNDKDVWVMNVMPVQSSPRMKIIYDRGLIGATHDWCEAFDTYPRTFDLIHAWNTFTETQARGCSFEDLLIEMDRILRPEGFVIIRDTTDNISYIKKYLTLLKWDKWSTETTPKGDPLSTKDEIVLIARKKLWSLPAISVS

SEQ ID NO: 40965 - protein, 612 aa, Arabidopsis thaliana
  peptide (1)..(612): Ceres Seq. ID no. 13497094
  misc_feature (89)..(601): Pfam Name: Putative methyltransferase Pfam Description: Putative methyltransferase
  misc_feature (72)..(592): Homolog of NCBI NO: 34908262 NR Description: ankyrin-like protein [Oryza sativa (japonica
  misc_feature (398)..(604): Homolog of NCBI NO: 25406781 NR Description: hypothetical protein [imported] - Arabidopsis
  misc_feature (82)..(397): Homolog of NCBI NO: 25406781 NR Description: hypothetical protein [imported] - Arabidopsis
  misc_feature (20)..(604): Homolog of NCBI NO: 14423548 NR Description: Unknown protein [Arabidopsis thaliana]
  misc_feature (20)..(604): Homolog of NCBI NO: 21536697 NR Description: ankyrin-like protein [Arabidopsis thaliana]
  misc_feature (20)..(604): Homolog of NCBI NO: 18390392 NR Description: dehydration-induced protein-related [Arabidopsis
  misc_feature (77)..(604): Homolog of NCBI NO: 7488052 NR Description: probable ankyrin - Arabidopsis thaliana
  misc_feature (77)..(604): Homolog of NCBI NO: 22331280 NR Description: dehydration-induced protein-related [Arabidopsis
  misc_feature (77)..(604): Homolog of NCBI NO: 18414198 NR Description: dehydration-induced protein-related [Arabidopsis
  misc_feature (15)..(604): Homolog of NCBI NO: 37535372 NR Description: hypothetical protein [Oryza sativa (japonica
MKHFRTERVRATPKLFTYVLVGFIALLGLTCLYYGSSFAPGSRKSDEFDGSNNRVRTGIGSLRNRDIVLAVSRFEVPKSVPICDSRHSELIPCLDRNLHYQLKLKLNLSLMEHYEHHCPPSERRFNCLVPPPVGYKIPLRWPVSRDEVWKANIPHTHLAQEKSDQNWMVVNGDKINFPGGGTHFHNGADKYIVSLAQMLKFPGDKLNNGGSIRNVLDVGCGVASFGAYLLSHDIIAMSLAPNDVHQNQIQFALERGIPSTLGVLGTKRLPYPSRSFELAHCSRCRIDWLQRDGILLLELDRLLRPGGYFVYSSPEAYAHDPENRKIGNAMHDLFKRMCWKVVAKRDQSVIWGKPISNSCYLKRDPGVLPPLCPSGDDPDATWNVSMKACISPYSVRMHKERWSGLVPWPRRLTAPPPRLEEIGVTPEQFREDTETWRLRVIEYWKLLKPMVQKNSIRNVMDMSSNLGGFAAALNDKDVWVMNVMPVQSSPRMKIIYDRGLIGATHDWCEAFDTYPRTFDLIHAWNTFTETQARGCSFEDLLIEMDRILRPEGFVIIRDTTDNISYIKKYLTLLKWDKWSTETTPKGDPLSTKDEIVLIARKKLWSLPAISVS

SEQ ID NO: 40966 - protein, 502 aa, Arabidopsis thaliana
  peptide (1)..(502): Ceres Seq. ID no. 13497095
  misc_feature (1)..(491): Pfam Name: Putative methyltransferase Pfam Description: Putative methyltransferase
  misc_feature (1)..(482): Homolog of NCBI NO: 34908262 NR Description: ankyrin-like protein [Oryza sativa (japonica
  misc_feature (288)..(494): Homolog of NCBI NO: 25406781 NR Description: hypothetical protein [imported] - Arabidopsis
  misc_feature (1)..(287): Homolog of NCBI NO: 25406781 NR Description: hypothetical protein [imported] - Arabidopsis
  misc_feature (1)..(494): Homolog of NCBI NO: 14423548 NR Description: Unknown protein [Arabidopsis thaliana]
  misc_feature (1)..(494): Homolog of NCBI NO: 21536697 NR Description: ankyrin-like protein [Arabidopsis thaliana]
  misc_feature (1)..(494): Homolog of NCBI NO: 18390392 NR Description: dehydration-induced protein-related [Arabidopsis
  misc_feature (1)..(494): Homolog of NCBI NO: 7488052 NR Description: probable ankyrin - Arabidopsis thaliana
  misc_feature (1)..(494): Homolog of NCBI NO: 22331280 NR Description: dehydration-induced protein-related [Arabidopsis
  misc_feature (1)..(494): Homolog of NCBI NO: 18414198 NR Description: dehydration-induced protein-related [Arabidopsis
  misc_feature (1)..(494): Homolog of NCBI NO: 37535372 NR Description: hypothetical protein [Oryza sativa (japonica
MEHYEHHCPPSERRFNCLVPPPVGYKIPLRWPVSRDEVWKANIPHTHLAQEKSDQNWMVVNGDKINFPGGGTHFHNGADKYIVSLAQMLKFPGDKLNNGGSIRNVLDVGCGVASFGAYLLSHDIIAMSLAPNDVHQNQIQFALERGIPSTLGVLGTKRLPYPSRSFELAHCSRCRIDWLQRDGILLLELDRLLRPGGYFVYSSPEAYAHDPENRKIGNAMHDLFKRMCWKVVAKRDQSVIWGKPISNSCYLKRDPGVLPPLCPSGDDPDATWNVSMKACISPYSVRMHKERWSGLVPWPRRLTAPPPRLEEIGVTPEQFREDTETWRLRVIEYWKLLKPMVQKNSIRNVMDMSSNLGGFAAALNDKDVWVMNVMPVQSSPRMKIIYDRGLIGATHDWCEAFDTYPRTFDLIHAWNTFTETQARGCSFEDLLIEMDRILRPEGFVIIRDTTDNISYIKKYLTLLKWDKWSTETTPKGDPLSTKDEIVLIARKKLWSLPAISVS

SEQ ID NO: 40967 - DNA, 1503 bp, Arabidopsis thaliana; identical to SEQ ID NO: 35171
  misc_feature (1)..(1503): Ceres Seq. ID no. 12335175
  misc_feature: MA Experiment ID: 108577 Result: Up-regulated in Transcription
  misc_feature: MA Experiment 108577 PARAMETER Experiment Name: At_42deg_Heat_cDNA_P Parameter: Temperature (deg C) Value: 42 vs. 22
  misc_feature: MA Experiment 108577 PARAMETER Experiment Name: At_42deg_Heat_cDNA_P Parameter: Timepoint (hr) Value: 6
  misc_feature: MA Experiment 108577 PARAMETER Experiment Name: At_42deg_Heat_cDNA_P Parameter: Tissue Value: Aerial
  misc_feature: MA Experiment ID: 108595 Result: Down-regulated in Transcription
  misc_feature: MA Experiment 108595 PARAMETER Experiment Name: At_Ler-pi_Ovule_cDNA_P Parameter: Plant Line Value: null
  misc_feature: MA Experiment ID: 20000173 Result: Up-regulated in Transcription
  misc_feature: MA Experiment 20000173 PARAMETER Experiment Name: At_42deg_Heat_P Parameter: Age (day) Value: 14
  misc_feature: MA Experiment 20000173 PARAMETER Experiment Name: At_42deg_Heat_P Parameter: Organism Value: A. thaliana
  misc_feature: MA Experiment 20000173 PARAMETER Experiment Name: At_42deg_Heat_P Parameter: Plant Line Value: WS
  misc_feature: MA Experiment 20000173 PARAMETER Experiment Name: At_42deg_Heat_P Parameter: Temperature (deg C) Value: 42 vs. 22
  misc_feature: MA Experiment 20000173 PARAMETER Experiment Name: At_42deg_Heat_P Parameter: Timepoint (hr) Value: 6
  misc_feature: MA Experiment 20000173 PARAMETER Experiment Name: At_42deg_Heat_P Parameter: Tissue Value: Aerial
  misc_feature: MA Experiment ID: 20000437 Result: Down-regulated in Transcription
  misc_feature: MA Experiment 20000437 PARAMETER Experiment Name: At_Drought_P Parameter: Age (day) Value: 8
  misc_feature: MA Experiment 20000437 PARAMETER Experiment Name: At_Drought_P Parameter: Organism Value: A. thaliana
  misc_feature: MA Experiment 20000437 PARAMETER Experiment Name: At_Drought_P Parameter: Plant Line Value: WS
  misc_feature: MA Experiment 20000437 PARAMETER Experiment Name: At_Drought_P Parameter: Timepoint (hr) Value: 24
  misc_feature: MA Experiment 20000437 PARAMETER Experiment Name: At_Drought_P Parameter: Tissue Value: Whole Plant
  misc_feature: MA Experiment 20000437 PARAMETER Experiment Name: At_Drought_P Parameter: Treatment Value: Drought vs. No Drought
  misc_feature: MA Experiment ID: 20001557 Result: Down-regulated in Transcription
  misc_feature: MA Experiment 20001557 PARAMETER Experiment Name: At_Drought_Soil_Dry_P Parameter: Age (day) Value: 27
  misc_feature: MA Experiment 20001557 PARAMETER Experiment Name: At_Drought_Soil_Dry_P Parameter: Organism Value: A. thaliana
  misc_feature: MA Experiment 20001557 PARAMETER Experiment Name: At_Drought_Soil_Dry_P Parameter: Plant Line Value: WS
  misc_feature: MA Experiment 20001557 PARAMETER Experiment Name: At_Drought_Soil_Dry_P Parameter: Post Timepoint (hr) Value: 3
  misc_feature: MA Experiment 20001557 PARAMETER Experiment Name: At_Drought_Soil_Dry_P Parameter: Post-Treatment Value: Re-Water vs. No Drought
  misc_feature: MA Experiment 20001557 PARAMETER Experiment Name: At_Drought_Soil_Dry_P Parameter: Timepoint (day) Value: 13
  misc_feature: MA Experiment 20001557 PARAMETER Experiment Name: At_Drought_Soil_Dry_P Parameter: Treatment Value: Drought vs. No Drought
  misc_feature: MA Experiment ID: 20001905 Result: Down-regulated in Transcription
  misc_feature: MA Experiment 20001905 PARAMETER Experiment Name: At_Drought_Reproduction_P Parameter: Age (day) Value: 40
  misc_feature: MA Experiment 20001905 PARAMETER Experiment Name: At_Drought_Reproduction_P Parameter: Organism Value: A. thaliana
  misc_feature: MA Experiment 20001905 PARAMETER Experiment Name: At_Drought_Reproduction_P Parameter: Plant Line Value: WS
  misc_feature: MA Experiment 20001905 PARAMETER Experiment Name: At_Drought_Reproduction_P Parameter: Timepoint (day) Value: 10
  misc_feature: MA Experiment 20001905 PARAMETER Experiment Name: At_Drought_Reproduction_P Parameter: Tissue Value: Rosettes
  misc_feature: MA Experiment 20001905 PARAMETER Experiment Name: At_Drought_Reproduction_P Parameter: Treatment Value: Drought vs. No Drought

SEQ ID NO: 40968 - protein, 392 aa, Arabidopsis thaliana; identical to SEQ ID NO: 35172
  peptide (1)..(392): Ceres Seq. ID no. 12335176
  misc_feature (79)..(368): Pfam Name: Pyridoxal-phosphate dependent enzyme Pfam Description: Pyridoxal-phosphate dependent enzyme
  misc_feature (79)..(368): Pfam Name: Pyridoxal-phosphate dependent enzyme Pfam Description: Pyridoxal-phosphate dependent enzyme
  misc_feature (1)..(372): Homolog of NCBI NO: 30695058 NR Description: cysteine synthase, mitochondrial (O-acetylserine
  misc_feature (1)..(392): Homolog of NCBI NO: 1488519 NR Description: cysteine synthase [Arabidopsis thaliana]
  misc_feature (10)..(392): Homolog of NCBI NO: 25291707 NR Description: cysteine synthase (EC 4.2.99.8) precursor,
  misc_feature (1)..(392): Homolog of NCBI NO: 11269069 NR Description: cysteine synthase (EC 4.2.99.8) F24G16.30
  misc_feature (1)..(391): Homolog of NCBI NO: 30695056 NR Description: cysteine synthase, mitochondrial (O-acetylserine
  misc_feature (1)..(372): Homolog of NCBI NO: 30695058 NR Description: cysteine synthase, mitochondrial (O-acetylserine
  misc_feature (10)..(392): Homolog of NCBI NO: 25291707 NR Description: cysteine synthase (EC 4.2.99.8) precursor,
  misc_feature (1)..(391): Homolog of NCBI NO: 30695056 NR Description: cysteine synthase, mitochondrial (O-acetylserine
  misc_feature (1)..(392): Homolog of NCBI NO: 15224351 NR Description: cysteine synthase (cpACS1)
  misc_feature (1)..(392): Homolog of NCBI NO: 572517 NR Description: cysteine synthase [Arabidopsis thaliana]
  misc_feature (1)..(392): Homolog of NCBI NO: 1084347 NR Description: cysteine synthase (EC 4.2.99.8) isoform 7-4
  misc_feature (1)..(392): Homolog of NCBI NO: 12643295 NR Description: CYSTEINE SYNTHASE, MITOCHONDRIAL PRECURSOR SULFHYDRYLASE) (O-ACETYLSERINE (THIOL)-LYASE) (CSASE C) (CS-C)
  misc_feature (1)..(392): Homolog of NCBI NO: 22331875 NR Description: cysteine synthase
  misc_feature (1)..(392): Homolog of NCBI NO: 11269069 NR Description: cysteine synthase (EC 4.2.99.8) F24G16.30
  misc_feature (1)..(392): Homolog of NCBI NO: 1488519 NR Description: cysteine synthase [Arabidopsis thaliana]
  misc_feature (1)..(392): Homolog of NCBI NO: 22331875 NR Description: cysteine synthase
  misc_feature (1)..(392): Homolog of NCBI NO: 12643295 NR Description: CYSTEINE SYNTHASE, MITOCHONDRIAL PRECURSOR SULFHYDRYLASE) (O-ACETYLSERINE (THIOL)-LYASE) (CSASE C) (CS-C)
  misc_feature (1)..(392): Homolog of NCBI NO: 1084347 NR Description: cysteine synthase (EC 4.2.99.8) isoform 7-4
  misc_feature (1)..(392): Homolog of NCBI NO: 572517 NR Description: cysteine synthase [Arabidopsis thaliana]
  misc_feature (1)..(392): Homolog of NCBI NO: 15224351 NR Description: cysteine synthase (cpACS1)

SEQ ID NO: 40969 - protein, 305 aa, Arabidopsis thaliana; identical to SEQ ID NO: 35173
  peptide (1)..(305): Ceres Seq. ID no. 12335177
  misc_feature (1)..(281): Pfam Name: Pyridoxal-phosphate dependent enzyme Pfam Description: Pyridoxal-phosphate dependent enzyme
  misc_feature (1)..(281): Pfam Name: Pyridoxal-phosphate dependent enzyme Pfam Description: Pyridoxal-phosphate dependent enzyme
  misc_feature (1)..(285): Homolog of NCBI NO: 30695058 NR Description: cysteine synthase, mitochondrial (O-acetylserine
  misc_feature (1)..(305): Homolog of NCBI NO: 1488519 NR Description: cysteine synthase [Arabidopsis thaliana]
  misc_feature (1)..(305): Homolog of NCBI NO: 25291707 NR Description: cysteine synthase (EC 4.2.99.8) precursor,
  misc_feature (1)..(305): Homolog of NCBI NO: 11269069 NR Description: cysteine synthase (EC 4.2.99.8) F24G16.30
  misc_feature (1)..(304): Homolog of NCBI NO: 30695056 NR Description: cysteine synthase, mitochondrial (O-acetylserine
  misc_feature (1)..(285): Homolog of NCBI NO: 30695058 NR Description: cysteine synthase, mitochondrial (O-acetylserine
  misc_feature (1)..(305): Homolog of NCBI NO: 25291707 NR Description: cysteine synthase (EC 4.2.99.8) precursor,
  misc_feature (1)..(304): Homolog of NCBI NO: 30695056 NR Description: cysteine synthase, mitochondrial (O-acetylserine
  misc_feature (1)..(305): Homolog of NCBI NO: 15224351 NR Description: cysteine synthase (cpACS1)
  misc_feature (1)..(305): Homolog of NCBI NO: 572517 NR Description: cysteine synthase [Arabidopsis thaliana]
  misc_feature (1)..(305): Homolog of NCBI NO: 1084347 NR Description: cysteine synthase (EC 4.2.99.8) isoform 7-4
  misc_feature (1)..(305): Homolog of NCBI NO: 12643295 NR Description: CYSTEINE SYNTHASE, MITOCHONDRIAL PRECURSOR SULFHYDRYLASE) (O-ACETYLSERINE (THIOL)-LYASE) (CSASE C) (CS-C)
  misc_feature (1)..(305): Homolog of NCBI NO: 22331875 NR Description: cysteine synthase
  misc_feature (1)..(305): Homolog of NCBI NO: 11269069 NR Description: cysteine synthase (EC 4.2.99.8) F24G16.30
  misc_feature (1)..(305): Homolog of NCBI NO: 1488519 NR Description: cysteine synthase [Arabidopsis thaliana]
  misc_feature (1)..(305): Homolog of NCBI NO: 22331875 NR Description: cysteine synthase
  misc_feature (1)..(305): Homolog of NCBI NO: 12643295 NR Description: CYSTEINE SYNTHASE, MITOCHONDRIAL PRECURSOR SULFHYDRYLASE) (O-ACETYLSERINE (THIOL)-LYASE) (CSASE C) (CS-C)
  misc_feature (1)..(305): Homolog of NCBI NO: 1084347 NR Description: cysteine synthase (EC 4.2.99.8) isoform 7-4
  misc_feature (1)..(305): Homolog of NCBI NO: 572517 NR Description: cysteine synthase [Arabidopsis thaliana]
  misc_feature (1)..(305): Homolog of NCBI NO: 15224351 NR Description: cysteine synthase (cpACS1)

SEQ ID NO: 40970 - protein, 284 aa, Arabidopsis thaliana; identical to SEQ ID NO: 35174
  peptide (1)..(284): Ceres Seq. ID no. 12335178
  misc_feature (1)..(260): Pfam Name: Pyridoxal-phosphate dependent enzyme Pfam Description: Pyridoxal-phosphate dependent enzyme
  misc_feature (1)..(260): Pfam Name: Pyridoxal-phosphate dependent enzyme Pfam Description: Pyridoxal-phosphate dependent enzyme
  misc_feature (1)..(264): Homolog of NCBI NO: 30695058 NR Description: cysteine synthase, mitochondrial (O-acetylserine
  misc_feature (1)..(284): Homolog of NCBI NO: 1488519 NR Description: cysteine synthase [Arabidopsis thaliana]
  misc_feature (1)..(284): Homolog of NCBI NO: 25291707 NR Description: cysteine synthase (EC 4.2.99.8) precursor,
  misc_feature (1)..(284): Homolog of NCBI NO: 11269069 NR Description: cysteine synthase (EC 4.2.99.8) F24G16.30
  misc_feature (1)..(283): Homolog of NCBI NO: 30695056 NR Description: cysteine synthase, mitochondrial (O-acetylserine
  misc_feature (1)..(264): Homolog of NCBI NO: 30695058 NR Description: cysteine synthase, mitochondrial (O-acetylserine
  misc_feature (1)..(284): Homolog of NCBI NO: 25291707 NR Description: cysteine synthase (EC 4.2.99.8) precursor,
  misc_feature (1)..(283): Homolog of NCBI NO: 30695056 NR Description: cysteine synthase, mitochondrial (O-acetylserine
  misc_feature (1)..(284): Homolog of NCBI NO: 15224351 NR Description: cysteine synthase (cpACS1)
  misc_feature (1)..(284): Homolog of NCBI NO: 572517 NR Description: cysteine synthase [Arabidopsis thaliana]
  misc_feature (1)..(284): Homolog of NCBI NO: 1084347 NR Description: cysteine synthase (EC 4.2.99.8) isoform 7-4
  misc_feature (1)..(284): Homolog of NCBI NO: 12643295 NR Description: CYSTEINE SYNTHASE, MITOCHONDRIAL PRECURSOR SULFHYDRYLASE) (O-ACETYLSERINE (THIOL)-LYASE) (CSASE C) (CS-C)
  misc_feature (1)..(284): Homolog of NCBI NO: 22331875 NR Description: cysteine synthase
  misc_feature (1)..(284): Homolog of NCBI NO: 11269069 NR Description: cysteine synthase (EC 4.2.99.8) F24G16.30
  misc_feature (1)..(284): Homolog of NCBI NO: 1488519 NR Description: cysteine synthase [Arabidopsis thaliana]
  misc_feature (1)..(284): Homolog of NCBI NO: 22331875 NR Description: cysteine synthase
  misc_feature (1)..(284): Homolog of NCBI NO: 12643295 NR Description: CYSTEINE SYNTHASE, MITOCHONDRIAL PRECURSOR SULFHYDRYLASE) (O-ACETYLSERINE (THIOL)-LYASE) (CSASE C) (CS-C)
  misc_feature (1)..(284): Homolog of NCBI NO: 1084347 NR Description: cysteine synthase (EC 4.2.99.8) isoform 7-4
  misc_feature (1)..(284): Homolog of NCBI NO: 572517 NR Description: cysteine synthase [Arabidopsis thaliana]
  misc_feature (1)..(284): Homolog of NCBI NO: 15224351 NR Description: cysteine synthase (cpACS1)

SEQ ID NO: 40971 - DNA, 1303 bp, Arabidopsis thaliana
  misc_feature (1)..(1303): Ceres Seq. ID no. 13489181
  misc_feature: MA Experiment ID: 20000265 Result: Up-regulated in Transcription
  misc_feature: MA Experiment 20000265 PARAMETER Experiment Name: At_Open_Flower_P Parameter: Age (day) Value: 21
  misc_feature: MA Experiment 20000265 PARAMETER Experiment Name: At_Open_Flower_P Parameter: Plant Line Value: WS
  misc_feature: MA Experiment 20000265 PARAMETER Experiment Name: At_Open_Flower_P Parameter: Tissue Value: Closed Flower vs. Whole Plant
ctcgtacttcctcgaagtgtaccggagaatctaaacccaatgtcgaaatccggcgataatcaaccagttgatagatacctccgccgtcaaatcctcggagaaggaacatacggtgtcgtttacaaagccaccgacacaaagactgggaaaactgtagcagtgaagaagataagattaggaaaccaaaaggaaggagtaaatttcacagctttaagagaaatcaagctactaaaagagctgaatcatccacatatcgttgaactcattgatgctttccctcacgatggaagtttgcatctagtttttgagtatatgcaaacagatttagaagcagtgattcgtgatcgtaatatctttttatctcctggtgatattaagtcttatatgttgatgactttgaagggtttagcttattgtcataagaaatgggttcttcacagggatatgaagccgaataatttgttgattggagagaatggtttgttgaagttggctgattttggtttggcgaggttgtttgggagtccgaatcggaggtttactcatcaggtatttgctacatggtacagagcgcctgagttactgtttgggagtcgacagtatggagcaggagttgatgtttgggctgcaggctgtatttttgctgagttactacttcgtagaccatttcttccgggttctactgagattgatcaacttggaaagatctttcaagcgtttggtactccagtaccttcccaatggtctgacatgatctatctcccagactacatggaattctcctatacacccgctccaccattacgtaccattttccctatggcaagtgatgacgctttggatcttctagcaaaaatgttcatctacgacccacgtcaaaggatcacaatacaacaagctttagaccacaggtatttctcgtcttctccatcaccaactgagccagggaagcttcagattccagcttccaaaggagacgcactcgaaccaaaggcctccgagcaaaaccaacatggaaatagcccagcggtactgtctcctcctggtaaaatgaggagagtgatgggtcctgaaggattcacttgagaagatgatgtttcatttcttttggaaaatatcaatggatatgcccagaagatttcaaaattagatttttaccattgataattcaatattagttaactatcaaagagaaaaaatttaaagccataaatgtccttcttagttcttactttgtttaatttaccaaatatgtcatgtatcaactattgttataatttcactatatatcaactatcttacc

SEQ ID NO: 40972 - protein, 361 aa, Arabidopsis thaliana
  peptide (1)..(361): Ceres Seq. ID no. 13489182
  misc_feature (26)..(306): Pfam Name: Protein kinase domain Pfam Description: Protein kinase domain
  misc_feature (25)..(321): Homolog of NCBI NO: 2125816 NR Description: serine/threonine protein kinase [Homo sapiens]
  misc_feature (25)..(333): Homolog of NCBI NO: 1705723 NR Description: Cell division protein kinase 7 (CDK-activating (CAK) (TFIIH basal transcription factor complex kinase subunit) kDa protein kinase) (P39 Mo15) (Protein-tyrosine kinase MPK-7)
  misc_feature (25)..(321): Homolog of NCBI NO: 33304107 NR Description: cyclin-dependent kinase 7 [synthetic construct]
  misc_feature (25)..(321): Homolog of NCBI NO: 4502743 NR Description: cyclin-dependent kinase 7
  misc_feature (25)..(321): Homolog of NCBI NO: 13529020 NR Description: cyclin-dependent kinase 7 (homolog of Xenopus
  misc_feature (24)..(361): Homolog of NCBI NO: 15220917 NR Description: cell division protein kinase, putative
  misc_feature (24)..(359): Homolog of NCBI NO: 15219522 NR Description: cell division protein kinase, putative
  misc_feature (17)..(359): Homolog of NCBI NO: 266410 NR Description: CDC2+/CDC28-related protein kinase R2
  misc_feature (24)..(359): Homolog of NCBI NO: 15419985 NR Description: CDK-activating kinase [Medicago sativa subsp. x
  misc_feature (14)..(361): Homolog of NCBI NO: 15219730 NR Description: cell division protein kinase, putative
LVLPRSVPENLNPMSKSGDNQPVDRYLRRQILGEGTYGVVYKATDTKTGKTVAVKKIRLGNQKEGVNFTALREIKLLKELNHPHIVELIDAFPHDGSLHLVFEYMQTDLEAVIRDRNIFLSPGDIKSYMLMTLKGLAYCHKKWVLHRDMKPNNLLIGENGLLKLADFGLARLFGSPNRRFTHQVFATWYRAPELLFGSRQYGAGVDVWAAGCIFAELLLRRPFLPGSTEIDQLGKIFQAFGTPVPSQWSDMIYLPDYMEFSYTPAPPLRTIFPMASDDALDLLAKMFIYDPRQRITIQQALDHRYFSSSPSPTEPGKLQIPASKGDALEPKASEQNQHGNSPAVLSPPGKMRRVMGPEGFT

SEQ ID NO: 40973 - protein, 348 aa, Arabidopsis thaliana
  peptide (1)..(348): Ceres Seq. ID no. 13489183
  misc_feature (13)..(293): Pfam Name: Protein kinase domain Pfam Description: Protein kinase domain
  misc_feature (12)..(308): Homolog of NCBI NO: 2125816 NR Description: serine/threonine protein kinase [Homo sapiens]
  misc_feature (12)..(320): Homolog of NCBI NO: 1705723 NR Description: Cell division protein kinase 7 (CDK-activating (CAK) (TFIIH basal transcription factor complex kinase subunit) kDa protein kinase) (P39 Mo15) (Protein-tyrosine kinase MPK-7)
  misc_feature (12)..(308): Homolog of NCBI NO: 33304107 NR Description: cyclin-dependent kinase 7 [synthetic construct]
  misc_feature (12)..(308): Homolog of NCBI NO: 4502743 NR Description: cyclin-dependent kinase 7
  misc_feature (12)..(308): Homolog of NCBI NO: 13529020 NR Description: cyclin-dependent kinase 7 (homolog of Xenopus
  misc_feature (11)..(348): Homolog of NCBI NO: 15220917 NR Description: cell division protein kinase, putative
  misc_feature (11)..(346): Homolog of NCBI NO: 15219522 NR Description: cell division protein kinase, putative
  misc_feature (4)..(346): Homolog of NCBI NO: 266410 NR Description: CDC2+/CDC28-related protein kinase R2
  misc_feature (11)..(346): Homolog of NCBI NO: 15419985 NR Description: CDK-activating kinase [Medicago sativa subsp. x
  misc_feature (1)..(348): Homolog of NCBI NO: 15219730 NR Description: cell division protein kinase, putative
MSKSGDNQPVDRYLRRQILGEGTYGVVYKATDTKTGKTVAVKKIRLGNQKEGVNFTALREIKLLKELNHPHIVELIDAFPHDGSLHLVFEYMQTDLEAVIRDRNIFLSPGDIKSYMLMTLKGLAYCHKKWVLHRDMKPNNLLIGENGLLKLADFGLARLFGSPNRRFTHQVFATWYRAPELLFGSRQYGAGVDVWAAGCIFAELLLRRPFLPGSTEIDQLGKIFQAFGTPVPSQWSDMIYLPDYMEFSYTPAPPLRTIFPMASDDALDLLAKMFIYDPRQRITIQQALDHRYFSSSPSPTEPGKLQIPASKGDALEPKASEQNQHGNSPAVLSPPGKMRRVMGPEGFT

SEQ ID NO: 40974 - protein, 257 aa, Arabidopsis thaliana
  peptide (1)..(257): Ceres Seq. ID no. 13489184
  misc_feature (1)..(202): Pfam Name: Protein kinase domain Pfam Description: Protein kinase domain
  misc_feature (1)..(217): Homolog of NCBI NO: 2125816 NR Description: serine/threonine protein kinase [Homo sapiens]
  misc_feature (1)..(229): Homolog of NCBI NO: 1705723 NR Description: Cell division protein kinase 7 (CDK-activating (CAK) (TFIIH basal transcription factor complex kinase subunit) kDa protein kinase) (P39 Mo15) (Protein-tyrosine kinase MPK-7)
  misc_feature (1)..(217): Homolog of NCBI NO: 33304107 NR Description: cyclin-dependent kinase 7 [synthetic construct]
  misc_feature (1)..(217): Homolog of NCBI NO: 4502743 NR Description: cyclin-dependent kinase 7
  misc_feature (1)..(217): Homolog of NCBI NO: 13529020 NR Description: cyclin-dependent kinase 7 (homolog of Xenopus
  misc_feature (1)..(257): Homolog of NCBI NO: 15220917 NR Description: cell division protein kinase, putative
  misc_feature (1)..(255): Homolog of NCBI NO: 15219522 NR Description: cell division protein kinase, putative
  misc_feature (1)..(255): Homolog of NCBI NO: 266410 NR Description: CDC2+/CDC28-related protein kinase R2
  misc_feature (1)..(255): Homolog of NCBI NO: 15419985 NR Description: CDK-activating kinase [Medicago sativa subsp. x
  misc_feature (1)..(257): Homolog of NCBI NO: 15219730 NR Description: cell division protein kinase, putative
MQTDLEAVIRDRNIFLSPGDIKSYMLMTLKGLAYCHKKWVLHRDMKPNNLLIGENGLLKLADFGLARLFGSPNRRFTHQVFATWYRAPELLFGSRQYGAGVDVWAAGCIFAELLLRRPFLPGSTEIDQLGKIFQAFGTPVPSQWSDMIYLPDYMEFSYTPAPPLRTIFPMASDDALDLLAKMFIYDPRQRITIQQALDHRYFSSSPSPTEPGKLQIPASKGDALEPKASEQNQHGNSPAVLSPPGKMRRVMGPEGFT

SEQ ID NO: 40975 - DNA, 1353 bp, Arabidopsis thaliana; identical to SEQ ID NO: 40492
  misc_feature (1)..(1353): Ceres Seq. ID no. 13494668
  misc_feature: MA Experiment ID: 108474 Result: Down-regulated in Transcription
  misc_feature: MA Experiment 108474 PARAMETER Experiment Name: At_Drought_Flowers_cDNA_P Parameter: Timepoint (hr) Value: null
  misc_feature: MA Experiment 108474 PARAMETER Experiment Name: At_Drought_Flowers_cDNA_P Parameter: Treatment Value: Drought vs. No Drought
  misc_feature: MA Experiment ID: 20000171 Result: Up-regulated in Transcription
  misc_feature: MA Experiment 20000171 PARAMETER Experiment Name: At_42deg_Heat_P Parameter: Age (day) Value: 14
  misc_feature: MA Experiment 20000171 PARAMETER Experiment Name: At_42deg_Heat_P Parameter: Organism Value: A. thaliana
  misc_feature: MA Experiment 20000171 PARAMETER Experiment Name: At_42deg_Heat_P Parameter: Plant Line Value: WS
  misc_feature: MA Experiment 20000171 PARAMETER Experiment Name: At_42deg_Heat_P Parameter: Temperature (deg C) Value: 42 vs. 22
  misc_feature: MA Experiment 20000171 PARAMETER Experiment Name: At_42deg_Heat_P Parameter: Timepoint (hr) Value: 1
  misc_feature: MA Experiment 20000171 PARAMETER Experiment Name: At_42deg_Heat_P Parameter: Tissue Value: Aerial
  misc_feature: MA Experiment ID: 20000173 Result: Up-regulated in Transcription
  misc_feature: MA Experiment 20000173 PARAMETER Experiment Name: At_42deg_Heat_P Parameter: Age (day) Value: 14
  misc_feature: MA Experiment 20000173 PARAMETER Experiment Name: At_42deg_Heat_P Parameter: Organism Value: A. thaliana
  misc_feature: MA Experiment 20000173 PARAMETER Experiment Name: At_42deg_Heat_P Parameter: Plant Line Value: WS
  misc_feature: MA Experiment 20000173 PARAMETER Experiment Name: At_42deg_Heat_P Parameter: Temperature (deg C) Value: 42 vs. 22
  misc_feature: MA Experiment 20000173 PARAMETER Experiment Name: At_42deg_Heat_P Parameter: Timepoint (hr) Value: 6
  misc_feature: MA Experiment 20000173 PARAMETER Experiment Name: At_42deg_Heat_P Parameter: Tissue Value: Aerial
  misc_feature: MA Experiment ID: 20000180 Result: Up-regulated in Transcription
  misc_feature: MA Experiment 20000180 PARAMETER Experiment Name: At_Germinating_Seeds_P Parameter: Age (hr) Value: 24 vs. 0
  misc_feature: MA Experiment 20000180 PARAMETER Experiment Name: At_Germinating_Seeds_P Parameter: Tissue Value: Germinating Seeds
  misc_feature: MA Experiment ID: 20000185 Result: Up-regulated in Transcription
  misc_feature: MA Experiment 20000185 PARAMETER Experiment Name: At_Roots__P Parameter: Age (day) Value: 7 vs. 21
  misc_feature: MA Experiment 20000185 PARAMETER Experiment Name: At_Roots__P Parameter: Organism Value: A. thaliana
  misc_feature: MA Experiment 20000185 PARAMETER Experiment Name: At_Roots__P Parameter: Tissue Value: Roots vs. Whole Plant
  misc_feature: MA Experiment ID: 20000227 Result: Down-regulated in Transcription
  misc_feature: MA Experiment 20000227 PARAMETER Experiment Name: At_Root-Tips-vs-Tops_P Parameter: Tissue Value: Root Tips vs. Root Tops
  misc_feature: MA Experiment ID: 20000265 Result: Up-regulated in Transcription
  misc_feature: MA Experiment 20000265 PARAMETER Experiment Name: At_Open_Flower_P Parameter: Age (day) Value: 21
  misc_feature: MA Experiment 20000265 PARAMETER Experiment Name: At_Open_Flower_P Parameter: Plant Line Value: WS
  misc_feature: MA Experiment 20000265 PARAMETER Experiment Name: At_Open_Flower_P Parameter: Tissue Value: Closed Flower vs. Whole Plant
  misc_feature: MA Experiment ID: 20000286 Result: Up-regulated in Transcription
  misc_feature: MA Experiment 20000286 PARAMETER Experiment Name: At_Open_Flower_P Parameter: Age (day) Value: 21
  misc_feature: MA Experiment 20000286 PARAMETER Experiment Name: At_Open_Flower_P Parameter: Plant Line Value: WS
  misc_feature: MA Experiment 20000286 PARAMETER Experiment Name: At_Open_Flower_P Parameter: Tissue Value: Half Open vs. Whole Plant
  misc_feature: MA Experiment ID: 20000439 Result: Up-regulated in Transcription
  misc_feature: MA Experiment 20000439 PARAMETER Experiment Name: At_Roots__P Parameter: Age (day) Value: 14 vs. 21
  misc_feature: MA Experiment 20000439 PARAMETER Experiment Name: At_Roots__P Parameter: Organism Value: A. thaliana
  misc_feature: MA Experiment 20000439 PARAMETER Experiment Name: At_Roots__P Parameter: Tissue Value: Roots vs. Whole Plant
  misc_feature: MA Experiment ID: 20000451 Result: Up-regulated in Transcription
  misc_feature: MA Experiment 20000451 PARAMETER Experiment Name: At_CS6879_Shoots-Roots_P Parameter: Age (day) Value: 14
  misc_feature: MA Experiment 20000451 PARAMETER Experiment Name: At_CS6879_Shoots-Roots_P Parameter: Organism Value: A. thaliana
  misc_feature: MA Experiment 20000451 PARAMETER Experiment Name: At_CS6879_Shoots-Roots_P Parameter: Plant Line Value: CS6879 vs. WS
  misc_feature: MA Experiment 20000451 PARAMETER Experiment Name: At_CS6879_Shoots-Roots_P Parameter: Tissue Value: Roots
  misc_feature: MA Experiment ID: 20001556 Result: Up-regulated in Transcription
  misc_feature: MA Experiment 20001556 PARAMETER Experiment Name: At_Drought_Soil_Dry_P Parameter: Age (day) Value: 26
  misc_feature: MA Experiment 20001556 PARAMETER Experiment Name: At_Drought_Soil_Dry_P Parameter: Organism Value: A. thaliana
  misc_feature: MA Experiment 20001556 PARAMETER Experiment Name: At_Drought_Soil_Dry_P Parameter: Plant Line Value: WS
  misc_feature: MA Experiment 20001556 PARAMETER Experiment Name: At_Drought_Soil_Dry_P Parameter: Post Timepoint (hr) Value: None
  misc_feature: MA Experiment 20001556 PARAMETER Experiment Name: At_Drought_Soil_Dry_P Parameter: Post-Treatment Value: None
  misc_feature: MA Experiment 20001556 PARAMETER Experiment Name: At_Drought_Soil_Dry_P Parameter: Timepoint (day) Value: 12
  misc_feature: MA Experiment 20001556 PARAMETER Experiment Name: At_Drought_Soil_Dry_P Parameter: Treatment Value: Drought vs. No Drought
  misc_feature: MA Experiment ID: 20001904 Result: Up-regulated in Transcription
  misc_feature: MA Experiment 20001904 PARAMETER Experiment Name: At_Drought_Reproduction_P Parameter: Age (day) Value: 37
  misc_feature: MA Experiment 20001904 PARAMETER Experiment Name: At_Drought_Reproduction_P Parameter: Organism Value: A. thaliana
  misc_feature: MA Experiment 20001904 PARAMETER Experiment Name: At_Drought_Reproduction_P Parameter: Plant Line Value: WS
  misc_feature: MA Experiment 20001904 PARAMETER Experiment Name: At_Drought_Reproduction_P Parameter: Timepoint (day) Value: 7
  misc_feature: MA Experiment 20001904 PARAMETER Experiment Name: At_Drought_Reproduction_P Parameter: Tissue Value: Rosettes
  misc_feature: MA Experiment 20001904 PARAMETER Experiment Name: At_Drought_Reproduction_P Parameter: Treatment Value: Drought vs. No Drought
  misc_feature: MA Experiment ID: 20001905 Result: Up-regulated in Transcription
  misc_feature: MA Experiment 20001905 PARAMETER Experiment Name: At_Drought_Reproduction_P Parameter: Age (day) Value: 40
  misc_feature: MA Experiment 20001905 PARAMETER Experiment Name: At_Drought_Reproduction_P Parameter: Organism Value: A. thaliana
  misc_feature: MA Experiment 20001905 PARAMETER Experiment Name: At_Drought_Reproduction_P Parameter: Plant Line Value: WS
  misc_feature: MA Experiment 20001905 PARAMETER Experiment Name: At_Drought_Reproduction_P Parameter: Timepoint (day) Value: 10
  misc_feature: MA Experiment 20001905 PARAMETER Experiment Name: At_Drought_Reproduction_P Parameter: Tissue Value: Rosettes
  misc_feature: MA Experiment 20001905 PARAMETER Experiment Name: At_Drought_Reproduction_P Parameter: Treatment Value: Drought vs. No Drought
  misc_feature: MA Experiment ID: 20001906 Result: Up-regulated in Transcription
  misc_feature: MA Experiment 20001906 PARAMETER Experiment Name: At_Drought_Reproduction_P Parameter: Age (day) Value: 35
  misc_feature: MA Experiment 20001906 PARAMETER Experiment Name: At_Drought_Reproduction_P Parameter: Organism Value: A. thaliana
  misc_feature: MA Experiment 20001906 PARAMETER Experiment Name: At_Drought_Reproduction_P Parameter: Plant Line Value: WS
  misc_feature: MA Experiment 20001906 PARAMETER Experiment Name: At_Drought_Reproduction_P Parameter: Timepoint (day) Value: 5
  misc_feature: MA Experiment 20001906 PARAMETER Experiment Name: At_Drought_Reproduction_P Parameter: Tissue Value: Siliques
  misc_feature: MA Experiment 20001906 PARAMETER Experiment Name: At_Drought_Reproduction_P Parameter: Treatment Value: Drought vs. No Drought

SEQ ID NO: 40976 - protein, 336 aa, Arabidopsis thaliana; identical to SEQ ID NO: 29064
  peptide (1)..(336): Ceres Seq. ID no. 13494669
  misc_feature (16)..(142): Pfam Name: No apical meristem (NAM) protein Pfam Description: No apical meristem (NAM) protein
  misc_feature (16)..(142): Pfam Name: No apical meristem (NAM) protein Pfam Description: No apical meristem (NAM) protein
  misc_feature (14)..(336): Homolog of NCBI NO: 30682054 NR Description: NAM (no apical meristem)-related protein
  misc_feature (1)..(336): Homolog of NCBI NO: 30682048 NR Description: NAM (no apical meristem)-related protein
  misc_feature (14)..(336): Homolog of NCBI NO: 30682054 NR Description: NAM (no apical meristem)-related protein
  misc_feature (14)..(336): Homolog of NCBI NO: 21537315 NR Description: NAM, no apical meristem,-like protein
  misc_feature (1)..(336): Homolog of NCBI NO: 15240252 NR Description: NAM, no apical meristem, - like protein
  misc_feature (1)..(336): Homolog of NCBI NO: 30682048 NR Description: NAM (no apical meristem)-related protein
  misc_feature (14)..(336): Homolog of NCBI NO: 21537315 NR Description: NAM, no apical meristem,-like protein
  misc_feature (1)..(336): Homolog of NCBI NO: 15240252 NR Description: NAM, no apical meristem, - like protein

SEQ ID NO: 40977 - protein, 323 aa, Arabidopsis thaliana; identical to SEQ ID NO: 29065
  peptide (1)..(323): Ceres Seq. ID no. 13494670
  misc_feature (3)..(129): Pfam Name: No apical meristem (NAM) protein Pfam Description: No apical meristem (NAM) protein
  misc_feature (3)..(129): Pfam Name: No apical meristem (NAM) protein Pfam Description: No apical meristem (NAM) protein
  misc_feature (1)..(323): Homolog of NCBI NO: 30682054 NR Description: NAM (no apical meristem)-related protein
  misc_feature (1)..(323): Homolog of NCBI NO: 30682048 NR Description: NAM (no apical meristem)-related protein
  misc_feature (1)..(323): Homolog of NCBI NO: 30682054 NR Description: NAM (no apical meristem)-related protein
  misc_feature (1)..(323): Homolog of NCBI NO: 21537315 NR Description: NAM, no apical meristem,-like protein
  misc_feature (1)..(323): Homolog of NCBI NO: 15240252 NR Description: NAM, no apical meristem, - like protein
  misc_feature (1)..(323): Homolog of NCBI NO: 30682048 NR Description: NAM (no apical meristem)-related protein
  misc_feature (1)..(323): Homolog of NCBI NO: 21537315 NR Description: NAM, no apical meristem,-like protein
  misc_feature (1)..(323): Homolog of NCBI NO: 15240252 NR Description: NAM, no apical meristem, - like protein

SEQ ID NO: 40978 - protein, 273 aa, Arabidopsis thaliana; identical to SEQ ID NO: 40495
  peptide (1)..(273): Ceres Seq. ID no. 13494671
  misc_feature (1)..(79): Pfam Name: No apical meristem (NAM) protein Pfam Description: No apical meristem (NAM) protein
  misc_feature (1)..(79): Pfam Name: No apical meristem (NAM) protein Pfam Description: No apical meristem (NAM) protein
  misc_feature (1)..(273): Homolog of NCBI NO: 30682054 NR Description: NAM (no apical meristem)-related protein
  misc_feature (1)..(273): Homolog of NCBI NO: 30682048 NR Description: NAM (no apical meristem)-related protein
  misc_feature (1)..(273): Homolog of NCBI NO: 30682054 NR Description: NAM (no apical meristem)-related protein
  misc_feature (1)..(273): Homolog of NCBI NO: 21537315 NR Description: NAM, no apical meristem,-like protein
  misc_feature (1)..(273): Homolog of NCBI NO: 15240252 NR Description: NAM, no apical meristem, - like protein
  misc_feature (1)..(273): Homolog of NCBI NO: 30682048 NR Description: NAM (no apical meristem)-related protein
  misc_feature (1)..(273): Homolog of NCBI NO: 21537315 NR Description: NAM, no apical meristem,-like protein
  misc_feature (1)..(273): Homolog of NCBI NO: 15240252 NR Description: NAM, no apical meristem, - like protein

SEQ ID NO: 40979 - DNA, 1464 bp, Arabidopsis thaliana
  misc_feature (1)..(1464): Ceres Seq. ID no. 12328322
  misc_feature: MA Experiment ID: 108435 Result: Up-regulated in Transcription
  misc_feature: MA Experiment 108435 PARAMETER Experiment Name: At_stm_Mutants_cDNA_P Parameter: Plant Line Value: wt Landsburg vs stm
  misc_feature: MA Experiment 108435 PARAMETER Experiment Name: At_stm_Mutants_cDNA_P Parameter: Tissue Value: Shoot Apical Meristem Region
  misc_feature: MA Experiment ID: 108462 Result: Down-regulated in Transcription
  misc_feature: MA Experiment 108462 PARAMETER Experiment Name: At_Germinating_Seeds_cDNA_P Parameter: Age (day) Value: 2 vs. 0
  misc_feature: MA Experiment 108462 PARAMETER Experiment Name: At_Germinating_Seeds_cDNA_P Parameter: Tissue Value: Germinating Seeds
  misc_feature: MA Experiment ID: 108463 Result: Down-regulated in Transcription
  misc_feature: MA Experiment 108463 PARAMETER Experiment Name: At_Germinating_Seeds_cDNA_P Parameter: Age (day) Value: 3 vs. 0
  misc_feature: MA Experiment 108463 PARAMETER Experiment Name: At_Germinating_Seeds_cDNA_P Parameter: Tissue Value: Germinating Seeds
  misc_feature: MA Experiment ID: 108464 Result: Down-regulated in Transcription
  misc_feature: MA Experiment 108464 PARAMETER Experiment Name: At_Germinating_Seeds_cDNA_P Parameter: Age (day) Value: 4 vs. 0
  misc_feature: MA Experiment 108464 PARAMETER Experiment Name: At_Germinating_Seeds_cDNA_P Parameter: Tissue Value: Germinating Seeds
  misc_feature: MA Experiment ID: 108501 Result: Up-regulated in Transcription
  misc_feature: MA Experiment 108501 PARAMETER Experiment Name: At_ap2_floral_buds_cDNA_P Parameter: Plant Line Value: ap2 (Ler.)
  misc_feature: MA Experiment 108501 PARAMETER Experiment Name: At_ap2_floral_buds_cDNA_P Parameter: Tissue Value: Closed Flower
  misc_feature: MA Experiment ID: 108561 Result: Down-regulated in Transcription
  misc_feature: MA Experiment 108561 PARAMETER Experiment Name: At_100uM_ABA_cDNA_P Parameter: Timepoint (hr) Value: 6
  misc_feature: MA Experiment 108561 PARAMETER Experiment Name: At_100uM_ABA_cDNA_P Parameter: Tissue Value: Aerial
  misc_feature: MA Experiment 108561 PARAMETER Experiment Name: At_100uM_ABA_cDNA_P Parameter: Treatment Value: 100uM ABA vs. No Treatment
  misc_feature: MA Experiment ID: 20000113 Result: Down-regulated in Transcription
  misc_feature: MA Experiment 20000113 PARAMETER Experiment Name: At_42deg_Heat_cDNA_P Parameter: Temperature (deg C) Value: 42 vs. 22
  misc_feature: MA Experiment 20000113 PARAMETER Experiment Name: At_42deg_Heat_cDNA_P Parameter: Timepoint (hr) Value: 8
  misc_feature: MA Experiment 20000113 PARAMETER Experiment Name: At_42deg_Heat_cDNA_P Parameter: Tissue Value: Aerial
  misc_feature: MA Experiment ID: 20000184 Result: Down-regulated in Transcription
  misc_feature: MA Experiment 20000184 PARAMETER Experiment Name: At_Shoots__P Parameter: Age (day) Value: 7
  misc_feature: MA Experiment 20000184 PARAMETER Experiment Name: At_Shoots__P Parameter: Tissue Value: Shoots vs. Whole Plant
  misc_feature: MA Experiment ID: 20000185 Result: Down-regulated in Transcription
  misc_feature: MA Experiment 20000185 PARAMETER Experiment Name: At_Roots__P Parameter: Age (day) Value: 7 vs. 21
  misc_feature: MA Experiment 20000185 PARAMETER Experiment Name: At_Roots__P Parameter: Organism Value: A. thaliana
  misc_feature: MA Experiment 20000185 PARAMETER Experiment Name: At_Roots__P Parameter: Tissue Value: Roots vs. Whole Plant
  misc_feature: MA Experiment ID: 20000234 Result: Up-regulated in Transcription
  misc_feature: MA Experiment 20000234 PARAMETER Experiment Name: At_Siliques_P Parameter: Age (day) Value: 21
  misc_feature: MA Experiment 20000234 PARAMETER Experiment Name: At_Siliques_P Parameter: Organism Value: A. thaliana
  misc_feature: MA Experiment 20000234 PARAMETER Experiment Name: At_Siliques_P Parameter: Plant Line Value: WS
  misc_feature: MA Experiment 20000234 PARAMETER Experiment Name: At_Siliques_P Parameter: Tissue Value: Less Than 5mm Siliques vs. Whole Plant
  misc_feature: MA Experiment ID: 20000235 Result: Up-regulated in Transcription
  misc_feature: MA Experiment 20000235 PARAMETER Experiment Name: At_Siliques_P Parameter: Age (day) Value: 21
  misc_feature: MA Experiment 20000235 PARAMETER Experiment Name: At_Siliques_P Parameter: Organism Value: A. thaliana
  misc_feature: MA Experiment 20000235 PARAMETER Experiment Name: At_Siliques_P Parameter: Plant Line Value: WS
  misc_feature: MA Experiment 20000235 PARAMETER Experiment Name: At_Siliques_P Parameter: Tissue Value: 5-10mm Siliques vs. Whole Plant
  misc_feature: MA Experiment ID: 20000264 Result: Up-regulated in Transcription
  misc_feature: MA Experiment 20000264 PARAMETER Experiment Name: At_Open_Flower_P Parameter: Age (day) Value: 21
  misc_feature: MA Experiment 20000264 PARAMETER Experiment Name: At_Open_Flower_P Parameter: Plant Line Value: WS
  misc_feature: MA Experiment 20000264 PARAMETER Experiment Name: At_Open_Flower_P Parameter: Tissue Value: Open Flower vs. Whole Plant
  misc_feature: MA Experiment ID: 20000265 Result: Up-regulated in Transcription
  misc_feature: MA Experiment 20000265 PARAMETER Experiment Name: At_Open_Flower_P Parameter: Age (day) Value: 21
  misc_feature: MA Experiment 20000265 PARAMETER Experiment Name: At_Open_Flower_P Parameter: Plant Line Value: WS
  misc_feature: MA Experiment 20000265 PARAMETER Experiment Name: At_Open_Flower_P Parameter: Tissue Value: Closed Flower vs. Whole Plant
  misc_feature: MA Experiment ID: 20000286 Result: Up-regulated in Transcription
  misc_feature: MA Experiment 20000286 PARAMETER Experiment Name: At_Open_Flower_P Parameter: Age (day) Value: 21
  misc_feature: MA Experiment 20000286 PARAMETER Experiment Name: At_Open_Flower_P Parameter: Plant Line Value: WS
  misc_feature: MA Experiment 20000286 PARAMETER Experiment Name: At_Open_Flower_P Parameter: Tissue Value: Half Open vs. Whole Plant
  misc_feature: MA Experiment ID: 20000438 Result: Down-regulated in Transcription
  misc_feature: MA Experiment 20000438 PARAMETER Experiment Name: At_Shoots__P Parameter: Age (day) Value: 14
  misc_feature: MA Experiment 20000438 PARAMETER Experiment Name: At_Shoots__P Parameter: Tissue Value: Shoots vs. Whole Plant
  misc_feature: MA Experiment ID: 20000439 Result: Down-regulated in Transcription
  misc_feature: MA Experiment 20000439 PARAMETER Experiment Name: At_Roots__P Parameter: Age (day) Value: 14 vs. 21
  misc_feature: MA Experiment 20000439 PARAMETER Experiment Name: At_Roots__P Parameter: Organism Value: A. thaliana
  misc_feature: MA Experiment 20000439 PARAMETER Experiment Name: At_Roots__P Parameter: Tissue Value: Roots vs. Whole Plant
  misc_feature: MA Experiment ID: 20000495 Result: Up-regulated in Transcription
  misc_feature: MA Experiment 20000495 PARAMETER Experiment Name: At_Guard_Cells_P Parameter: Harvest Date Value: 8/2/2002
  misc_feature: MA Experiment 20000495 PARAMETER Experiment Name: At_Guard_Cells_P Parameter: Organism Value: A. thaliana
  misc_feature: MA Experiment 20000495 PARAMETER Experiment Name: At_Guard_Cells_P Parameter: Tissue Value: Guard Cells vs. Leaves
  misc_feature: MA Experiment ID: 20000573 Result: Up-regulated in Transcription
  misc_feature: MA Experiment 20000573 PARAMETER Experiment Name: At_100uM_ABA_Mutants__P Parameter: Organism Value: A. thaliana
  misc_feature: MA Experiment 20000573 PARAMETER Experiment Name: At_100uM_ABA_Mutants__P Parameter: Plant Line Value: CS22 vs. Ler wt
  misc_feature: MA Experiment 20000573 PARAMETER Experiment Name: At_100uM_ABA_Mutants__P Parameter: Timepoint (hr) Value: N/A
  misc_feature: MA Experiment 20000573 PARAMETER Experiment Name: At_100uM_ABA_Mutants__P Parameter: Tissue Value: Whole Plant
  misc_feature: MA Experiment 20000573 PARAMETER Experiment Name: At_100uM_ABA_Mutants__P Parameter: Treatment Value: None
  misc_feature: MA Experiment ID: 20001557 Result: Up-regulated in Transcription
  misc_feature: MA Experiment 20001557 PARAMETER Experiment Name: At_Drought_Soil_Dry_P Parameter: Age (day) Value: 27
  misc_feature: MA Experiment 20001557 PARAMETER Experiment Name: At_Drought_Soil_Dry_P Parameter: Organism Value: A. thaliana
  misc_feature: MA Experiment 20001557 PARAMETER Experiment Name: At_Drought_Soil_Dry_P Parameter: Plant Line Value: WS
  misc_feature: MA Experiment 20001557 PARAMETER Experiment Name: At_Drought_Soil_Dry_P Parameter: Post Timepoint (hr) Value: 3
  misc_feature: MA Experiment 20001557 PARAMETER Experiment Name: At_Drought_Soil_Dry_P Parameter: Post-Treatment Value: Re-Water vs. No Drought
  misc_feature: MA Experiment 20001557 PARAMETER Experiment Name: At_Drought_Soil_Dry_P Parameter: Timepoint (day) Value: 13
  misc_feature: MA Experiment 20001557 PARAMETER Experiment Name: At_Drought_Soil_Dry_P Parameter: Treatment Value: Drought vs. No Drought
  misc_feature: MA Experiment ID: 20001560 Result: Up-regulated in Transcription
  misc_feature: MA Experiment 20001560 PARAMETER Experiment Name: At_Drought_Soil_Dry_P Parameter: Age (day) Value: 28
  misc_feature: MA Experiment 20001560 PARAMETER Experiment Name: At_Drought_Soil_Dry_P Parameter: Organism Value: A. thaliana
  misc_feature: MA Experiment 20001560 PARAMETER Experiment Name: At_Drought_Soil_Dry_P Parameter: Plant Line Value: WS
  misc_feature: MA Experiment 20001560 PARAMETER Experiment Name: At_Drought_Soil_Dry_P Parameter: Post Timepoint (hr) Value: None
  misc_feature: MA Experiment 20001560 PARAMETER Experiment Name: At_Drought_Soil_Dry_P Parameter: Post-Treatment Value: None
  misc_feature: MA Experiment 20001560 PARAMETER Experiment Name: At_Drought_Soil_Dry_P Parameter: Timepoint (day) Value: 14
  misc_feature: MA Experiment 20001560 PARAMETER Experiment Name: At_Drought_Soil_Dry_P Parameter: Treatment Value: Drought vs. No Drought
  misc_feature: MA Experiment ID: 20001906 Result: Down-regulated in Transcription
  misc_feature: MA Experiment 20001906 PARAMETER Experiment Name: At_Drought_Reproduction_P Parameter: Age (day) Value: 35
  misc_feature: MA Experiment 20001906 PARAMETER Experiment Name: At_Drought_Reproduction_P Parameter: Organism Value: A. thaliana
  misc_feature: MA Experiment 20001906 PARAMETER Experiment Name: At_Drought_Reproduction_P Parameter: Plant Line Value: WS
  misc_feature: MA Experiment 20001906 PARAMETER Experiment Name: At_Drought_Reproduction_P Parameter: Timepoint (day) Value: 5
  misc_feature: MA Experiment 20001906 PARAMETER Experiment Name: At_Drought_Reproduction_P Parameter: Tissue Value: Siliques
  misc_feature: MA Experiment 20001906 PARAMETER Experiment Name: At_Drought_Reproduction_P Parameter: Treatment Value: Drought vs. No Drought
  misc_feature: MA Experiment ID: 20001911 Result: Down-regulated in Transcription
  misc_feature: MA Experiment 20001911 PARAMETER Experiment Name: At_Drought_Reproduction_P Parameter: Age (day) Value: 40
  misc_feature: MA Experiment 20001911 PARAMETER Experiment Name: At_Drought_Reproduction_P Parameter: Organism Value: A. thaliana
  misc_feature: MA Experiment 20001911 PARAMETER Experiment Name: At_Drought_Reproduction_P Parameter: Plant Line Value: WS
  misc_feature: MA Experiment 20001911 PARAMETER Experiment Name: At_Drought_Reproduction_P Parameter: Timepoint (day) Value: 10
  misc_feature: MA Experiment 20001911 PARAMETER Experiment Name: At_Drought_Reproduction_P Parameter: Tissue Value: Flowers
  misc_feature: MA Experiment 20001911 PARAMETER Experiment Name: At_Drought_Reproduction_P Parameter: Treatment Value: Drought vs. No Drought
accttcttctatctaaaggaagtctttactcagagaaccaaaagaaaaataaagagaaaagaacccaaaaaaaaaaagccattgtaaattcagaataaatggaagaacatctaaatccattagcagtgactcatcttcttcaacacacactaagaagcttatgcatccatgagaactctcaatgggtttatgctgttttctggaggatcttgcctagaaactatcctcctcccaaatgggatggtcaaggagcttatgatagatcaagagggaacaggagaaactggatcttggtttgggaagatggtttttgcaactttgcagcttctgccgcggaaatgagctccggagaaggtagtggtggcggtggtggctcagcggcttatggaaatagtgattttcaacaataccaagggcttcagcctgaattgttcttcaagatgtctcatgaaatctacaattatggagaagggttgataggaaaagtagctgcagatcacagtcacaagtggatttataaagaacctaatgaccaagagattaacttcttatctgcttggcataattccgctgactcataccctaggacatgggaagctcagtttcagtctggtatcaaaaccattgccttgatttctgttcgagaaggtgttgtccagttaggagctgttcacaaggtgatagaggatttaagctatgttgtgatgctaagaaaaaagctgagctatatagagagcatccctggagtacttcttcctcacccttcttcttctggttaccctttcatcaacgcttctccttctgacacgtggcatttcccgggagtcgctcctccgcatcagcagcctgagcaccagttttatcattctgaccacaaccaccgctttttgataggccaccacaaccagccacaagctgtaggaggggctgcaccgcctctaccgctttcgatgaagataacaccgtcaatgagcagcctcgaggcgcttctctcgaagctcccgtcggttgtacctccggcgacacaaccagggtactacccgtttcaccacagtgctaaagaggaaatgagtcaagaagaacaaaacgatgcgtttagggttgaacgtaatgatttggtgggtgagggtagtaataatcataatcataataataattacaatagtaataatgatatttataactatagcaataattgcagcaacaataattacgatagagagaataagatcggtgggtttcttagtgaggattattgatgagtctagtaaaatatctctcttttttttgtcgtacaataagtataaattgtactaagaattttcgtagtctgacatttgtaattcttagattttatttttctactggttggcaaatttaatataaatgattttattttaatatttgcattgtagcagtgtatatgtcttgtttctgacatagtgacatagtagtacgttgttt

SEQ ID NO: 40980 - protein, 386 aa, Arabidopsis thaliana
  peptide (1)..(386): Ceres Seq. ID no. 12328323
  misc_feature (114)..(251): Homolog of NCBI NO: 25406897 NR Description: hypothetical protein [imported] - Arabidopsis
  misc_feature (114)..(205): Homolog of NCBI NO: 29649495 NR Description: hypothetical protein [Arabidopsis thaliana]
  misc_feature (114)..(205): Homolog of NCBI NO: 30684893 NR Description: expressed protein [Arabidopsis thaliana]
  misc_feature (114)..(205): Homolog of NCBI NO: 22651858 NR Description: hypothetical protein [Arabidopsis thaliana]
  misc_feature (127)..(260): Homolog of NCBI NO: 30696393 NR Description: expressed protein [Arabidopsis thaliana]
  misc_feature (115)..(250): Homolog of NCBI NO: 15232532 NR Description: unknown protein; protein id: At3g15240.1
  misc_feature (112)..(250): Homolog of NCBI NO: 38454108 NR Description: At3g15240 [Arabidopsis thaliana]
  misc_feature (64)..(260): Homolog of NCBI NO: 30696395 NR Description: expressed protein [Arabidopsis thaliana]
  misc_feature (1)..(386): Homolog of NCBI NO: 18406603 NR Description: expressed protein
MEEHLNPLAVTHLLQHTLRSLCIHENSQWVYAVFWRILPRNYPPPKWDGQGAYDRSRGNRRNWILVWEDGFCNFAASAAEMSSGEGSGGGGGSAAYGNSDFQQYQGLQPELFFKMSHEIYNYGEGLIGKVAADHSHKWIYKEPNDQEINFLSAWHNSADSYPRTWEAQFQSGIKTIALISVREGVVQLGAVHKVIEDLSYVVMLRKKLSYIESIPGVLLPHPSSSGYPFINASPSDTWHFPGVAPPHQQPEHQFYHSDHNHRFLIGHHNQPQAVGGAAPPLPLSMKITPSMSSLEALLSKLPSVVPPATQPGYYPFHHSAKEEMSQEEQNDAFRVERNDLVGEGSNNHNHNNNYNSNNDIYNYSNNCSNNNYDRENKIGGFLSEDY

SEQ ID NO: 40981 - protein, 306 aa, Arabidopsis thaliana
  peptide (1)..(306): Ceres Seq. ID no. 12328324
  misc_feature (34)..(171): Homolog of NCBI NO: 25406897 NR Description: hypothetical protein [imported] - Arabidopsis
  misc_feature (34)..(125): Homolog of NCBI NO: 30684893 NR Description: expressed protein [Arabidopsis thaliana]
  misc_feature (34)..(125): Homolog of NCBI NO: 29649495 NR Description: hypothetical protein [Arabidopsis thaliana]
  misc_feature (34)..(125): Homolog of NCBI NO: 22651858 NR Description: hypothetical protein [Arabidopsis thaliana]
  misc_feature (47)..(180): Homolog of NCBI NO: 30696393 NR Description: expressed protein [Arabidopsis thaliana]
  misc_feature (35)..(170): Homolog of NCBI NO: 15232532 NR Description: unknown protein; protein id: At3g15240.1
  misc_feature (32)..(170): Homolog of NCBI NO: 38454108 NR Description: At3g15240 [Arabidopsis thaliana]
  misc_feature (1)..(180): Homolog of NCBI NO: 30696395 NR Description: expressed protein [Arabidopsis thaliana]
  misc_feature (1)..(306): Homolog of NCBI NO: 18406603 NR Description: expressed protein
MSSGEGSGGGGGSAAYGNSDFQQYQGLQPELFFKMSHEIYNYGEGLIGKVAADHSHKWIYKEPNDQEINFLSAWHNSADSYPRTWEAQFQSGIKTIALISVREGVVQLGAVHKVIEDLSYVVMLRKKLSYIESIPGVLLPHPSSSGYPFINASPSDTWHFPGVAPPHQQPEHQFYHSDHNHRFLIGHHNQPQAVGGAAPPLPLSMKITPSMSSLEALLSKLPSVVPPATQPGYYPFHHSAKEEMSQEEQNDAFRVERNDLVGEGSNNHNHNNNYNSNNDIYNYSNNCSNNNYDRENKIGGFLSEDY

SEQ ID NO: 40982 - protein, 272 aa, Arabidopsis thaliana
  peptide (1)..(272): Ceres Seq. ID no. 12328325
  misc_feature (1)..(137): Homolog of NCBI NO: 25406897 NR Description: hypothetical protein [imported] - Arabidopsis
  misc_feature (1)..(91): Homolog of NCBI NO: 30684893 NR Description: expressed protein [Arabidopsis thaliana]
  misc_feature (1)..(91): Homolog of NCBI NO: 29649495 NR Description: hypothetical protein [Arabidopsis thaliana]
  misc_feature (1)..(91): Homolog of NCBI NO: 22651858 NR Description: hypothetical protein [Arabidopsis thaliana]
  misc_feature (13)..(146): Homolog of NCBI NO: 30696393 NR Description: expressed protein [Arabidopsis thaliana]
  misc_feature (1)..(136): Homolog of NCBI NO: 15232532 NR Description: unknown protein; protein id: At3g15240.1
  misc_feature (1)..(136): Homolog of NCBI NO: 38454108 NR Description: At3g15240 [Arabidopsis thaliana]
  misc_feature (1)..(146): Homolog of NCBI NO: 30696395 NR Description: expressed protein [Arabidopsis thaliana]
  misc_feature (1)..(272): Homolog of NCBI NO: 18406603 NR Description: expressed protein
MSHEIYNYGEGLIGKVAADHSHKWIYKEPNDQEINFLSAWHNSADSYPRTWEAQFQSGIKTIALISVREGVVQLGAVHKVIEDLSYVVMLRKKLSYIESIPGVLLPHPSSSGYPFINASPSDTWHFPGVAPPHQQPEHQFYHSDHNHRFLIGHHNQPQAVGGAAPPLPLSMKITPSMSSLEALLSKLPSVVPPATQPGYYPFHHSAKEEMSQEEQNDAFRVERNDLVGEGSNNHNHNNNYNSNNDIYNYSNNCSNNNYDRENKIGGFLSEDY

SEQ ID NO: 40983 - DNA, 1512 bp, Arabidopsis thaliana
  misc_feature (1)..(1512): Ceres Seq. ID no. 13575090
  misc_feature: MA Experiment ID: 20000171 Result: Down-regulated in Transcription
  misc_feature: MA Experiment 20000171 PARAMETER Experiment Name: At_42deg_Heat_P Parameter: Age (day) Value: 14
  misc_feature: MA Experiment 20000171 PARAMETER Experiment Name: At_42deg_Heat_P Parameter: Organism Value: A. thaliana
  misc_feature: MA Experiment 20000171 PARAMETER Experiment Name: At_42deg_Heat_P Parameter: Plant Line Value: WS
  misc_feature: MA Experiment 20000171 PARAMETER Experiment Name: At_42deg_Heat_P Parameter: Temperature (deg C) Value: 42 vs. 22
  misc_feature: MA Experiment 20000171 PARAMETER Experiment Name: At_42deg_Heat_P Parameter: Timepoint (hr) Value: 1
  misc_feature: MA Experiment 20000171 PARAMETER Experiment Name: At_42deg_Heat_P Parameter: Tissue Value: Aerial
  misc_feature: MA Experiment ID: 20000173 Result: Down-regulated in Transcription
  misc_feature: MA Experiment 20000173 PARAMETER Experiment Name: At_42deg_Heat_P Parameter: Age (day) Value: 14
  misc_feature: MA Experiment 20000173 PARAMETER Experiment Name: At_42deg_Heat_P Parameter: Organism Value: A. thaliana
  misc_feature: MA Experiment 20000173 PARAMETER Experiment Name: At_42deg_Heat_P Parameter: Plant Line Value: WS
  misc_feature: MA Experiment 20000173 PARAMETER Experiment Name: At_42deg_Heat_P Parameter: Temperature (deg C) Value: 42 vs. 22
  misc_feature: MA Experiment 20000173 PARAMETER Experiment Name: At_42deg_Heat_P Parameter: Timepoint (hr) Value: 6
  misc_feature: MA Experiment 20000173 PARAMETER Experiment Name: At_42deg_Heat_P Parameter: Tissue Value: Aerial
  misc_feature: MA Experiment ID: 20000184 Result: Up-regulated in Transcription
  misc_feature: MA Experiment 20000184 PARAMETER Experiment Name: At_Shoots__P Parameter: Age (day) Value: 7
  misc_feature: MA Experiment 20000184 PARAMETER Experiment Name: At_Shoots__P Parameter: Tissue Value: Shoots vs. Whole Plant
  misc_feature: MA Experiment ID: 20000211 Result: Up-regulated in Transcription
  misc_feature: MA Experiment 20000211 PARAMETER Experiment Name: At_0.001percent_MeJA__P Parameter: Age (day) Value: 14
  misc_feature: MA Experiment 20000211 PARAMETER Experiment Name: At_0.001percent_MeJA__P Parameter: Organism Value: A. thaliana
  misc_feature: MA Experiment 20000211 PARAMETER Experiment Name: At_0.001percent_MeJA__P Parameter: Plant Line Value: WS
  misc_feature: MA Experiment 20000211 PARAMETER Experiment Name: At_0.001percent_MeJA__P Parameter: Timepoint (hr) Value: 1
  misc_feature: MA Experiment 20000211 PARAMETER Experiment Name: At_0.001percent_MeJA__P Parameter: Tissue Value: Aerial
  misc_feature: MA Experiment 20000211 PARAMETER Experiment Name: At_0.001percent_MeJA__P Parameter: Treatment Value: 0.001percent MeJA vs. No Treatment
  misc_feature: MA Experiment ID: 20000234 Result: Up-regulated in Transcription
  misc_feature: MA Experiment 20000234 PARAMETER Experiment Name: At_Siliques_P Parameter: Age (day) Value: 21
  misc_feature: MA Experiment 20000234 PARAMETER Experiment Name: At_Siliques_P Parameter: Organism Value: A. thaliana
  misc_feature: MA Experiment 20000234 PARAMETER Experiment Name: At_Siliques_P Parameter: Plant Line Value: WS
  misc_feature: MA Experiment 20000234 PARAMETER Experiment Name: At_Siliques_P Parameter: Tissue Value: Less Than 5mm Siliques vs. Whole Plant
  misc_feature: MA Experiment ID: 20000286 Result: Up-regulated in Transcription
  misc_feature: MA Experiment 20000286 PARAMETER Experiment Name: At_Open_Flower_P Parameter: Age (day) Value: 21
  misc_feature: MA Experiment 20000286 PARAMETER Experiment Name: At_Open_Flower_P Parameter: Plant Line Value: WS
  misc_feature: MA Experiment 20000286 PARAMETER Experiment Name: At_Open_Flower_P Parameter: Tissue Value: Half Open vs. Whole Plant
  misc_feature: MA Experiment ID: 20000437 Result: Down-regulated in Transcription
  misc_feature: MA Experiment 20000437 PARAMETER Experiment Name: At_Drought_P Parameter: Age (day) Value: 8
  misc_feature: MA Experiment 20000437 PARAMETER Experiment Name: At_Drought_P Parameter: Organism Value: A. thaliana
  misc_feature: MA Experiment 20000437 PARAMETER Experiment Name: At_Drought_P Parameter: Plant Line Value: WS
  misc_feature: MA Experiment 20000437 PARAMETER Experiment Name: At_Drought_P Parameter: Timepoint (hr) Value: 24
  misc_feature: MA Experiment 20000437 PARAMETER Experiment Name: At_Drought_P Parameter: Tissue Value: Whole Plant
  misc_feature: MA Experiment 20000437 PARAMETER Experiment Name: At_Drought_P Parameter: Treatment Value: Drought vs. No Drought
  misc_feature: MA Experiment ID: 20000438 Result: Up-regulated in Transcription
  misc_feature: MA Experiment 20000438 PARAMETER Experiment Name: At_Shoots__P Parameter: Age (day) Value: 14
  misc_feature: MA Experiment 20000438 PARAMETER Experiment Name: At_Shoots__P Parameter: Tissue Value: Shoots vs. Whole Plant
  misc_feature: MA Experiment ID: 20000495 Result: Down-regulated in Transcription
  misc_feature: MA Experiment 20000495 PARAMETER Experiment Name: At_Guard_Cells_P Parameter: Harvest Date Value: 8/2/2002
  misc_feature: MA Experiment 20000495 PARAMETER Experiment Name: At_Guard_Cells_P Parameter: Organism Value: A. thaliana
  misc_feature: MA Experiment 20000495 PARAMETER Experiment Name: At_Guard_Cells_P Parameter: Tissue Value: Guard Cells vs. Leaves
  misc_feature: MA Experiment ID: 20000573 Result: Down-regulated in Transcription
  misc_feature: MA Experiment 20000573 PARAMETER Experiment Name: At_100uM_ABA_Mutants__P Parameter: Organism Value: A. thaliana
  misc_feature: MA Experiment 20000573 PARAMETER Experiment Name: At_100uM_ABA_Mutants__P Parameter: Plant Line Value: CS22 vs. Ler wt
  misc_feature: MA Experiment 20000573 PARAMETER Experiment Name: At_100uM_ABA_Mutants__P Parameter: Timepoint (hr) Value: N/A
  misc_feature: MA Experiment 20000573 PARAMETER Experiment Name: At_100uM_ABA_Mutants__P Parameter: Tissue Value: Whole Plant
  misc_feature: MA Experiment 20000573 PARAMETER Experiment Name: At_100uM_ABA_Mutants__P Parameter: Treatment Value: None
  misc_feature: MA Experiment ID: 20001248 Result: Down-regulated in Transcription
  misc_feature: MA Experiment 20001248 PARAMETER Experiment Name: At_Far-red-induction_P Parameter: Age (day) Value: 7
  misc_feature: MA Experiment 20001248 PARAMETER Experiment Name: At_Far-red-induction_P Parameter: Light Value: Far-red vs. White
  misc_feature: MA Experiment 20001248 PARAMETER Experiment Name: At_Far-red-induction_P Parameter: Organism Value: A. thaliana
  misc_feature: MA Experiment 20001248 PARAMETER Experiment Name: At_Far-red-induction_P Parameter: Plant Line Value: Columbia
  misc_feature: MA Experiment 20001248 PARAMETER Experiment Name: At_Far-red-induction_P Parameter: Timepoint (hr) Value: 4
  misc_feature: MA Experiment 20001248 PARAMETER Experiment Name: At_Far-red-induction_P Parameter: Tissue Value: Whole Plant
  misc_feature: MA Experiment ID: 20001451 Result: Down-regulated in Transcription
  misc_feature: MA Experiment 20001451 PARAMETER Experiment Name: At_Far-red-induction_P Parameter: Age (day) Value: 7
  misc_feature: MA Experiment 20001451 PARAMETER Experiment Name: At_Far-red-induction_P Parameter: Light Value: Far-red vs. White
  misc_feature: MA Experiment 20001451 PARAMETER Experiment Name: At_Far-red-induction_P Parameter: Organism Value: A. thaliana
  misc_feature: MA Experiment 20001451 PARAMETER Experiment Name: At_Far-red-induction_P Parameter: Plant Line Value: Columbia
  misc_feature: MA Experiment 20001451 PARAMETER Experiment Name: At_Far-red-induction_P Parameter: Timepoint (hr) Value: 24
  misc_feature: MA Experiment 20001451 PARAMETER Experiment Name: At_Far-red-induction_P Parameter: Tissue Value: Whole Plant
  misc_feature: MA Experiment ID: 20001558 Result: Up-regulated in Transcription
  misc_feature: MA Experiment 20001558 PARAMETER Experiment Name: At_Drought_Soil_Dry_P Parameter: Age (day) Value: 27
  misc_feature: MA Experiment 20001558 PARAMETER Experiment Name: At_Drought_Soil_Dry_P Parameter: Organism Value: A. thaliana
  misc_feature: MA Experiment 20001558 PARAMETER Experiment Name: At_Drought_Soil_Dry_P Parameter: Plant Line Value: WS
  misc_feature: MA Experiment 20001558 PARAMETER Experiment Name: At_Drought_Soil_Dry_P Parameter: Post Timepoint (hr) Value: 6
  misc_feature: MA Experiment 20001558 PARAMETER Experiment Name: At_Drought_Soil_Dry_P Parameter: Post-Treatment Value: Re-Water vs. No Drought
  misc_feature: MA Experiment 20001558 PARAMETER Experiment Name: At_Drought_Soil_Dry_P Parameter: Timepoint (day) Value: 13
  misc_feature: MA Experiment 20001558 PARAMETER Experiment Name: At_Drought_Soil_Dry_P Parameter: Treatment Value: Drought vs. No Drought
aaccacacttttgttaacaaacctcattaatccaacaaaagtttcaacattccccaagaagaaaagacagcaactttaatcaaagcttctcgagtttgttgagtatcaaaaagcaaaacaagaatcatgaagaagaaaggcaccaacaacaacaactttagccttctgtctttgtctctgttcctgaattgtttgattctaacaaacggatacagcattggagtcggagttggaatcggcggtggagacggtgacgacggcggagtttggataggtggaggaaaccctaattccaatcctggctcagctccaaaccaacaacagacaacaaatgcagcttacaatgctcttcaatcttggaaatccgccattacagaggatccatctggtgttcttaaaacatgggttggtgaagatgtttgttcttacagaggcgtgttctgttctggctcatctataacctccatagatctaaacaaagcaaatctcaaaggcaccattgttaaagacctctctttactctcagacctaaccattcttcatctcaacagtaacagattctctggtcaaatcccagattctttcaagaatcttgattctcttcaagaactcgatctcagcaacaacagattctccggttctttccctcaagtcacactctacatcccaaatctggtttacctcgatctccggttcaacaatttcactggctctataccggaaaatctcttcaacaaacaattagacgcgattctcctcaacaacaatcaattcaccggagaaatccctgggaatctcggttactctacagcttcggtgattaatctcgctaacaacaaattatccggcgaaatcccgacgagtttcggtatcaccggttcgaaattgaaagaggttttgttcttgaataaccagttaaccggttgtataccggaatcagttggtttattctccgacattgaagtgtttgatgttagtttcaattcattgatgggtcatgtccctgacacgatctcttgcttatcggagattgaagttttgaatctcggacacaacaaattctccggtgatcttcctgatttggtctgtactttgaggaatctgataaatctgacggtttctttcaacttcttctctgggtttagctctcagtgctcgagccttagcgttgggtttgatttcaccggaaattgtattcccggtaagggttatcaacggcctcagccggattgttcggcgattcctggtggccaattgagctgttttagaattccggcgcagccgttaacgtgtgctgcgattagcttggggttgaaggtggcttcatctccatgaaaacataaaaagttcgaagcttttgtattggttatgcaattgtgacttgatagaagaaaatggtttttatcagttacattattaatcaaaatgatttatattagtagataaaacttatttctgattttgaaacctttgtaatctgatctttctaaaaaaaaagaaaagttgggatct

SEQ ID NO: 40984 - protein, 402 aa, Arabidopsis thaliana
  peptide (1)..(402): Ceres Seq. ID no. 13575091
  misc_feature (301)..(324): Pfam Name: Leucine Rich Repeat Pfam Description: Leucine Rich Repeat
  misc_feature (63)..(402): Homolog of NCBI NO: 15235279 NR Description: leucine rich repeat protein family [Arabidopsis
  misc_feature (51)..(387): Homolog of NCBI NO: 15233976 NR Description: leucine-rich repeat extensin family [Arabidopsis
  misc_feature (41)..(369): Homolog of NCBI NO: 34912294 NR Description: putative extensin-like protein
  misc_feature (71)..(386): Homolog of NCBI NO: 15228861 NR Description: leucine-rich repeat extensin family [Arabidopsis
  misc_feature (71)..(402): Homolog of NCBI NO: 15235668 NR Description: leucine-rich repeat extensin family [Arabidopsis
  misc_feature (40)..(379): Homolog of NCBI NO: 15220780 NR Description: leucine-rich repeat extensin family [Arabidopsis
  misc_feature (11)..(379): Homolog of NCBI NO: 7484956 NR Description: extensin homolog F24O1.18 - Arabidopsis thaliana
  misc_feature (51)..(386): Homolog of NCBI NO: 15230120 NR Description: leucine-rich repeat extensin family [Arabidopsis
  misc_feature (1)..(401): Homolog of NCBI NO: 15233499 NR Description: extensin-related protein [Arabidopsis thaliana]
  misc_feature (1)..(402): Homolog of NCBI NO: 15224840 NR Description: leucine rich repeat protein family [Arabidopsis
MKKKGTNNNNFSLLSLSLFLNCLILTNGYSIGVGVGIGGGDGDDGGVWIGGGNPNSNPGSAPNQQQTTNAAYNALQSWKSAITEDPSGVLKTWVGEDVCSYRGVFCSGSSITSIDLNKANLKGTIVKDLSLLSDLTILHLNSNRFSGQIPDSFKNLDSLQELDLSNNRFSGSFPQVTLYIPNLVYLDLRFNNFTGSIPENLFNKQLDAILLNNNQFTGEIPGNLGYSTASVINLANNKLSGEIPTSFGITGSKLKEVLFLNNQLTGCIPESVGLFSDIEVFDVSFNSLMGHVPDTISCLSEIEVLNLGHNKFSGDLPDLVCTLRNLINLTVSFNFFSGFSSQCSSLSVGFDFTGNCIPGKGYQRPQPDCSAIPGGQLSCFRIPAQPLTCAAISLGLKVASSP

SEQ ID NO: 40985 - DNA, 1103 bp, Arabidopsis thaliana
  misc_feature (1)..(1103): Ceres Seq. ID no. 13489505
  misc_feature: MA Experiment ID: 108462 Result: Up-regulated in Transcription
  misc_feature: MA Experiment 108462 PARAMETER Experiment Name: At_Germinating_Seeds_cDNA_P Parameter: Age (day) Value: 2 vs. 0
  misc_feature: MA Experiment 108462 PARAMETER Experiment Name: At_Germinating_Seeds_cDNA_P Parameter: Tissue Value: Germinating Seeds
  misc_feature: MA Experiment ID: 108463 Result: Up-regulated in Transcription
  misc_feature: MA Experiment 108463 PARAMETER Experiment Name: At_Germinating_Seeds_cDNA_P Parameter: Age (day) Value: 3 vs. 0
  misc_feature: MA Experiment 108463 PARAMETER Experiment Name: At_Germinating_Seeds_cDNA_P Parameter: Tissue Value: Germinating Seeds
  misc_feature: MA Experiment ID: 108464 Result: Up-regulated in Transcription
  misc_feature: MA Experiment 108464 PARAMETER Experiment Name: At_Germinating_Seeds_cDNA_P Parameter: Age (day) Value: 4 vs. 0
  misc_feature: MA Experiment 108464 PARAMETER Experiment Name: At_Germinating_Seeds_cDNA_P Parameter: Tissue Value: Germinating Seeds
  misc_feature: MA Experiment ID: 108573 Result: Up-regulated in Transcription
  misc_feature: MA Experiment 108573 PARAMETER Experiment Name: At_Drought_cDNA_P Parameter: Timepoint (hr) Value: 6
  misc_feature: MA Experiment 108573 PARAMETER Experiment Name: At_Drought_cDNA_P Parameter: Tissue Value: Aerial
  misc_feature: MA Experiment 108573 PARAMETER Experiment Name: At_Drought_cDNA_P Parameter: Treatment Value: Drought vs. No Drought
  misc_feature: MA Experiment ID: 108579 Result: Down-regulated in Transcription
  misc_feature: MA Experiment 108579 PARAMETER Experiment Name: At_4deg_Cold_cDNA_P Parameter: Temperature (deg C) Value: 4 vs. 22
  misc_feature: MA Experiment 108579 PARAMETER Experiment Name: At_4deg_Cold_cDNA_P Parameter: Timepoint (hr) Value: 6
  misc_feature: MA Experiment 108579 PARAMETER Experiment Name: At_4deg_Cold_cDNA_P Parameter: Tissue Value: Aerial
  misc_feature: MA Experiment ID: 108585 Result: Up-regulated in Transcription
  misc_feature: MA Experiment 108585 PARAMETER Experiment Name: At_5mM_NaNP_cDNA_P Parameter: Timepoint (hr) Value: 6
  misc_feature: MA Experiment 108585 PARAMETER Experiment Name: At_5mM_NaNP_cDNA_P Parameter: Tissue Value: Aerial
  misc_feature: MA Experiment 108585 PARAMETER Experiment Name: At_5mM_NaNP_cDNA_P Parameter: Treatment Value: null
  misc_feature: MA Experiment ID: 108594 Result: Down-regulated in Transcription
  misc_feature: MA Experiment 108594 PARAMETER Experiment Name: At_Ler-rhl_Root_cDNA_P Parameter: Plant Line Value: null
  misc_feature: MA Experiment ID: 20000214 Result: Down-regulated in Transcription
  misc_feature: MA Experiment 20000214 PARAMETER Experiment Name: At_4deg_Cold_P Parameter: Timepoint (hr) Value: 6
  misc_feature: MA Experiment ID: 20000224 Result: Down-regulated in Transcription
  misc_feature: MA Experiment ID: 20000496 Result: Up-regulated in Transcription
  misc_feature: MA Experiment 20000496 PARAMETER Experiment Name: At_Guard_Cells_P Parameter: Harvest Date Value: 7/19/2002
  misc_feature: MA Experiment 20000496 PARAMETER Experiment Name: At_Guard_Cells_P Parameter: Organism Value: Canola
  misc_feature: MA Experiment 20000496 PARAMETER Experiment Name: At_Guard_Cells_P Parameter: Tissue Value: Guard Cells vs. Leaves
  misc_feature: MA Experiment ID: 20001248 Result: Up-regulated in Transcription
  misc_feature: MA Experiment 20001248 PARAMETER Experiment Name: At_Far-red-induction_P Parameter: Age (day) Value: 7
  misc_feature: MA Experiment 20001248 PARAMETER Experiment Name: At_Far-red-induction_P Parameter: Light Value: Far-red vs. White
  misc_feature: MA Experiment 20001248 PARAMETER Experiment Name: At_Far-red-induction_P Parameter: Organism Value: A. thaliana
  misc_feature: MA Experiment 20001248 PARAMETER Experiment Name: At_Far-red-induction_P Parameter: Plant Line Value: Columbia
  misc_feature: MA Experiment 20001248 PARAMETER Experiment Name: At_Far-red-induction_P Parameter: Timepoint (hr) Value: 4
  misc_feature: MA Experiment 20001248 PARAMETER Experiment Name: At_Far-red-induction_P Parameter: Tissue Value: Whole Plant
  misc_feature: MA Experiment ID: 20001450 Result: Up-regulated in Transcription
  misc_feature: MA Experiment 20001450 PARAMETER Experiment Name: At_Far-red-induction_P Parameter: Age (day) Value: 7
  misc_feature: MA Experiment 20001450 PARAMETER Experiment Name: At_Far-red-induction_P Parameter: Light Value: Far-red vs. White
  misc_feature: MA Experiment 20001450 PARAMETER Experiment Name: At_Far-red-induction_P Parameter: Organism Value: A. thaliana
  misc_feature: MA Experiment 20001450 PARAMETER Experiment Name: At_Far-red-induction_P Parameter: Plant Line Value: Columbia
  misc_feature: MA Experiment 20001450 PARAMETER Experiment Name: At_Far-red-induction_P Parameter: Timepoint (hr) Value: 8
  misc_feature: MA Experiment 20001450 PARAMETER Experiment Name: At_Far-red-induction_P Parameter: Tissue Value: Whole Plant
  misc_feature: MA Experiment ID: 20001905 Result: Down-regulated in Transcription
  misc_feature: MA Experiment 20001905 PARAMETER Experiment Name: At_Drought_Reproduction_P Parameter: Age (day) Value: 40
  misc_feature: MA Experiment 20001905 PARAMETER Experiment Name: At_Drought_Reproduction_P Parameter: Organism Value: A. thaliana
  misc_feature: MA Experiment 20001905 PARAMETER Experiment Name: At_Drought_Reproduction_P Parameter: Plant Line Value: WS
  misc_feature: MA Experiment 20001905 PARAMETER Experiment Name: At_Drought_Reproduction_P Parameter: Timepoint (day) Value: 10
  misc_feature: MA Experiment 20001905 PARAMETER Experiment Name: At_Drought_Reproduction_P Parameter: Tissue Value: Rosettes
  misc_feature: MA Experiment 20001905 PARAMETER Experiment Name: At_Drought_Reproduction_P Parameter: Treatment Value: Drought vs. No Drought
aaagctctgaaaagatggccggagctgtttctgccgtcgatcaaccgttgaaaatcatcaccggagctgatgactttggagcgagcctcaaggacgcgatggtaacacacctccgctctctcggcatagacgtggaggataccggagtgtcctcttactactctgctggatctgaagtcggtcgccgcgtctccgcttcatcgtcttccgaagttcgcggcttagtctgctgcggcaccggcgtcggagttgcgatgttcgccaacaagttcccgggcgtctacgcagccacttgtctctccgtcgaagacgccgtcaacgctcgatcaataagcaattgcaatgtcctcgcattctccggcatcaaaacatccccggaaaccgccttggaaatcttcgacgcttggatcaaaactcctttcaaatctccttgtcctgcgtccggatccgaaccatggagctcagttatctcttccttcctcgacaattctctctccgagatgtctcagattggaaagtcaaccgccggcgattcaacaaccaagaagatcgatgaaacaaccgcgtcttgcgtaatttgctgcttggcgaagaacagagagttcactccagtggacatcatgccgggaggctcgatgaagatcgttagagagacgccgacgtcggcgattgtaagattcaaagcgggaagtgtggaaccggcgcatcaccacacattcggccatgaccttgtagtcataaagggaaagaaaagtgtgtggaatctgagcaagaaggagagagctgatctcgttgacggcgattacctattcactcccgccggtgatgttcaccgagtcaaatatcacgaagacactgagttcttcatcacttgggatggccattgggacatattccttgacgaagacctcgaaactgcaaagaaagccatcgaagaagaagcttgaaggtgtaaactttgtgtagtactctcttcttttgaatgttgtaagttctgagagtaaactttcttaaattgatgtactttgtaagaatctttgatttcaaaagatggtgtaatattacaaatactttctcttatgaacactatataaagggtttct

SEQ ID NO: 40986 - protein, 314 aa, Arabidopsis thaliana
  peptide (1)..(314): Ceres Seq. ID no. 13489506
  misc_feature (73)..(150): Pfam Name: Ribose/Galactose Isomerase Pfam Description: Ribose/Galactose Isomerase
  misc_feature (16)..(140): Homolog of NCBI NO: 16804699 NR Description: similar to ribose 5-phosphate epimerase
  misc_feature (16)..(141): Homolog of NCBI NO: 15896134 NR Description: Ribose 5-phosphate isomerase, RpiB [Clostridium
  misc_feature (16)..(149): Homolog of NCBI NO: 15965978 NR Description: PUTATIVE RIBOSE 5-PHOSPHATE ISOMERASE B PROTEIN
  misc_feature (12)..(141): Homolog of NCBI NO: 23021362 NR Description: hypothetical protein [Clostridium thermocellum
  misc_feature (16)..(149): Homolog of NCBI NO: 36958662 NR Description: Ribose 5-phosphate isomerase [Rhizobium sp.
  misc_feature (16)..(141): Homolog of NCBI NO: 18311180 NR Description: ribose 5-phosphate isomerase [Clostridium
  misc_feature (16)..(140): Homolog of NCBI NO: 23111538 NR Description: hypothetical protein [Desulfitobacterium
  misc_feature (8)..(313): Homolog of NCBI NO: 34913680 NR Description: putative DNA-damage-repair/toleration protein
  misc_feature (85)..(314): Homolog of NCBI NO: 1169199 NR Description: DNA-damage-repair/toleration protein DRT102
  misc_feature (5)..(314): Homolog of NCBI NO: 18397039 NR Description: DNA-damage-repair/toleration protein DRT102
SSEKMAGAVSAVDQPLKIITGADDFGASLKDAMVTHLRSLGIDVEDTGVSSYYSAGSEVGRRVSASSSSEVRGLVCCGTGVGVAMFANKFPGVYAATCLSVEDAVNARSISNCNVLAFSGIKTSPETALEIFDAWIKTPFKSPCPASGSEPWSSVISSFLDNSLSEMSQIGKSTAGDSTTKKIDETTASCVICCLAKNREFTPVDIMPGGSMKIVRETPTSAIVRFKAGSVEPAHHHTFGHDLVVIKGKKSVWNLSKKERADLVDGDYLFTPAGDVHRVKYHEDTEFFITWDGHWDIFLDEDLETAKKAIEEEA

SEQ ID NO: 40987 - protein, 310 aa, Arabidopsis thaliana
  peptide (1)..(310): Ceres Seq. ID no. 13489507
  misc_feature (69)..(146): Pfam Name: Ribose/Galactose Isomerase Pfam Description: Ribose/Galactose Isomerase
  misc_feature (12)..(136): Homolog of NCBI NO: 16804699 NR Description: similar to ribose 5-phosphate epimerase
  misc_feature (12)..(137): Homolog of NCBI NO: 15896134 NR Description: Ribose 5-phosphate isomerase, RpiB [Clostridium
  misc_feature (12)..(145): Homolog of NCBI NO: 15965978 NR Description: PUTATIVE RIBOSE 5-PHOSPHATE ISOMERASE B PROTEIN
  misc_feature (8)..(137): Homolog of NCBI NO: 23021362 NR Description: hypothetical protein [Clostridium thermocellum
  misc_feature (12)..(145): Homolog of NCBI NO: 36958662 NR Description: Ribose 5-phosphate isomerase [Rhizobium sp.
  misc_feature (12)..(137): Homolog of NCBI NO: 18311180 NR Description: ribose 5-phosphate isomerase [Clostridium
  misc_feature (12)..(136): Homolog of NCBI NO: 23111538 NR Description: hypothetical protein [Desulfitobacterium
  misc_feature (4)..(309): Homolog of NCBI NO: 34913680 NR Description: putative DNA-damage-repair/toleration protein
  misc_feature (81)..(310): Homolog of NCBI NO: 1169199 NR Description: DNA-damage-repair/toleration protein DRT102
  misc_feature (1)..(310): Homolog of NCBI NO: 18397039 NR Description: DNA-damage-repair/toleration protein DRT102
MAGAVSAVDQPLKIITGADDFGASLKDAMVTHLRSLGIDVEDTGVSSYYSAGSEVGRRVSASSSSEVRGLVCCGTGVGVAMFANKFPGVYAATCLSVEDAVNARSISNCNVLAFSGIKTSPETALEIFDAWIKTPFKSPCPASGSEPWSSVISSFLDNSLSEMSQIGKSTAGDSTTKKIDETTASCVICCLAKNREFTPVDIMPGGSMKIVRETPTSAIVRFKAGSVEPAHHHTFGHDLVVIKGKKSVWNLSKKERADLVDGDYLFTPAGDVHRVKYHEDTEFFITWDGHWDIFLDEDLETAKKAIEEEA

SEQ ID NO: 40988 - protein, 282 aa, Arabidopsis thaliana
  peptide (1)..(282): Ceres Seq. ID no. 13489508
  misc_feature (41)..(118): Pfam Name: Ribose/Galactose Isomerase Pfam Description: Ribose/Galactose Isomerase
  misc_feature (1)..(108): Homolog of NCBI NO: 16804699 NR Description: similar to ribose 5-phosphate epimerase
  misc_feature (1)..(109): Homolog of NCBI NO: 15896134 NR Description: Ribose 5-phosphate isomerase, RpiB [Clostridium
  misc_feature (1)..(117): Homolog of NCBI NO: 15965978 NR Description: PUTATIVE RIBOSE 5-PHOSPHATE ISOMERASE B PROTEIN
  misc_feature (1)..(109): Homolog of NCBI NO: 23021362 NR Description: hypothetical protein [Clostridium thermocellum
  misc_feature (1)..(117): Homolog of NCBI NO: 36958662 NR Description: Ribose 5-phosphate isomerase [Rhizobium sp.
  misc_feature (1)..(109): Homolog of NCBI NO: 18311180 NR Description: ribose 5-phosphate isomerase [Clostridium
  misc_feature (1)..(108): Homolog of NCBI NO: 23111538 NR Description: hypothetical protein [Desulfitobacterium
  misc_feature (1)..(281): Homolog of NCBI NO: 34913680 NR Description: putative DNA-damage-repair/toleration protein
  misc_feature (53)..(282): Homolog of NCBI NO: 1169199 NR Description: DNA-damage-repair/toleration protein DRT102
  misc_feature (1)..(282): Homolog of NCBI NO: 18397039 NR Description: DNA-damage-repair/toleration protein DRT102
MVTHLRSLGIDVEDTGVSSYYSAGSEVGRRVSASSSSEVRGLVCCGTGVGVAMFANKFPGVYAATCLSVEDAVNARSISNCNVLAFSGIKTSPETALEIFDAWIKTPFKSPCPASGSEPWSSVISSFLDNSLSEMSQIGKSTAGDSTTKKIDETTASCVICCLAKNREFTPVDIMPGGSMKIVRETPTSAIVRFKAGSVEPAHHHTFGHDLVVIKGKKSVWNLSKKERADLVDGDYLFTPAGDVHRVKYHEDTEFFITWDGHWDIFLDEDLETAKKAIEEEA

SEQ ID NO: 40989 - DNA, 1254 bp, Arabidopsis thaliana
  misc_feature (1)..(1254): Ceres Seq. ID no. 12328326
  misc_feature: MA Experiment ID: 108464 Result: Up-regulated in Transcription
  misc_feature: MA Experiment 108464 PARAMETER Experiment Name: At_Germinating_Seeds_cDNA_P Parameter: Age (day) Value: 4 vs. 0
  misc_feature: MA Experiment 108464 PARAMETER Experiment Name: At_Germinating_Seeds_cDNA_P Parameter: Tissue Value: Germinating Seeds
  misc_feature: MA Experiment ID: 108469 Result: Up-regulated in Transcription
  misc_feature: MA Experiment ID: 108595 Result: Up-regulated in Transcription
  misc_feature: MA Experiment 108595 PARAMETER Experiment Name: At_Ler-pi_Ovule_cDNA_P Parameter: Plant Line Value: null
  misc_feature: MA Experiment ID: 108668 Result: Up-regulated in Transcription
  misc_feature: MA Experiment 108668 PARAMETER Experiment Name: At_2mM_SA_cDNA_P Parameter: Plant Line Value: WS
  misc_feature: MA Experiment 108668 PARAMETER Experiment Name: At_2mM_SA_cDNA_P Parameter: Timepoint (hr) Value: 6
  misc_feature: MA Experiment 108668 PARAMETER Experiment Name: At_2mM_SA_cDNA_P Parameter: Treatment Value: 2mM SA vs. No Treatment
  misc_feature: MA Experiment ID: 20000030 Result: Down-regulated in Transcription
  misc_feature: MA Experiment 20000030 PARAMETER Experiment Name: At_CS6630_Roots_cDNA_P Parameter: Plant Line Value: CS6630 vs. WS
  misc_feature: MA Experiment 20000030 PARAMETER Experiment Name: At_CS6630_Roots_cDNA_P Parameter: Tissue Value: Roots
  misc_feature: MA Experiment ID: 20000180 Result: Up-regulated in Transcription
  misc_feature: MA Experiment 20000180 PARAMETER Experiment Name: At_Germinating_Seeds_P Parameter: Age (hr) Value: 24 vs. 0
  misc_feature: MA Experiment 20000180 PARAMETER Experiment Name: At_Germinating_Seeds_P Parameter: Tissue Value: Germinating Seeds
  misc_feature: MA Experiment ID: 20000182 Result: Up-regulated in Transcription
  misc_feature: MA Experiment 20000182 PARAMETER Experiment Name: At_2mM_SA_P Parameter: Age (day) Value: 14
  misc_feature: MA Experiment 20000182 PARAMETER Experiment Name: At_2mM_SA_P Parameter: Organism Value: A. thaliana
  misc_feature: MA Experiment 20000182 PARAMETER Experiment Name: At_2mM_SA_P Parameter: Plant Line Value: WS
  misc_feature: MA Experiment 20000182 PARAMETER Experiment Name: At_2mM_SA_P Parameter: Timepoint (hr) Value: 6
  misc_feature: MA Experiment 20000182 PARAMETER Experiment Name: At_2mM_SA_P Parameter: Tissue Value: Aerial
  misc_feature: MA Experiment 20000182 PARAMETER Experiment Name: At_2mM_SA_P Parameter: Treatment Value: 2mM SA vs. No Treatment
  misc_feature: MA Experiment ID: 20000184 Result: Down-regulated in Transcription
  misc_feature: MA Experiment 20000184 PARAMETER Experiment Name: At_Shoots__P Parameter: Age (day) Value: 7
  misc_feature: MA Experiment 20000184 PARAMETER Experiment Name: At_Shoots__P Parameter: Tissue Value: Shoots vs. Whole Plant
  misc_feature: MA Experiment ID: 20000234 Result: Down-regulated in Transcription
  misc_feature: MA Experiment 20000234 PARAMETER Experiment Name: At_Siliques_P Parameter: Age (day) Value: 21
  misc_feature: MA Experiment 20000234 PARAMETER Experiment Name: At_Siliques_P Parameter: Organism Value: A. thaliana
  misc_feature: MA Experiment 20000234 PARAMETER Experiment Name: At_Siliques_P Parameter: Plant Line Value: WS
  misc_feature: MA Experiment 20000234 PARAMETER Experiment Name: At_Siliques_P Parameter: Tissue Value: Less Than 5mm Siliques vs. Whole Plant
  misc_feature: MA Experiment ID: 20000235 Result: Down-regulated in Transcription
  misc_feature: MA Experiment 20000235 PARAMETER Experiment Name: At_Siliques_P Parameter: Age (day) Value: 21
  misc_feature: MA Experiment 20000235 PARAMETER Experiment Name: At_Siliques_P Parameter: Organism Value: A. thaliana
  misc_feature: MA Experiment 20000235 PARAMETER Experiment Name: At_Siliques_P Parameter: Plant Line Value: WS
  misc_feature: MA Experiment 20000235 PARAMETER Experiment Name: At_Siliques_P Parameter: Tissue Value: 5-10mm Siliques vs. Whole Plant
  misc_feature: MA Experiment ID: 20000438 Result: Down-regulated in Transcription
  misc_feature: MA Experiment 20000438 PARAMETER Experiment Name: At_Shoots__P Parameter: Age (day) Value: 14
  misc_feature: MA Experiment 20000438 PARAMETER Experiment Name: At_Shoots__P Parameter: Tissue Value: Shoots vs. Whole Plant
  misc_feature: MA Experiment ID: 20000439 Result: Up-regulated in Transcription
  misc_feature: MA Experiment 20000439 PARAMETER Experiment Name: At_Roots__P Parameter: Age (day) Value: 14 vs. 21
  misc_feature: MA Experiment 20000439 PARAMETER Experiment Name: At_Roots__P Parameter: Organism Value: A. thaliana
  misc_feature: MA Experiment 20000439 PARAMETER Experiment Name: At_Roots__P Parameter: Tissue Value: Roots vs. Whole Plant
  misc_feature: MA Experiment ID: 20000460 Result: Down-regulated in Transcription
  misc_feature: MA Experiment 20000460 PARAMETER Experiment Name: At_10percent_PEG_P Parameter: Age (day) Value: 12
  misc_feature: MA Experiment 20000460 PARAMETER Experiment Name: At_10percent_PEG_P Parameter: Organism Value: A. thaliana
  misc_feature: MA Experiment 20000460 PARAMETER Experiment Name: At_10percent_PEG_P Parameter: Plant Line Value: WS
  misc_feature: MA Experiment 20000460 PARAMETER Experiment Name: At_10percent_PEG_P Parameter: Timepoint (day) Value: 12
  misc_feature: MA Experiment 20000460 PARAMETER Experiment Name: At_10percent_PEG_P Parameter: Tissue Value: Whole Plant
  misc_feature: MA Experiment 20000460 PARAMETER Experiment Name: At_10percent_PEG_P Parameter: Treatment Value: 10percent PEG vs. No Treatment
  misc_feature: MA Experiment ID: 20000527 Result: Down-regulated in Transcription
  misc_feature: MA Experiment 20000527 PARAMETER Experiment Name: At_10percent_PEG_P Parameter: Age (day) Value: 20
  misc_feature: MA Experiment 20000527 PARAMETER Experiment Name: At_10percent_PEG_P Parameter: Organism Value: A. thaliana
  misc_feature: MA Experiment 20000527 PARAMETER Experiment Name: At_10percent_PEG_P Parameter: Plant Line Value: WS
  misc_feature: MA Experiment 20000527 PARAMETER Experiment Name: At_10percent_PEG_P Parameter: Timepoint (day) Value: 20
  misc_feature: MA Experiment 20000527 PARAMETER Experiment Name: At_10percent_PEG_P Parameter: Tissue Value: Whole Plant
  misc_feature: MA Experiment 20000527 PARAMETER Experiment Name: At_10percent_PEG_P Parameter: Treatment Value: 10percent PEG vs. No Treatment
  misc_feature: MA Experiment ID: 20000573 Result: Up-regulated in Transcription
  misc_feature: MA Experiment 20000573 PARAMETER Experiment Name: At_100uM_ABA_Mutants__P Parameter: Organism Value: A. thaliana
  misc_feature: MA Experiment 20000573 PARAMETER Experiment Name: At_100uM_ABA_Mutants__P Parameter: Plant Line Value: CS22 vs. Ler wt
  misc_feature: MA Experiment 20000573 PARAMETER Experiment Name: At_100uM_ABA_Mutants__P Parameter: Timepoint (hr) Value: N/A
  misc_feature: MA Experiment 20000573 PARAMETER Experiment Name: At_100uM_ABA_Mutants__P Parameter: Tissue Value: Whole Plant
  misc_feature: MA Experiment 20000573 PARAMETER Experiment Name: At_100uM_ABA_Mutants__P Parameter: Treatment Value: None
  misc_feature: MA Experiment ID: 20000575 Result: Down-regulated in Transcription
  misc_feature: MA Experiment 20000575 PARAMETER Experiment Name: At_100uM_ABA_Mutants__P Parameter: Organism Value: A. thaliana
  misc_feature: MA Experiment 20000575 PARAMETER Experiment Name: At_100uM_ABA_Mutants__P Parameter: Plant Line Value: CS22
  misc_feature: MA Experiment 20000575 PARAMETER Experiment Name: At_100uM_ABA_Mutants__P Parameter: Timepoint (hr) Value: 6
  misc_feature: MA Experiment 20000575 PARAMETER Experiment Name: At_100uM_ABA_Mutants__P Parameter: Tissue Value: Whole Plant
  misc_feature: MA Experiment 20000575 PARAMETER Experiment Name: At_100uM_ABA_Mutants__P Parameter: Treatment Value: 1uM ABA vs. No Treatment
  misc_feature: MA Experiment ID: 20000794 Result: Down-regulated in Transcription
  misc_feature: MA Experiment 20000794 PARAMETER Experiment Name: At_Petals_P Parameter: Age (day) Value: 23-25 days
  misc_feature: MA Experiment 20000794 PARAMETER Experiment Name: At_Petals_P Parameter: Plant Line Value: WS
  misc_feature: MA Experiment 20000794 PARAMETER Experiment Name: At_Petals_P Parameter: Tissue Value: Petals vs. Whole plant
  misc_feature: MA Experiment ID: 20001555 Result: Down-regulated in Transcription
  misc_feature: MA Experiment 20001555 PARAMETER Experiment Name: At_Drought_Soil_Dry_P Parameter: Age (day) Value: 24
  misc_feature: MA Experiment 20001555 PARAMETER Experiment Name: At_Drought_Soil_Dry_P Parameter: Organism Value: A. thaliana
  misc_feature: MA Experiment 20001555 PARAMETER Experiment Name: At_Drought_Soil_Dry_P Parameter: Plant Line Value: WS
  misc_feature: MA Experiment 20001555 PARAMETER Experiment Name: At_Drought_Soil_Dry_P Parameter: Post Timepoint (hr) Value: None
  misc_feature: MA Experiment 20001555 PARAMETER Experiment Name: At_Drought_Soil_Dry_P Parameter: Post-Treatment Value: None
  misc_feature: MA Experiment 20001555 PARAMETER Experiment Name: At_Drought_Soil_Dry_P Parameter: Timepoint (day) Value: 10
  misc_feature: MA Experiment 20001555 PARAMETER Experiment Name: At_Drought_Soil_Dry_P Parameter: Treatment Value: Drought vs. No Drought
  misc_feature: MA Experiment ID: 20001557 Result: Down-regulated in Transcription
  misc_feature: MA Experiment 20001557 PARAMETER Experiment Name: At_Drought_Soil_Dry_P Parameter: Age (day) Value: 27
  misc_feature: MA Experiment 20001557 PARAMETER Experiment Name: At_Drought_Soil_Dry_P Parameter: Organism Value: A. thaliana
  misc_feature: MA Experiment 20001557 PARAMETER Experiment Name: At_Drought_Soil_Dry_P Parameter: Plant Line Value: WS
  misc_feature: MA Experiment 20001557 PARAMETER Experiment Name: At_Drought_Soil_Dry_P Parameter: Post Timepoint (hr) Value: 3
  misc_feature: MA Experiment 20001557 PARAMETER Experiment Name: At_Drought_Soil_Dry_P Parameter: Post-Treatment Value: Re-Water vs. No Drought
  misc_feature: MA Experiment 20001557 PARAMETER Experiment Name: At_Drought_Soil_Dry_P Parameter: Timepoint (day) Value: 13
  misc_feature: MA Experiment 20001557 PARAMETER Experiment Name: At_Drought_Soil_Dry_P Parameter: Treatment Value: Drought vs. No Drought
  misc_feature: MA Experiment ID: 20001558 Result: Down-regulated in Transcription
  misc_feature: MA Experiment 20001558 PARAMETER Experiment Name: At_Drought_Soil_Dry_P Parameter: Age (day) Value: 27
  misc_feature: MA Experiment 20001558 PARAMETER Experiment Name: At_Drought_Soil_Dry_P Parameter: Organism Value: A. thaliana
  misc_feature: MA Experiment 20001558 PARAMETER Experiment Name: At_Drought_Soil_Dry_P Parameter: Plant Line Value: WS
  misc_feature: MA Experiment 20001558 PARAMETER Experiment Name: At_Drought_Soil_Dry_P Parameter: Post Timepoint (hr) Value: 6
  misc_feature: MA Experiment 20001558 PARAMETER Experiment Name: At_Drought_Soil_Dry_P Parameter: Post-Treatment Value: Re-Water vs. No Drought
  misc_feature: MA Experiment 20001558 PARAMETER Experiment Name: At_Drought_Soil_Dry_P Parameter: Timepoint (day) Value: 13
  misc_feature: MA Experiment 20001558 PARAMETER Experiment Name: At_Drought_Soil_Dry_P Parameter: Treatment Value: Drought vs. No Drought
  misc_feature: MA Experiment ID: 20001560 Result: Down-regulated in Transcription
  misc_feature: MA Experiment 20001560 PARAMETER Experiment Name: At_Drought_Soil_Dry_P Parameter: Age (day) Value: 28
  misc_feature: MA Experiment 20001560 PARAMETER Experiment Name: At_Drought_Soil_Dry_P Parameter: Organism Value: A. thaliana
  misc_feature: MA Experiment 20001560 PARAMETER Experiment Name: At_Drought_Soil_Dry_P Parameter: Plant Line Value: WS
  misc_feature: MA Experiment 20001560 PARAMETER Experiment Name: At_Drought_Soil_Dry_P Parameter: Post Timepoint (hr) Value: None
  misc_feature: MA Experiment 20001560 PARAMETER Experiment Name: At_Drought_Soil_Dry_P Parameter: Post-Treatment Value: None
  misc_feature: MA Experiment 20001560 PARAMETER Experiment Name: At_Drought_Soil_Dry_P Parameter: Timepoint (day) Value: 14
  misc_feature: MA Experiment 20001560 PARAMETER Experiment Name: At_Drought_Soil_Dry_P Parameter: Treatment Value: Drought vs. No Drought
  misc_feature: MA Experiment ID: 20001904 Result: Down-regulated in Transcription
  misc_feature: MA Experiment 20001904 PARAMETER Experiment Name: At_Drought_Reproduction_P Parameter: Age (day) Value: 37
  misc_feature: MA Experiment 20001904 PARAMETER Experiment Name: At_Drought_Reproduction_P Parameter: Organism Value: A. thaliana
  misc_feature: MA Experiment 20001904 PARAMETER Experiment Name: At_Drought_Reproduction_P Parameter: Plant Line Value: WS
  misc_feature: MA Experiment 20001904 PARAMETER Experiment Name: At_Drought_Reproduction_P Parameter: Timepoint (day) Value: 7
  misc_feature: MA Experiment 20001904 PARAMETER Experiment Name: At_Drought_Reproduction_P Parameter: Tissue Value: Rosettes
  misc_feature: MA Experiment 20001904 PARAMETER Experiment Name: At_Drought_Reproduction_P Parameter: Treatment Value: Drought vs. No Drought
gtttttcgatgccttacgagaaagagctcgctgctgctaagaaagccgtctctctagctgctcgtctcagccaggaagtgcagaagtctctgttgcaatcagatgtccggtcaaaatctgataaaagtccggttacagctgctgattatggatcccaagctgtgatcagtcatgtactagagagagaacttcaccctgaaccactatacttggttgctgaagagaatgcagaagatctgcacaagaatggcgccgaggaatttctagaaagcattactaagcttgtgaacaatgctctagcttctgatgattcctacgccaactcttctctttcaatggatgatgtaaggaaggcgatagaccacgggaggtcacaaggcggttccagtggccgccattggattcttgatcctgttgatggaaccagagggtttgtaaaaggagaggaatacgctgtggcattagctttgcttgtggaaggcaaagtagtgctcggtgtcatggcttgcccgaaacttgagaatcacaagtcttcttcttcaggatgccttttctttgctacagtgggagaaggagcttatgtgcaatcgcttgaaggcgactctcatcctccacaaaaggtattataattatcagagcatttgatgtcccttaggcttgttctctcgttttgtgttcttaaaacagagtggagaaagtgtgctaataggtgcaagtgagcaacattgagaatcctgaagaagcaacctttgtggaatcatcccacaaaccaatccccatccatagctccattgccaataaacttgggatcaaagctccacctctaagaatccatagtcaagtgaagtacgcagctctggctcgaggagatgcagagatatacttgcgtttcactcttaaagggtaccgagagttcatatggaaccatgctgctggtgcaatcatcacaacagaagctggaggtgtagtttgcgatgctgacgggaatcctctggacttctcgagaggaaatcatcttgaacacaaaacagggatcgtggtcagcaccaagaaccttatgccacggctcttgaaagccattagagaatccatagaagaggagatgcttctctctgagacacaactgaaactgtaatatatgtactgcctgaaatagctatctggtgtatatcacacatctgccgttgtgtactgtcagacactgaagaaattgtatgcttttgaatattggtctcgatttcaataaaagatttc

SEQ ID NO: 40990 - protein, 208 aa, Arabidopsis thaliana
  peptide (1)..(208): Ceres Seq. ID no. 12328327
  misc_feature (5)..(170): Homolog of NCBI NO: 15451579 NR Description: Putative PAP-specific phosphatase [Oryza sativa]
  misc_feature (4)..(207): Homolog of NCBI NO: 14268820 NR Description: diphosphonucleotide phosphatase 1 [Zea mays]
  misc_feature (4)..(207): Homolog of NCBI NO: 3913517 NR Description: 3'(2'),5'-BISPHOSPHATE NUCLEOTIDASE
  misc_feature (3)..(203): Homolog of NCBI NO: 8777312 NR Description: 3'(2'),5'-bisphosphate nucleotidase [Arabidopsis
  misc_feature (3)..(203): Homolog of NCBI NO: 21618152 NR Description: 3(2),5-bisphosphate nucleotidase [Arabidopsis
  misc_feature (3)..(203): Homolog of NCBI NO: 18424775 NR Description: 3(2),5-bisphosphate nucleotidase
  misc_feature (3)..(203): Homolog of NCBI NO: 15237567 NR Description: 3(2),5-bisphosphate nucleotidase
  misc_feature (3)..(207): Homolog of NCBI NO: 15237589 NR Description: 3(2),5-bisphosphate nucleotidase (emb|CAB05889.1)
  misc_feature (3)..(207): Homolog of NCBI NO: 15242383 NR Description: 3'(2'),5'-bisphosphate nucleotidase-like protein
  misc_feature (3)..(207): Homolog of NCBI NO: 34395640 NR Description: Probable SAL4 phosphatase (3'(2'),5'-bisphosphate
FSMPYEKELAAAKKAVSLAARLSQEVQKSLLQSDVRSKSDKSPVTAADYGSQAVISHVLERELHPEPLYLVAEENAEDLHKNGAEEFLESITKLVNNALASDDSYANSSLSMDDVRKAIDHGRSQGGSSGRHWILDPVDGTRGFVKGEEYAVALALLVEGKVVLGVMACPKLENHKSSSSGCLFFATVGEGAYVQSLEGDSHPPQKVL

SEQ ID NO: 40991 - protein, 206 aa, Arabidopsis thaliana
  peptide (1)..(206): Ceres Seq. ID no. 12328328
  misc_feature (3)..(168): Homolog of NCBI NO: 15451579 NR Description: Putative PAP-specific phosphatase [Oryza sativa]
  misc_feature (2)..(205): Homolog of NCBI NO: 14268820 NR Description: diphosphonucleotide phosphatase 1 [Zea mays]
  misc_feature (2)..(205): Homolog of NCBI NO: 3913517 NR Description: 3'(2'),5'-BISPHOSPHATE NUCLEOTIDASE
  misc_feature (1)..(201): Homolog of NCBI NO: 8777312 NR Description: 3'(2'),5'-bisphosphate nucleotidase [Arabidopsis
  misc_feature (1)..(201): Homolog of NCBI NO: 21618152 NR Description: 3(2),5-bisphosphate nucleotidase [Arabidopsis
  misc_feature (1)..(201): Homolog of NCBI NO: 18424775 NR Description: 3(2),5-bisphosphate nucleotidase
  misc_feature (1)..(201): Homolog of NCBI NO: 15237567 NR Description: 3(2),5-bisphosphate nucleotidase
  misc_feature (1)..(205): Homolog of NCBI NO: 15237589 NR Description: 3(2),5-bisphosphate nucleotidase (emb|CAB05889.1)
  misc_feature (1)..(205): Homolog of NCBI NO: 15242383 NR Description: 3'(2'),5'-bisphosphate nucleotidase-like protein
  misc_feature (1)..(205): Homolog of NCBI NO: 34395640 NR Description: Probable SAL4 phosphatase (3'(2'),5'-bisphosphate
MPYEKELAAAKKAVSLAARLSQEVQKSLLQSDVRSKSDKSPVTAADYGSQAVISHVLERELHPEPLYLVAEENAEDLHKNGAEEFLESITKLVNNALASDDSYANSSLSMDDVRKAIDHGRSQGGSSGRHWILDPVDGTRGFVKGEEYAVALALLVEGKVVLGVMACPKLENHKSSSSGCLFFATVGEGAYVQSLEGDSHPPQKVL

SEQ ID NO: 40992 - DNA, 1950 bp, Arabidopsis thaliana
  misc_feature (1)..(1950): Ceres Seq. ID no. 13488610
  misc_feature: MA Experiment ID: 108434 Result: Up-regulated in Transcription
  misc_feature: MA Experiment 108434 PARAMETER Experiment Name: At_Root_Tips_cDNA_P Parameter: Tissue Value: Root Tips
  misc_feature: MA Experiment ID: 108461 Result: Down-regulated in Transcription
  misc_feature: MA Experiment 108461 PARAMETER Experiment Name: At_Germinating_Seeds_cDNA_P Parameter: Age (day) Value: 1 vs. 0
  misc_feature: MA Experiment 108461 PARAMETER Experiment Name: At_Germinating_Seeds_cDNA_P Parameter: Tissue Value: Germinating Seeds
  misc_feature: MA Experiment ID: 108462 Result: Down-regulated in Transcription
  misc_feature: MA Experiment 108462 PARAMETER Experiment Name: At_Germinating_Seeds_cDNA_P Parameter: Age (day) Value: 2 vs. 0
  misc_feature: MA Experiment 108462 PARAMETER Experiment Name: At_Germinating_Seeds_cDNA_P Parameter: Tissue Value: Germinating Seeds
  misc_feature: MA Experiment ID: 108463 Result: Down-regulated in Transcription
  misc_feature: MA Experiment 108463 PARAMETER Experiment Name: At_Germinating_Seeds_cDNA_P Parameter: Age (day) Value: 3 vs. 0
  misc_feature: MA Experiment 108463 PARAMETER Experiment Name: At_Germinating_Seeds_cDNA_P Parameter: Tissue Value: Germinating Seeds
  misc_feature: MA Experiment ID: 108464 Result: Down-regulated in Transcription
  misc_feature: MA Experiment 108464 PARAMETER Experiment Name: At_Germinating_Seeds_cDNA_P Parameter: Age (day) Value: 4 vs. 0
  misc_feature: MA Experiment 108464 PARAMETER Experiment Name: At_Germinating_Seeds_cDNA_P Parameter: Tissue Value: Germinating Seeds
  misc_feature: MA Experiment ID: 108469 Result: Up-regulated in Transcription
  misc_feature: MA Experiment ID: 108573 Result: Up-regulated in Transcription
  misc_feature: MA Experiment 108573 PARAMETER Experiment Name: At_Drought_cDNA_P Parameter: Timepoint (hr) Value: 6
  misc_feature: MA Experiment 108573 PARAMETER Experiment Name: At_Drought_cDNA_P Parameter: Tissue Value: Aerial
  misc_feature: MA Experiment 108573 PARAMETER Experiment Name: At_Drought_cDNA_P Parameter: Treatment Value: Drought vs. No Drought
  misc_feature: MA Experiment ID: 108585 Result: Up-regulated in Transcription
  misc_feature: MA Experiment 108585 PARAMETER Experiment Name: At_5mM_NaNP_cDNA_P Parameter: Timepoint (hr) Value: 6
  misc_feature: MA Experiment 108585 PARAMETER Experiment Name: At_5mM_NaNP_cDNA_P Parameter: Tissue Value: Aerial
  misc_feature: MA Experiment 108585 PARAMETER Experiment Name: At_5mM_NaNP_cDNA_P Parameter: Treatment Value: null
  misc_feature: MA Experiment ID: 20000069 Result: Up-regulated in Transcription
  misc_feature: MA Experiment 20000069 PARAMETER Experiment Name: At_100uM_ABA_Mutants_cDNA_P Parameter: Plant Line Value: CS23
  misc_feature: MA Experiment 20000069 PARAMETER Experiment Name: At_100uM_ABA_Mutants_cDNA_P Parameter: Timepoint (hr) Value: 6
  misc_feature: MA Experiment 20000069 PARAMETER Experiment Name: At_100uM_ABA_Mutants_cDNA_P Parameter: Tissue Value: Aerial
  misc_feature: MA Experiment 20000069 PARAMETER Experiment Name: At_100uM_ABA_Mutants_cDNA_P Parameter: Treatment Value: 100uM ABA vs. No Treatment
  misc_feature: MA Experiment ID: 20000070 Result: Up-regulated in Transcription
  misc_feature: MA Experiment 20000070 PARAMETER Experiment Name: At_100uM_ABA_Mutants_cDNA_P Parameter: Plant Line Value: CS24
  misc_feature: MA Experiment 20000070 PARAMETER Experiment Name: At_100uM_ABA_Mutants_cDNA_P Parameter: Timepoint (hr) Value: 6
  misc_feature: MA Experiment 20000070 PARAMETER Experiment Name: At_100uM_ABA_Mutants_cDNA_P Parameter: Tissue Value: Aerial
  misc_feature: MA Experiment 20000070 PARAMETER Experiment Name: At_100uM_ABA_Mutants_cDNA_P Parameter: Treatment Value: 100uM ABA vs. No Treatment
  misc_feature: MA Experiment ID: 20000071 Result: Up-regulated in Transcription
  misc_feature: MA Experiment 20000071 PARAMETER Experiment Name: At_100uM_ABA_Mutants_cDNA_P Parameter: Plant Line Value: CS8104
  misc_feature: MA Experiment 20000071 PARAMETER Experiment Name: At_100uM_ABA_Mutants_cDNA_P Parameter: Timepoint (hr) Value: 6
  misc_feature: MA Experiment 20000071 PARAMETER Experiment Name: At_100uM_ABA_Mutants_cDNA_P Parameter: Tissue Value: Aerial
  misc_feature: MA Experiment 20000071 PARAMETER Experiment Name: At_100uM_ABA_Mutants_cDNA_P Parameter: Treatment Value: 100uM ABA vs. No Treatment
  misc_feature: MA Experiment ID: 20000072 Result: Up-regulated in Transcription
  misc_feature: MA Experiment 20000072 PARAMETER Experiment Name: At_100uM_ABA_Mutants_cDNA_P Parameter: Plant Line Value: CS8105
  misc_feature: MA Experiment 20000072 PARAMETER Experiment Name: At_100uM_ABA_Mutants_cDNA_P Parameter: Timepoint (hr) Value: 6
  misc_feature: MA Experiment 20000072 PARAMETER Experiment Name: At_100uM_ABA_Mutants_cDNA_P Parameter: Tissue Value: Aerial
  misc_feature: MA Experiment 20000072 PARAMETER Experiment Name: At_100uM_ABA_Mutants_cDNA_P Parameter: Treatment Value: 100uM ABA vs. No Treatment
  misc_feature: MA Experiment ID: 20000086 Result: Up-regulated in Transcription
  misc_feature: MA Experiment 20000086 PARAMETER Experiment Name: At_100uM_ABA_Mutants_cDNA_P Parameter: Plant Line Value: CS22
  misc_feature: MA Experiment 20000086 PARAMETER Experiment Name: At_100uM_ABA_Mutants_cDNA_P Parameter: Timepoint (hr) Value: 6
  misc_feature: MA Experiment 20000086 PARAMETER Experiment Name: At_100uM_ABA_Mutants_cDNA_P Parameter: Tissue Value: Aerial
  misc_feature: MA Experiment 20000086 PARAMETER Experiment Name: At_100uM_ABA_Mutants_cDNA_P Parameter: Treatment Value: 100uM ABA vs. No Treatment
  misc_feature: MA Experiment ID: 20000088 Result: Up-regulated in Transcription
  misc_feature: MA Experiment 20000088 PARAMETER Experiment Name: At_100uM_ABA_Mutants_cDNA_P Parameter: Plant Line Value: Landsberg
  misc_feature: MA Experiment 20000088 PARAMETER Experiment Name: At_100uM_ABA_Mutants_cDNA_P Parameter: Timepoint (hr) Value: 6
  misc_feature: MA Experiment 20000088 PARAMETER Experiment Name: At_100uM_ABA_Mutants_cDNA_P Parameter: Tissue Value: Aerial
  misc_feature: MA Experiment 20000088 PARAMETER Experiment Name: At_100uM_ABA_Mutants_cDNA_P Parameter: Treatment Value: 100uM ABA vs. No Treatment
  misc_feature: MA Experiment ID: 20000117 Result: Up-regulated in Transcription
  misc_feature: MA Experiment 20000117 PARAMETER Experiment Name: At_100uM_ABA_Mutants_cDNA_P Parameter: Plant Line Value: Columbia
  misc_feature: MA Experiment 20000117 PARAMETER Experiment Name: At_100uM_ABA_Mutants_cDNA_P Parameter: Timepoint (hr) Value: 6
  misc_feature: MA Experiment 20000117 PARAMETER Experiment Name: At_100uM_ABA_Mutants_cDNA_P Parameter: Tissue Value: Aerial
  misc_feature: MA Experiment 20000117 PARAMETER Experiment Name: At_100uM_ABA_Mutants_cDNA_P Parameter: Treatment Value: 100uM ABA vs. No Treatment
  misc_feature: MA Experiment ID: 20000179 Result: Down-regulated in Transcription
  misc_feature: MA Experiment 20000179 PARAMETER Experiment Name: At_Germinating_Seeds_P Parameter: Age (hr) Value: 6 vs. 0
  misc_feature: MA Experiment 20000179 PARAMETER Experiment Name: At_Germinating_Seeds_P Parameter: Tissue Value: Germinating Seeds
  misc_feature: MA Experiment ID: 20001557 Result: Up-regulated in Transcription
  misc_feature: MA Experiment 20001557 PARAMETER Experiment Name: At_Drought_Soil_Dry_P Parameter: Age (day) Value: 27
  misc_feature: MA Experiment 20001557 PARAMETER Experiment Name: At_Drought_Soil_Dry_P Parameter: Organism Value: A. thaliana
  misc_feature: MA Experiment 20001557 PARAMETER Experiment Name: At_Drought_Soil_Dry_P Parameter: Plant Line Value: WS
  misc_feature: MA Experiment 20001557 PARAMETER Experiment Name: At_Drought_Soil_Dry_P Parameter: Post Timepoint (hr) Value: 3
  misc_feature: MA Experiment 20001557 PARAMETER Experiment Name: At_Drought_Soil_Dry_P Parameter: Post-Treatment Value: Re-Water vs. No Drought
  misc_feature: MA Experiment 20001557 PARAMETER Experiment Name: At_Drought_Soil_Dry_P Parameter: Timepoint (day) Value: 13
  misc_feature: MA Experiment 20001557 PARAMETER Experiment Name: At_Drought_Soil_Dry_P Parameter: Treatment Value: Drought vs. No Drought
cttgctcagggtccttagcaaggcctagaggatcaaatggacctcctgggtgtagcttgtcctcgaaatccaatccgttggtgattctgtagtactcggctccaccgaggagaacaacctcagcaactacggcgagaacaaggttgatagggatgttcttgccaaagtagttcaatgtgtttccatcaagaagcaaagcaccagtcttaaaccagacagcttcagggccacagttagcgccatatttgtttaaagcttcaggaatgatgaaaccagctgctcctaacatagcccatctcgcatggatcaattcaaaagcttggtatttagcaaagttctcaggcttctttccaagaccaaatgggtcataaccataatctccagcaacttcaccgtttaagtactctgggatctctgatctatccaaaagaccatcaggcaagaaaattctcctgtcaggaccataccacttggcgagctcactagtccccccccccctcaaagatctctcaaagaatggcttccgcggctgttgcatcgatggttcttgaccctaaagcatcaccggccttgatggatctatccaccgcagacgaagaagatctctatggccgcctcaaatcgcttgaacgacaactagagttcaccgatatccaagaagaatatgtgaaagacgagcaaaagaatctcaaacgagagctgttacgagcacaagaagaggtcaaacgaattcaatccgtgcctttggtgataggtcagttcatggagatggtagatcagaacaacggcatcgtcggatctactactggctccaattactatgtcagaattctcagcacaatcaatagagaactcttaaagccttctgcttccgtcgctcttcaccgtcactccaacgcccttgttgatgttttgcctccggaggctgattctagcatctcccttctcagccaatctgagaagcctgacgtctcctacaatgatattggaggatgcgatattcagaaacaggaaattcgtgaggctgttgaattgcctcttacccaccacgagctttacaaacagattggtattgacccacctcgtggagtcttgctctatggacctcctggtactggaaagactatgttggctaaggctgttgccaatcacacaactgctgccttcattagggttgttggatccgagtttgtgcaaaagtatctcggcgagggacctcgtatggttcgtgatgtcttccgtcttgccaaggaaaatgctccagctatcatcttcattgatgaggtagatgccatcgctactgctaggtttgatgctcaaacaggagccgatagggaagttcagcgtattctcatggagcttcttaatcagatggatggatttgaccagaccgtgaatgtcaaggtcataatggcaacaaacagggcagacactctagatcctgctctcttacgtcctggaagacttgatcgtaagattgagttcccccttcctgatagacgtcaaaagaggcttgttttccaggtatgcacctccaaaatgaaccttagcgatgaggttgacttggaagactatgtttcacggcctgataaaattagcgctgctgagatagcagcaatttgccaggaagctggtatgcatgcggtgcgaaagaacagatatgtgatactacctaaggatttcgagaagggctaccgcgcaaatgttaagaagccagacacggactttgagttttacaagtgaagagaaagcagaagtggaaccagattatggctgttgttaaaattccagtgtgttttgagaattattaaggacatggaatcaaatttgcagttaaattaagaactaagttgcatctcctaatttctgtaactcgagttcacatttgtttttagtctatcagctttttacagtttaatgtataagaaaaactggggatggtgtccttag

SEQ ID NO: 40993 - protein, 408 aa, Arabidopsis thaliana
  peptide (1)..(408): Ceres Seq. ID no. 13488611
  misc_feature (191)..(378): Pfam Name: ATPase family associated with various cellular Pfam Description: ATPase family associated with various cellular
  misc_feature (1)..(408): Homolog of NCBI NO: 39590031 NR Description: Hypothetical protein CBG04772 [Caenorhabditis
  misc_feature (5)..(408): Homolog of NCBI NO: 39584985 NR Description: Hypothetical protein CBG09101 [Caenorhabditis
  misc_feature (7)..(408): Homolog of NCBI NO: 25742677 NR Description: proteasome 26S ATPase subunit 4 [Rattus
  misc_feature (7)..(408): Homolog of NCBI NO: 30585275 NR Description: Homo sapiens proteasome (prosome, macropain) 26S
  misc_feature (7)..(408): Homolog of NCBI NO: 5729991 NR Description: proteasome 26S ATPase subunit 4 isoform 1
  misc_feature (13)..(408): Homolog of NCBI NO: 1172638 NR Description: 26S PROTEASE REGULATORY SUBUNIT 6B (ATPASE MS73)
  misc_feature (12)..(408): Homolog of NCBI NO: 18860063 NR Description: CG16916-PA [Drosophila melanogaster]
  misc_feature (41)..(408): Homolog of NCBI NO: 17298145 NR Description: 26S proteasome regulatory particle triple-A
  misc_feature (8)..(408): Homolog of NCBI NO: 1709798 NR Description: 26S PROTEASE REGULATORY SUBUNIT 6B HOMOLOG
  misc_feature (1)..(408): Homolog of NCBI NO: 15237159 NR Description: 26S proteasome AAA-ATPase subunit RPT3
MASAAVASMVLDPKASPALMDLSTADEEDLYGRLKSLERQLEFTDIQEEYVKDEQKNLKRELLRAQEEVKRIQSVPLVIGQFMEMVDQNNGIVGSTTGSNYYVRILSTINRELLKPSASVALHRHSNALVDVLPPEADSSISLLSQSEKPDVSYNDIGGCDIQKQEIREAVELPLTHHELYKQIGIDPPRGVLLYGPPGTGKTMLAKAVANHTTAAFIRVVGSEFVQKYLGEGPRMVRDVFRLAKENAPAIIFIDEVDAIATARFDAQTGADREVQRILMELLNQMDGFDQTVNVKVIMATNRADTLDPALLRPGRLDRKIEFPLPDRRQKRLVFQVCTSKMNLSDEVDLEDYVSRPDKISAAEIAAICQEAGMHAVRKNRYVILPKDFEKGYRANVKKPDTDFEFYK

SEQ ID NO: 40994 - protein, 400 aa, Arabidopsis thaliana
  peptide (1)..(400): Ceres Seq. ID no. 13488612
  misc_feature (183)..(370): Pfam Name: ATPase family associated with various cellular Pfam Description: ATPase family associated with various cellular
  misc_feature (1)..(400): Homolog of NCBI NO: 39590031 NR Description: Hypothetical protein CBG04772 [Caenorhabditis
  misc_feature (1)..(400): Homolog of NCBI NO: 39584985 NR Description: Hypothetical protein CBG09101 [Caenorhabditis
  misc_feature (1)..(400): Homolog of NCBI NO: 25742677 NR Description: proteasome 26S ATPase subunit 4 [Rattus
  misc_feature (1)..(400): Homolog of NCBI NO: 30585275 NR Description: Homo sapiens proteasome (prosome, macropain) 26S
  misc_feature (1)..(400): Homolog of NCBI NO: 5729991 NR Description: proteasome 26S ATPase subunit 4 isoform 1
  misc_feature (5)..(400): Homolog of NCBI NO: 1172638 NR Description: 26S PROTEASE REGULATORY SUBUNIT 6B (ATPASE MS73)
  misc_feature (4)..(400): Homolog of NCBI NO: 18860063 NR Description: CG16916-PA [Drosophila melanogaster]
  misc_feature (33)..(400): Homolog of NCBI NO: 17298145 NR Description: 26S proteasome regulatory particle triple-A
  misc_feature (1)..(400): Homolog of NCBI NO: 1709798 NR Description: 26S PROTEASE REGULATORY SUBUNIT 6B HOMOLOG
  misc_feature (1)..(400): Homolog of NCBI NO: 15237159 NR Description: 26S proteasome AAA-ATPase subunit RPT3
MVLDPKASPALMDLSTADEEDLYGRLKSLERQLEFTDIQEEYVKDEQKNLKRELLRAQEEVKRIQSVPLVIGQFMEMVDQNNGIVGSTTGSNYYVRILSTINRELLKPSASVALHRHSNALVDVLPPEADSSISLLSQSEKPDVSYNDIGGCDIQKQEIREAVELPLTHHELYKQIGIDPPRGVLLYGPPGTGKTMLAKAVANHTTAAFIRVVGSEFVQKYLGEGPRMVRDVFRLAKENAPAIIFIDEVDAIATARFDAQTGADREVQRILMELLNQMDGFDQTVNVKVIMATNRADTLDPALLRPGRLDRKIEFPLPDRRQKRLVFQVCTSKMNLSDEVDLEDYVSRPDKISAAEIAAICQEAGMHAVRKNRYVILPKDFEKGYRANVKKPDTDFEFYK

SEQ ID NO: 40995 - protein, 389 aa, Arabidopsis thaliana
  peptide (1)..(389): Ceres Seq. ID no. 13488613
  misc_feature (172)..(359): Pfam Name: ATPase family associated with various cellular Pfam Description: ATPase family associated with various cellular
  misc_feature (1)..(389): Homolog of NCBI NO: 39590031 NR Description: Hypothetical protein CBG04772 [Caenorhabditis
  misc_feature (1)..(389): Homolog of NCBI NO: 39584985 NR Description: Hypothetical protein CBG09101 [Caenorhabditis
  misc_feature (1)..(389): Homolog of NCBI NO: 25742677 NR Description: proteasome 26S ATPase subunit 4 [Rattus
  misc_feature (1)..(389): Homolog of NCBI NO: 30585275 NR Description: Homo sapiens proteasome (prosome, macropain) 26S
  misc_feature (1)..(389): Homolog of NCBI NO: 5729991 NR Description: proteasome 26S ATPase subunit 4 isoform 1
  misc_feature (1)..(389): Homolog of NCBI NO: 1172638 NR Description: 26S PROTEASE REGULATORY SUBUNIT 6B (ATPASE MS73)
  misc_feature (1)..(389): Homolog of NCBI NO: 18860063 NR Description: CG16916-PA [Drosophila melanogaster]
  misc_feature (22)..(389): Homolog of NCBI NO: 17298145 NR Description: 26S proteasome regulatory particle triple-A
  misc_feature (1)..(389): Homolog of NCBI NO: 1709798 NR Description: 26S PROTEASE REGULATORY SUBUNIT 6B HOMOLOG
  misc_feature (1)..(389): Homolog of NCBI NO: 15237159 NR Description: 26S proteasome AAA-ATPase subunit RPT3
MDLSTADEEDLYGRLKSLERQLEFTDIQEEYVKDEQKNLKRELLRAQEEVKRIQSVPLVIGQFMEMVDQNNGIVGSTTGSNYYVRILSTINRELLKPSASVALHRHSNALVDVLPPEADSSISLLSQSEKPDVSYNDIGGCDIQKQEIREAVELPLTHHELYKQIGIDPPRGVLLYGPPGTGKTMLAKAVANHTTAAFIRVVGSEFVQKYLGEGPRMVRDVFRLAKENAPAIIFIDEVDAIATARFDAQTGADREVQRILMELLNQMDGFDQTVNVKVIMATNRADTLDPALLRPGRLDRKIEFPLPDRRQKRLVFQVCTSKMNLSDEVDLEDYVSRPDKISAAEIAAICQEAGMHAVRKNRYVILPKDFEKGYRANVKKPDTDFEFYK

SEQ ID NO: 40996 - DNA, 1772 bp, Arabidopsis thaliana
  misc_feature (1)..(1772): Ceres Seq. ID no. 12421835
  misc_feature: MA Experiment ID: 108461 Result: Up-regulated in Transcription
  misc_feature: MA Experiment 108461 PARAMETER Experiment Name: At_Germinating_Seeds_cDNA_P Parameter: Age (day) Value: 1 vs. 0
  misc_feature: MA Experiment 108461 PARAMETER Experiment Name: At_Germinating_Seeds_cDNA_P Parameter: Tissue Value: Germinating Seeds
  misc_feature: MA Experiment ID: 108462 Result: Up-regulated in Transcription
  misc_feature: MA Experiment 108462 PARAMETER Experiment Name: At_Germinating_Seeds_cDNA_P Parameter: Age (day) Value: 2 vs. 0
  misc_feature: MA Experiment 108462 PARAMETER Experiment Name: At_Germinating_Seeds_cDNA_P Parameter: Tissue Value: Germinating Seeds
  misc_feature: MA Experiment ID: 108463 Result: Up-regulated in Transcription
  misc_feature: MA Experiment 108463 PARAMETER Experiment Name: At_Germinating_Seeds_cDNA_P Parameter: Age (day) Value: 3 vs. 0
  misc_feature: MA Experiment 108463 PARAMETER Experiment Name: At_Germinating_Seeds_cDNA_P Parameter: Tissue Value: Germinating Seeds
  misc_feature: MA Experiment ID: 108569 Result: Up-regulated in Transcription
  misc_feature: MA Experiment 108569 PARAMETER Experiment Name: At_0.001%_MeJA__cDNA_P Parameter: Timepoint (hr) Value: 6
  misc_feature: MA Experiment 108569 PARAMETER Experiment Name: At_0.001%_MeJA__cDNA_P Parameter: Tissue Value: Aerial
  misc_feature: MA Experiment 108569 PARAMETER Experiment Name: At_0.001%_MeJA__cDNA_P Parameter: Treatment Value: 0.001% MeJA vs. No Treatment
  misc_feature: MA Experiment ID: 108572 Result: Up-regulated in Transcription
  misc_feature: MA Experiment 108572 PARAMETER Experiment Name: At_Drought_cDNA_P Parameter: Timepoint (hr) Value: 1
  misc_feature: MA Experiment 108572 PARAMETER Experiment Name: At_Drought_cDNA_P Parameter: Tissue Value: Aerial
  misc_feature: MA Experiment 108572 PARAMETER Experiment Name: At_Drought_cDNA_P Parameter: Treatment Value: Drought vs. No Drought
  misc_feature: MA Experiment ID: 108573 Result: Up-regulated in Transcription
  misc_feature: MA Experiment 108573 PARAMETER Experiment Name: At_Drought_cDNA_P Parameter: Timepoint (hr) Value: 6
  misc_feature: MA Experiment 108573 PARAMETER Experiment Name: At_Drought_cDNA_P Parameter: Tissue Value: Aerial
  misc_feature: MA Experiment 108573 PARAMETER Experiment Name: At_Drought_cDNA_P Parameter: Treatment Value: Drought vs. No Drought
  misc_feature: MA Experiment ID: 108595 Result: Up-regulated in Transcription
  misc_feature: MA Experiment 108595 PARAMETER Experiment Name: At_Ler-pi_Ovule_cDNA_P Parameter: Plant Line Value: null
  misc_feature: MA Experiment ID: 20000171 Result: Down-regulated in Transcription
  misc_feature: MA Experiment 20000171 PARAMETER Experiment Name: At_42deg_Heat_P Parameter: Age (day) Value: 14
  misc_feature: MA Experiment 20000171 PARAMETER Experiment Name: At_42deg_Heat_P Parameter: Organism Value: A. thaliana
  misc_feature: MA Experiment 20000171 PARAMETER Experiment Name: At_42deg_Heat_P Parameter: Plant Line Value: WS
  misc_feature: MA Experiment 20000171 PARAMETER Experiment Name: At_42deg_Heat_P Parameter: Temperature (deg C) Value: 42 vs. 22
  misc_feature: MA Experiment 20000171 PARAMETER Experiment Name: At_42deg_Heat_P Parameter: Timepoint (hr) Value: 1
  misc_feature: MA Experiment 20000171 PARAMETER Experiment Name: At_42deg_Heat_P Parameter: Tissue Value: Aerial
  misc_feature: MA Experiment ID: 20000180 Result: Up-regulated in Transcription
  misc_feature: MA Experiment 20000180 PARAMETER Experiment Name: At_Germinating_Seeds_P Parameter: Age (hr) Value: 24 vs. 0
  misc_feature: MA Experiment 20000180 PARAMETER Experiment Name: At_Germinating_Seeds_P Parameter: Tissue Value: Germinating Seeds
  misc_feature: MA Experiment ID: 20000184 Result: Up-regulated in Transcription
  misc_feature: MA Experiment 20000184 PARAMETER Experiment Name: At_Shoots__P Parameter: Age (day) Value: 7
  misc_feature: MA Experiment 20000184 PARAMETER Experiment Name: At_Shoots__P Parameter: Tissue Value: Shoots vs. Whole Plant
  misc_feature: MA Experiment ID: 20000234 Result: Down-regulated in Transcription
  misc_feature: MA Experiment 20000234 PARAMETER Experiment Name: At_Siliques_P Parameter: Age (day) Value: 21
  misc_feature: MA Experiment 20000234 PARAMETER Experiment Name: At_Siliques_P Parameter: Organism Value: A. thaliana
  misc_feature: MA Experiment 20000234 PARAMETER Experiment Name: At_Siliques_P Parameter: Plant Line Value: WS
  misc_feature: MA Experiment 20000234 PARAMETER Experiment Name: At_Siliques_P Parameter: Tissue Value: Less Than 5mm Siliques vs. Whole Plant
  misc_feature: MA Experiment ID: 20000235 Result: Down-regulated in Transcription
  misc_feature: MA Experiment 20000235 PARAMETER Experiment Name: At_Siliques_P Parameter: Age (day) Value: 21
  misc_feature: MA Experiment 20000235 PARAMETER Experiment Name: At_Siliques_P Parameter: Organism Value: A. thaliana
  misc_feature: MA Experiment 20000235 PARAMETER Experiment Name: At_Siliques_P Parameter: Plant Line Value: WS
  misc_feature: MA Experiment 20000235 PARAMETER Experiment Name: At_Siliques_P Parameter: Tissue Value: 5-10mm Siliques vs. Whole Plant
  misc_feature: MA Experiment ID: 20000265 Result: Up-regulated in Transcription
  misc_feature: MA Experiment 20000265 PARAMETER Experiment Name: At_Open_Flower_P Parameter: Age (day) Value: 21
  misc_feature: MA Experiment 20000265 PARAMETER Experiment Name: At_Open_Flower_P Parameter: Plant Line Value: WS
  misc_feature: MA Experiment 20000265 PARAMETER Experiment Name: At_Open_Flower_P Parameter: Tissue Value: Closed Flower vs. Whole Plant
  misc_feature: MA Experiment ID: 20000286 Result: Up-regulated in Transcription
  misc_feature: MA Experiment 20000286 PARAMETER Experiment Name: At_Open_Flower_P Parameter: Age (day) Value: 21
  misc_feature: MA Experiment 20000286 PARAMETER Experiment Name: At_Open_Flower_P Parameter: Plant Line Value: WS
  misc_feature: MA Experiment 20000286 PARAMETER Experiment Name: At_Open_Flower_P Parameter: Tissue Value: Half Open vs. Whole Plant
  misc_feature: MA Experiment ID: 20000438 Result: Up-regulated in Transcription
  misc_feature: MA Experiment 20000438 PARAMETER Experiment Name: At_Shoots__P Parameter: Age (day) Value: 14
  misc_feature: MA Experiment 20000438 PARAMETER Experiment Name: At_Shoots__P Parameter: Tissue Value: Shoots vs. Whole Plant
  misc_feature: MA Experiment ID: 20000573 Result: Down-regulated in Transcription
  misc_feature: MA Experiment 20000573 PARAMETER Experiment Name: At_100uM_ABA_Mutants__P Parameter: Organism Value: A. thaliana
  misc_feature: MA Experiment 20000573 PARAMETER Experiment Name: At_100uM_ABA_Mutants__P Parameter: Plant Line Value: CS22 vs. Ler wt
  misc_feature: MA Experiment 20000573 PARAMETER Experiment Name: At_100uM_ABA_Mutants__P Parameter: Timepoint (hr) Value: N/A
  misc_feature: MA Experiment 20000573 PARAMETER Experiment Name: At_100uM_ABA_Mutants__P Parameter: Tissue Value: Whole Plant
  misc_feature: MA Experiment 20000573 PARAMETER Experiment Name: At_100uM_ABA_Mutants__P Parameter: Treatment Value: None
  misc_feature: MA Experiment ID: 20000574 Result: Down-regulated in Transcription
  misc_feature: MA Experiment 20000574 PARAMETER Experiment Name: At_100uM_ABA_Mutants__P Parameter: Organism Value: A. thaliana
  misc_feature: MA Experiment 20000574 PARAMETER Experiment Name: At_100uM_ABA_Mutants__P Parameter: Plant Line Value: CS23 vs. Ler wt
  misc_feature: MA Experiment 20000574 PARAMETER Experiment Name: At_100uM_ABA_Mutants__P Parameter: Timepoint (hr) Value: N/A
  misc_feature: MA Experiment 20000574 PARAMETER Experiment Name: At_100uM_ABA_Mutants__P Parameter: Tissue Value: Whole Plant
  misc_feature: MA Experiment 20000574 PARAMETER Experiment Name: At_100uM_ABA_Mutants__P Parameter: Treatment Value: None
  misc_feature: MA Experiment ID: 20001248 Result: Down-regulated in Transcription
  misc_feature: MA Experiment 20001248 PARAMETER Experiment Name: At_Far-red-induction_P Parameter: Age (day) Value: 7
  misc_feature: MA Experiment 20001248 PARAMETER Experiment Name: At_Far-red-induction_P Parameter: Light Value: Far-red vs. White
  misc_feature: MA Experiment 20001248 PARAMETER Experiment Name: At_Far-red-induction_P Parameter: Organism Value: A. thaliana
  misc_feature: MA Experiment 20001248 PARAMETER Experiment Name: At_Far-red-induction_P Parameter: Plant Line Value: Columbia
  misc_feature: MA Experiment 20001248 PARAMETER Experiment Name: At_Far-red-induction_P Parameter: Timepoint (hr) Value: 4
  misc_feature: MA Experiment 20001248 PARAMETER Experiment Name: At_Far-red-induction_P Parameter: Tissue Value: Whole Plant
  misc_feature: MA Experiment ID: 20001451 Result: Down-regulated in Transcription
  misc_feature: MA Experiment 20001451 PARAMETER Experiment Name: At_Far-red-induction_P Parameter: Age (day) Value: 7
  misc_feature: MA Experiment 20001451 PARAMETER Experiment Name: At_Far-red-induction_P Parameter: Light Value: Far-red vs. White
  misc_feature: MA Experiment 20001451 PARAMETER Experiment Name: At_Far-red-induction_P Parameter: Organism Value: A. thaliana
  misc_feature: MA Experiment 20001451 PARAMETER Experiment Name: At_Far-red-induction_P Parameter: Plant Line Value: Columbia
  misc_feature: MA Experiment 20001451 PARAMETER Experiment Name: At_Far-red-induction_P Parameter: Timepoint (hr) Value: 24
  misc_feature: MA Experiment 20001451 PARAMETER Experiment Name: At_Far-red-induction_P Parameter: Tissue Value: Whole Plant
  misc_feature: MA Experiment ID: 20001557 Result: Up-regulated in Transcription
  misc_feature: MA Experiment 20001557 PARAMETER Experiment Name: At_Drought_Soil_Dry_P Parameter: Age (day) Value: 27
  misc_feature: MA Experiment 20001557 PARAMETER Experiment Name: At_Drought_Soil_Dry_P Parameter: Organism Value: A. thaliana
  misc_feature: MA Experiment 20001557 PARAMETER Experiment Name: At_Drought_Soil_Dry_P Parameter: Plant Line Value: WS
  misc_feature: MA Experiment 20001557 PARAMETER Experiment Name: At_Drought_Soil_Dry_P Parameter: Post Timepoint (hr) Value: 3
  misc_feature: MA Experiment 20001557 PARAMETER Experiment Name: At_Drought_Soil_Dry_P Parameter: Post-Treatment Value: Re-Water vs. No Drought
  misc_feature: MA Experiment 20001557 PARAMETER Experiment Name: At_Drought_Soil_Dry_P Parameter: Timepoint (day) Value: 13
  misc_feature: MA Experiment 20001557 PARAMETER Experiment Name: At_Drought_Soil_Dry_P Parameter: Treatment Value: Drought vs. No Drought
actctaaacttgttcaaaactctgactaacattcttcttcacttatctcccatctttctctcttcaataataataaacatggatctcaccgacgtaatcatattcttgttcgctctctatttcatcaacctatggtggcgccggtacttttccgccggaagcagccagtgtagcttgaacattccaccgggaccaaaaggatggccactagtcggaaacctactccaagtcatattccaacgtcgccatttcgtcttcttaatgcgtgacctacgtaaaaagtatggtccaatattcaccatgcagatgggacaacgtacgatgattatcatcacggacgaaaaactcatccacgaggcactagtccaacgcggccctacattcgcttcccggcctccggactcgccgatccggctcatgtttagtgttgggaaatgcgctataaactcggcggagtacggatctttgtggaggactctgaggaggaactttgtgacagagctagtgaccgcgccgagagtgaagcagtgctcgtggataaggagttgggctatgcagaatcatatgaagaggattaaaacggagaatgttgagaaaggtttcgtggaggttatgagccaatgtaggctaacgatttgtagtatcttgatctgtctttgtttcggtgccaagatcagcgaggaaaagattaagaacattgagaatgttcttaaggacgttatgcttataacttctccgacgttacctgactttttgccggttttcactccgttgtttcggcgtcaagttagagaagctagagagctgaggaagacgcagctcgagtgtctcgtgccgttgataagaaaccgtcgtaagttcgttgatgcaaaggagaatcctaacgaagagatggttagtccgattggtgcagcttatgtggattctttgtttcgtttgaatttgatcgagagaggtggtgagcttggagatgaagagattgtgactttgtgctcggagattgtctctgccggtacggacacgagtgcaacgacgcttgaatgggcgttatttcatctagtgactgaccaaaacattcaagagaagttatatgaggaagttgttggagttgttggcaaaaacggcgtcgttgaagaggatgacgtggcgaaaatgccttatttagaagccatcgtgaaagagactctccgacgacatcctccgggacactttcttctctctcacgccgccgtgaaagacacggagctaggagggtatgatattccggcaggggcgtatgtggaaatttacactgcttgggttactgagaacccggatatttggtcggatcctggtaagtttcgacccgagaggtttttaaccggtggggacggggttgatgctgactggacggggacacgtggtgttacaatgttgccttttggtgcgggtcgtaggatctgcccggcttggtctttagggattctgcacatcaacttgatgcttgcaaggatgatccattcgtttaaatggatcccggttccggattctccacccgacccgactgagacgtacgccttcacggtcgttatgaaaaattctctcaaagcgcaaatcaggtcaaggacctaacggatatgtttagtttttgtaagcgtgtggggtaattaaaagttataattccttagtacgtcacattaatctttgctatttttaatgttgtttatgtctatctttatctattctcaaggagtgtaaaatatatataatcatatgcagtttctgttcgttcg

SEQ ID NO: 40997 - protein, 536 aa, Arabidopsis thaliana
  peptide (1)..(536): Ceres Seq. ID no. 12421836
  misc_feature (62)..(534): Pfam Name: Cytochrome P450 Pfam Description: Cytochrome P450
  misc_feature (27)..(536): Homolog of NCBI NO: 15221065 NR Description: cytochrome p450, putative
TLNLFKTLTNILLHLSPIFLSSIIINMDLTDVIIFLFALYFINLWWRRYFSAGSSQCSLNIPPGPKGWPLVGNLLQVIFQRRHFVFLMRDLRKKYGPIFTMQMGQRTMIIITDEKLIHEALVQRGPTFASRPPDSPIRLMFSVGKCAINSAEYGSLWRTLRRNFVTELVTAPRVKQCSWIRSWAMQNHMKRIKTENVEKGFVEVMSQCRLTICSILICLCFGAKISEEKIKNIENVLKDVMLITSPTLPDFLPVFTPLFRRQVREARELRKTQLECLVPLIRNRRKFVDAKENPNEEMVSPIGAAYVDSLFRLNLIERGGELGDEEIVTLCSEIVSAGTDTSATTLEWALFHLVTDQNIQEKLYEEVVGVVGKNGVVEEDDVAKMPYLEAIVKETLRRHPPGHFLLSHAAVKDTELGGYDIPAGAYVEIYTAWVTENPDIWSDPGKFRPERFLTGGDGVDADWTGTRGVTMLPFGAGRRICPAWSLGILHINLMLARMIHSFKWIPVPDSPPDPTETYAFTVVMKNSLKAQIRSRT

SEQ ID NO: 40998 - protein, 510 aa, Arabidopsis thaliana
  peptide (1)..(510): Ceres Seq. ID no. 12421837
  misc_feature (36)..(508): Pfam Name: Cytochrome P450 Pfam Description: Cytochrome P450
  misc_feature (1)..(510): Homolog of NCBI NO: 15221065 NR Description: cytochrome p450, putative
MDLTDVIIFLFALYFINLWWRRYFSAGSSQCSLNIPPGPKGWPLVGNLLQVIFQRRHFVFLMRDLRKKYGPIFTMQMGQRTMIIITDEKLIHEALVQRGPTFASRPPDSPIRLMFSVGKCAINSAEYGSLWRTLRRNFVTELVTAPRVKQCSWIRSWAMQNHMKRIKTENVEKGFVEVMSQCRLTICSILICLCFGAKISEEKIKNIENVLKDVMLITSPTLPDFLPVFTPLFRRQVREARELRKTQLECLVPLIRNRRKFVDAKENPNEEMVSPIGAAYVDSLFRLNLIERGGELGDEEIVTLCSEIVSAGTDTSATTLEWALFHLVTDQNIQEKLYEEVVGVVGKNGVVEEDDVAKMPYLEAIVKETLRRHPPGHFLLSHAAVKDTELGGYDIPAGAYVEIYTAWVTENPDIWSDPGKFRPERFLTGGDGVDADWTGTRGVTMLPFGAGRRICPAWSLGILHINLMLARMIHSFKWIPVPDSPPDPTETYAFTVVMKNSLKAQIRSRT

SEQ ID NO: 40999 - protein, 449 aa, Arabidopsis thaliana
  peptide (1)..(449): Ceres Seq. ID no. 12421838
  misc_feature (1)..(447): Pfam Name: Cytochrome P450 Pfam Description: Cytochrome P450
  misc_feature (1)..(449): Homolog of NCBI NO: 15221065 NR Description: cytochrome p450, putative
MRDLRKKYGPIFTMQMGQRTMIIITDEKLIHEALVQRGPTFASRPPDSPIRLMFSVGKCAINSAEYGSLWRTLRRNFVTELVTAPRVKQCSWIRSWAMQNHMKRIKTENVEKGFVEVMSQCRLTICSILICLCFGAKISEEKIKNIENVLKDVMLITSPTLPDFLPVFTPLFRRQVREARELRKTQLECLVPLIRNRRKFVDAKENPNEEMVSPIGAAYVDSLFRLNLIERGGELGDEEIVTLCSEIVSAGTDTSATTLEWALFHLVTDQNIQEKLYEEVVGVVGKNGVVEEDDVAKMPYLEAIVKETLRRHPPGHFLLSHAAVKDTELGGYDIPAGAYVEIYTAWVTENPDIWSDPGKFRPERFLTGGDGVDADWTGTRGVTMLPFGAGRRICPAWSLGILHINLMLARMIHSFKWIPVPDSPPDPTETYAFTVVMKNSLKAQIRSRT

SEQ ID NO: 41000 - DNA, 1771 bp, Arabidopsis thaliana
  misc_feature (1)..(1771): Ceres Seq. ID no. 12331243
  misc_feature: MA Experiment ID: 20000794 Result: Up-regulated in Transcription
  misc_feature: MA Experiment 20000794 PARAMETER Experiment Name: At_Petals_P Parameter: Age (day) Value: 23-25 days
  misc_feature: MA Experiment 20000794 PARAMETER Experiment Name: At_Petals_P Parameter: Plant Line Value: WS
  misc_feature: MA Experiment 20000794 PARAMETER Experiment Name: At_Petals_P Parameter: Tissue Value: Petals vs. Whole plant
  misc_feature: MA Experiment ID: 20001905 Result: Up-regulated in Transcription
  misc_feature: MA Experiment 20001905 PARAMETER Experiment Name: At_Drought_Reproduction_P Parameter: Age (day) Value: 40
  misc_feature: MA Experiment 20001905 PARAMETER Experiment Name: At_Drought_Reproduction_P Parameter: Organism Value: A. thaliana
  misc_feature: MA Experiment 20001905 PARAMETER Experiment Name: At_Drought_Reproduction_P Parameter: Plant Line Value: WS
  misc_feature: MA Experiment 20001905 PARAMETER Experiment Name: At_Drought_Reproduction_P Parameter: Timepoint (day) Value: 10
  misc_feature: MA Experiment 20001905 PARAMETER Experiment Name: At_Drought_Reproduction_P Parameter: Tissue Value: Rosettes
  misc_feature: MA Experiment 20001905 PARAMETER Experiment Name: At_Drought_Reproduction_P Parameter: Treatment Value: Drought vs. No Drought
  misc_feature: MA Experiment ID: 20001911 Result: Up-regulated in Transcription
  misc_feature: MA Experiment 20001911 PARAMETER Experiment Name: At_Drought_Reproduction_P Parameter: Age (day) Value: 40
  misc_feature: MA Experiment 20001911 PARAMETER Experiment Name: At_Drought_Reproduction_P Parameter: Organism Value: A. thaliana
  misc_feature: MA Experiment 20001911 PARAMETER Experiment Name: At_Drought_Reproduction_P Parameter: Plant Line Value: WS
  misc_feature: MA Experiment 20001911 PARAMETER Experiment Name: At_Drought_Reproduction_P Parameter: Timepoint (day) Value: 10
  misc_feature: MA Experiment 20001911 PARAMETER Experiment Name: At_Drought_Reproduction_P Parameter: Tissue Value: Flowers
  misc_feature: MA Experiment 20001911 PARAMETER Experiment Name: At_Drought_Reproduction_P Parameter: Treatment Value: Drought vs. No Drought
ccgtaatctcaatcacaaactatttccccccttcgttcatcaaatcctcaagagaaaaaaaaaatccccaaaagcttcctcaaaaccctaacacagatctctcgatcttctccgatctgtcttttctcctaatctggtttagtttgatttaattggattgaagatgtcagacgctttgaatatgactcttgatgaaattgtgaagaagagtaagagtgaaaggtctgcagctgcaaggtctggaggtaaaggagtttcccgtaagagtggacgtggacgtggtggacctaatggtgttgtaggagctggaagaggaggtggacctgttcgtagaggtcctcttgctgttaatactcggccatcatcatccttctccataaacaaggcaagctcgaaatcttgattggaactctgtgccaccaaataccgaagcatgctaaaacttaagatggatgatcttttaatgctcttatgtccttggagaagaatcatacatgcataaaccgttacctctgatgatgattcagattacaagaatcttctaacatcttcttagaaaagcttctttcctgcaattagtggtttttatggttaaatactgggaacttcgagaggcatgcgtagatgtgcagaagttttcggttgatattgtcactcgctataggtttattgaagagctcctttaatctaagtagtccacatagggttatctacagggggataaagcctgaaaatgtgtgtggttctagggggaatttcagaaattttacttaaagagtaaataggatttatgatgggttatcaaagtgggggtatttgcactatgcatgaagttcacgatggtacatctggaatttcttcggagtgtgatggcagtctcagttttcgtttttggcttcagagactgactgataacaccacttgcccgcaggaagaggagcttgccatggcagaatcagaatgatttgtatgaagaaacccttagagctgttggggtgtcaggagtggaagtcggaaccacagtttatattaccaaccttgatcagggagtgacaaatgaagatataagggaactctatgctgagattggagagctgaaaagatatgcaattcactatgacaaaaatgggcgtccaagtggatcggctgaagttgtgtatatgagaagaagtgatgcaattcaagctatgaggaaatacaacaatgtacttttggatggaaggcctatgaaactggagattctgggtggaagtactgaatctgctcctgtcgcagctcgtgttaatgtgactggattgaatggaaggatgaagaggagtgtcttcattggacaaggagttagaggtgggagagtaggaagaggaagaggttcaggtccttctggaagacgccttccagtccaacaaaaccaacaaggtggtcgaggtggtcgaggcggggtccgtggtagaggcagaggtgctggtggaggcagagggaataaaagtggtggccgaggtggaaagaagccggtggagaagtctgctgcggatctcgacaaagatctcgaaagctatcatgctgaagctatgaacatctcttaaagcaagacttcgcatcttgtcatgtacttttgtgttctttattcgtagtctctgactaaatatgtgccaaagtctggtttggtttaattacgtttaggatggctctactctgctttcgttttcctcttttcttgtttcacactttcacagtcacttttggttattgaagttaaaagagatttagctgc

SEQ ID NO: 41001 - protein, 140 aa, Arabidopsis thaliana; identical to SEQ ID NO: 26230
  peptide (1)..(140): Ceres Seq. ID no. 12331244
  misc_feature (1)..(77): Homolog of NCBI NO: 30411083 NR Description: Similar to THO complex 4 [Homo sapiens]
  misc_feature (1)..(137): Homolog of NCBI NO: 38175495 NR Description: putative transcriptional coactivator(DIP2)
  misc_feature (1)..(140): Homolog of NCBI NO: 11358209 NR Description: hypothetical protein T22P11.120 - Arabidopsis
  misc_feature (1)..(140): Homolog of NCBI NO: 30679669 NR Description: RNA and export factor binding protein, putative
  misc_feature (1)..(140): Homolog of NCBI NO: 9757981 NR Description: gene_id:K12B20.19~unknown protein [Arabidopsis
  misc_feature (1)..(140): Homolog of NCBI NO: 9663025 NR Description: DIP2 protein [Arabidopsis thaliana]
  misc_feature (1)..(140): Homolog of NCBI NO: 30693141 NR Description: RNA and export factor binding protein, putative
  misc_feature (1)..(140): Homolog of NCBI NO: 25404603 NR Description: hypothetical protein T6J19.1 [imported] -
  misc_feature (1)..(140): Homolog of NCBI NO: 9663023 NR Description: DIP1 protein [Arabidopsis thaliana]
  misc_feature (1)..(140): Homolog of NCBI NO: 18408471 NR Description: RNA and export factor binding protein, putative

SEQ ID NO: 41002 - protein, 131 aa, Arabidopsis thaliana; identical to SEQ ID NO: 26231
  peptide (1)..(131): Ceres Seq. ID no. 12331245
  misc_feature (1)..(68): Homolog of NCBI NO: 30411083 NR Description: Similar to THO complex 4 [Homo sapiens]
  misc_feature (1)..(128): Homolog of NCBI NO: 38175495 NR Description: putative transcriptional coactivator(DIP2)
  misc_feature (1)..(131): Homolog of NCBI NO: 11358209 NR Description: hypothetical protein T22P11.120 - Arabidopsis
  misc_feature (1)..(131): Homolog of NCBI NO: 30679669 NR Description: RNA and export factor binding protein, putative
  misc_feature (1)..(131): Homolog of NCBI NO: 9757981 NR Description: gene_id:K12B20.19~unknown protein [Arabidopsis
  misc_feature (1)..(131): Homolog of NCBI NO: 9663025 NR Description: DIP2 protein [Arabidopsis thaliana]
  misc_feature (1)..(131): Homolog of NCBI NO: 30693141 NR Description: RNA and export factor binding protein, putative
  misc_feature (1)..(131): Homolog of NCBI NO: 25404603 NR Description: hypothetical protein T6J19.1 [imported] -
  misc_feature (1)..(131): Homolog of NCBI NO: 9663023 NR Description: DIP1 protein [Arabidopsis thaliana]
  misc_feature (1)..(131): Homolog of NCBI NO: 18408471 NR Description: RNA and export factor binding protein, putative

SEQ ID NO: 41003 - protein, 118 aa, Arabidopsis thaliana; identical to SEQ ID NO: 26232
  peptide (1)..(118): Ceres Seq. ID no. 12331246
  misc_feature (1)..(55): Homolog of NCBI NO: 30411083 NR Description: Similar to THO complex 4 [Homo sapiens]
  misc_feature (1)..(115): Homolog of NCBI NO: 38175495 NR Description: putative transcriptional coactivator(DIP2)
  misc_feature (1)..(118): Homolog of NCBI NO: 11358209 NR Description: hypothetical protein T22P11.120 - Arabidopsis
  misc_feature (1)..(118): Homolog of NCBI NO: 30679669 NR Description: RNA and export factor binding protein, putative
  misc_feature (1)..(118): Homolog of NCBI NO: 9757981 NR Description: gene_id:K12B20.19~unknown protein [Arabidopsis
  misc_feature (1)..(118): Homolog of NCBI NO: 9663025 NR Description: DIP2 protein [Arabidopsis thaliana]
  misc_feature (1)..(118): Homolog of NCBI NO: 30693141 NR Description: RNA and export factor binding protein, putative
  misc_feature (1)..(118): Homolog of NCBI NO: 25404603 NR Description: hypothetical protein T6J19.1 [imported] -
  misc_feature (1)..(118): Homolog of NCBI NO: 9663023 NR Description: DIP1 protein [Arabidopsis thaliana]
  misc_feature (1)..(118): Homolog of NCBI NO: 18408471 NR Description: RNA and export factor binding protein, putative

SEQ ID NO: 41004 - DNA, 935 bp, Arabidopsis thaliana
  misc_feature (1)..(935): Ceres Seq. ID no. 13494180
  misc_feature: MA Experiment ID: 108577 Result: Down-regulated in Transcription
  misc_feature: MA Experiment 108577 PARAMETER Experiment Name: At_42deg_Heat_cDNA_P Parameter: Temperature (deg C) Value: 42 vs. 22
  misc_feature: MA Experiment 108577 PARAMETER Experiment Name: At_42deg_Heat_cDNA_P Parameter: Timepoint (hr) Value: 6
  misc_feature: MA Experiment 108577 PARAMETER Experiment Name: At_42deg_Heat_cDNA_P Parameter: Tissue Value: Aerial
  misc_feature: MA Experiment ID: 20000069 Result: Up-regulated in Transcription
  misc_feature: MA Experiment 20000069 PARAMETER Experiment Name: At_100uM_ABA_Mutants_cDNA_P Parameter: Plant Line Value: CS23
  misc_feature: MA Experiment 20000069 PARAMETER Experiment Name: At_100uM_ABA_Mutants_cDNA_P Parameter: Timepoint (hr) Value: 6
  misc_feature: MA Experiment 20000069 PARAMETER Experiment Name: At_100uM_ABA_Mutants_cDNA_P Parameter: Tissue Value: Aerial
  misc_feature: MA Experiment 20000069 PARAMETER Experiment Name: At_100uM_ABA_Mutants_cDNA_P Parameter: Treatment Value: 100uM ABA vs. No Treatment
  misc_feature: MA Experiment ID: 20000070 Result: Up-regulated in Transcription
  misc_feature: MA Experiment 20000070 PARAMETER Experiment Name: At_100uM_ABA_Mutants_cDNA_P Parameter: Plant Line Value: CS24
  misc_feature: MA Experiment 20000070 PARAMETER Experiment Name: At_100uM_ABA_Mutants_cDNA_P Parameter: Timepoint (hr) Value: 6
  misc_feature: MA Experiment 20000070 PARAMETER Experiment Name: At_100uM_ABA_Mutants_cDNA_P Parameter: Tissue Value: Aerial
  misc_feature: MA Experiment 20000070 PARAMETER Experiment Name: At_100uM_ABA_Mutants_cDNA_P Parameter: Treatment Value: 100uM ABA vs. No Treatment
  misc_feature: MA Experiment ID: 20000071 Result: Up-regulated in Transcription
  misc_feature: MA Experiment 20000071 PARAMETER Experiment Name: At_100uM_ABA_Mutants_cDNA_P Parameter: Plant Line Value: CS8104
  misc_feature: MA Experiment 20000071 PARAMETER Experiment Name: At_100uM_ABA_Mutants_cDNA_P Parameter: Timepoint (hr) Value: 6
  misc_feature: MA Experiment 20000071 PARAMETER Experiment Name: At_100uM_ABA_Mutants_cDNA_P Parameter: Tissue Value: Aerial
  misc_feature: MA Experiment 20000071 PARAMETER Experiment Name: At_100uM_ABA_Mutants_cDNA_P Parameter: Treatment Value: 100uM ABA vs. No Treatment
  misc_feature: MA Experiment ID: 20000089 Result: Up-regulated in Transcription
  misc_feature: MA Experiment ID: 20000090 Result: Up-regulated in Transcription
  misc_feature: MA Experiment ID: 20000111 Result: Down-regulated in Transcription
  misc_feature: MA Experiment 20000111 PARAMETER Experiment Name: At_42deg_Heat_cDNA_P Parameter: Temperature (deg C) Value: 42 vs. 22
  misc_feature: MA Experiment 20000111 PARAMETER Experiment Name: At_42deg_Heat_cDNA_P Parameter: Timepoint (hr) Value: 6
  misc_feature: MA Experiment 20000111 PARAMETER Experiment Name: At_42deg_Heat_cDNA_P Parameter: Tissue Value: Aerial
  misc_feature: MA Experiment ID: 20000113 Result: Down-regulated in Transcription
  misc_feature: MA Experiment 20000113 PARAMETER Experiment Name: At_42deg_Heat_cDNA_P Parameter: Temperature (deg C) Value: 42 vs. 22
  misc_feature: MA Experiment 20000113 PARAMETER Experiment Name: At_42deg_Heat_cDNA_P Parameter: Timepoint (hr) Value: 8
  misc_feature: MA Experiment 20000113 PARAMETER Experiment Name: At_42deg_Heat_cDNA_P Parameter: Tissue Value: Aerial
  misc_feature: MA Experiment ID: 20000227 Result: Down-regulated in Transcription
  misc_feature: MA Experiment 20000227 PARAMETER Experiment Name: At_Root-Tips-vs-Tops_P Parameter: Tissue Value: Root Tips vs. Root Tops
  misc_feature: MA Experiment ID: 20000438 Result: Down-regulated in Transcription
  misc_feature: MA Experiment 20000438 PARAMETER Experiment Name: At_Shoots__P Parameter: Age (day) Value: 14
  misc_feature: MA Experiment 20000438 PARAMETER Experiment Name: At_Shoots__P Parameter: Tissue Value: Shoots vs. Whole Plant
  misc_feature: MA Experiment ID: 20001247 Result: Down-regulated in Transcription
  misc_feature: MA Experiment 20001247 PARAMETER Experiment Name: At_Far-red-induction_P Parameter: Age (day) Value: 7
  misc_feature: MA Experiment 20001247 PARAMETER Experiment Name: At_Far-red-induction_P Parameter: Light Value: Far-red vs. White
  misc_feature: MA Experiment 20001247 PARAMETER Experiment Name: At_Far-red-induction_P Parameter: Organism Value: A. thaliana
  misc_feature: MA Experiment 20001247 PARAMETER Experiment Name: At_Far-red-induction_P Parameter: Plant Line Value: Columbia
  misc_feature: MA Experiment 20001247 PARAMETER Experiment Name: At_Far-red-induction_P Parameter: Timepoint (hr) Value: 1
  misc_feature: MA Experiment 20001247 PARAMETER Experiment Name: At_Far-red-induction_P Parameter: Tissue Value: Whole Plant
agttttctcaattttttctagactcgtatcgatatggcgaatcatgaaacgatatttgatcagctaaagaagcagattccagtagatgaggaagaacctctgattttgaatcgagactcaagcgttggtctcgtcatcgttgacgttgttaatggcttctgcacaattggctccggcaatatggctccaacaaagcataatgaacagatatcgaagatggtggaggaaagtgcaaagcttgctagagagttctgtgatcggaaatggccggttttggcgtttattgactctcatcatccagatattccggagagaccttatcctcctcattgtattataggaactgaagaatcagaacttgttcctgctctgaaatggcttgaaagtgaggattgtgccactcttagacgaaaggattgtattaatgggtttgtgggttcgatggagagtgatggttctaatgtttttgtggattgggttaaggaaaaacagatcaaagttattgtcgttgtaggtatctgtacagacatatgtgtgtttgattttgtggctactgcactttctgcccgaaaccacggtgttctttctcctgtagaagatgtggtagtgtactcccgtggctgtgctacttttgaccttcctcttcatgttgcgaaagacatcaaaggcgctcaggctcatcctcaggagttgatgcaccatgtaggtctatatatggctaaaggaagaggagctcaggtagtctctaaaatttcttttgagacttgaaagactatatctcgtttataaacataacactcttgatatcaaatatttcagtaaattgttgagtttgcctctcttttctttcgtgtaaattgttcatgaagcttgttctctgaatttcaactcttgtgtaactgtttcagaatgacaaataatatgatgggtttctt

SEQ ID NO: 41005 - protein, 244 aa, Arabidopsis thaliana
  peptide (1)..(244): Ceres Seq. ID no. 13494181
  misc_feature (25)..(222): Pfam Name: Isochorismatase family Pfam Description: Isochorismatase family
  misc_feature (85)..(238): Homolog of NCBI NO: 22974429 NR Description: hypothetical protein [Chloroflexus aurantiacus]
  misc_feature (1)..(240): Homolog of NCBI NO: 23042463 NR Description: hypothetical protein [Trichodesmium erythraeum
  misc_feature (5)..(219): Homolog of NCBI NO: 15144508 NR Description: unknown [Lycopersicon esculentum]
  misc_feature (1)..(218): Homolog of NCBI NO: 25412119 NR Description: hypothetical protein At2g22570 [imported] -
  misc_feature (1)..(244): Homolog of NCBI NO: 21537016 NR Description: unknown [Arabidopsis thaliana]
  misc_feature (1)..(244): Homolog of NCBI NO: 18400020 NR Description: isochorismatase hydrolase family [Arabidopsis
MANHETIFDQLKKQIPVDEEEPLILNRDSSVGLVIVDVVNGFCTIGSGNMAPTKHNEQISKMVEESAKLAREFCDRKWPVLAFIDSHHPDIPERPYPPHCIIGTEESELVPALKWLESEDCATLRRKDCINGFVGSMESDGSNVFVDWVKEKQIKVIVVVGICTDICVFDFVATALSARNHGVLSPVEDVVVYSRGCATFDLPLHVAKDIKGAQAHPQELMHHVGLYMAKGRGAQVVSKISFET

SEQ ID NO: 41006 - protein, 195 aa, Arabidopsis thaliana
  peptide (1)..(195): Ceres Seq. ID no. 13494182
  misc_feature (1)..(173): Pfam Name: Isochorismatase family Pfam Description: Isochorismatase family
  misc_feature (36)..(189): Homolog of NCBI NO: 22974429 NR Description: hypothetical protein [Chloroflexus aurantiacus]
  misc_feature (1)..(191): Homolog of NCBI NO: 23042463 NR Description: hypothetical protein [Trichodesmium erythraeum
  misc_feature (1)..(170): Homolog of NCBI NO: 15144508 NR Description: unknown [Lycopersicon esculentum]
  misc_feature (1)..(169): Homolog of NCBI NO: 25412119 NR Description: hypothetical protein At2g22570 [imported] -
  misc_feature (1)..(195): Homolog of NCBI NO: 21537016 NR Description: unknown [Arabidopsis thaliana]
  misc_feature (1)..(195): Homolog of NCBI NO: 18400020 NR Description: isochorismatase hydrolase family [Arabidopsis
MAPTKHNEQISKMVEESAKLAREFCDRKWPVLAFIDSHHPDIPERPYPPHCIIGTEESELVPALKWLESEDCATLRRKDCINGFVGSMESDGSNVFVDWVKEKQIKVIVVVGICTDICVFDFVATALSARNHGVLSPVEDVVVYSRGCATFDLPLHVAKDIKGAQAHPQELMHHVGLYMAKGRGAQVVSKISFET

SEQ ID NO: 41007 - protein, 183 aa, Arabidopsis thaliana
  peptide (1)..(183): Ceres Seq. ID no. 13494183
  misc_feature (1)..(161): Pfam Name: Isochorismatase family Pfam Description: Isochorismatase family
  misc_feature (24)..(177): Homolog of NCBI NO: 22974429 NR Description: hypothetical protein [Chloroflexus aurantiacus]
  misc_feature (1)..(179): Homolog of NCBI NO: 23042463 NR Description: hypothetical protein [Trichodesmium erythraeum
  misc_feature (1)..(158): Homolog of NCBI NO: 15144508 NR Description: unknown [Lycopersicon esculentum]
  misc_feature (1)..(157): Homolog of NCBI NO: 25412119 NR Description: hypothetical protein At2g22570 [imported] -
  misc_feature (1)..(183): Homolog of NCBI NO: 21537016 NR Description: unknown [Arabidopsis thaliana]
  misc_feature (1)..(183): Homolog of NCBI NO: 18400020 NR Description: isochorismatase hydrolase family [Arabidopsis
MVEESAKLAREFCDRKWPVLAFIDSHHPDIPERPYPPHCIIGTEESELVPALKWLESEDCATLRRKDCINGFVGSMESDGSNVFVDWVKEKQIKVIVVVGICTDICVFDFVATALSARNHGVLSPVEDVVVYSRGCATFDLPLHVAKDIKGAQAHPQELMHHVGLYMAKGRGAQVVSKISFET

SEQ ID NO: 41008 - DNA, 1337 bp, Arabidopsis thaliana
  misc_feature (1)..(1337): Ceres Seq. ID no. 12329732
  misc_feature: MA Experiment ID: 108463 Result: Up-regulated in Transcription
  misc_feature: MA Experiment 108463 PARAMETER Experiment Name: At_Germinating_Seeds_cDNA_P Parameter: Age (day) Value: 3 vs. 0
  misc_feature: MA Experiment 108463 PARAMETER Experiment Name: At_Germinating_Seeds_cDNA_P Parameter: Tissue Value: Germinating Seeds
  misc_feature: MA Experiment ID: 108473 Result: Up-regulated in Transcription
  misc_feature: MA Experiment 108473 PARAMETER Experiment Name: At_Drought_Flowers_cDNA_P Parameter: Timepoint (hr) Value: 7 d
  misc_feature: MA Experiment 108473 PARAMETER Experiment Name: At_Drought_Flowers_cDNA_P Parameter: Tissue Value: Flower
  misc_feature: MA Experiment 108473 PARAMETER Experiment Name: At_Drought_Flowers_cDNA_P Parameter: Treatment Value: Drought vs. No Drought
  misc_feature: MA Experiment ID: 108489 Result: Up-regulated in Transcription
  misc_feature: MA Experiment ID: 20000030 Result: Up-regulated in Transcription
  misc_feature: MA Experiment 20000030 PARAMETER Experiment Name: At_CS6630_Roots_cDNA_P Parameter: Plant Line Value: CS6630 vs. WS
  misc_feature: MA Experiment 20000030 PARAMETER Experiment Name: At_CS6630_Roots_cDNA_P Parameter: Tissue Value: Roots
  misc_feature: MA Experiment ID: 20000069 Result: Up-regulated in Transcription
  misc_feature: MA Experiment 20000069 PARAMETER Experiment Name: At_100uM_ABA_Mutants_cDNA_P Parameter: Plant Line Value: CS23
  misc_feature: MA Experiment 20000069 PARAMETER Experiment Name: At_100uM_ABA_Mutants_cDNA_P Parameter: Timepoint (hr) Value: 6
  misc_feature: MA Experiment 20000069 PARAMETER Experiment Name: At_100uM_ABA_Mutants_cDNA_P Parameter: Tissue Value: Aerial
  misc_feature: MA Experiment 20000069 PARAMETER Experiment Name: At_100uM_ABA_Mutants_cDNA_P Parameter: Treatment Value: 100uM ABA vs. No Treatment
  misc_feature: MA Experiment ID: 20000070 Result: Up-regulated in Transcription
  misc_feature: MA Experiment 20000070 PARAMETER Experiment Name: At_100uM_ABA_Mutants_cDNA_P Parameter: Plant Line Value: CS24
  misc_feature: MA Experiment 20000070 PARAMETER Experiment Name: At_100uM_ABA_Mutants_cDNA_P Parameter: Timepoint (hr) Value: 6
  misc_feature: MA Experiment 20000070 PARAMETER Experiment Name: At_100uM_ABA_Mutants_cDNA_P Parameter: Tissue Value: Aerial
  misc_feature: MA Experiment 20000070 PARAMETER Experiment Name: At_100uM_ABA_Mutants_cDNA_P Parameter: Treatment Value: 100uM ABA vs. No Treatment
  misc_feature: MA Experiment ID: 20000071 Result: Up-regulated in Transcription
  misc_feature: MA Experiment 20000071 PARAMETER Experiment Name: At_100uM_ABA_Mutants_cDNA_P Parameter: Plant Line Value: CS8104
  misc_feature: MA Experiment 20000071 PARAMETER Experiment Name: At_100uM_ABA_Mutants_cDNA_P Parameter: Timepoint (hr) Value: 6
  misc_feature: MA Experiment 20000071 PARAMETER Experiment Name: At_100uM_ABA_Mutants_cDNA_P Parameter: Tissue Value: Aerial
  misc_feature: MA Experiment 20000071 PARAMETER Experiment Name: At_100uM_ABA_Mutants_cDNA_P Parameter: Treatment Value: 100uM ABA vs. No Treatment
  misc_feature: MA Experiment ID: 20000072 Result: Up-regulated in Transcription
  misc_feature: MA Experiment 20000072 PARAMETER Experiment Name: At_100uM_ABA_Mutants_cDNA_P Parameter: Plant Line Value: CS8105
  misc_feature: MA Experiment 20000072 PARAMETER Experiment Name: At_100uM_ABA_Mutants_cDNA_P Parameter: Timepoint (hr) Value: 6
  misc_feature: MA Experiment 20000072 PARAMETER Experiment Name: At_100uM_ABA_Mutants_cDNA_P Parameter: Tissue Value: Aerial
  misc_feature: MA Experiment 20000072 PARAMETER Experiment Name: At_100uM_ABA_Mutants_cDNA_P Parameter: Treatment Value: 100uM ABA vs. No Treatment
  misc_feature: MA Experiment ID: 20000087 Result: Up-regulated in Transcription
  misc_feature: MA Experiment 20000087 PARAMETER Experiment Name: At_100uM_ABA_Mutants_cDNA_P Parameter: Plant Line Value: WS
  misc_feature: MA Experiment 20000087 PARAMETER Experiment Name: At_100uM_ABA_Mutants_cDNA_P Parameter: Timepoint (hr) Value: 6
  misc_feature: MA Experiment 20000087 PARAMETER Experiment Name: At_100uM_ABA_Mutants_cDNA_P Parameter: Tissue Value: Aerial
  misc_feature: MA Experiment 20000087 PARAMETER Experiment Name: At_100uM_ABA_Mutants_cDNA_P Parameter: Treatment Value: 100uM ABA vs. No Treatment
  misc_feature: MA Experiment ID: 20000088 Result: Up-regulated in Transcription
  misc_feature: MA Experiment 20000088 PARAMETER Experiment Name: At_100uM_ABA_Mutants_cDNA_P Parameter: Plant Line Value: Landsberg
  misc_feature: MA Experiment 20000088 PARAMETER Experiment Name: At_100uM_ABA_Mutants_cDNA_P Parameter: Timepoint (hr) Value: 6
  misc_feature: MA Experiment 20000088 PARAMETER Experiment Name: At_100uM_ABA_Mutants_cDNA_P Parameter: Tissue Value: Aerial
  misc_feature: MA Experiment 20000088 PARAMETER Experiment Name: At_100uM_ABA_Mutants_cDNA_P Parameter: Treatment Value: 100uM ABA vs. No Treatment
  misc_feature: MA Experiment ID: 20000089 Result: Up-regulated in Transcription
  misc_feature: MA Experiment ID: 20000111 Result: Up-regulated in Transcription
  misc_feature: MA Experiment 20000111 PARAMETER Experiment Name: At_42deg_Heat_cDNA_P Parameter: Temperature (deg C) Value: 42 vs. 22
  misc_feature: MA Experiment 20000111 PARAMETER Experiment Name: At_42deg_Heat_cDNA_P Parameter: Timepoint (hr) Value: 6
  misc_feature: MA Experiment 20000111 PARAMETER Experiment Name: At_42deg_Heat_cDNA_P Parameter: Tissue Value: Aerial
  misc_feature: MA Experiment ID: 20000117 Result: Up-regulated in Transcription
  misc_feature: MA Experiment 20000117 PARAMETER Experiment Name: At_100uM_ABA_Mutants_cDNA_P Parameter: Plant Line Value: Columbia
  misc_feature: MA Experiment 20000117 PARAMETER Experiment Name: At_100uM_ABA_Mutants_cDNA_P Parameter: Timepoint (hr) Value: 6
  misc_feature: MA Experiment 20000117 PARAMETER Experiment Name: At_100uM_ABA_Mutants_cDNA_P Parameter: Tissue Value: Aerial
  misc_feature: MA Experiment 20000117 PARAMETER Experiment Name: At_100uM_ABA_Mutants_cDNA_P Parameter: Treatment Value: 100uM ABA vs. No Treatment
  misc_feature: MA Experiment ID: 20000269 Result: Down-regulated in Transcription
  misc_feature: MA Experiment 20000269 PARAMETER Experiment Name: At_1mM_KNO3_L-vs-H_Roots_P Parameter: Age (day) Value: 7,10,12
  misc_feature: MA Experiment 20000269 PARAMETER Experiment Name: At_1mM_KNO3_L-vs-H_Roots_P Parameter: Organism Value: A. thaliana
  misc_feature: MA Experiment 20000269 PARAMETER Experiment Name: At_1mM_KNO3_L-vs-H_Roots_P Parameter: Plant Line Value: WS
  misc_feature: MA Experiment 20000269 PARAMETER Experiment Name: At_1mM_KNO3_L-vs-H_Roots_P Parameter: Timepoint (day) Value: 7,10,12
  misc_feature: MA Experiment 20000269 PARAMETER Experiment Name: At_1mM_KNO3_L-vs-H_Roots_P Parameter: Tissue Value: Roots
  misc_feature: MA Experiment 20000269 PARAMETER Experiment Name: At_1mM_KNO3_L-vs-H_Roots_P Parameter: Treatment Value: 1mM KNO3 vs. 50mM KNO3
  misc_feature: MA Experiment ID: 20000437 Result: Up-regulated in Transcription
  misc_feature: MA Experiment 20000437 PARAMETER Experiment Name: At_Drought_P Parameter: Age (day) Value: 8
  misc_feature: MA Experiment 20000437 PARAMETER Experiment Name: At_Drought_P Parameter: Organism Value: A. thaliana
  misc_feature: MA Experiment 20000437 PARAMETER Experiment Name: At_Drought_P Parameter: Plant Line Value: WS
  misc_feature: MA Experiment 20000437 PARAMETER Experiment Name: At_Drought_P Parameter: Timepoint (hr) Value: 24
  misc_feature: MA Experiment 20000437 PARAMETER Experiment Name: At_Drought_P Parameter: Tissue Value: Whole Plant
  misc_feature: MA Experiment 20000437 PARAMETER Experiment Name: At_Drought_P Parameter: Treatment Value: Drought vs. No Drought
  misc_feature: MA Experiment ID: 20001451 Result: Up-regulated in Transcription
  misc_feature: MA Experiment 20001451 PARAMETER Experiment Name: At_Far-red-induction_P Parameter: Age (day) Value: 7
  misc_feature: MA Experiment 20001451 PARAMETER Experiment Name: At_Far-red-induction_P Parameter: Light Value: Far-red vs. White
  misc_feature: MA Experiment 20001451 PARAMETER Experiment Name: At_Far-red-induction_P Parameter: Organism Value: A. thaliana
  misc_feature: MA Experiment 20001451 PARAMETER Experiment Name: At_Far-red-induction_P Parameter: Plant Line Value: Columbia
  misc_feature: MA Experiment 20001451 PARAMETER Experiment Name: At_Far-red-induction_P Parameter: Timepoint (hr) Value: 24
  misc_feature: MA Experiment 20001451 PARAMETER Experiment Name: At_Far-red-induction_P Parameter: Tissue Value: Whole Plant
  misc_feature: MA Experiment ID: 20001458 Result: Up-regulated in Transcription
  misc_feature: MA Experiment 20001458 PARAMETER Experiment Name: At_50mM_NH4NO3_L-to-H_P Parameter: Age (day) Value: Undefined
  misc_feature: MA Experiment 20001458 PARAMETER Experiment Name: At_50mM_NH4NO3_L-to-H_P Parameter: Organism Value: Undefined
  misc_feature: MA Experiment 20001458 PARAMETER Experiment Name: At_50mM_NH4NO3_L-to-H_P Parameter: Plant Line Value: Undefined
  misc_feature: MA Experiment 20001458 PARAMETER Experiment Name: At_50mM_NH4NO3_L-to-H_P Parameter: Timepoint (hr) Value: 2
  misc_feature: MA Experiment 20001458 PARAMETER Experiment Name: At_50mM_NH4NO3_L-to-H_P Parameter: Tissue Value: Siliques
  misc_feature: MA Experiment 20001458 PARAMETER Experiment Name: At_50mM_NH4NO3_L-to-H_P Parameter: Treatment Value: 50mM NH4NO3 vs. 100mM Manitol
  misc_feature: MA Experiment ID: 20001910 Result: Up-regulated in Transcription
  misc_feature: MA Experiment 20001910 PARAMETER Experiment Name: At_Drought_Reproduction_P Parameter: Age (day) Value: 37
  misc_feature: MA Experiment 20001910 PARAMETER Experiment Name: At_Drought_Reproduction_P Parameter: Organism Value: A. thaliana
  misc_feature: MA Experiment 20001910 PARAMETER Experiment Name: At_Drought_Reproduction_P Parameter: Plant Line Value: WS
  misc_feature: MA Experiment 20001910 PARAMETER Experiment Name: At_Drought_Reproduction_P Parameter: Timepoint (day) Value: 7
  misc_feature: MA Experiment 20001910 PARAMETER Experiment Name: At_Drought_Reproduction_P Parameter: Tissue Value: Flowers
  misc_feature: MA Experiment 20001910 PARAMETER Experiment Name: At_Drought_Reproduction_P Parameter: Treatment Value: Drought vs. No Drought
atcttgtccgatggttcaaacagaaaccgatcaaaggatgggtcttaatctgaatttgtctatctactctttaccaaaacccttatctcaatttctcgatgaagtgtcgaggatcaaagacaatcattccaaactgtctgaaatcgatggttatgtcggaaaattagaggaagaaaggaacaaaatcgatgtttttaaacgagaactccctttatgcatgctcttattgaacgaagcgattggggcgttgaaggatgaggctagaaaagggttatcactgatggcatctaatgggaaattcgatgatgttgaaagggcaaaaccggaaactgataagaagagctggatgagctctgcccagttatggatctcgaaccctaattcccaattccgatcgacaaatgaagaagaagaagatcggtgtgtgagtcagaacccatttcagacatgtaattaccctaatcaaggaggggtatttatgccatttaaccgtcccccacctcctccaccaccagctcctctgtctctcatgactccaacatcagagatgatgatggattatagcagaattgagcagagtcatcatcatcatcaattcaataaaccttcttcacagagtcatcacattcagaagaaagagcagagaaggagatggtcacaggaacttcaccgtaaatttgttgatgctcttcataggcttggagggccacaagttgctacaccaaagcagattagagatttgatgaaagttgatggtttaaccaatgatgaagtcaagagccatttacaaaaatatagaatgcatatccgtaagcatccgctgcatccgacaaagactttgtcatcgtcggatcagccaggtgtgttagagagagaatcgcagagcttaataagtttgtcgaggtcggattcgccacaaagcccacttgttgcaagagggttgttcagtagtaatgttggtcatagctcagaggaagatgaggaggaggaggatgaagaggaggagaagtctgatggacgtagtagctgtagaaatgatgaaacaaagaagaagagacaagtgttggatcttgagctttgaaagtctgcatagtgaatgatataatctttaccaacttatgttatatatgctcaaaactttgagtttgttcgggagtttttgtagatgtaaacatgagagttgaaataaggaagaggattttgagcaaaaagtagggtttgtttttgcaagaggaaatagatagagaagagtgttcgaaatcctctgtgttttttttttttttttttttttacttcataagtaagataaactcatatatcaaagattttgtttttat

SEQ ID NO: 41009 - protein, 359 aa, Arabidopsis thaliana
  peptide (1)..(359): Ceres Seq. ID no. 12329733
  misc_feature (215)..(266): Pfam Name: Myb-like DNA-binding domain Pfam Description: Myb-like DNA-binding domain
  misc_feature (101)..(285): Homolog of NCBI NO: 18409089 NR Description: expressed protein
  misc_feature (13)..(140): Homolog of NCBI NO: 34915398 NR Description: contains ESTs
  misc_feature (201)..(339): Homolog of NCBI NO: 34915398 NR Description: contains ESTs
  misc_feature (13)..(140): Homolog of NCBI NO: 33146555 NR Description: putative cytoskeletal protein-like protein
  misc_feature (201)..(339): Homolog of NCBI NO: 33146555 NR Description: putative cytoskeletal protein-like protein
  misc_feature (177)..(359): Homolog of NCBI NO: 1732509 NR Description: putative cytoskeletal protein [Arabidopsis
  misc_feature (177)..(359): Homolog of NCBI NO: 25407794 NR Description: probable cytoskeletal protein [imported] -
  misc_feature (4)..(346): Homolog of NCBI NO: 14532434 NR Description: AT4g37180/C7A10_180 [Arabidopsis thaliana]
  misc_feature (4)..(359): Homolog of NCBI NO: 30690890 NR Description: cytoskeletal protein -related [Arabidopsis
  misc_feature (4)..(359): Homolog of NCBI NO: 18419989 NR Description: putative cytoskeletal protein; protein id:
SCPMVQTETDQRMGLNLNLSIYSLPKPLSQFLDEVSRIKDNHSKLSEIDGYVGKLEEERNKIDVFKRELPLCMLLLNEAIGALKDEARKGLSLMASNGKFDDVERAKPETDKKSWMSSAQLWISNPNSQFRSTNEEEEDRCVSQNPFQTCNYPNQGGVFMPFNRPPPPPPPAPLSLMTPTSEMMMDYSRIEQSHHHHQFNKPSSQSHHIQKKEQRRRWSQELHRKFVDALHRLGGPQVATPKQIRDLMKVDGLTNDEVKSHLQKYRMHIRKHPLHPTKTLSSSDQPGVLERESQSLISLSRSDSPQSPLVARGLFSSNVGHSSEEDEEEEDEEEEKSDGRSSCRNDETKKKRQVLDLEL

SEQ ID NO: 41010 - protein, 356 aa, Arabidopsis thaliana
  peptide (1)..(356): Ceres Seq. ID no. 12329734
  misc_feature (212)..(263): Pfam Name: Myb-like DNA-binding domain Pfam Description: Myb-like DNA-binding domain
  misc_feature (98)..(282): Homolog of NCBI NO: 18409089 NR Description: expressed protein
  misc_feature (10)..(137): Homolog of NCBI NO: 34915398 NR Description: contains ESTs
  misc_feature (198)..(336): Homolog of NCBI NO: 34915398 NR Description: contains ESTs
  misc_feature (10)..(137): Homolog of NCBI NO: 33146555 NR Description: putative cytoskeletal protein-like protein
  misc_feature (198)..(336): Homolog of NCBI NO: 33146555 NR Description: putative cytoskeletal protein-like protein
  misc_feature (174)..(356): Homolog of NCBI NO: 1732509 NR Description: putative cytoskeletal protein [Arabidopsis
  misc_feature (174)..(356): Homolog of NCBI NO: 25407794 NR Description: probable cytoskeletal protein [imported] -
  misc_feature (1)..(343): Homolog of NCBI NO: 14532434 NR Description: AT4g37180/C7A10_180 [Arabidopsis thaliana]
  misc_feature (1)..(356): Homolog of NCBI NO: 30690890 NR Description: cytoskeletal protein -related [Arabidopsis
  misc_feature (1)..(356): Homolog of NCBI NO: 18419989 NR Description: putative cytoskeletal protein; protein id:
MVQTETDQRMGLNLNLSIYSLPKPLSQFLDEVSRIKDNHSKLSEIDGYVGKLEEERNKIDVFKRELPLCMLLLNEAIGALKDEARKGLSLMASNGKFDDVERAKPETDKKSWMSSAQLWISNPNSQFRSTNEEEEDRCVSQNPFQTCNYPNQGGVFMPFNRPPPPPPPAPLSLMTPTSEMMMDYSRIEQSHHHHQFNKPSSQSHHIQKKEQRRRWSQELHRKFVDALHRLGGPQVATPKQIRDLMKVDGLTNDEVKSHLQKYRMHIRKHPLHPTKTLSSSDQPGVLERESQSLISLSRSDSPQSPLVARGLFSSNVGHSSEEDEEEEDEEEEKSDGRSSCRNDETKKKRQVLDLEL

SEQ ID NO: 41011 - protein, 347 aa, Arabidopsis thaliana
  peptide (1)..(347): Ceres Seq. ID no. 12329735
  misc_feature (203)..(254): Pfam Name: Myb-like DNA-binding domain Pfam Description: Myb-like DNA-binding domain
  misc_feature (89)..(273): Homolog of NCBI NO: 18409089 NR Description: expressed protein
  misc_feature (1)..(128): Homolog of NCBI NO: 34915398 NR Description: contains ESTs
  misc_feature (189)..(327): Homolog of NCBI NO: 34915398 NR Description: contains ESTs
  misc_feature (1)..(128): Homolog of NCBI NO: 33146555 NR Description: putative cytoskeletal protein-like protein
  misc_feature (189)..(327): Homolog of NCBI NO: 33146555 NR Description: putative cytoskeletal protein-like protein
  misc_feature (165)..(347): Homolog of NCBI NO: 1732509 NR Description: putative cytoskeletal protein [Arabidopsis
  misc_feature (165)..(347): Homolog of NCBI NO: 25407794 NR Description: probable cytoskeletal protein [imported] -
  misc_feature (1)..(334): Homolog of NCBI NO: 14532434 NR Description: AT4g37180/C7A10_180 [Arabidopsis thaliana]
  misc_feature (1)..(347): Homolog of NCBI NO: 30690890 NR Description: cytoskeletal protein -related [Arabidopsis
  misc_feature (1)..(347): Homolog of NCBI NO: 18419989 NR Description: putative cytoskeletal protein; protein id:
MGLNLNLSIYSLPKPLSQFLDEVSRIKDNHSKLSEIDGYVGKLEEERNKIDVFKRELPLCMLLLNEAIGALKDEARKGLSLMASNGKFDDVERAKPETDKKSWMSSAQLWISNPNSQFRSTNEEEEDRCVSQNPFQTCNYPNQGGVFMPFNRPPPPPPPAPLSLMTPTSEMMMDYSRIEQSHHHHQFNKPSSQSHHIQKKEQRRRWSQELHRKFVDALHRLGGPQVATPKQIRDLMKVDGLTNDEVKSHLQKYRMHIRKHPLHPTKTLSSSDQPGVLERESQSLISLSRSDSPQSPLVARGLFSSNVGHSSEEDEEEEDEEEEKSDGRSSCRNDETKKKRQVLDLEL

SEQ ID NO: 41012 - DNA, 1185 bp, Arabidopsis thaliana
  misc_feature (1)..(1185): Ceres Seq. ID no. 12327893
  misc_feature: MA Experiment ID: 108435 Result: Down-regulated in Transcription
  misc_feature: MA Experiment 108435 PARAMETER Experiment Name: At_stm_Mutants_cDNA_P Parameter: Plant Line Value: wt Landsburg vs stm
  misc_feature: MA Experiment 108435 PARAMETER Experiment Name: At_stm_Mutants_cDNA_P Parameter: Tissue Value: Shoot Apical Meristem Region
  misc_feature: MA Experiment ID: 108577 Result: Down-regulated in Transcription
  misc_feature: MA Experiment 108577 PARAMETER Experiment Name: At_42deg_Heat_cDNA_P Parameter: Temperature (deg C) Value: 42 vs. 22
  misc_feature: MA Experiment 108577 PARAMETER Experiment Name: At_42deg_Heat_cDNA_P Parameter: Timepoint (hr) Value: 6
  misc_feature: MA Experiment 108577 PARAMETER Experiment Name: At_42deg_Heat_cDNA_P Parameter: Tissue Value: Aerial
  misc_feature: MA Experiment ID: 108595 Result: Down-regulated in Transcription
  misc_feature: MA Experiment 108595 PARAMETER Experiment Name: At_Ler-pi_Ovule_cDNA_P Parameter: Plant Line Value: null
  misc_feature: MA Experiment ID: 20000111 Result: Down-regulated in Transcription
  misc_feature: MA Experiment 20000111 PARAMETER Experiment Name: At_42deg_Heat_cDNA_P Parameter: Temperature (deg C) Value: 42 vs. 22
  misc_feature: MA Experiment 20000111 PARAMETER Experiment Name: At_42deg_Heat_cDNA_P Parameter: Timepoint (hr) Value: 6
  misc_feature: MA Experiment 20000111 PARAMETER Experiment Name: At_42deg_Heat_cDNA_P Parameter: Tissue Value: Aerial
  misc_feature: MA Experiment ID: 20000112 Result: Down-regulated in Transcription
  misc_feature: MA Experiment 20000112 PARAMETER Experiment Name: At_42deg_Heat_cDNA_P Parameter: Temperature (deg C) Value: 42 vs. 22
  misc_feature: MA Experiment 20000112 PARAMETER Experiment Name: At_42deg_Heat_cDNA_P Parameter: Timepoint (hr) Value: 2
  misc_feature: MA Experiment 20000112 PARAMETER Experiment Name: At_42deg_Heat_cDNA_P Parameter: Tissue Value: Aerial
  misc_feature: MA Experiment ID: 20000113 Result: Down-regulated in Transcription
  misc_feature: MA Experiment 20000113 PARAMETER Experiment Name: At_42deg_Heat_cDNA_P Parameter: Temperature (deg C) Value: 42 vs. 22
  misc_feature: MA Experiment 20000113 PARAMETER Experiment Name: At_42deg_Heat_cDNA_P Parameter: Timepoint (hr) Value: 8
  misc_feature: MA Experiment 20000113 PARAMETER Experiment Name: At_42deg_Heat_cDNA_P Parameter: Tissue Value: Aerial
  misc_feature: MA Experiment ID: 20000144 Result: Down-regulated in Transcription
  misc_feature: MA Experiment 20000144 PARAMETER Experiment Name: At_42deg_Heat_cDNA_P Parameter: Temperature (deg C) Value: 42 vs. 22
  misc_feature: MA Experiment 20000144 PARAMETER Experiment Name: At_42deg_Heat_cDNA_P Parameter: Timepoint (hr) Value: 1
  misc_feature: MA Experiment 20000144 PARAMETER Experiment Name: At_42deg_Heat_cDNA_P Parameter: Tissue Value: Aerial
  misc_feature: MA Experiment ID: 20000234 Result: Down-regulated in Transcription
  misc_feature: MA Experiment 20000234 PARAMETER Experiment Name: At_Siliques_P Parameter: Age (day) Value: 21
  misc_feature: MA Experiment 20000234 PARAMETER Experiment Name: At_Siliques_P Parameter: Organism Value: A. thaliana
  misc_feature: MA Experiment 20000234 PARAMETER Experiment Name: At_Siliques_P Parameter: Plant Line Value: WS
  misc_feature: MA Experiment 20000234 PARAMETER Experiment Name: At_Siliques_P Parameter: Tissue Value: Less Than 5mm Siliques vs. Whole Plant
  misc_feature: MA Experiment ID: 20000438 Result: Up-regulated in Transcription
  misc_feature: MA Experiment 20000438 PARAMETER Experiment Name: At_Shoots__P Parameter: Age (day) Value: 14
  misc_feature: MA Experiment 20000438 PARAMETER Experiment Name: At_Shoots__P Parameter: Tissue Value: Shoots vs. Whole Plant
  misc_feature: MA Experiment ID: 20000574 Result: Down-regulated in Transcription
  misc_feature: MA Experiment 20000574 PARAMETER Experiment Name: At_100uM_ABA_Mutants__P Parameter: Organism Value: A. thaliana
  misc_feature: MA Experiment 20000574 PARAMETER Experiment Name: At_100uM_ABA_Mutants__P Parameter: Plant Line Value: CS23 vs. Ler wt
  misc_feature: MA Experiment 20000574 PARAMETER Experiment Name: At_100uM_ABA_Mutants__P Parameter: Timepoint (hr) Value: N/A
  misc_feature: MA Experiment 20000574 PARAMETER Experiment Name: At_100uM_ABA_Mutants__P Parameter: Tissue Value: Whole Plant
  misc_feature: MA Experiment 20000574 PARAMETER Experiment Name: At_100uM_ABA_Mutants__P Parameter: Treatment Value: None
  misc_feature: MA Experiment ID: 20000794 Result: Down-regulated in Transcription
  misc_feature: MA Experiment 20000794 PARAMETER Experiment Name: At_Petals_P Parameter: Age (day) Value: 23-25 days
  misc_feature: MA Experiment 20000794 PARAMETER Experiment Name: At_Petals_P Parameter: Plant Line Value: WS
  misc_feature: MA Experiment 20000794 PARAMETER Experiment Name: At_Petals_P Parameter: Tissue Value: Petals vs. Whole plant
caataacaacactttcgatgacttcggctttgactctggtttcttaggacaacaattccatggaaatcatcaatctccgaactcgatgaatttcactggcttaaaccactcagtaccggattttcttccagctccggaaaacagctctggatcatgtggattgagtcctctgttctcgaacagagcaaaggttttaaaaccgttacaggtaatggcttcatctggctcgcagccaactctgtttcagaaacgagctgcaatgcgtcagagttcgactagcaaatcagagagttcttctgaaatgaggaaatcgagctacgagagagagattgacgatactagtaccggaatcatcgatatctctggattgaattacgaatctgatgaccataatactaataacaacaaaggtaagaagaaaggaatgcctgcaaagaaccttatggctgagagaagaagaaggaagaagcttaatgataggctttacatgcttagatcagttgttcccaagatcagcaaaatggatagagcatcaatacttggagatgctattgattacctcaaagagcttttacaaagaatcaacgatcttcataccgaactcgaatctactccaccgagttcttcaagcttgcatccgttaacaccgactccacaaacgctgtcttaccgtgttaaggaagagttgtgtccatcttcctccttgccaagccctaaaggccagcaaccaagagttgaggttagattaagagaaggaaaggcagtgaacattcacatgttctgtggacgtagaccaggtcttttactttccaccatgagagctttggataacttaggattggatgttcaacaagctgtgattagctgtttcaacggttttgctttggatgttttccgcgctgagcaatgtcaagaagaccatgacgtgttacctgaacaaatcaaagcagtgcttttagatacagcaggttacgctggtttggtttgattgcgaagcagaaggaagcatctgtgtggaacagagctagatctaagtccttgttctgttttagtcagcaattttcttacttagtttcatcatttttaatcagtgtattgaagatgataactacttaattttagcttcgaaaacatgtgtttcgagtacaatagtttcaacctttgagcaaaatgccattgtttctc

SEQ ID NO: 41013 - protein, 328 aa, Arabidopsis thaliana
  peptide (1)..(328): Ceres Seq. ID no. 12327894
  misc_feature (144)..(191): Pfam Name: Helix-loop-helix DNA-binding domain Pfam Description: Helix-loop-helix DNA-binding domain
  misc_feature (96)..(320): Homolog of NCBI NO: 22325727 NR Description: bHLH protein; protein id: At2g16910.1
  misc_feature (96)..(320): Homolog of NCBI NO: 25411751 NR Description: bHLH transcription factor [imported] -
  misc_feature (141)..(295): Homolog of NCBI NO: 37536566 NR Description: hypothetical protein [Oryza sativa (japonica
  misc_feature (136)..(326): Homolog of NCBI NO: 22758263 NR Description: Putative bHLH transcription protein
  misc_feature (2)..(326): Homolog of NCBI NO: 18424973 NR Description: bHLH protein; protein id: At5g65640.1, supported
  misc_feature (2)..(326): Homolog of NCBI NO: 21537346 NR Description: unknown [Arabidopsis thaliana]
  misc_feature (136)..(323): Homolog of NCBI NO: 34907076 NR Description: OSJNBa0093F16.27 [Oryza sativa (japonica
  misc_feature (50)..(328): Homolog of NCBI NO: 22331357 NR Description: bHLH protein
  misc_feature (1)..(328): Homolog of NCBI NO: 25513489 NR Description: F13K23.12 protein - Arabidopsis thaliana
  misc_feature (1)..(328): Homolog of NCBI NO: 15222101 NR Description: bHLH protein; protein id: At1g12860.1
NNNTFDDFGFDSGFLGQQFHGNHQSPNSMNFTGLNHSVPDFLPAPENSSGSCGLSPLFSNRAKVLKPLQVMASSGSQPTLFQKRAAMRQSSTSKSESSSEMRKSSYEREIDDTSTGIIDISGLNYESDDHNTNNNKGKKKGMPAKNLMAERRRRKKLNDRLYMLRSVVPKISKMDRASILGDAIDYLKELLQRINDLHTELESTPPSSSSLHPLTPTPQTLSYRVKEELCPSSSLPSPKGQQPRVEVRLREGKAVNIHMFCGRRPGLLLSTMRALDNLGLDVQQAVISCFNGFALDVFRAEQCQEDHDVLPEQIKAVLLDTAGYAGLV

SEQ ID NO: 41014 - protein, 300 aa, Arabidopsis thaliana
  peptide (1)..(300): Ceres Seq. ID no. 12327895
  misc_feature (116)..(163): Pfam Name: Helix-loop-helix DNA-binding domain Pfam Description: Helix-loop-helix DNA-binding domain
  misc_feature (68)..(292): Homolog of NCBI NO: 22325727 NR Description: bHLH protein; protein id: At2g16910.1
  misc_feature (68)..(292): Homolog of NCBI NO: 25411751 NR Description: bHLH transcription factor [imported] -
  misc_feature (113)..(267): Homolog of NCBI NO: 37536566 NR Description: hypothetical protein [Oryza sativa (japonica
  misc_feature (108)..(298): Homolog of NCBI NO: 22758263 NR Description: Putative bHLH transcription protein
  misc_feature (1)..(298): Homolog of NCBI NO: 18424973 NR Description: bHLH protein; protein id: At5g65640.1, supported
  misc_feature (1)..(298): Homolog of NCBI NO: 21537346 NR Description: unknown [Arabidopsis thaliana]
  misc_feature (108)..(295): Homolog of NCBI NO: 34907076 NR Description: OSJNBa0093F16.27 [Oryza sativa (japonica
  misc_feature (22)..(300): Homolog of NCBI NO: 22331357 NR Description: bHLH protein
  misc_feature (1)..(300): Homolog of NCBI NO: 25513489 NR Description: F13K23.12 protein - Arabidopsis thaliana
  misc_feature (1)..(300): Homolog of NCBI NO: 15222101 NR Description: bHLH protein; protein id: At1g12860.1
MNFTGLNHSVPDFLPAPENSSGSCGLSPLFSNRAKVLKPLQVMASSGSQPTLFQKRAAMRQSSTSKSESSSEMRKSSYEREIDDTSTGIIDISGLNYESDDHNTNNNKGKKKGMPAKNLMAERRRRKKLNDRLYMLRSVVPKISKMDRASILGDAIDYLKELLQRINDLHTELESTPPSSSSLHPLTPTPQTLSYRVKEELCPSSSLPSPKGQQPRVEVRLREGKAVNIHMFCGRRPGLLLSTMRALDNLGLDVQQAVISCFNGFALDVFRAEQCQEDHDVLPEQIKAVLLDTAGYAGLV

SEQ ID NO: 41015 - protein, 258 aa, Arabidopsis thaliana
  peptide (1)..(258): Ceres Seq. ID no. 12327896
  misc_feature (74)..(121): Pfam Name: Helix-loop-helix DNA-binding domain Pfam Description: Helix-loop-helix DNA-binding domain
  misc_feature (26)..(250): Homolog of NCBI NO: 22325727 NR Description: bHLH protein; protein id: At2g16910.1
  misc_feature (26)..(250): Homolog of NCBI NO: 25411751 NR Description: bHLH transcription factor [imported] -
  misc_feature (71)..(225): Homolog of NCBI NO: 37536566 NR Description: hypothetical protein [Oryza sativa (japonica
  misc_feature (66)..(256): Homolog of NCBI NO: 22758263 NR Description: Putative bHLH transcription protein
  misc_feature (1)..(256): Homolog of NCBI NO: 18424973 NR Description: bHLH protein; protein id: At5g65640.1, supported
  misc_feature (1)..(256): Homolog of NCBI NO: 21537346 NR Description: unknown [Arabidopsis thaliana]
  misc_feature (66)..(253): Homolog of NCBI NO: 34907076 NR Description: OSJNBa0093F16.27 [Oryza sativa (japonica
  misc_feature (1)..(258): Homolog of NCBI NO: 22331357 NR Description: bHLH protein
  misc_feature (1)..(258): Homolog of NCBI NO: 25513489 NR Description: F13K23.12 protein - Arabidopsis thaliana
  misc_feature (1)..(258): Homolog of NCBI NO: 15222101 NR Description: bHLH protein; protein id: At1g12860.1
MASSGSQPTLFQKRAAMRQSSTSKSESSSEMRKSSYEREIDDTSTGIIDISGLNYESDDHNTNNNKGKKKGMPAKNLMAERRRRKKLNDRLYMLRSVVPKISKMDRASILGDAIDYLKELLQRINDLHTELESTPPSSSSLHPLTPTPQTLSYRVKEELCPSSSLPSPKGQQPRVEVRLREGKAVNIHMFCGRRPGLLLSTMRALDNLGLDVQQAVISCFNGFALDVFRAEQCQEDHDVLPEQIKAVLLDTAGYAGLV

SEQ ID NO: 41016 - DNA, 2079 bp, Arabidopsis thaliana
  misc_feature (1)..(2079): Ceres Seq. ID no. 13489597
  misc_feature: MA Experiment ID: 108474 Result: Down-regulated in Transcription
  misc_feature: MA Experiment 108474 PARAMETER Experiment Name: At_Drought_Flowers_cDNA_P Parameter: Timepoint (hr) Value: null
  misc_feature: MA Experiment 108474 PARAMETER Experiment Name: At_Drought_Flowers_cDNA_P Parameter: Treatment Value: Drought vs. No Drought
  misc_feature: MA Experiment ID: 108501 Result: Down-regulated in Transcription
  misc_feature: MA Experiment 108501 PARAMETER Experiment Name: At_ap2_floral_buds_cDNA_P Parameter: Plant Line Value: ap2 (Ler.)
  misc_feature: MA Experiment 108501 PARAMETER Experiment Name: At_ap2_floral_buds_cDNA_P Parameter: Tissue Value: Closed Flower
  misc_feature: MA Experiment ID: 20000087 Result: Up-regulated in Transcription
  misc_feature: MA Experiment 20000087 PARAMETER Experiment Name: At_100uM_ABA_Mutants_cDNA_P Parameter: Plant Line Value: WS
  misc_feature: MA Experiment 20000087 PARAMETER Experiment Name: At_100uM_ABA_Mutants_cDNA_P Parameter: Timepoint (hr) Value: 6
  misc_feature: MA Experiment 20000087 PARAMETER Experiment Name: At_100uM_ABA_Mutants_cDNA_P Parameter: Tissue Value: Aerial
  misc_feature: MA Experiment 20000087 PARAMETER Experiment Name: At_100uM_ABA_Mutants_cDNA_P Parameter: Treatment Value: 100uM ABA vs. No Treatment
  misc_feature: MA Experiment ID: 20000171 Result: Up-regulated in Transcription
  misc_feature: MA Experiment 20000171 PARAMETER Experiment Name: At_42deg_Heat_P Parameter: Age (day) Value: 14
  misc_feature: MA Experiment 20000171 PARAMETER Experiment Name: At_42deg_Heat_P Parameter: Organism Value: A. thaliana
  misc_feature: MA Experiment 20000171 PARAMETER Experiment Name: At_42deg_Heat_P Parameter: Plant Line Value: WS
  misc_feature: MA Experiment 20000171 PARAMETER Experiment Name: At_42deg_Heat_P Parameter: Temperature (deg C) Value: 42 vs. 22
  misc_feature: MA Experiment 20000171 PARAMETER Experiment Name: At_42deg_Heat_P Parameter: Timepoint (hr) Value: 1
  misc_feature: MA Experiment 20000171 PARAMETER Experiment Name: At_42deg_Heat_P Parameter: Tissue Value: Aerial
  misc_feature: MA Experiment ID: 20000234 Result: Up-regulated in Transcription
  misc_feature: MA Experiment 20000234 PARAMETER Experiment Name: At_Siliques_P Parameter: Age (day) Value: 21
  misc_feature: MA Experiment 20000234 PARAMETER Experiment Name: At_Siliques_P Parameter: Organism Value: A. thaliana
  misc_feature: MA Experiment 20000234 PARAMETER Experiment Name: At_Siliques_P Parameter: Plant Line Value: WS
  misc_feature: MA Experiment 20000234 PARAMETER Experiment Name: At_Siliques_P Parameter: Tissue Value: Less Than 5mm Siliques vs. Whole Plant
  misc_feature: MA Experiment ID: 20000264 Result: Up-regulated in Transcription
  misc_feature: MA Experiment 20000264 PARAMETER Experiment Name: At_Open_Flower_P Parameter: Age (day) Value: 21
  misc_feature: MA Experiment 20000264 PARAMETER Experiment Name: At_Open_Flower_P Parameter: Plant Line Value: WS
  misc_feature: MA Experiment 20000264 PARAMETER Experiment Name: At_Open_Flower_P Parameter: Tissue Value: Open Flower vs. Whole Plant
  misc_feature: MA Experiment ID: 20000265 Result: Up-regulated in Transcription
  misc_feature: MA Experiment 20000265 PARAMETER Experiment Name: At_Open_Flower_P Parameter: Age (day) Value: 21
  misc_feature: MA Experiment 20000265 PARAMETER Experiment Name: At_Open_Flower_P Parameter: Plant Line Value: WS
  misc_feature: MA Experiment 20000265 PARAMETER Experiment Name: At_Open_Flower_P Parameter: Tissue Value: Closed Flower vs. Whole Plant
  misc_feature: MA Experiment ID: 20000286 Result: Up-regulated in Transcription
  misc_feature: MA Experiment 20000286 PARAMETER Experiment Name: At_Open_Flower_P Parameter: Age (day) Value: 21
  misc_feature: MA Experiment 20000286 PARAMETER Experiment Name: At_Open_Flower_P Parameter: Plant Line Value: WS
  misc_feature: MA Experiment 20000286 PARAMETER Experiment Name: At_Open_Flower_P Parameter: Tissue Value: Half Open vs. Whole Plant
  misc_feature: MA Experiment ID: 20000794 Result: Up-regulated in Transcription
  misc_feature: MA Experiment 20000794 PARAMETER Experiment Name: At_Petals_P Parameter: Age (day) Value: 23-25 days
  misc_feature: MA Experiment 20000794 PARAMETER Experiment Name: At_Petals_P Parameter: Plant Line Value: WS
  misc_feature: MA Experiment 20000794 PARAMETER Experiment Name: At_Petals_P Parameter: Tissue Value: Petals vs. Whole plant
  misc_feature: MA Experiment ID: 20001911 Result: Down-regulated in Transcription
  misc_feature: MA Experiment 20001911 PARAMETER Experiment Name: At_Drought_Reproduction_P Parameter: Age (day) Value: 40
  misc_feature: MA Experiment 20001911 PARAMETER Experiment Name: At_Drought_Reproduction_P Parameter: Organism Value: A. thaliana
  misc_feature: MA Experiment 20001911 PARAMETER Experiment Name: At_Drought_Reproduction_P Parameter: Plant Line Value: WS
  misc_feature: MA Experiment 20001911 PARAMETER Experiment Name: At_Drought_Reproduction_P Parameter: Timepoint (day) Value: 10
  misc_feature: MA Experiment 20001911 PARAMETER Experiment Name: At_Drought_Reproduction_P Parameter: Tissue Value: Flowers
  misc_feature: MA Experiment 20001911 PARAMETER Experiment Name: At_Drought_Reproduction_P Parameter: Treatment Value: Drought vs. No Drought
atcacattctctccttattcaacttaaatactacacggccaaaaacatttaacaaacgccactcagatcctgagtctttggatcaatggctatttcaaatgttatttctgtcttattattattgcttgtactaatcaatttaagcaatcaaaatatcaaaggaattgatgcatttcatcagatttacgaagaattgcaatctgaatcagtcgagtcagtgaatcatcttcacagacctagttttcactttcaacctccaaagcattggattaacgatccaaatggtccagtatactacaaaggtctctaccatctcttctaccaatataacaccaaaggtgcggtttggggtaatattatatgggcccattcggtttctaaagacttggttaactgggaggctcttgaaccggctcttagtccttcaaaatggttcgacatcggaggtacatggtccggttcaataacaatcgtaccgggaaaagtaccgattatcctctataccggtgttaaccagaacgaaactcagttgcaaaactatgcaatcccagaggaccgatcagacccatacctaaggaaatggattaaaccggacgataacccgattgcaatcccagactatacaatgaacggttcagcattccgtgacccgacaaccgcttggttctccaaagacgggcattggagaaccgtggtagggtcaaaaagaaagcgtagaggaattgcttacatctacagaagccgagatttcaagcattgggtcaaagctaagcacccggttcactctaaacagtcaaccggtatgtgggaatgtcctgatttcttcccggtttccttaaccgatttccgaaacggtttggacttggattacgtcggtccaaacaccaagcatgtgttgaaggttagcttggacattacccggtacgagtattacacgcttggtaaatacgatcttaagaaggaccggtacataccggacggtaatactcccgatggttgggagggtttaagattcgattacggtaatttctacgcttccaagacattctttgactacaaaaagaacagaagaatcttatggggttgggctaatgaatctgacaccgttgaagatgatattttgaagggttgggctggtcttcaggtgattccaagaacggtgctccttgattcaagcaagaagcaacttgtgttttggcctgttgaagagatagagtcattaagaggtaactacgtccgaatgaacaatcatgacatcaagatgggtcaacgcatagaagtcaaaggaatcactcctgctcaagccgatgtggaagtaacgttctatgttggaagtctagagaaagctgagatattcgatccgagtttcacgtggaaaccattggaattgtgtaacattaaaggctcgaatgtgagaggcggtgtaggaccttttggtctgatcacattagcgactcctgatttggaagagtacactcctgtcttctttagagtcttcaacgacactaaaactcataagcctaaagttctcatgtgctccgatgctagaccgtcgtcgttaaagcaagacacgggtttactcgcaaaagataggatgtataaaccatcgtttgctggttttgtggatgttgatatggctgatggaaggatctctctaaggagtttgattgatcattcagtagtagagagctttggagcattaggtaaaacggtgataacatcaagagtgtatccagtgaaagcagtaaaagagaatgcacatttgtatgtctttaacaatggaacacaaactgtgaccatagagagtctcaatgcttggaatatggatcgtcctctgcaaatgaatgatggagctctttaatttagctcttctctctatagtttagctataccgtcttctctctttctcactttttcttatattttcatcttcagtatagtaactgagagatactgtgaaattaggaagaaaaatgtgggagtttctgtgtttacgaacaatttggttgtgatgtccatactttatgtatcgactgttgtatctttctgtctttagtctctcaataaaaataagtttag

SEQ ID NO: 41017 - protein, 591 aa, Arabidopsis thaliana
  peptide (1)..(591): Ceres Seq. ID no. 13489598
  misc_feature (54)..(540): Pfam Name: Glycosyl hydrolases family 32 Pfam Description: Glycosyl hydrolases family 32
  misc_feature (50)..(587): Homolog of NCBI NO: 21322512 NR Description: acid vacuolar invertase [Beta vulgaris]
  misc_feature (50)..(587): Homolog of NCBI NO: 124713 NR Description: ACID BETA-FRUCTOFURANOSIDASE PRECURSOR (ACID
  misc_feature (50)..(580): Homolog of NCBI NO: 18072855 NR Description: beta-fructofuranosidase [Beta vulgaris]
  misc_feature (4)..(580): Homolog of NCBI NO: 1076619 NR Description: beta-fructofuranosidase (EC 3.2.1.26) - common
  misc_feature (11)..(587): Homolog of NCBI NO: 124712 NR Description: BETA-FRUCTOFURANOSIDASE, INSOLUBLE ISOENZYME 1 (SUCROSE-6-PHOSPHATE HYDROLASE 1) (INVERTASE 1) (CELL WALL
  misc_feature (11)..(587): Homolog of NCBI NO: 2129916 NR Description: beta-fructofuranosidase (EC 3.2.1.26) 1
  misc_feature (10)..(590): Homolog of NCBI NO: 7435478 NR Description: beta-fructofuranosidase (EC 3.2.1.26), 66.9K -
  misc_feature (10)..(590): Homolog of NCBI NO: 719270 NR Description: invertase
  misc_feature (10)..(590): Homolog of NCBI NO: 26451724 NR Description: putative beta-fructofuranosidase [Arabidopsis
  misc_feature (10)..(590): Homolog of NCBI NO: 30693668 NR Description: glycosyl hydrolase family 32 [Arabidopsis
MAISNVISVLLLLLVLINLSNQNIKGIDAFHQIYEELQSESVESVNHLHRPSFHFQPPKHWINDPNGPVYYKGLYHLFYQYNTKGAVWGNIIWAHSVSKDLVNWEALEPALSPSKWFDIGGTWSGSITIVPGKVPIILYTGVNQNETQLQNYAIPEDRSDPYLRKWIKPDDNPIAIPDYTMNGSAFRDPTTAWFSKDGHWRTVVGSKRKRRGIAYIYRSRDFKHWVKAKHPVHSKQSTGMWECPDFFPVSLTDFRNGLDLDYVGPNTKHVLKVSLDITRYEYYTLGKYDLKKDRYIPDGNTPDGWEGLRFDYGNFYASKTFFDYKKNRRILWGWANESDTVEDDILKGWAGLQVIPRTVLLDSSKKQLVFWPVEEIESLRGNYVRMNNHDIKMGQRIEVKGITPAQADVEVTFYVGSLEKAEIFDPSFTWKPLELCNIKGSNVRGGVGPFGLITLATPDLEEYTPVFFRVFNDTKTHKPKVLMCSDARPSSLKQDTGLLAKDRMYKPSFAGFVDVDMADGRISLRSLIDHSVVESFGALGKTVITSRVYPVKAVKENAHLYVFNNGTQTVTIESLNAWNMDRPLQMNDGAL

SEQ ID NO: 41018 - protein, 411 aa, Arabidopsis thaliana
  peptide (1)..(411): Ceres Seq. ID no. 13489599
  misc_feature (1)..(360): Pfam Name: Glycosyl hydrolases family 32 Pfam Description: Glycosyl hydrolases family 32
  misc_feature (1)..(407): Homolog of NCBI NO: 21322512 NR Description: acid vacuolar invertase [Beta vulgaris]
  misc_feature (1)..(407): Homolog of NCBI NO: 124713 NR Description: ACID BETA-FRUCTOFURANOSIDASE PRECURSOR (ACID
  misc_feature (1)..(400): Homolog of NCBI NO: 18072855 NR Description: beta-fructofuranosidase [Beta vulgaris]
  misc_feature (1)..(400): Homolog of NCBI NO: 1076619 NR Description: beta-fructofuranosidase (EC 3.2.1.26) - common
  misc_feature (1)..(407): Homolog of NCBI NO: 124712 NR Description: BETA-FRUCTOFURANOSIDASE, INSOLUBLE ISOENZYME 1 (SUCROSE-6-PHOSPHATE HYDROLASE 1) (INVERTASE 1) (CELL WALL
  misc_feature (1)..(407): Homolog of NCBI NO: 2129916 NR Description: beta-fructofuranosidase (EC 3.2.1.26) 1
  misc_feature (1)..(410): Homolog of NCBI NO: 7435478 NR Description: beta-fructofuranosidase (EC 3.2.1.26), 66.9K -
  misc_feature (1)..(410): Homolog of NCBI NO: 719270 NR Description: invertase
  misc_feature (1)..(410): Homolog of NCBI NO: 26451724 NR Description: putative beta-fructofuranosidase [Arabidopsis
  misc_feature (1)..(410): Homolog of NCBI NO: 30693668 NR Description: glycosyl hydrolase family 32 [Arabidopsis
MNGSAFRDPTTAWFSKDGHWRTVVGSKRKRRGIAYIYRSRDFKHWVKAKHPVHSKQSTGMWECPDFFPVSLTDFRNGLDLDYVGPNTKHVLKVSLDITRYEYYTLGKYDLKKDRYIPDGNTPDGWEGLRFDYGNFYASKTFFDYKKNRRILWGWANESDTVEDDILKGWAGLQVIPRTVLLDSSKKQLVFWPVEEIESLRGNYVRMNNHDIKMGQRIEVKGITPAQADVEVTFYVGSLEKAEIFDPSFTWKPLELCNIKGSNVRGGVGPFGLITLATPDLEEYTPVFFRVFNDTKTHKPKVLMCSDARPSSLKQDTGLLAKDRMYKPSFAGFVDVDMADGRISLRSLIDHSVVESFGALGKTVITSRVYPVKAVKENAHLYVFNNGTQTVTIESLNAWNMDRPLQMNDGAL

SEQ ID NO: 41019 - protein, 352 aa, Arabidopsis thaliana
  peptide (1)..(352): Ceres Seq. ID no. 13489600
  misc_feature (1)..(301): Pfam Name: Glycosyl hydrolases family 32 Pfam Description: Glycosyl hydrolases family 32
  misc_feature (1)..(348): Homolog of NCBI NO: 21322512 NR Description: acid vacuolar invertase [Beta vulgaris]
  misc_feature (1)..(348): Homolog of NCBI NO: 124713 NR Description: ACID BETA-FRUCTOFURANOSIDASE PRECURSOR (ACID
  misc_feature (1)..(341): Homolog of NCBI NO: 18072855 NR Description: beta-fructofuranosidase [Beta vulgaris]
  misc_feature (1)..(341): Homolog of NCBI NO: 1076619 NR Description: beta-fructofuranosidase (EC 3.2.1.26) - common
  misc_feature (1)..(348): Homolog of NCBI NO: 124712 NR Description: BETA-FRUCTOFURANOSIDASE, INSOLUBLE ISOENZYME 1 (SUCROSE-6-PHOSPHATE HYDROLASE 1) (INVERTASE 1) (CELL WALL
  misc_feature (1)..(348): Homolog of NCBI NO: 2129916 NR Description: beta-fructofuranosidase (EC 3.2.1.26) 1
  misc_feature (1)..(351): Homolog of NCBI NO: 7435478 NR Description: beta-fructofuranosidase (EC 3.2.1.26), 66.9K -
  misc_feature (1)..(351): Homolog of NCBI NO: 719270 NR Description: invertase
  misc_feature (1)..(351): Homolog of NCBI NO: 26451724 NR Description: putative beta-fructofuranosidase [Arabidopsis
  misc_feature (1)..(351): Homolog of NCBI NO: 30693668 NR Description: glycosyl hydrolase family 32 [Arabidopsis
MWECPDFFPVSLTDFRNGLDLDYVGPNTKHVLKVSLDITRYEYYTLGKYDLKKDRYIPDGNTPDGWEGLRFDYGNFYASKTFFDYKKNRRILWGWANESDTVEDDILKGWAGLQVIPRTVLLDSSKKQLVFWPVEEIESLRGNYVRMNNHDIKMGQRIEVKGITPAQADVEVTFYVGSLEKAEIFDPSFTWKPLELCNIKGSNVRGGVGPFGLITLATPDLEEYTPVFFRVFNDTKTHKPKVLMCSDARPSSLKQDTGLLAKDRMYKPSFAGFVDVDMADGRISLRSLIDHSVVESFGALGKTVITSRVYPVKAVKENAHLYVFNNGTQTVTIESLNAWNMDRPLQMNDGAL

SEQ ID NO: 41020 - DNA, 875 bp, Arabidopsis thaliana; identical to SEQ ID NO: 25017
  misc_feature (1)..(875): Ceres Seq. ID no. 13575759
  misc_feature: MA Experiment ID: 20000184 Result: Up-regulated in Transcription
  misc_feature: MA Experiment 20000184 PARAMETER Experiment Name: At_Shoots__P Parameter: Age (day) Value: 7
  misc_feature: MA Experiment 20000184 PARAMETER Experiment Name: At_Shoots__P Parameter: Tissue Value: Shoots vs. Whole Plant
  misc_feature: MA Experiment ID: 20000439 Result: Down-regulated in Transcription
  misc_feature: MA Experiment 20000439 PARAMETER Experiment Name: At_Roots__P Parameter: Age (day) Value: 14 vs. 21
  misc_feature: MA Experiment 20000439 PARAMETER Experiment Name: At_Roots__P Parameter: Organism Value: A. thaliana
  misc_feature: MA Experiment 20000439 PARAMETER Experiment Name: At_Roots__P Parameter: Tissue Value: Roots vs. Whole Plant
  misc_feature: MA Experiment ID: 20000441 Result: Up-regulated in Transcription
  misc_feature: MA Experiment 20000441 PARAMETER Experiment Name: At_1uM_BR-BRZ__P Parameter: Tissue Value: Shoot Apices
  misc_feature: MA Experiment 20000441 PARAMETER Experiment Name: At_1uM_BR-BRZ__P Parameter: Treatment Value: 1uM BR vs. No Treatment
  misc_feature: MA Experiment ID: 20000451 Result: Up-regulated in Transcription
  misc_feature: MA Experiment 20000451 PARAMETER Experiment Name: At_CS6879_Shoots-Roots_P Parameter: Age (day) Value: 14
  misc_feature: MA Experiment 20000451 PARAMETER Experiment Name: At_CS6879_Shoots-Roots_P Parameter: Organism Value: A. thaliana
  misc_feature: MA Experiment 20000451 PARAMETER Experiment Name: At_CS6879_Shoots-Roots_P Parameter: Plant Line Value: CS6879 vs. WS
  misc_feature: MA Experiment 20000451 PARAMETER Experiment Name: At_CS6879_Shoots-Roots_P Parameter: Tissue Value: Roots
  misc_feature: MA Experiment ID: 20001451 Result: Up-regulated in Transcription
  misc_feature: MA Experiment 20001451 PARAMETER Experiment Name: At_Far-red-induction_P Parameter: Age (day) Value: 7
  misc_feature: MA Experiment 20001451 PARAMETER Experiment Name: At_Far-red-induction_P Parameter: Light Value: Far-red vs. White
  misc_feature: MA Experiment 20001451 PARAMETER Experiment Name: At_Far-red-induction_P Parameter: Organism Value: A. thaliana
  misc_feature: MA Experiment 20001451 PARAMETER Experiment Name: At_Far-red-induction_P Parameter: Plant Line Value: Columbia
  misc_feature: MA Experiment 20001451 PARAMETER Experiment Name: At_Far-red-induction_P Parameter: Timepoint (hr) Value: 24
  misc_feature: MA Experiment 20001451 PARAMETER Experiment Name: At_Far-red-induction_P Parameter: Tissue Value: Whole Plant
  misc_feature: MA Experiment ID: 20001555 Result: Down-regulated in Transcription
  misc_feature: MA Experiment 20001555 PARAMETER Experiment Name: At_Drought_Soil_Dry_P Parameter: Age (day) Value: 24
  misc_feature: MA Experiment 20001555 PARAMETER Experiment Name: At_Drought_Soil_Dry_P Parameter: Organism Value: A. thaliana
  misc_feature: MA Experiment 20001555 PARAMETER Experiment Name: At_Drought_Soil_Dry_P Parameter: Plant Line Value: WS
  misc_feature: MA Experiment 20001555 PARAMETER Experiment Name: At_Drought_Soil_Dry_P Parameter: Post Timepoint (hr) Value: None
  misc_feature: MA Experiment 20001555 PARAMETER Experiment Name: At_Drought_Soil_Dry_P Parameter: Post-Treatment Value: None
  misc_feature: MA Experiment 20001555 PARAMETER Experiment Name: At_Drought_Soil_Dry_P Parameter: Timepoint (day) Value: 10
  misc_feature: MA Experiment 20001555 PARAMETER Experiment Name: At_Drought_Soil_Dry_P Parameter: Treatment Value: Drought vs. No Drought
  misc_feature: MA Experiment ID: 20001556 Result: Down-regulated in Transcription
  misc_feature: MA Experiment 20001556 PARAMETER Experiment Name: At_Drought_Soil_Dry_P Parameter: Age (day) Value: 26
  misc_feature: MA Experiment 20001556 PARAMETER Experiment Name: At_Drought_Soil_Dry_P Parameter: Organism Value: A. thaliana
  misc_feature: MA Experiment 20001556 PARAMETER Experiment Name: At_Drought_Soil_Dry_P Parameter: Plant Line Value: WS
  misc_feature: MA Experiment 20001556 PARAMETER Experiment Name: At_Drought_Soil_Dry_P Parameter: Post Timepoint (hr) Value: None
  misc_feature: MA Experiment 20001556 PARAMETER Experiment Name: At_Drought_Soil_Dry_P Parameter: Post-Treatment Value: None
  misc_feature: MA Experiment 20001556 PARAMETER Experiment Name: At_Drought_Soil_Dry_P Parameter: Timepoint (day) Value: 12
  misc_feature: MA Experiment 20001556 PARAMETER Experiment Name: At_Drought_Soil_Dry_P Parameter: Treatment Value: Drought vs. No Drought
  misc_feature: MA Experiment ID: 20001559 Result: Down-regulated in Transcription
  misc_feature: MA Experiment 20001559 PARAMETER Experiment Name: At_Drought_Soil_Dry_P Parameter: Age (day) Value: 28
  misc_feature: MA Experiment 20001559 PARAMETER Experiment Name: At_Drought_Soil_Dry_P Parameter: Organism Value: A. thaliana
  misc_feature: MA Experiment 20001559 PARAMETER Experiment Name: At_Drought_Soil_Dry_P Parameter: Plant Line Value: WS
  misc_feature: MA Experiment 20001559 PARAMETER Experiment Name: At_Drought_Soil_Dry_P Parameter: Post Timepoint (hr) Value: 29
  misc_feature: MA Experiment 20001559 PARAMETER Experiment Name: At_Drought_Soil_Dry_P Parameter: Post-Treatment Value: Re-Water vs. No Drought
  misc_feature: MA Experiment 20001559 PARAMETER Experiment Name: At_Drought_Soil_Dry_P Parameter: Timepoint (day) Value: 14
  misc_feature: MA Experiment 20001559 PARAMETER Experiment Name: At_Drought_Soil_Dry_P Parameter: Treatment Value: Drought vs. No Drought
  misc_feature: MA Experiment ID: 20001560 Result: Down-regulated in Transcription
  misc_feature: MA Experiment 20001560 PARAMETER Experiment Name: At_Drought_Soil_Dry_P Parameter: Age (day) Value: 28
  misc_feature: MA Experiment 20001560 PARAMETER Experiment Name: At_Drought_Soil_Dry_P Parameter: Organism Value: A. thaliana
  misc_feature: MA Experiment 20001560 PARAMETER Experiment Name: At_Drought_Soil_Dry_P Parameter: Plant Line Value: WS
  misc_feature: MA Experiment 20001560 PARAMETER Experiment Name: At_Drought_Soil_Dry_P Parameter: Post Timepoint (hr) Value: None
  misc_feature: MA Experiment 20001560 PARAMETER Experiment Name: At_Drought_Soil_Dry_P Parameter: Post-Treatment Value: None
  misc_feature: MA Experiment 20001560 PARAMETER Experiment Name: At_Drought_Soil_Dry_P Parameter: Timepoint (day) Value: 14
  misc_feature: MA Experiment 20001560 PARAMETER Experiment Name: At_Drought_Soil_Dry_P Parameter: Treatment Value: Drought vs. No Drought

SEQ ID NO: 41021 - protein, 195 aa, Arabidopsis thaliana; identical to SEQ ID NO: 25018
  peptide (1)..(195): Ceres Seq. ID no. 13575760
  misc_feature (67)..(183): Pfam Name: Ctr copper transporter family Pfam Description: Ctr copper transporter family
  misc_feature (67)..(183): Pfam Name: Ctr copper transporter family Pfam Description: Ctr copper transporter family
  misc_feature (62)..(178): Homolog of NCBI NO: 18496856 NR Description: COPT4 [Arabidopsis thaliana]
  misc_feature (62)..(178): Homolog of NCBI NO: 30687312 NR Description: COPT4 protein [Arabidopsis thaliana]
  misc_feature (58)..(171): Homolog of NCBI NO: 34909916 NR Description: P0665A11.18 [Oryza sativa (japonica
  misc_feature (60)..(185): Homolog of NCBI NO: 18496854 NR Description: copper transporter-like protein COPT3
  misc_feature (31)..(185): Homolog of NCBI NO: 21592951 NR Description: copper transport protein-like [Arabidopsis
  misc_feature (62)..(178): Homolog of NCBI NO: 18496856 NR Description: COPT4 [Arabidopsis thaliana]
  misc_feature (58)..(171): Homolog of NCBI NO: 34909916 NR Description: P0665A11.18 [Oryza sativa (japonica
  misc_feature (31)..(185): Homolog of NCBI NO: 21592951 NR Description: copper transport protein-like [Arabidopsis
  misc_feature (26)..(195): Homolog of NCBI NO: 15237802 NR Description: copper transport protein [Arabidopsis thaliana]
  misc_feature (26)..(195): Homolog of NCBI NO: 11288418 NR Description: copper transport protein [imported] - Arabidopsis
  misc_feature (26)..(195): Homolog of NCBI NO: 15232677 NR Description: copper transport protein - like protein
  misc_feature (43)..(184): Homolog of NCBI NO: 30683324 NR Description: copper transport protein -related protein
  misc_feature (31)..(185): Homolog of NCBI NO: 15237804 NR Description: copper transport protein - like [Arabidopsis
  misc_feature (60)..(185): Homolog of NCBI NO: 18496854 NR Description: copper transporter-like protein COPT3
  misc_feature (62)..(178): Homolog of NCBI NO: 30687312 NR Description: COPT4 protein [Arabidopsis thaliana]
  misc_feature (31)..(185): Homolog of NCBI NO: 15237804 NR Description: copper transport protein - like [Arabidopsis
  misc_feature (43)..(184): Homolog of NCBI NO: 30683324 NR Description: copper transport protein -related protein
  misc_feature (26)..(195): Homolog of NCBI NO: 15232677 NR Description: copper transport protein - like protein
  misc_feature (26)..(195): Homolog of NCBI NO: 11288418 NR Description: copper transport protein [imported] - Arabidopsis
  misc_feature (26)..(195): Homolog of NCBI NO: 15237802 NR Description: copper transport protein [Arabidopsis thaliana]

SEQ ID NO: 41022 - protein, 170 aa, Arabidopsis thaliana; identical to SEQ ID NO: 25019
  peptide (1)..(170): Ceres Seq. ID no. 13575761
  misc_feature (42)..(158): Pfam Name: Ctr copper transporter family Pfam Description: Ctr copper transporter family
  misc_feature (42)..(158): Pfam Name: Ctr copper transporter family Pfam Description: Ctr copper transporter family
  misc_feature (37)..(153): Homolog of NCBI NO: 18496856 NR Description: COPT4 [Arabidopsis thaliana]
  misc_feature (37)..(153): Homolog of NCBI NO: 30687312 NR Description: COPT4 protein [Arabidopsis thaliana]
  misc_feature (33)..(146): Homolog of NCBI NO: 34909916 NR Description: P0665A11.18 [Oryza sativa (japonica
  misc_feature (35)..(160): Homolog of NCBI NO: 18496854 NR Description: copper transporter-like protein COPT3
  misc_feature (6)..(160): Homolog of NCBI NO: 21592951 NR Description: copper transport protein-like [Arabidopsis
  misc_feature (37)..(153): Homolog of NCBI NO: 18496856 NR Description: COPT4 [Arabidopsis thaliana]
  misc_feature (33)..(146): Homolog of NCBI NO: 34909916 NR Description: P0665A11.18 [Oryza sativa (japonica
  misc_feature (6)..(160): Homolog of NCBI NO: 21592951 NR Description: copper transport protein-like [Arabidopsis
  misc_feature (1)..(170): Homolog of NCBI NO: 15237802 NR Description: copper transport protein [Arabidopsis thaliana]
  misc_feature (1)..(170): Homolog of NCBI NO: 11288418 NR Description: copper transport protein [imported] - Arabidopsis
  misc_feature (1)..(170): Homolog of NCBI NO: 15232677 NR Description: copper transport protein - like protein
  misc_feature (18)..(159): Homolog of NCBI NO: 30683324 NR Description: copper transport protein -related protein
  misc_feature (6)..(160): Homolog of NCBI NO: 15237804 NR Description: copper transport protein - like [Arabidopsis
  misc_feature (35)..(160): Homolog of NCBI NO: 18496854 NR Description: copper transporter-like protein COPT3
  misc_feature (37)..(153): Homolog of NCBI NO: 30687312 NR Description: COPT4 protein [Arabidopsis thaliana]
  misc_feature (6)..(160): Homolog of NCBI NO: 15237804 NR Description: copper transport protein - like [Arabidopsis
  misc_feature (18)..(159): Homolog of NCBI NO: 30683324 NR Description: copper transport protein -related protein
  misc_feature (1)..(170): Homolog of NCBI NO: 15232677 NR Description: copper transport protein - like protein
  misc_feature (1)..(170): Homolog of NCBI NO: 11288418 NR Description: copper transport protein [imported] - Arabidopsis
  misc_feature (1)..(170): Homolog of NCBI NO: 15237802 NR Description: copper transport protein [Arabidopsis thaliana]

SEQ ID NO: 41023 - protein, 165 aa, Arabidopsis thaliana; identical to SEQ ID NO: 25020
  peptide (1)..(165): Ceres Seq. ID no. 13575762
  misc_feature (37)..(153): Pfam Name: Ctr copper transporter family Pfam Description: Ctr copper transporter family
  misc_feature (37)..(153): Pfam Name: Ctr copper transporter family Pfam Description: Ctr copper transporter family
  misc_feature (32)..(148): Homolog of NCBI NO: 18496856 NR Description: COPT4 [Arabidopsis thaliana]
  misc_feature (32)..(148): Homolog of NCBI NO: 30687312 NR Description: COPT4 protein [Arabidopsis thaliana]
  misc_feature (28)..(141): Homolog of NCBI NO: 34909916 NR Description: P0665A11.18 [Oryza sativa (japonica
  misc_feature (30)..(155): Homolog of NCBI NO: 18496854 NR Description: copper transporter-like protein COPT3
  misc_feature (1)..(155): Homolog of NCBI NO: 21592951 NR Description: copper transport protein-like [Arabidopsis
  misc_feature (32)..(148): Homolog of NCBI NO: 18496856 NR Description: COPT4 [Arabidopsis thaliana]
  misc_feature (28)..(141): Homolog of NCBI NO: 34909916 NR Description: P0665A11.18 [Oryza sativa (japonica
  misc_feature (1)..(155): Homolog of NCBI NO: 21592951 NR Description: copper transport protein-like [Arabidopsis
  misc_feature (1)..(165): Homolog of NCBI NO: 15237802 NR Description: copper transport protein [Arabidopsis thaliana]
  misc_feature (1)..(165): Homolog of NCBI NO: 11288418 NR Description: copper transport protein [imported] - Arabidopsis
  misc_feature (1)..(165): Homolog of NCBI NO: 15232677 NR Description: copper transport protein - like protein
  misc_feature (13)..(154): Homolog of NCBI NO: 30683324 NR Description: copper transport protein -related protein
  misc_feature (1)..(155): Homolog of NCBI NO: 15237804 NR Description: copper transport protein - like [Arabidopsis
  misc_feature (30)..(155): Homolog of NCBI NO: 18496854 NR Description: copper transporter-like protein COPT3
  misc_feature (32)..(148): Homolog of NCBI NO: 30687312 NR Description: COPT4 protein [Arabidopsis thaliana]
  misc_feature (1)..(155): Homolog of NCBI NO: 15237804 NR Description: copper transport protein - like [Arabidopsis
  misc_feature (13)..(154): Homolog of NCBI NO: 30683324 NR Description: copper transport protein -related protein
  misc_feature (1)..(165): Homolog of NCBI NO: 15232677 NR Description: copper transport protein - like protein
  misc_feature (1)..(165): Homolog of NCBI NO: 11288418 NR Description: copper transport protein [imported] - Arabidopsis
  misc_feature (1)..(165): Homolog of NCBI NO: 15237802 NR Description: copper transport protein [Arabidopsis thaliana]

SEQ ID NO: 41024 - DNA, 1686 bp, Arabidopsis thaliana
  misc_feature (1)..(1686): Ceres Seq. ID no. 12562538
  misc_feature: MA Experiment ID: 108435 Result: Down-regulated in Transcription
  misc_feature: MA Experiment 108435 PARAMETER Experiment Name: At_stm_Mutants_cDNA_P Parameter: Plant Line Value: wt Landsburg vs stm
  misc_feature: MA Experiment 108435 PARAMETER Experiment Name: At_stm_Mutants_cDNA_P Parameter: Tissue Value: Shoot Apical Meristem Region
  misc_feature: MA Experiment ID: 108462 Result: Up-regulated in Transcription
  misc_feature: MA Experiment 108462 PARAMETER Experiment Name: At_Germinating_Seeds_cDNA_P Parameter: Age (day) Value: 2 vs. 0
  misc_feature: MA Experiment 108462 PARAMETER Experiment Name: At_Germinating_Seeds_cDNA_P Parameter: Tissue Value: Germinating Seeds
  misc_feature: MA Experiment ID: 108463 Result: Up-regulated in Transcription
  misc_feature: MA Experiment 108463 PARAMETER Experiment Name: At_Germinating_Seeds_cDNA_P Parameter: Age (day) Value: 3 vs. 0
  misc_feature: MA Experiment 108463 PARAMETER Experiment Name: At_Germinating_Seeds_cDNA_P Parameter: Tissue Value: Germinating Seeds
  misc_feature: MA Experiment ID: 108464 Result: Up-regulated in Transcription
  misc_feature: MA Experiment 108464 PARAMETER Experiment Name: At_Germinating_Seeds_cDNA_P Parameter: Age (day) Value: 4 vs. 0
  misc_feature: MA Experiment 108464 PARAMETER Experiment Name: At_Germinating_Seeds_cDNA_P Parameter: Tissue Value: Germinating Seeds
  misc_feature: MA Experiment ID: 108488 Result: Down-regulated in Transcription
  misc_feature: MA Experiment ID: 108573 Result: Up-regulated in Transcription
  misc_feature: MA Experiment 108573 PARAMETER Experiment Name: At_Drought_cDNA_P Parameter: Timepoint (hr) Value: 6
  misc_feature: MA Experiment 108573 PARAMETER Experiment Name: At_Drought_cDNA_P Parameter: Tissue Value: Aerial
  misc_feature: MA Experiment 108573 PARAMETER Experiment Name: At_Drought_cDNA_P Parameter: Treatment Value: Drought vs. No Drought
  misc_feature: MA Experiment ID: 108577 Result: Up-regulated in Transcription
  misc_feature: MA Experiment 108577 PARAMETER Experiment Name: At_42deg_Heat_cDNA_P Parameter: Temperature (deg C) Value: 42 vs. 22
  misc_feature: MA Experiment 108577 PARAMETER Experiment Name: At_42deg_Heat_cDNA_P Parameter: Timepoint (hr) Value: 6
  misc_feature: MA Experiment 108577 PARAMETER Experiment Name: At_42deg_Heat_cDNA_P Parameter: Tissue Value: Aerial
  misc_feature: MA Experiment ID: 108579 Result: Down-regulated in Transcription
  misc_feature: MA Experiment 108579 PARAMETER Experiment Name: At_4deg_Cold_cDNA_P Parameter: Temperature (deg C) Value: 4 vs. 22
  misc_feature: MA Experiment 108579 PARAMETER Experiment Name: At_4deg_Cold_cDNA_P Parameter: Timepoint (hr) Value: 6
  misc_feature: MA Experiment 108579 PARAMETER Experiment Name: At_4deg_Cold_cDNA_P Parameter: Tissue Value: Aerial
  misc_feature: MA Experiment ID: 108585 Result: Up-regulated in Transcription
  misc_feature: MA Experiment 108585 PARAMETER Experiment Name: At_5mM_NaNP_cDNA_P Parameter: Timepoint (hr) Value: 6
  misc_feature: MA Experiment 108585 PARAMETER Experiment Name: At_5mM_NaNP_cDNA_P Parameter: Tissue Value: Aerial
  misc_feature: MA Experiment 108585 PARAMETER Experiment Name: At_5mM_NaNP_cDNA_P Parameter: Treatment Value: null
  misc_feature: MA Experiment ID: 20000111 Result: Up-regulated in Transcription
  misc_feature: MA Experiment 20000111 PARAMETER Experiment Name: At_42deg_Heat_cDNA_P Parameter: Temperature (deg C) Value: 42 vs. 22
  misc_feature: MA Experiment 20000111 PARAMETER Experiment Name: At_42deg_Heat_cDNA_P Parameter: Timepoint (hr) Value: 6
  misc_feature: MA Experiment 20000111 PARAMETER Experiment Name: At_42deg_Heat_cDNA_P Parameter: Tissue Value: Aerial
  misc_feature: MA Experiment ID: 20000112 Result: Up-regulated in Transcription
  misc_feature: MA Experiment 20000112 PARAMETER Experiment Name: At_42deg_Heat_cDNA_P Parameter: Temperature (deg C) Value: 42 vs. 22
  misc_feature: MA Experiment 20000112 PARAMETER Experiment Name: At_42deg_Heat_cDNA_P Parameter: Timepoint (hr) Value: 2
  misc_feature: MA Experiment 20000112 PARAMETER Experiment Name: At_42deg_Heat_cDNA_P Parameter: Tissue Value: Aerial
  misc_feature: MA Experiment ID: 20000113 Result: Up-regulated in Transcription
  misc_feature: MA Experiment 20000113 PARAMETER Experiment Name: At_42deg_Heat_cDNA_P Parameter: Temperature (deg C) Value: 42 vs. 22
  misc_feature: MA Experiment 20000113 PARAMETER Experiment Name: At_42deg_Heat_cDNA_P Parameter: Timepoint (hr) Value: 8
  misc_feature: MA Experiment 20000113 PARAMETER Experiment Name: At_42deg_Heat_cDNA_P Parameter: Tissue Value: Aerial
  misc_feature: MA Experiment ID: 20000173 Result: Up-regulated in Transcription
  misc_feature: MA Experiment 20000173 PARAMETER Experiment Name: At_42deg_Heat_P Parameter: Age (day) Value: 14
  misc_feature: MA Experiment 20000173 PARAMETER Experiment Name: At_42deg_Heat_P Parameter: Organism Value: A. thaliana
  misc_feature: MA Experiment 20000173 PARAMETER Experiment Name: At_42deg_Heat_P Parameter: Plant Line Value: WS
  misc_feature: MA Experiment 20000173 PARAMETER Experiment Name: At_42deg_Heat_P Parameter: Temperature (deg C) Value: 42 vs. 22
  misc_feature: MA Experiment 20000173 PARAMETER Experiment Name: At_42deg_Heat_P Parameter: Timepoint (hr) Value: 6
  misc_feature: MA Experiment 20000173 PARAMETER Experiment Name: At_42deg_Heat_P Parameter: Tissue Value: Aerial
  misc_feature: MA Experiment ID: 20000224 Result: Down-regulated in Transcription
  misc_feature: MA Experiment ID: 20000794 Result: Up-regulated in Transcription
  misc_feature: MA Experiment 20000794 PARAMETER Experiment Name: At_Petals_P Parameter: Age (day) Value: 23-25 days
  misc_feature: MA Experiment 20000794 PARAMETER Experiment Name: At_Petals_P Parameter: Plant Line Value: WS
  misc_feature: MA Experiment 20000794 PARAMETER Experiment Name: At_Petals_P Parameter: Tissue Value: Petals vs. Whole plant
  misc_feature: MA Experiment ID: 20001905 Result: Up-regulated in Transcription
  misc_feature: MA Experiment 20001905 PARAMETER Experiment Name: At_Drought_Reproduction_P Parameter: Age (day) Value: 40
  misc_feature: MA Experiment 20001905 PARAMETER Experiment Name: At_Drought_Reproduction_P Parameter: Organism Value: A. thaliana
  misc_feature: MA Experiment 20001905 PARAMETER Experiment Name: At_Drought_Reproduction_P Parameter: Plant Line Value: WS
  misc_feature: MA Experiment 20001905 PARAMETER Experiment Name: At_Drought_Reproduction_P Parameter: Timepoint (day) Value: 10
  misc_feature: MA Experiment 20001905 PARAMETER Experiment Name: At_Drought_Reproduction_P Parameter: Tissue Value: Rosettes
  misc_feature: MA Experiment 20001905 PARAMETER Experiment Name: At_Drought_Reproduction_P Parameter: Treatment Value: Drought vs. No Drought
atctggtgttgctttccttgtaccacacgatccttatagctcatcatctaatggccatttaatccgccagagaagaagaagaagaagaaaatagattagggtttttcattccagaatagccctaatccaaattcgaaatctttcttctgattttgatctttccgatcatgtcatcggtctgtgttaacgaagcattaaccgatgacgagctgagatgggtattgtcgagactagacagtgataaagataaggaagtgtttggtttggtctgcaagaggtggctaaatctgcagagtaccgaccggaagaagctagcggcacgtgctggtccacatatgctccgccgtctcgcttctaggttcactcaaatcgtcgaattggatttgtctcagtcaatttctaggtccttttatccaggagttactgattctgacctcgctgttatctctgagggattcaagtttctcagagttcttaatcttcacaactgtaaaggtattacagatactggattggcctcaattggaaggtgtctttctttactgcagtttttggatgtatcatattgtagaaagctctcagataaaggattatcagctgttgcagaaggctgccatgatctaagggcattgcatttagcgggttgtcgtttcatcaccgatgaatcgttgaaatcactctctgagagatgccgtgatctcgaagctctggggctacaaggctgcaccaatatcactgattcaggtcttgctgatcttgtgaagggatgcagaaagataaaatctttagacattaataaatgtagcaatgttggagatgctggagtttcgagcgtggcgaaagcttgtgcatcttccctcaagacactcaaattgctggactgttacaaagtcgggaacgaatctatatcgtcgctggcgcagttttgcaagaatctggaaactctgataatcggtggatgcagagatatctctgacgaatctatcatgttactggcagattcctgtaaagacagtctcaagaacttgaggatggattggtgcttgaatatatctgactcttcccttagctgcattctcaagcagtgcaagaacttggaggctctagatattggttgctgtgaagaggtcacagacactgctttccgggatttagggagcgacgatgttttgggattgaaggttttaaaggttagcaactgcacgaagatcacagtaacagggataggcaagcttttggacaaatgcagttccctggagtatatagatgtaaggtctcttccacatgtgacagaagtgagatgcagtgaagctggtttggagttcccaaaatgttgtaaagttaacttttcaggtagtttaaccgagccagatgttctgctttgatcgttgctgttgggatctcgttacttgtctgttgggaaattctggtaaccctaaaccttctgtgatctctctatctgtctcgtgtatgggcacactcatagcttatagttcatcagtgagtcttctctcaagctcttgtatatttttgtgcattaaatatttggttgtagcggctgcttgattattcttcagttgctttgcaaagtgtgtgtagttgttgttgaacctgcttctccttaagagtaaaaaaaggtcagcacttgatatttgtaaactctgattctcaatgtactgatttctt

SEQ ID NO: 41025 - protein, 405 aa, Arabidopsis thaliana
  peptide (1)..(405): Ceres Seq. ID no. 12562539
  misc_feature (1)..(376): Homolog of NCBI NO: 630513 NR Description: hypothetical protein C02F5.7 - Caenorhabditis
  misc_feature (85)..(401): Homolog of NCBI NO: 37590914 NR Description: Unknown (protein for MGC:73374) [Danio rerio]
  misc_feature (84)..(401): Homolog of NCBI NO: 6164721 NR Description: F-box protein Fbl2 [Homo sapiens]
  misc_feature (85)..(392): Homolog of NCBI NO: 21536497 NR Description: F-box protein family, AtFBL4 [Arabidopsis
  misc_feature (84)..(401): Homolog of NCBI NO: 30519963 NR Description: F-box and leucine-rich repeat protein 2 [Mus
  misc_feature (84)..(401): Homolog of NCBI NO: 16306582 NR Description: F-box and leucine-rich repeat protein 2
  misc_feature (84)..(401): Homolog of NCBI NO: 6063090 NR Description: F-box protein FBL2 [Homo sapiens]
  misc_feature (84)..(401): Homolog of NCBI NO: 5919219 NR Description: leucine-rich repeats containing F-box protein
  misc_feature (84)..(401): Homolog of NCBI NO: 26336707 NR Description: unnamed protein product [Mus musculus]
  misc_feature (1)..(405): Homolog of NCBI NO: 15237286 NR Description: putative protein
MSSVCVNEALTDDELRWVLSRLDSDKDKEVFGLVCKRWLNLQSTDRKKLAARAGPHMLRRLASRFTQIVELDLSQSISRSFYPGVTDSDLAVISEGFKFLRVLNLHNCKGITDTGLASIGRCLSLLQFLDVSYCRKLSDKGLSAVAEGCHDLRALHLAGCRFITDESLKSLSERCRDLEALGLQGCTNITDSGLADLVKGCRKIKSLDINKCSNVGDAGVSSVAKACASSLKTLKLLDCYKVGNESISSLAQFCKNLETLIIGGCRDISDESIMLLADSCKDSLKNLRMDWCLNISDSSLSCILKQCKNLEALDIGCCEEVTDTAFRDLGSDDVLGLKVLKVSNCTKITVTGIGKLLDKCSSLEYIDVRSLPHVTEVRCSEAGLEFPKCCKVNFSGSLTEPDVLL

SEQ ID NO: 41026 - protein, 349 aa, Arabidopsis thaliana
  peptide (1)..(349): Ceres Seq. ID no. 12562540
  misc_feature (1)..(320): Homolog of NCBI NO: 630513 NR Description: hypothetical protein C02F5.7 - Caenorhabditis
  misc_feature (29)..(345): Homolog of NCBI NO: 37590914 NR Description: Unknown (protein for MGC:73374) [Danio rerio]
  misc_feature (28)..(345): Homolog of NCBI NO: 6164721 NR Description: F-box protein Fbl2 [Homo sapiens]
  misc_feature (29)..(336): Homolog of NCBI NO: 21536497 NR Description: F-box protein family, AtFBL4 [Arabidopsis
  misc_feature (28)..(345): Homolog of NCBI NO: 30519963 NR Description: F-box and leucine-rich repeat protein 2 [Mus
  misc_feature (28)..(345): Homolog of NCBI NO: 6063090 NR Description: F-box protein FBL2 [Homo sapiens]
  misc_feature (28)..(345): Homolog of NCBI NO: 16306582 NR Description: F-box and leucine-rich repeat protein 2
  misc_feature (28)..(345): Homolog of NCBI NO: 5919219 NR Description: leucine-rich repeats containing F-box protein
  misc_feature (28)..(345): Homolog of NCBI NO: 26336707 NR Description: unnamed protein product [Mus musculus]
  misc_feature (1)..(349): Homolog of NCBI NO: 15237286 NR Description: putative protein
MLRRLASRFTQIVELDLSQSISRSFYPGVTDSDLAVISEGFKFLRVLNLHNCKGITDTGLASIGRCLSLLQFLDVSYCRKLSDKGLSAVAEGCHDLRALHLAGCRFITDESLKSLSERCRDLEALGLQGCTNITDSGLADLVKGCRKIKSLDINKCSNVGDAGVSSVAKACASSLKTLKLLDCYKVGNESISSLAQFCKNLETLIIGGCRDISDESIMLLADSCKDSLKNLRMDWCLNISDSSLSCILKQCKNLEALDIGCCEEVTDTAFRDLGSDDVLGLKVLKVSNCTKITVTGIGKLLDKCSSLEYIDVRSLPHVTEVRCSEAGLEFPKCCKVNFSGSLTEPDVLL

SEQ ID NO: 41027 - DNA, 930 bp, Arabidopsis thaliana
  misc_feature (1)..(930): Ceres Seq. ID no. 13497557
  misc_feature: MA Experiment ID: 108434 Result: Up-regulated in Transcription
  misc_feature: MA Experiment 108434 PARAMETER Experiment Name: At_Root_Tips_cDNA_P Parameter: Tissue Value: Root Tips
  misc_feature: MA Experiment ID: 108573 Result: Up-regulated in Transcription
  misc_feature: MA Experiment 108573 PARAMETER Experiment Name: At_Drought_cDNA_P Parameter: Timepoint (hr) Value: 6
  misc_feature: MA Experiment 108573 PARAMETER Experiment Name: At_Drought_cDNA_P Parameter: Tissue Value: Aerial
  misc_feature: MA Experiment 108573 PARAMETER Experiment Name: At_Drought_cDNA_P Parameter: Treatment Value: Drought vs. No Drought
  misc_feature: MA Experiment ID: 108579 Result: Down-regulated in Transcription
  misc_feature: MA Experiment 108579 PARAMETER Experiment Name: At_4deg_Cold_cDNA_P Parameter: Temperature (deg C) Value: 4 vs. 22
  misc_feature: MA Experiment 108579 PARAMETER Experiment Name: At_4deg_Cold_cDNA_P Parameter: Timepoint (hr) Value: 6
  misc_feature: MA Experiment 108579 PARAMETER Experiment Name: At_4deg_Cold_cDNA_P Parameter: Tissue Value: Aerial
  misc_feature: MA Experiment ID: 20000111 Result: Down-regulated in Transcription
  misc_feature: MA Experiment 20000111 PARAMETER Experiment Name: At_42deg_Heat_cDNA_P Parameter: Temperature (deg C) Value: 42 vs. 22
  misc_feature: MA Experiment 20000111 PARAMETER Experiment Name: At_42deg_Heat_cDNA_P Parameter: Timepoint (hr) Value: 6
  misc_feature: MA Experiment 20000111 PARAMETER Experiment Name: At_42deg_Heat_cDNA_P Parameter: Tissue Value: Aerial
  misc_feature: MA Experiment ID: 20000112 Result: Down-regulated in Transcription
  misc_feature: MA Experiment 20000112 PARAMETER Experiment Name: At_42deg_Heat_cDNA_P Parameter: Temperature (deg C) Value: 42 vs. 22
  misc_feature: MA Experiment 20000112 PARAMETER Experiment Name: At_42deg_Heat_cDNA_P Parameter: Timepoint (hr) Value: 2
  misc_feature: MA Experiment 20000112 PARAMETER Experiment Name: At_42deg_Heat_cDNA_P Parameter: Tissue Value: Aerial
  misc_feature: MA Experiment ID: 20000113 Result: Down-regulated in Transcription
  misc_feature: MA Experiment 20000113 PARAMETER Experiment Name: At_42deg_Heat_cDNA_P Parameter: Temperature (deg C) Value: 42 vs. 22
  misc_feature: MA Experiment 20000113 PARAMETER Experiment Name: At_42deg_Heat_cDNA_P Parameter: Timepoint (hr) Value: 8
  misc_feature: MA Experiment 20000113 PARAMETER Experiment Name: At_42deg_Heat_cDNA_P Parameter: Tissue Value: Aerial
  misc_feature: MA Experiment ID: 20000234 Result: Up-regulated in Transcription
  misc_feature: MA Experiment 20000234 PARAMETER Experiment Name: At_Siliques_P Parameter: Age (day) Value: 21
  misc_feature: MA Experiment 20000234 PARAMETER Experiment Name: At_Siliques_P Parameter: Organism Value: A. thaliana
  misc_feature: MA Experiment 20000234 PARAMETER Experiment Name: At_Siliques_P Parameter: Plant Line Value: WS
  misc_feature: MA Experiment 20000234 PARAMETER Experiment Name: At_Siliques_P Parameter: Tissue Value: Less Than 5mm Siliques vs. Whole Plant
  misc_feature: MA Experiment ID: 20000235 Result: Up-regulated in Transcription
  misc_feature: MA Experiment 20000235 PARAMETER Experiment Name: At_Siliques_P Parameter: Age (day) Value: 21
  misc_feature: MA Experiment 20000235 PARAMETER Experiment Name: At_Siliques_P Parameter: Organism Value: A. thaliana
  misc_feature: MA Experiment 20000235 PARAMETER Experiment Name: At_Siliques_P Parameter: Plant Line Value: WS
  misc_feature: MA Experiment 20000235 PARAMETER Experiment Name: At_Siliques_P Parameter: Tissue Value: 5-10mm Siliques vs. Whole Plant
  misc_feature: MA Experiment ID: 20000264 Result: Up-regulated in Transcription
  misc_feature: MA Experiment 20000264 PARAMETER Experiment Name: At_Open_Flower_P Parameter: Age (day) Value: 21
  misc_feature: MA Experiment 20000264 PARAMETER Experiment Name: At_Open_Flower_P Parameter: Plant Line Value: WS
  misc_feature: MA Experiment 20000264 PARAMETER Experiment Name: At_Open_Flower_P Parameter: Tissue Value: Open Flower vs. Whole Plant
  misc_feature: MA Experiment ID: 20000265 Result: Up-regulated in Transcription
  misc_feature: MA Experiment 20000265 PARAMETER Experiment Name: At_Open_Flower_P Parameter: Age (day) Value: 21
  misc_feature: MA Experiment 20000265 PARAMETER Experiment Name: At_Open_Flower_P Parameter: Plant Line Value: WS
  misc_feature: MA Experiment 20000265 PARAMETER Experiment Name: At_Open_Flower_P Parameter: Tissue Value: Closed Flower vs. Whole Plant
  misc_feature: MA Experiment ID: 20000286 Result: Up-regulated in Transcription
  misc_feature: MA Experiment 20000286 PARAMETER Experiment Name: At_Open_Flower_P Parameter: Age (day) Value: 21
  misc_feature: MA Experiment 20000286 PARAMETER Experiment Name: At_Open_Flower_P Parameter: Plant Line Value: WS
  misc_feature: MA Experiment 20000286 PARAMETER Experiment Name: At_Open_Flower_P Parameter: Tissue Value: Half Open vs. Whole Plant
  misc_feature: MA Experiment ID: 20000451 Result: Down-regulated in Transcription
  misc_feature: MA Experiment 20000451 PARAMETER Experiment Name: At_CS6879_Shoots-Roots_P Parameter: Age (day) Value: 14
  misc_feature: MA Experiment 20000451 PARAMETER Experiment Name: At_CS6879_Shoots-Roots_P Parameter: Organism Value: A. thaliana
  misc_feature: MA Experiment 20000451 PARAMETER Experiment Name: At_CS6879_Shoots-Roots_P Parameter: Plant Line Value: CS6879 vs. WS
  misc_feature: MA Experiment 20000451 PARAMETER Experiment Name: At_CS6879_Shoots-Roots_P Parameter: Tissue Value: Roots
atctccgatttagatagaaacaacaatcctccggtggtcactcgctaatctccgtttgatctcgccgacactcgagccttttaccgatgaaggatggagattccttaccaataagcacttcttccgtcgcggcgacgacggtgaccggaaagaaggaaaccggttattccgctctcttctcgaaaggccggtacaagttttgggccttagctgcgattctgttactcgctttctggtcaatgctcactggcacggtcaatctccgttggtctgccggtaacattaaccatttcaccgacgatctcgtctttcccatccacgaggatctcgatgttcttgaaatggaggagagggagaaagtggtgaagcacatgtgggatgtgtataacaatggccgtcgtatcagattacctaggttttggcaagaggccttcgaggctgcttacgaggagcttaccagtgatgtacctgatgtggttgaggctgccatttccgagatcgctaggatgtctattcgctccattgttatagatccgcctccgcttcattccacgaatgtacgagaattgacaaagactctaaaacttgcggacaaaggaagagcaactcaaatatcaaaaccaagcagccgtcgattgaaatagctatggaggctttacgaaaaaggtagtgtagcagtcagccgtcgtggcgtgaccatacatatacttgatgtcagaaagatcaatcaacctcatccctagaatatatgtccatcattagtgttattttttcttccactaggggcattaatcctttcactatcatcatcatctcttctataaacaaaattttgaggaagctttttatccacaccttattagctctgaacggtaatgtcttttattttggatttatgaaatatttcatatgtagttagcccatacattt

SEQ ID NO: 41028 - protein, 185 aa, Arabidopsis thaliana
  peptide (1)..(185): Ceres Seq. ID no. 13497558
  misc_feature (36)..(143): Homolog of NCBI NO: 15222008 NR Description: expressed protein [Arabidopsis thaliana]
  misc_feature (31)..(151): Homolog of NCBI NO: 28209490 NR Description: unknown protein [Oryza sativa (japonica
  misc_feature (1)..(155): Homolog of NCBI NO: 15234477 NR Description: expressed protein [Arabidopsis thaliana]
  misc_feature (1)..(156): Homolog of NCBI NO: 9858772 NR Description: BAC19.4 [Lycopersicon esculentum]
  misc_feature (1)..(185): Homolog of NCBI NO: 18424975 NR Description: expressed protein [Arabidopsis thaliana]
MKDGDSLPISTSSVAATTVTGKKETGYSALFSKGRYKFWALAAILLLAFWSMLTGTVNLRWSAGNINHFTDDLVFPIHEDLDVLEMEEREKVVKHMWDVYNNGRRIRLPRFWQEAFEAAYEELTSDVPDVVEAAISEIARMSIRSIVIDPPPLHSTNVRELTKTLKLADKGRATQISKPSSRRLK

SEQ ID NO: 41029 - protein, 134 aa, Arabidopsis thaliana
  peptide (1)..(134): Ceres Seq. ID no. 13497559
  misc_feature (1)..(92): Homolog of NCBI NO: 15222008 NR Description: expressed protein [Arabidopsis thaliana]
  misc_feature (1)..(100): Homolog of NCBI NO: 28209490 NR Description: unknown protein [Oryza sativa (japonica
  misc_feature (1)..(104): Homolog of NCBI NO: 15234477 NR Description: expressed protein [Arabidopsis thaliana]
  misc_feature (1)..(105): Homolog of NCBI NO: 9858772 NR Description: BAC19.4 [Lycopersicon esculentum]
  misc_feature (1)..(134): Homolog of NCBI NO: 18424975 NR Description: expressed protein [Arabidopsis thaliana]
MLTGTVNLRWSAGNINHFTDDLVFPIHEDLDVLEMEEREKVVKHMWDVYNNGRRIRLPRFWQEAFEAAYEELTSDVPDVVEAAISEIARMSIRSIVIDPPPLHSTNVRELTKTLKLADKGRATQISKPSSRRLK

SEQ ID NO: 41030 - protein, 100 aa, Arabidopsis thaliana; identical to SEQ ID NO: 37003
  peptide (1)..(100): Ceres Seq. ID no. 13497560
  misc_feature (1)..(58): Homolog of NCBI NO: 15222008 NR Description: expressed protein [Arabidopsis thaliana]
  misc_feature (1)..(66): Homolog of NCBI NO: 28209490 NR Description: unknown protein [Oryza sativa (japonica
  misc_feature (1)..(70): Homolog of NCBI NO: 15234477 NR Description: expressed protein [Arabidopsis thaliana]
  misc_feature (1)..(71): Homolog of NCBI NO: 9858772 NR Description: BAC19.4 [Lycopersicon esculentum]
  misc_feature (1)..(100): Homolog of NCBI NO: 18424975 NR Description: expressed protein [Arabidopsis thaliana]

SEQ ID NO: 41031 - DNA, 542 bp, Arabidopsis thaliana
  misc_feature (1)..(542): Ceres Seq. ID no. 12562252
  misc_feature: MA Experiment ID: 108434 Result: Down-regulated in Transcription
  misc_feature: MA Experiment 108434 PARAMETER Experiment Name: At_Root_Tips_cDNA_P Parameter: Tissue Value: Root Tips
  misc_feature: MA Experiment ID: 108435 Result: Up-regulated in Transcription
  misc_feature: MA Experiment 108435 PARAMETER Experiment Name: At_stm_Mutants_cDNA_P Parameter: Plant Line Value: wt Landsburg vs stm
  misc_feature: MA Experiment 108435 PARAMETER Experiment Name: At_stm_Mutants_cDNA_P Parameter: Tissue Value: Shoot Apical Meristem Region
  misc_feature: MA Experiment ID: 108569 Result: Up-regulated in Transcription
  misc_feature: MA Experiment 108569 PARAMETER Experiment Name: At_0.001%_MeJA__cDNA_P Parameter: Timepoint (hr) Value: 6
  misc_feature: MA Experiment 108569 PARAMETER Experiment Name: At_0.001%_MeJA__cDNA_P Parameter: Tissue Value: Aerial
  misc_feature: MA Experiment 108569 PARAMETER Experiment Name: At_0.001%_MeJA__cDNA_P Parameter: Treatment Value: 0.001% MeJA vs. No Treatment
  misc_feature: MA Experiment ID: 108576 Result: Up-regulated in Transcription
  misc_feature: MA Experiment 108576 PARAMETER Experiment Name: At_42deg_Heat_cDNA_P Parameter: Temperature (deg C) Value: 42 vs. 22
  misc_feature: MA Experiment 108576 PARAMETER Experiment Name: At_42deg_Heat_cDNA_P Parameter: Timepoint (hr) Value: 1
  misc_feature: MA Experiment 108576 PARAMETER Experiment Name: At_42deg_Heat_cDNA_P Parameter: Tissue Value: Aerial
  misc_feature: MA Experiment ID: 108594 Result: Down-regulated in Transcription
  misc_feature: MA Experiment 108594 PARAMETER Experiment Name: At_Ler-rhl_Root_cDNA_P Parameter: Plant Line Value: null
  misc_feature: MA Experiment ID: 108595 Result: Up-regulated in Transcription
  misc_feature: MA Experiment 108595 PARAMETER Experiment Name: At_Ler-pi_Ovule_cDNA_P Parameter: Plant Line Value: null
  misc_feature: MA Experiment ID: 108609 Result: Up-regulated in Transcription
  misc_feature: MA Experiment 108609 PARAMETER Experiment Name: At_100uM_ABA_cDNA_P Parameter: Timepoint (hr) Value: 24
  misc_feature: MA Experiment 108609 PARAMETER Experiment Name: At_100uM_ABA_cDNA_P Parameter: Tissue Value: Aerial
  misc_feature: MA Experiment 108609 PARAMETER Experiment Name: At_100uM_ABA_cDNA_P Parameter: Treatment Value: 100uM ABA vs. No Treatment
  misc_feature: MA Experiment ID: 20000088 Result: Up-regulated in Transcription
  misc_feature: MA Experiment 20000088 PARAMETER Experiment Name: At_100uM_ABA_Mutants_cDNA_P Parameter: Plant Line Value: Landsberg
  misc_feature: MA Experiment 20000088 PARAMETER Experiment Name: At_100uM_ABA_Mutants_cDNA_P Parameter: Timepoint (hr) Value: 6
  misc_feature: MA Experiment 20000088 PARAMETER Experiment Name: At_100uM_ABA_Mutants_cDNA_P Parameter: Tissue Value: Aerial
  misc_feature: MA Experiment 20000088 PARAMETER Experiment Name: At_100uM_ABA_Mutants_cDNA_P Parameter: Treatment Value: 100uM ABA vs. No Treatment
atcacttacttaacatactaagagagttattagaacttgcaaaaaatggcttccaaggctttgattctgttaggtctcttctcagttcttctcgtcgtctccgaagtgtctgccgcaaggcaatcgggcatggtgaagccagagagtgaggaaactgtgcaacctgaaggttatggcggtggccacggaggacatggtggtcacggagggggaggaggccacggacatggaggacacaacggaggagggggccacggacttgacggatacggaggaggtggaggacactatggaggaggtggaggacactacggaggaggtggaggacactacggaggaggtggaggacactacggaggaggtggtggaggacacggaggtggaggacactacggaggtggaggccacgggctaaacgaacctgttcagactaagccgggtgtttaaaactatataatatcttcactaccatgcatgattgcatatatatatatacgcttatgtattatctatatgcctataaataaaccatggtgagtttg

SEQ ID NO: 41032 - protein, 133 aa, Arabidopsis thaliana
  peptide (1)..(133): Ceres Seq. ID no. 12562253
  misc_feature (38)..(132): Pfam Name: Herpesvirus latent membrane protein 1 (LMP1) Pfam Description: Herpesvirus latent membrane protein 1 (LMP1)
  misc_feature (1)..(132): Homolog of NCBI NO: 18266043 NR Description: glycine-rich protein [Brassica oleracea]
  misc_feature (4)..(124): Homolog of NCBI NO: 7488799 NR Description: dormancy-associated protein 2 - garden pea
  misc_feature (1)..(117): Homolog of NCBI NO: 81625 NR Description: glycine-rich protein 3 precursor - Arabidopsis
  misc_feature (1)..(117): Homolog of NCBI NO: 259447 NR Description: glycine-rich protein; atGRP [Arabidopsis thaliana]
  misc_feature (1)..(122): Homolog of NCBI NO: 15224548 NR Description: putative glycine-rich protein
  misc_feature (1)..(133): Homolog of NCBI NO: 9957568 NR Description: antimicrobial peptide shep-GRP [Capsella
  misc_feature (1)..(133): Homolog of NCBI NO: 15224547 NR Description: putative glycine-rich protein; protein id:
  misc_feature (1)..(133): Homolog of NCBI NO: 21536606 NR Description: putative glycine-rich protein [Arabidopsis
  misc_feature (1)..(133): Homolog of NCBI NO: 15224540 NR Description: putative glycine-rich protein
  misc_feature (1)..(133): Homolog of NCBI NO: 30678191 NR Description: glycine-rich protein [Arabidopsis thaliana]
MASKALILLGLFSVLLVVSEVSAARQSGMVKPESEETVQPEGYGGGHGGHGGHGGGGGHGHGGHNGGGGHGLDGYGGGGGHYGGGGGHYGGGGGHYGGGGGHYGGGGGGHGGGGHYGGGGHGLNEPVQTKPGV

SEQ ID NO: 41033 - protein, 105 aa, Arabidopsis thaliana
  peptide (1)..(105): Ceres Seq. ID no. 12562254
  misc_feature (10)..(104): Pfam Name: Herpesvirus latent membrane protein 1 (LMP1) Pfam Description: Herpesvirus latent membrane protein 1 (LMP1)
  misc_feature (1)..(104): Homolog of NCBI NO: 18266043 NR Description: glycine-rich protein [Brassica oleracea]
  misc_feature (1)..(96): Homolog of NCBI NO: 7488799 NR Description: dormancy-associated protein 2 - garden pea
  misc_feature (1)..(89): Homolog of NCBI NO: 81625 NR Description: glycine-rich protein 3 precursor - Arabidopsis
  misc_feature (1)..(89): Homolog of NCBI NO: 259447 NR Description: glycine-rich protein; atGRP [Arabidopsis thaliana]
  misc_feature (1)..(94): Homolog of NCBI NO: 15224548 NR Description: putative glycine-rich protein
  misc_feature (1)..(105): Homolog of NCBI NO: 9957568 NR Description: antimicrobial peptide shep-GRP [Capsella
  misc_feature (1)..(105): Homolog of NCBI NO: 15224547 NR Description: putative glycine-rich protein; protein id:
  misc_feature (1)..(105): Homolog of NCBI NO: 21536606 NR Description: putative glycine-rich protein [Arabidopsis
  misc_feature (1)..(105): Homolog of NCBI NO: 15224540 NR Description: putative glycine-rich protein
  misc_feature (1)..(105): Homolog of NCBI NO: 30678191 NR Description: glycine-rich protein [Arabidopsis thaliana]
MVKPESEETVQPEGYGGGHGGHGGHGGGGGHGHGGHNGGGGHGLDGYGGGGGHYGGGGGHYGGGGGHYGGGGGHYGGGGGGHGGGGHYGGGGHGLNEPVQTKPGV

SEQ ID NO: 41034 - protein, 80 aa, Arabidopsis thaliana
  peptide (1)..(80): Ceres Seq. ID no. 12562255
  misc_feature (1)..(80): Pfam Name: Transferrin binding protein-like solute binding protein Pfam Description: Transferrin binding protein-like solute binding
MAVATEDMVVTEGEEATDMEDTTEEGATDLTDTEEVEDTMEEVEDTTEEVEDTTEEVEDTTEEVVEDTEVEDTTEVEATG

SEQ ID NO: 41035 - DNA, 1819 bp, Arabidopsis thaliana
  misc_feature (1)..(1819): Ceres Seq. ID no. 13488907
  misc_feature: MA Experiment ID: 108435 Result: Down-regulated in Transcription
  misc_feature: MA Experiment 108435 PARAMETER Experiment Name: At_stm_Mutants_cDNA_P Parameter: Plant Line Value: wt Landsburg vs stm
  misc_feature: MA Experiment 108435 PARAMETER Experiment Name: At_stm_Mutants_cDNA_P Parameter: Tissue Value: Shoot Apical Meristem Region
  misc_feature: MA Experiment ID: 108461 Result: Down-regulated in Transcription
  misc_feature: MA Experiment 108461 PARAMETER Experiment Name: At_Germinating_Seeds_cDNA_P Parameter: Age (day) Value: 1 vs. 0
  misc_feature: MA Experiment 108461 PARAMETER Experiment Name: At_Germinating_Seeds_cDNA_P Parameter: Tissue Value: Germinating Seeds
  misc_feature: MA Experiment ID: 108462 Result: Down-regulated in Transcription
  misc_feature: MA Experiment 108462 PARAMETER Experiment Name: At_Germinating_Seeds_cDNA_P Parameter: Age (day) Value: 2 vs. 0
  misc_feature: MA Experiment 108462 PARAMETER Experiment Name: At_Germinating_Seeds_cDNA_P Parameter: Tissue Value: Germinating Seeds
  misc_feature: MA Experiment ID: 108463 Result: Down-regulated in Transcription
  misc_feature: MA Experiment 108463 PARAMETER Experiment Name: At_Germinating_Seeds_cDNA_P Parameter: Age (day) Value: 3 vs. 0
  misc_feature: MA Experiment 108463 PARAMETER Experiment Name: At_Germinating_Seeds_cDNA_P Parameter: Tissue Value: Germinating Seeds
  misc_feature: MA Experiment ID: 108464 Result: Down-regulated in Transcription
  misc_feature: MA Experiment 108464 PARAMETER Experiment Name: At_Germinating_Seeds_cDNA_P Parameter: Age (day) Value: 4 vs. 0
  misc_feature: MA Experiment 108464 PARAMETER Experiment Name: At_Germinating_Seeds_cDNA_P Parameter: Tissue Value: Germinating Seeds
  misc_feature: MA Experiment ID: 108473 Result: Up-regulated in Transcription
  misc_feature: MA Experiment 108473 PARAMETER Experiment Name: At_Drought_Flowers_cDNA_P Parameter: Timepoint (hr) Value: 7 d
  misc_feature: MA Experiment 108473 PARAMETER Experiment Name: At_Drought_Flowers_cDNA_P Parameter: Tissue Value: Flower
  misc_feature: MA Experiment 108473 PARAMETER Experiment Name: At_Drought_Flowers_cDNA_P Parameter: Treatment Value: Drought vs. No Drought
  misc_feature: MA Experiment ID: 108488 Result: Down-regulated in Transcription
  misc_feature: MA Experiment ID: 108561 Result: Up-regulated in Transcription
  misc_feature: MA Experiment 108561 PARAMETER Experiment Name: At_100uM_ABA_cDNA_P Parameter: Timepoint (hr) Value: 6
  misc_feature: MA Experiment 108561 PARAMETER Experiment Name: At_100uM_ABA_cDNA_P Parameter: Tissue Value: Aerial
  misc_feature: MA Experiment 108561 PARAMETER Experiment Name: At_100uM_ABA_cDNA_P Parameter: Treatment Value: 100uM ABA vs. No Treatment
  misc_feature: MA Experiment ID: 108572 Result: Up-regulated in Transcription
  misc_feature: MA Experiment 108572 PARAMETER Experiment Name: At_Drought_cDNA_P Parameter: Timepoint (hr) Value: 1
  misc_feature: MA Experiment 108572 PARAMETER Experiment Name: At_Drought_cDNA_P Parameter: Tissue Value: Aerial
  misc_feature: MA Experiment 108572 PARAMETER Experiment Name: At_Drought_cDNA_P Parameter: Treatment Value: Drought vs. No Drought
  misc_feature: MA Experiment ID: 108573 Result: Up-regulated in Transcription
  misc_feature: MA Experiment 108573 PARAMETER Experiment Name: At_Drought_cDNA_P Parameter: Timepoint (hr) Value: 6
  misc_feature: MA Experiment 108573 PARAMETER Experiment Name: At_Drought_cDNA_P Parameter: Tissue Value: Aerial
  misc_feature: MA Experiment 108573 PARAMETER Experiment Name: At_Drought_cDNA_P Parameter: Treatment Value: Drought vs. No Drought
  misc_feature: MA Experiment ID: 108585 Result: Up-regulated in Transcription
  misc_feature: MA Experiment 108585 PARAMETER Experiment Name: At_5mM_NaNP_cDNA_P Parameter: Timepoint (hr) Value: 6
  misc_feature: MA Experiment 108585 PARAMETER Experiment Name: At_5mM_NaNP_cDNA_P Parameter: Tissue Value: Aerial
  misc_feature: MA Experiment 108585 PARAMETER Experiment Name: At_5mM_NaNP_cDNA_P Parameter: Treatment Value: null
  misc_feature: MA Experiment ID: 108594 Result: Down-regulated in Transcription
  misc_feature: MA Experiment 108594 PARAMETER Experiment Name: At_Ler-rhl_Root_cDNA_P Parameter: Plant Line Value: null
  misc_feature: MA Experiment ID: 108605 Result: Up-regulated in Transcription
  misc_feature: MA Experiment 108605 PARAMETER Experiment Name: At_100uM_ABA_cDNA_P Parameter: Timepoint (hr) Value: 6
  misc_feature: MA Experiment 108605 PARAMETER Experiment Name: At_100uM_ABA_cDNA_P Parameter: Tissue Value: Aerial
  misc_feature: MA Experiment 108605 PARAMETER Experiment Name: At_100uM_ABA_cDNA_P Parameter: Treatment Value: 100uM ABA vs. No Treatment
  misc_feature: MA Experiment ID: 108607 Result: Up-regulated in Transcription
  misc_feature: MA Experiment 108607 PARAMETER Experiment Name: At_100uM_ABA_cDNA_P Parameter: Timepoint (hr) Value: 4
  misc_feature: MA Experiment 108607 PARAMETER Experiment Name: At_100uM_ABA_cDNA_P Parameter: Tissue Value: Aerial
  misc_feature: MA Experiment 108607 PARAMETER Experiment Name: At_100uM_ABA_cDNA_P Parameter: Treatment Value: 100uM ABA vs. No Treatment
  misc_feature: MA Experiment ID: 108609 Result: Up-regulated in Transcription
  misc_feature: MA Experiment 108609 PARAMETER Experiment Name: At_100uM_ABA_cDNA_P Parameter: Timepoint (hr) Value: 24
  misc_feature: MA Experiment 108609 PARAMETER Experiment Name: At_100uM_ABA_cDNA_P Parameter: Tissue Value: Aerial
  misc_feature: MA Experiment 108609 PARAMETER Experiment Name: At_100uM_ABA_cDNA_P Parameter: Treatment Value: 100uM ABA vs. No Treatment
  misc_feature: MA Experiment ID: 108668 Result: Up-regulated in Transcription
  misc_feature: MA Experiment 108668 PARAMETER Experiment Name: At_2mM_SA_cDNA_P Parameter: Plant Line Value: WS
  misc_feature: MA Experiment 108668 PARAMETER Experiment Name: At_2mM_SA_cDNA_P Parameter: Timepoint (hr) Value: 6
  misc_feature: MA Experiment 108668 PARAMETER Experiment Name: At_2mM_SA_cDNA_P Parameter: Treatment Value: 2mM SA vs. No Treatment
  misc_feature: MA Experiment ID: 20000070 Result: Up-regulated in Transcription
  misc_feature: MA Experiment 20000070 PARAMETER Experiment Name: At_100uM_ABA_Mutants_cDNA_P Parameter: Plant Line Value: CS24
  misc_feature: MA Experiment 20000070 PARAMETER Experiment Name: At_100uM_ABA_Mutants_cDNA_P Parameter: Timepoint (hr) Value: 6
  misc_feature: MA Experiment 20000070 PARAMETER Experiment Name: At_100uM_ABA_Mutants_cDNA_P Parameter: Tissue Value: Aerial
  misc_feature: MA Experiment 20000070 PARAMETER Experiment Name: At_100uM_ABA_Mutants_cDNA_P Parameter: Treatment Value: 100uM ABA vs. No Treatment
  misc_feature: MA Experiment ID: 20000071 Result: Up-regulated in Transcription
  misc_feature: MA Experiment 20000071 PARAMETER Experiment Name: At_100uM_ABA_Mutants_cDNA_P Parameter: Plant Line Value: CS8104
  misc_feature: MA Experiment 20000071 PARAMETER Experiment Name: At_100uM_ABA_Mutants_cDNA_P Parameter: Timepoint (hr) Value: 6
  misc_feature: MA Experiment 20000071 PARAMETER Experiment Name: At_100uM_ABA_Mutants_cDNA_P Parameter: Tissue Value: Aerial
  misc_feature: MA Experiment 20000071 PARAMETER Experiment Name: At_100uM_ABA_Mutants_cDNA_P Parameter: Treatment Value: 100uM ABA vs. No Treatment
  misc_feature: MA Experiment ID: 20000086 Result: Up-regulated in Transcription
  misc_feature: MA Experiment 20000086 PARAMETER Experiment Name: At_100uM_ABA_Mutants_cDNA_P Parameter: Plant Line Value: CS22
  misc_feature: MA Experiment 20000086 PARAMETER Experiment Name: At_100uM_ABA_Mutants_cDNA_P Parameter: Timepoint (hr) Value: 6
  misc_feature: MA Experiment 20000086 PARAMETER Experiment Name: At_100uM_ABA_Mutants_cDNA_P Parameter: Tissue Value: Aerial
  misc_feature: MA Experiment 20000086 PARAMETER Experiment Name: At_100uM_ABA_Mutants_cDNA_P Parameter: Treatment Value: 100uM ABA vs. No Treatment
  misc_feature: MA Experiment ID: 20000087 Result: Up-regulated in Transcription
  misc_feature: MA Experiment 20000087 PARAMETER Experiment Name: At_100uM_ABA_Mutants_cDNA_P Parameter: Plant Line Value: WS
  misc_feature: MA Experiment 20000087 PARAMETER Experiment Name: At_100uM_ABA_Mutants_cDNA_P Parameter: Timepoint (hr) Value: 6
  misc_feature: MA Experiment 20000087 PARAMETER Experiment Name: At_100uM_ABA_Mutants_cDNA_P Parameter: Tissue Value: Aerial
  misc_feature: MA Experiment 20000087 PARAMETER Experiment Name: At_100uM_ABA_Mutants_cDNA_P Parameter: Treatment Value: 100uM ABA vs. No Treatment
  misc_feature: MA Experiment ID: 20000088 Result: Up-regulated in Transcription
  misc_feature: MA Experiment 20000088 PARAMETER Experiment Name: At_100uM_ABA_Mutants_cDNA_P Parameter: Plant Line Value: Landsberg
  misc_feature: MA Experiment 20000088 PARAMETER Experiment Name: At_100uM_ABA_Mutants_cDNA_P Parameter: Timepoint (hr) Value: 6
  misc_feature: MA Experiment 20000088 PARAMETER Experiment Name: At_100uM_ABA_Mutants_cDNA_P Parameter: Tissue Value: Aerial
  misc_feature: MA Experiment 20000088 PARAMETER Experiment Name: At_100uM_ABA_Mutants_cDNA_P Parameter: Treatment Value: 100uM ABA vs. No Treatment
  misc_feature: MA Experiment ID: 20000117 Result: Up-regulated in Transcription
  misc_feature: MA Experiment 20000117 PARAMETER Experiment Name: At_100uM_ABA_Mutants_cDNA_P Parameter: Plant Line Value: Columbia
  misc_feature: MA Experiment 20000117 PARAMETER Experiment Name: At_100uM_ABA_Mutants_cDNA_P Parameter: Timepoint (hr) Value: 6
  misc_feature: MA Experiment 20000117 PARAMETER Experiment Name: At_100uM_ABA_Mutants_cDNA_P Parameter: Tissue Value: Aerial
  misc_feature: MA Experiment 20000117 PARAMETER Experiment Name: At_100uM_ABA_Mutants_cDNA_P Parameter: Treatment Value: 100uM ABA vs. No Treatment
  misc_feature: MA Experiment ID: 20000166 Result: Up-regulated in Transcription
  misc_feature: MA Experiment 20000166 PARAMETER Experiment Name: At_100uM_ABA_P Parameter: Age (day) Value: 14
  misc_feature: MA Experiment 20000166 PARAMETER Experiment Name: At_100uM_ABA_P Parameter: Organism Value: A. thaliana
  misc_feature: MA Experiment 20000166 PARAMETER Experiment Name: At_100uM_ABA_P Parameter: Plant Line Value: WS
  misc_feature: MA Experiment 20000166 PARAMETER Experiment Name: At_100uM_ABA_P Parameter: Timepoint (hr) Value: 1
  misc_feature: MA Experiment 20000166 PARAMETER Experiment Name: At_100uM_ABA_P Parameter: Tissue Value: Aerial
  misc_feature: MA Experiment 20000166 PARAMETER Experiment Name: At_100uM_ABA_P Parameter: Treatment Value: 100uM ABA vs. No Treatment
  misc_feature: MA Experiment ID: 20000169 Result: Up-regulated in Transcription
  misc_feature: MA Experiment 20000169 PARAMETER Experiment Name: At_100uM_ABA_P Parameter: Age (day) Value: 14
  misc_feature: MA Experiment 20000169 PARAMETER Experiment Name: At_100uM_ABA_P Parameter: Organism Value: A. thaliana
  misc_feature: MA Experiment 20000169 PARAMETER Experiment Name: At_100uM_ABA_P Parameter: Plant Line Value: WS
  misc_feature: MA Experiment 20000169 PARAMETER Experiment Name: At_100uM_ABA_P Parameter: Timepoint (hr) Value: 6
  misc_feature: MA Experiment 20000169 PARAMETER Experiment Name: At_100uM_ABA_P Parameter: Tissue Value: Aerial
  misc_feature: MA Experiment 20000169 PARAMETER Experiment Name: At_100uM_ABA_P Parameter: Treatment Value: 100uM ABA vs. No Treatment
  misc_feature: MA Experiment ID: 20000180 Result: Down-regulated in Transcription
  misc_feature: MA Experiment 20000180 PARAMETER Experiment Name: At_Germinating_Seeds_P Parameter: Age (hr) Value: 24 vs. 0
  misc_feature: MA Experiment 20000180 PARAMETER Experiment Name: At_Germinating_Seeds_P Parameter: Tissue Value: Germinating Seeds
  misc_feature: MA Experiment ID: 20000182 Result: Up-regulated in Transcription
  misc_feature: MA Experiment 20000182 PARAMETER Experiment Name: At_2mM_SA_P Parameter: Age (day) Value: 14
  misc_feature: MA Experiment 20000182 PARAMETER Experiment Name: At_2mM_SA_P Parameter: Organism Value: A. thaliana
  misc_feature: MA Experiment 20000182 PARAMETER Experiment Name: At_2mM_SA_P Parameter: Plant Line Value: WS
  misc_feature: MA Experiment 20000182 PARAMETER Experiment Name: At_2mM_SA_P Parameter: Timepoint (hr) Value: 6
  misc_feature: MA Experiment 20000182 PARAMETER Experiment Name: At_2mM_SA_P Parameter: Tissue Value: Aerial
  misc_feature: MA Experiment 20000182 PARAMETER Experiment Name: At_2mM_SA_P Parameter: Treatment Value: 2mM SA vs. No Treatment
  misc_feature: MA Experiment ID: 20000184 Result: Down-regulated in Transcription
  misc_feature: MA Experiment 20000184 PARAMETER Experiment Name: At_Shoots__P Parameter: Age (day) Value: 7
  misc_feature: MA Experiment 20000184 PARAMETER Experiment Name: At_Shoots__P Parameter: Tissue Value: Shoots vs. Whole Plant
  misc_feature: MA Experiment ID: 20000185 Result: Down-regulated in Transcription
  misc_feature: MA Experiment 20000185 PARAMETER Experiment Name: At_Roots__P Parameter: Age (day) Value: 7 vs. 21
  misc_feature: MA Experiment 20000185 PARAMETER Experiment Name: At_Roots__P Parameter: Organism Value: A. thaliana
  misc_feature: MA Experiment 20000185 PARAMETER Experiment Name: At_Roots__P Parameter: Tissue Value: Roots vs. Whole Plant
  misc_feature: MA Experiment ID: 20000267 Result: Up-regulated in Transcription
  misc_feature: MA Experiment 20000267 PARAMETER Experiment Name: At_Drought_P Parameter: Age (day) Value: 7
  misc_feature: MA Experiment 20000267 PARAMETER Experiment Name: At_Drought_P Parameter: Organism Value: A. thaliana
  misc_feature: MA Experiment 20000267 PARAMETER Experiment Name: At_Drought_P Parameter: Plant Line Value: WS
  misc_feature: MA Experiment 20000267 PARAMETER Experiment Name: At_Drought_P Parameter: Timepoint (hr) Value: 6
  misc_feature: MA Experiment 20000267 PARAMETER Experiment Name: At_Drought_P Parameter: Tissue Value: Whole Plant
  misc_feature: MA Experiment 20000267 PARAMETER Experiment Name: At_Drought_P Parameter: Treatment Value: Drought vs. No Drought
  misc_feature: MA Experiment ID: 20000268 Result: Up-regulated in Transcription
  misc_feature: MA Experiment 20000268 PARAMETER Experiment Name: At_100mM_NaCl__P Parameter: Age (day) Value: 14
  misc_feature: MA Experiment 20000268 PARAMETER Experiment Name: At_100mM_NaCl__P Parameter: Organism Value: A. thaliana
  misc_feature: MA Experiment 20000268 PARAMETER Experiment Name: At_100mM_NaCl__P Parameter: Plant Line Value: WS
  misc_feature: MA Experiment 20000268 PARAMETER Experiment Name: At_100mM_NaCl__P Parameter: Timepoint (hr) Value: 6
  misc_feature: MA Experiment 20000268 PARAMETER Experiment Name: At_100mM_NaCl__P Parameter: Tissue Value: Whole Plant
  misc_feature: MA Experiment 20000268 PARAMETER Experiment Name: At_100mM_NaCl__P Parameter: Treatment Value: 100mM NaCl vs. No Treatment
  misc_feature: MA Experiment ID: 20000308 Result: Up-regulated in Transcription
  misc_feature: MA Experiment 20000308 PARAMETER Experiment Name: At_100mM_NaCl__P Parameter: Age (day) Value: 17
  misc_feature: MA Experiment 20000308 PARAMETER Experiment Name: At_100mM_NaCl__P Parameter: Organism Value: A. thaliana
  misc_feature: MA Experiment 20000308 PARAMETER Experiment Name: At_100mM_NaCl__P Parameter: Plant Line Value: WS
  misc_feature: MA Experiment 20000308 PARAMETER Experiment Name: At_100mM_NaCl__P Parameter: Timepoint (hr) Value: 72
  misc_feature: MA Experiment 20000308 PARAMETER Experiment Name: At_100mM_NaCl__P Parameter: Tissue Value: Whole Plant
  misc_feature: MA Experiment 20000308 PARAMETER Experiment Name: At_100mM_NaCl__P Parameter: Treatment Value: 100mM NaCl vs. No Treatment
  misc_feature: MA Experiment ID: 20000436 Result: Up-regulated in Transcription
  misc_feature: MA Experiment 20000436 PARAMETER Experiment Name: At_Drought_P Parameter: Age (day) Value: 7
  misc_feature: MA Experiment 20000436 PARAMETER Experiment Name: At_Drought_P Parameter: Organism Value: A. thaliana
  misc_feature: MA Experiment 20000436 PARAMETER Experiment Name: At_Drought_P Parameter: Plant Line Value: WS
  misc_feature: MA Experiment 20000436 PARAMETER Experiment Name: At_Drought_P Parameter: Timepoint (hr) Value: 12
  misc_feature: MA Experiment 20000436 PARAMETER Experiment Name: At_Drought_P Parameter: Tissue Value: Whole Plant
  misc_feature: MA Experiment 20000436 PARAMETER Experiment Name: At_Drought_P Parameter: Treatment Value: Drought vs. No Drought
  misc_feature: MA Experiment ID: 20000437 Result: Up-regulated in Transcription
  misc_feature: MA Experiment 20000437 PARAMETER Experiment Name: At_Drought_P Parameter: Age (day) Value: 8
  misc_feature: MA Experiment 20000437 PARAMETER Experiment Name: At_Drought_P Parameter: Organism Value: A. thaliana
  misc_feature: MA Experiment 20000437 PARAMETER Experiment Name: At_Drought_P Parameter: Plant Line Value: WS
  misc_feature: MA Experiment 20000437 PARAMETER Experiment Name: At_Drought_P Parameter: Timepoint (hr) Value: 24
  misc_feature: MA Experiment 20000437 PARAMETER Experiment Name: At_Drought_P Parameter: Tissue Value: Whole Plant
  misc_feature: MA Experiment 20000437 PARAMETER Experiment Name: At_Drought_P Parameter: Treatment Value: Drought vs. No Drought
  misc_feature: MA Experiment ID: 20000438 Result: Down-regulated in Transcription
  misc_feature: MA Experiment 20000438 PARAMETER Experiment Name: At_Shoots__P Parameter: Age (day) Value: 14
  misc_feature: MA Experiment 20000438 PARAMETER Experiment Name: At_Shoots__P Parameter: Tissue Value: Shoots vs. Whole Plant
  misc_feature: MA Experiment ID: 20000439 Result: Down-regulated in Transcription
  misc_feature: MA Experiment 20000439 PARAMETER Experiment Name: At_Roots__P Parameter: Age (day) Value: 14 vs. 21
  misc_feature: MA Experiment 20000439 PARAMETER Experiment Name: At_Roots__P Parameter: Organism Value: A. thaliana
  misc_feature: MA Experiment 20000439 PARAMETER Experiment Name: At_Roots__P Parameter: Tissue Value: Roots vs. Whole Plant
  misc_feature: MA Experiment ID: 20000441 Result: Down-regulated in Transcription
  misc_feature: MA Experiment 20000441 PARAMETER Experiment Name: At_1uM_BR-BRZ__P Parameter: Tissue Value: Shoot Apices
  misc_feature: MA Experiment 20000441 PARAMETER Experiment Name: At_1uM_BR-BRZ__P Parameter: Treatment Value: 1uM BR vs. No Treatment
  misc_feature: MA Experiment ID: 20000443 Result: Down-regulated in Transcription
  misc_feature: MA Experiment 20000443 PARAMETER Experiment Name: At_1uM_BR-BRZ__P Parameter: Tissue Value: Shoot Apices
  misc_feature: MA Experiment 20000443 PARAMETER Experiment Name: At_1uM_BR-BRZ__P Parameter: Treatment Value: 1uM BRZ vs. No Treatment
  misc_feature: MA Experiment ID: 20000453 Result: Up-regulated in Transcription
  misc_feature: MA Experiment 20000453 PARAMETER Experiment Name: At_100uM_ABA_P Parameter: Age (day) Value: 15
  misc_feature: MA Experiment 20000453 PARAMETER Experiment Name: At_100uM_ABA_P Parameter: Organism Value: A. thaliana
  misc_feature: MA Experiment 20000453 PARAMETER Experiment Name: At_100uM_ABA_P Parameter: Plant Line Value: WS
  misc_feature: MA Experiment 20000453 PARAMETER Experiment Name: At_100uM_ABA_P Parameter: Timepoint (hr) Value: 24
  misc_feature: MA Experiment 20000453 PARAMETER Experiment Name: At_100uM_ABA_P Parameter: Tissue Value: Aerial
  misc_feature: MA Experiment 20000453 PARAMETER Experiment Name: At_100uM_ABA_P Parameter: Treatment Value: 100uM ABA vs. No Treatment
  misc_feature: MA Experiment ID: 20000709 Result: Down-regulated in Transcription
  misc_feature: MA Experiment 20000709 PARAMETER Experiment Name: At_15mM_NH4NO3_L-to-H_P Parameter: Age (hr) Value: 14
  misc_feature: MA Experiment 20000709 PARAMETER Experiment Name: At_15mM_NH4NO3_L-to-H_P Parameter: Organism Value: A. thaliana
  misc_feature: MA Experiment 20000709 PARAMETER Experiment Name: At_15mM_NH4NO3_L-to-H_P Parameter: Plant Line Value: WS
  misc_feature: MA Experiment 20000709 PARAMETER Experiment Name: At_15mM_NH4NO3_L-to-H_P Parameter: Timepoint (hr) Value: 4
  misc_feature: MA Experiment 20000709 PARAMETER Experiment Name: At_15mM_NH4NO3_L-to-H_P Parameter: Tissue Value: Aerial
  misc_feature: MA Experiment 20000709 PARAMETER Experiment Name: At_15mM_NH4NO3_L-to-H_P Parameter: Treatment Value: 15mM NH4NO3 vs. 30mM Mannitol
  misc_feature: MA Experiment ID: 20000794 Result: Up-regulated in Transcription
  misc_feature: MA Experiment 20000794 PARAMETER Experiment Name: At_Petals_P Parameter: Age (day) Value: 23-25 days
  misc_feature: MA Experiment 20000794 PARAMETER Experiment Name: At_Petals_P Parameter: Plant Line Value: WS
  misc_feature: MA Experiment 20000794 PARAMETER Experiment Name: At_Petals_P Parameter: Tissue Value: Petals vs. Whole plant
  misc_feature: MA Experiment ID: 20001247 Result: Down-regulated in Transcription
  misc_feature: MA Experiment 20001247 PARAMETER Experiment Name: At_Far-red-induction_P Parameter: Age (day) Value: 7
  misc_feature: MA Experiment 20001247 PARAMETER Experiment Name: At_Far-red-induction_P Parameter: Light Value: Far-red vs. White
  misc_feature: MA Experiment 20001247 PARAMETER Experiment Name: At_Far-red-induction_P Parameter: Organism Value: A. thaliana
  misc_feature: MA Experiment 20001247 PARAMETER Experiment Name: At_Far-red-induction_P Parameter: Plant Line Value: Columbia
  misc_feature: MA Experiment 20001247 PARAMETER Experiment Name: At_Far-red-induction_P Parameter: Timepoint (hr) Value: 1
  misc_feature: MA Experiment 20001247 PARAMETER Experiment Name: At_Far-red-induction_P Parameter: Tissue Value: Whole Plant
  misc_feature: MA Experiment ID: 20001504 Result: Up-regulated in Transcription
  misc_feature: MA Experiment 20001504 PARAMETER Experiment Name: At_Far-red-enriched_P Parameter: Age (day) Value: 10
  misc_feature: MA Experiment 20001504 PARAMETER Experiment Name: At_Far-red-enriched_P Parameter: Light Value: Far-red enriched vs. White
  misc_feature: MA Experiment 20001504 PARAMETER Experiment Name: At_Far-red-enriched_P Parameter: Organism Value: A. thaliana
  misc_feature: MA Experiment 20001504 PARAMETER Experiment Name: At_Far-red-enriched_P Parameter: Plant Line Value: Columbia
  misc_feature: MA Experiment 20001504 PARAMETER Experiment Name: At_Far-red-enriched_P Parameter: Timepoint (day) Value: 6
  misc_feature: MA Experiment 20001504 PARAMETER Experiment Name: At_Far-red-enriched_P Parameter: Tissue Value: Whole Plant
  misc_feature: MA Experiment ID: 20001554 Result: Up-regulated in Transcription
  misc_feature: MA Experiment 20001554 PARAMETER Experiment Name: At_Drought_Soil_Dry_P Parameter: Age (day) Value: 21
  misc_feature: MA Experiment 20001554 PARAMETER Experiment Name: At_Drought_Soil_Dry_P Parameter: Organism Value: A. thaliana
  misc_feature: MA Experiment 20001554 PARAMETER Experiment Name: At_Drought_Soil_Dry_P Parameter: Plant Line Value: WS
  misc_feature: MA Experiment 20001554 PARAMETER Experiment Name: At_Drought_Soil_Dry_P Parameter: Post Timepoint (hr) Value: None
  misc_feature: MA Experiment 20001554 PARAMETER Experiment Name: At_Drought_Soil_Dry_P Parameter: Post-Treatment Value: None
  misc_feature: MA Experiment 20001554 PARAMETER Experiment Name: At_Drought_Soil_Dry_P Parameter: Timepoint (day) Value: 7
  misc_feature: MA Experiment 20001554 PARAMETER Experiment Name: At_Drought_Soil_Dry_P Parameter: Treatment Value: Drought vs. No Drought
  misc_feature: MA Experiment ID: 20001555 Result: Up-regulated in Transcription
  misc_feature: MA Experiment 20001555 PARAMETER Experiment Name: At_Drought_Soil_Dry_P Parameter: Age (day) Value: 24
  misc_feature: MA Experiment 20001555 PARAMETER Experiment Name: At_Drought_Soil_Dry_P Parameter: Organism Value: A. thaliana
  misc_feature: MA Experiment 20001555 PARAMETER Experiment Name: At_Drought_Soil_Dry_P Parameter: Plant Line Value: WS
  misc_feature: MA Experiment 20001555 PARAMETER Experiment Name: At_Drought_Soil_Dry_P Parameter: Post Timepoint (hr) Value: None
  misc_feature: MA Experiment 20001555 PARAMETER Experiment Name: At_Drought_Soil_Dry_P Parameter: Post-Treatment Value: None
  misc_feature: MA Experiment 20001555 PARAMETER Experiment Name: At_Drought_Soil_Dry_P Parameter: Timepoint (day) Value: 10
  misc_feature: MA Experiment 20001555 PARAMETER Experiment Name: At_Drought_Soil_Dry_P Parameter: Treatment Value: Drought vs. No Drought
  misc_feature: MA Experiment ID: 20001556 Result: Up-regulated in Transcription
  misc_feature: MA Experiment 20001556 PARAMETER Experiment Name: At_Drought_Soil_Dry_P Parameter: Age (day) Value: 26
  misc_feature: MA Experiment 20001556 PARAMETER Experiment Name: At_Drought_Soil_Dry_P Parameter: Organism Value: A. thaliana
  misc_feature: MA Experiment 20001556 PARAMETER Experiment Name: At_Drought_Soil_Dry_P Parameter: Plant Line Value: WS
  misc_feature: MA Experiment 20001556 PARAMETER Experiment Name: At_Drought_Soil_Dry_P Parameter: Post Timepoint (hr) Value: None
  misc_feature: MA Experiment 20001556 PARAMETER Experiment Name: At_Drought_Soil_Dry_P Parameter: Post-Treatment Value: None
  misc_feature: MA Experiment 20001556 PARAMETER Experiment Name: At_Drought_Soil_Dry_P Parameter: Timepoint (day) Value: 12
  misc_feature: MA Experiment 20001556 PARAMETER Experiment Name: At_Drought_Soil_Dry_P Parameter: Treatment Value: Drought vs. No Drought
  misc_feature: MA Experiment ID: 20001904 Result: Up-regulated in Transcription
  misc_feature: MA Experiment 20001904 PARAMETER Experiment Name: At_Drought_Reproduction_P Parameter: Age (day) Value: 37
  misc_feature: MA Experiment 20001904 PARAMETER Experiment Name: At_Drought_Reproduction_P Parameter: Organism Value: A. thaliana
  misc_feature: MA Experiment 20001904 PARAMETER Experiment Name: At_Drought_Reproduction_P Parameter: Plant Line Value: WS
  misc_feature: MA Experiment 20001904 PARAMETER Experiment Name: At_Drought_Reproduction_P Parameter: Timepoint (day) Value: 7
  misc_feature: MA Experiment 20001904 PARAMETER Experiment Name: At_Drought_Reproduction_P Parameter: Tissue Value: Rosettes
  misc_feature: MA Experiment 20001904 PARAMETER Experiment Name: At_Drought_Reproduction_P Parameter: Treatment Value: Drought vs. No Drought
  misc_feature: MA Experiment ID: 20001905 Result: Up-regulated in Transcription
  misc_feature: MA Experiment 20001905 PARAMETER Experiment Name: At_Drought_Reproduction_P Parameter: Age (day) Value: 40
  misc_feature: MA Experiment 20001905 PARAMETER Experiment Name: At_Drought_Reproduction_P Parameter: Organism Value: A. thaliana
  misc_feature: MA Experiment 20001905 PARAMETER Experiment Name: At_Drought_Reproduction_P Parameter: Plant Line Value: WS
  misc_feature: MA Experiment 20001905 PARAMETER Experiment Name: At_Drought_Reproduction_P Parameter: Timepoint (day) Value: 10
  misc_feature: MA Experiment 20001905 PARAMETER Experiment Name: At_Drought_Reproduction_P Parameter: Tissue Value: Rosettes
  misc_feature: MA Experiment 20001905 PARAMETER Experiment Name: At_Drought_Reproduction_P Parameter: Treatment Value: Drought vs. No Drought
  misc_feature: MA Experiment ID: 20001906 Result: Up-regulated in Transcription
  misc_feature: MA Experiment 20001906 PARAMETER Experiment Name: At_Drought_Reproduction_P Parameter: Age (day) Value: 35
  misc_feature: MA Experiment 20001906 PARAMETER Experiment Name: At_Drought_Reproduction_P Parameter: Organism Value: A. thaliana
  misc_feature: MA Experiment 20001906 PARAMETER Experiment Name: At_Drought_Reproduction_P Parameter: Plant Line Value: WS
  misc_feature: MA Experiment 20001906 PARAMETER Experiment Name: At_Drought_Reproduction_P Parameter: Timepoint (day) Value: 5
  misc_feature: MA Experiment 20001906 PARAMETER Experiment Name: At_Drought_Reproduction_P Parameter: Tissue Value: Siliques
  misc_feature: MA Experiment 20001906 PARAMETER Experiment Name: At_Drought_Reproduction_P Parameter: Treatment Value: Drought vs. No Drought
  misc_feature: MA Experiment ID: 20001907 Result: Up-regulated in Transcription
  misc_feature: MA Experiment 20001907 PARAMETER Experiment Name: At_Drought_Reproduction_P Parameter: Age (day) Value: 37
  misc_feature: MA Experiment 20001907 PARAMETER Experiment Name: At_Drought_Reproduction_P Parameter: Organism Value: A. thaliana
  misc_feature: MA Experiment 20001907 PARAMETER Experiment Name: At_Drought_Reproduction_P Parameter: Plant Line Value: WS
  misc_feature: MA Experiment 20001907 PARAMETER Experiment Name: At_Drought_Reproduction_P Parameter: Timepoint (day) Value: 7
  misc_feature: MA Experiment 20001907 PARAMETER Experiment Name: At_Drought_Reproduction_P Parameter: Tissue Value: Siliques
  misc_feature: MA Experiment 20001907 PARAMETER Experiment Name: At_Drought_Reproduction_P Parameter: Treatment Value: Drought vs. No Drought
  misc_feature: MA Experiment ID: 20001908 Result: Up-regulated in Transcription
  misc_feature: MA Experiment 20001908 PARAMETER Experiment Name: At_Drought_Reproduction_P Parameter: Age (day) Value: 40
  misc_feature: MA Experiment 20001908 PARAMETER Experiment Name: At_Drought_Reproduction_P Parameter: Organism Value: A. thaliana
  misc_feature: MA Experiment 20001908 PARAMETER Experiment Name: At_Drought_Reproduction_P Parameter: Plant Line Value: WS
  misc_feature: MA Experiment 20001908 PARAMETER Experiment Name: At_Drought_Reproduction_P Parameter: Timepoint (day) Value: 10
  misc_feature: MA Experiment 20001908 PARAMETER Experiment Name: At_Drought_Reproduction_P Parameter: Tissue Value: Siliques
  misc_feature: MA Experiment 20001908 PARAMETER Experiment Name: At_Drought_Reproduction_P Parameter: Treatment Value: Drought vs. No Drought
  misc_feature: MA Experiment ID: 20001909 Result: Up-regulated in Transcription
  misc_feature: MA Experiment 20001909 PARAMETER Experiment Name: At_Drought_Reproduction_P Parameter: Age (day) Value: 35
  misc_feature: MA Experiment 20001909 PARAMETER Experiment Name: At_Drought_Reproduction_P Parameter: Organism Value: A. thaliana
  misc_feature: MA Experiment 20001909 PARAMETER Experiment Name: At_Drought_Reproduction_P Parameter: Plant Line Value: WS
  misc_feature: MA Experiment 20001909 PARAMETER Experiment Name: At_Drought_Reproduction_P Parameter: Timepoint (day) Value: 5
  misc_feature: MA Experiment 20001909 PARAMETER Experiment Name: At_Drought_Reproduction_P Parameter: Tissue Value: Flowers
  misc_feature: MA Experiment 20001909 PARAMETER Experiment Name: At_Drought_Reproduction_P Parameter: Treatment Value: Drought vs. No Drought
  misc_feature: MA Experiment ID: 20001910 Result: Up-regulated in Transcription
  misc_feature: MA Experiment 20001910 PARAMETER Experiment Name: At_Drought_Reproduction_P Parameter: Age (day) Value: 37
  misc_feature: MA Experiment 20001910 PARAMETER Experiment Name: At_Drought_Reproduction_P Parameter: Organism Value: A. thaliana
  misc_feature: MA Experiment 20001910 PARAMETER Experiment Name: At_Drought_Reproduction_P Parameter: Plant Line Value: WS
  misc_feature: MA Experiment 20001910 PARAMETER Experiment Name: At_Drought_Reproduction_P Parameter: Timepoint (day) Value: 7
  misc_feature: MA Experiment 20001910 PARAMETER Experiment Name: At_Drought_Reproduction_P Parameter: Tissue Value: Flowers
  misc_feature: MA Experiment 20001910 PARAMETER Experiment Name: At_Drought_Reproduction_P Parameter: Treatment Value: Drought vs. No Drought
  misc_feature: MA Experiment ID: 20001911 Result: Up-regulated in Transcription
  misc_feature: MA Experiment 20001911 PARAMETER Experiment Name: At_Drought_Reproduction_P Parameter: Age (day) Value: 40
  misc_feature: MA Experiment 20001911 PARAMETER Experiment Name: At_Drought_Reproduction_P Parameter: Organism Value: A. thaliana
  misc_feature: MA Experiment 20001911 PARAMETER Experiment Name: At_Drought_Reproduction_P Parameter: Plant Line Value: WS
  misc_feature: MA Experiment 20001911 PARAMETER Experiment Name: At_Drought_Reproduction_P Parameter: Timepoint (day) Value: 10
  misc_feature: MA Experiment 20001911 PARAMETER Experiment Name: At_Drought_Reproduction_P Parameter: Tissue Value: Flowers
  misc_feature: MA Experiment 20001911 PARAMETER Experiment Name: At_Drought_Reproduction_P Parameter: Treatment Value: Drought vs. No Drought
gatatttattcaactgcgtggtataaccaaaaaaaaaaagaaacactattcgactctttttttgtttttgtaataaacataaaataaattttggagagagatatttcgtcggaaattaattgacgttcaaaagattcgttaccggaatatttagtagaggcggcgatcgagttatggcggatatttgttatgaagacgagacgtcggcttgtgaatcaagaccgttgtggtctagccggaagtggaggatcggtgtccagcgattcaggatgtctccgtcggagatgaatcccacggcgtcgacgacggaggaggaggataaatctgaagggatttataataagcgaaataaacaagaagagtacgattttatgaactgtgcatcgtcgtcaccttctcaaagctctcctgaagaagagagtgtatcacttgaagacagtgacgtctctatctccgatggaaattcatcggttaatgatgttgcagttattccgtcgaagaagacggttaaagagacggatctgaggccgagatacggcgtcgcatcggtgtgcgggagaagaagagatatggaagatgcggttgcgttacatccgtcttttgtacggaaacaaacggagttttctcgaacaagatggcactattttggtgtttacgacggccatggctgttctcacgttgcggctaggtgtaaagagagacttcacgagttagtgcaagaagaagcgttgtcggataagaaagaagaatggaagaagatgatggagcgtagcttcacacgtatggacaaagaggttgttcgttggggtgaaactgtgatgagtgctaattgtaggtgtgagcttcaaacgccggactgtgacgctgttggatccaccgccgttgtctccgtcattacgccggagaagatcattgttgcgaattgcggtgactcaagagcagttctttgtaggaatggtaaagcagtacctctttctacagatcataagcctgatcgtccggatgagctggatcgaatccaagaagcaggaggacgagtgatatactgggacggtgcaagagtcttaggcgttttagccatgtcacgagccataggagacaattatttaaaaccgtacgtcacttcggagccggaagtgacggttacggatcggactgaggaagatgagtttctgattctagcgacggacgggctatgggacgtagtgacgaacgaggcagcgtgtacgatggtgcgcatgtgtctcaacagaaaaagtggtcgtggaagacggcgaggagaaacacagactccggggaggaggagtgaagaagaagggaaagaagaagaggagaaggtggtggggtcaagaaagaacgggaagagaggagagatcacggacaaagcatgtacggaggcgtcagtattgctgacgaagctggcgttggcaaaacacagtagtgacaacgtaagcgtcgtcgttattgatctcagaagaagaagaaagagacacgttgcttgacactaatctcctcatcactcttactccaccgttttttgtgttgtttaaaatgattcttttaccttgggacgaaggtagctcaaatctttgaacccaaaagagagaaaaaaaaagcattaggtctaaaaaaaaaaccccggtttactgaaagcggttaaaccgggtatggttgggtcttttttgttctgaacctttttttcttgccttttttcggtgtgtaatgaacaaacagaaaaggaagccggaatgtgtcactgtctaggtggaatcagttcagaattcaattaataaaaaagtatgtatatgttttcttggcc

SEQ ID NO: 41036 - protein, 442 aa, Arabidopsis thaliana
  peptide (1)..(442): Ceres Seq. ID no. 13488908
  misc_feature (119)..(426): Pfam Name: Protein phosphatase 2C Pfam Description: Protein phosphatase 2C
  misc_feature (396)..(439): Homolog of NCBI NO: 7768151 NR Description: protein phpsphatase 2C (PP2C) [Fagus sylvatica]
  misc_feature (1)..(383): Homolog of NCBI NO: 7768151 NR Description: protein phpsphatase 2C (PP2C) [Fagus sylvatica]
  misc_feature (399)..(435): Homolog of NCBI NO: 10432446 NR Description: protein phosphatase 2C [Nicotiana tabacum]
  misc_feature (20)..(361): Homolog of NCBI NO: 10432446 NR Description: protein phosphatase 2C [Nicotiana tabacum]
  misc_feature (1)..(435): Homolog of NCBI NO: 16226419 NR Description: AT5g59220/mnc17_110 [Arabidopsis thaliana]
  misc_feature (1)..(435): Homolog of NCBI NO: 15237839 NR Description: protein phosphatase 2C (PP2C), putative
  misc_feature (391)..(435): Homolog of NCBI NO: 15227078 NR Description: protein phosphatase 2C (PP2C), putative
  misc_feature (119)..(374): Homolog of NCBI NO: 15227078 NR Description: protein phosphatase 2C (PP2C), putative
  misc_feature (1)..(442): Homolog of NCBI NO: 21537020 NR Description: protein phosphatase 2C, putative [Arabidopsis
  misc_feature (1)..(442): Homolog of NCBI NO: 15222398 NR Description: protein phosphatase 2C (PP2C), putative
MADICYEDETSACESRPLWSSRKWRIGVQRFRMSPSEMNPTASTTEEEDKSEGIYNKRNKQEEYDFMNCASSSPSQSSPEEESVSLEDSDVSISDGNSSVNDVAVIPSKKTVKETDLRPRYGVASVCGRRRDMEDAVALHPSFVRKQTEFSRTRWHYFGVYDGHGCSHVAARCKERLHELVQEEALSDKKEEWKKMMERSFTRMDKEVVRWGETVMSANCRCELQTPDCDAVGSTAVVSVITPEKIIVANCGDSRAVLCRNGKAVPLSTDHKPDRPDELDRIQEAGGRVIYWDGARVLGVLAMSRAIGDNYLKPYVTSEPEVTVTDRTEEDEFLILATDGLWDVVTNEAACTMVRMCLNRKSGRGRRRGETQTPGRRSEEEGKEEEEKVVGSRKNGKRGEITDKACTEASVLLTKLALAKHSSDNVSVVVIDLRRRRKRHVA

SEQ ID NO: 41037 - protein, 410 aa, Arabidopsis thaliana
  peptide (1)..(410): Ceres Seq. ID no. 13488909
  misc_feature (87)..(394): Pfam Name: Protein phosphatase 2C Pfam Description: Protein phosphatase 2C
  misc_feature (364)..(407): Homolog of NCBI NO: 7768151 NR Description: protein phpsphatase 2C (PP2C) [Fagus sylvatica]
  misc_feature (1)..(351): Homolog of NCBI NO: 7768151 NR Description: protein phpsphatase 2C (PP2C) [Fagus sylvatica]
  misc_feature (367)..(403): Homolog of NCBI NO: 10432446 NR Description: protein phosphatase 2C [Nicotiana tabacum]
  misc_feature (1)..(329): Homolog of NCBI NO: 10432446 NR Description: protein phosphatase 2C [Nicotiana tabacum]
  misc_feature (1)..(403): Homolog of NCBI NO: 16226419 NR Description: AT5g59220/mnc17_110 [Arabidopsis thaliana]
  misc_feature (1)..(403): Homolog of NCBI NO: 15237839 NR Description: protein phosphatase 2C (PP2C), putative
  misc_feature (359)..(403): Homolog of NCBI NO: 15227078 NR Description: protein phosphatase 2C (PP2C), putative
  misc_feature (87)..(342): Homolog of NCBI NO: 15227078 NR Description: protein phosphatase 2C (PP2C), putative
  misc_feature (1)..(410): Homolog of NCBI NO: 21537020 NR Description: protein phosphatase 2C, putative [Arabidopsis
  misc_feature (1)..(410): Homolog of NCBI NO: 15222398 NR Description: protein phosphatase 2C (PP2C), putative
MSPSEMNPTASTTEEEDKSEGIYNKRNKQEEYDFMNCASSSPSQSSPEEESVSLEDSDVSISDGNSSVNDVAVIPSKKTVKETDLRPRYGVASVCGRRRDMEDAVALHPSFVRKQTEFSRTRWHYFGVYDGHGCSHVAARCKERLHELVQEEALSDKKEEWKKMMERSFTRMDKEVVRWGETVMSANCRCELQTPDCDAVGSTAVVSVITPEKIIVANCGDSRAVLCRNGKAVPLSTDHKPDRPDELDRIQEAGGRVIYWDGARVLGVLAMSRAIGDNYLKPYVTSEPEVTVTDRTEEDEFLILATDGLWDVVTNEAACTMVRMCLNRKSGRGRRRGETQTPGRRSEEEGKEEEEKVVGSRKNGKRGEITDKACTEASVLLTKLALAKHSSDNVSVVVIDLRRRRKRHVA

SEQ ID NO: 41038 - protein, 405 aa, Arabidopsis thaliana
  peptide (1)..(405): Ceres Seq. ID no. 13488910
  misc_feature (82)..(389): Pfam Name: Protein phosphatase 2C Pfam Description: Protein phosphatase 2C
  misc_feature (359)..(402): Homolog of NCBI NO: 7768151 NR Description: protein phpsphatase 2C (PP2C) [Fagus sylvatica]
  misc_feature (1)..(346): Homolog of NCBI NO: 7768151 NR Description: protein phpsphatase 2C (PP2C) [Fagus sylvatica]
  misc_feature (362)..(398): Homolog of NCBI NO: 10432446 NR Description: protein phosphatase 2C [Nicotiana tabacum]
  misc_feature (1)..(324): Homolog of NCBI NO: 10432446 NR Description: protein phosphatase 2C [Nicotiana tabacum]
  misc_feature (1)..(398): Homolog of NCBI NO: 16226419 NR Description: AT5g59220/mnc17_110 [Arabidopsis thaliana]
  misc_feature (1)..(398): Homolog of NCBI NO: 15237839 NR Description: protein phosphatase 2C (PP2C), putative
  misc_feature (354)..(398): Homolog of NCBI NO: 15227078 NR Description: protein phosphatase 2C (PP2C), putative
  misc_feature (82)..(337): Homolog of NCBI NO: 15227078 NR Description: protein phosphatase 2C (PP2C), putative
  misc_feature (1)..(405): Homolog of NCBI NO: 21537020 NR Description: protein phosphatase 2C, putative [Arabidopsis
  misc_feature (1)..(405): Homolog of NCBI NO: 15222398 NR Description: protein phosphatase 2C (PP2C), putative
MNPTASTTEEEDKSEGIYNKRNKQEEYDFMNCASSSPSQSSPEEESVSLEDSDVSISDGNSSVNDVAVIPSKKTVKETDLRPRYGVASVCGRRRDMEDAVALHPSFVRKQTEFSRTRWHYFGVYDGHGCSHVAARCKERLHELVQEEALSDKKEEWKKMMERSFTRMDKEVVRWGETVMSANCRCELQTPDCDAVGSTAVVSVITPEKIIVANCGDSRAVLCRNGKAVPLSTDHKPDRPDELDRIQEAGGRVIYWDGARVLGVLAMSRAIGDNYLKPYVTSEPEVTVTDRTEEDEFLILATDGLWDVVTNEAACTMVRMCLNRKSGRGRRRGETQTPGRRSEEEGKEEEEKVVGSRKNGKRGEITDKACTEASVLLTKLALAKHSSDNVSVVVIDLRRRRKRHVA

SEQ ID NO: 41039 - DNA, 2160 bp, Arabidopsis thaliana
  misc_feature (1)..(2160): Ceres Seq. ID no. 13487429
  misc_feature: MA Experiment ID: 108561 Result: Up-regulated in Transcription
  misc_feature: MA Experiment 108561 PARAMETER Experiment Name: At_100uM_ABA_cDNA_P Parameter: Timepoint (hr) Value: 6
  misc_feature: MA Experiment 108561 PARAMETER Experiment Name: At_100uM_ABA_cDNA_P Parameter: Tissue Value: Aerial
  misc_feature: MA Experiment 108561 PARAMETER Experiment Name: At_100uM_ABA_cDNA_P Parameter: Treatment Value: 100uM ABA vs. No Treatment
  misc_feature: MA Experiment ID: 108572 Result: Up-regulated in Transcription
  misc_feature: MA Experiment 108572 PARAMETER Experiment Name: At_Drought_cDNA_P Parameter: Timepoint (hr) Value: 1
  misc_feature: MA Experiment 108572 PARAMETER Experiment Name: At_Drought_cDNA_P Parameter: Tissue Value: Aerial
  misc_feature: MA Experiment 108572 PARAMETER Experiment Name: At_Drought_cDNA_P Parameter: Treatment Value: Drought vs. No Drought
  misc_feature: MA Experiment ID: 108573 Result: Up-regulated in Transcription
  misc_feature: MA Experiment 108573 PARAMETER Experiment Name: At_Drought_cDNA_P Parameter: Timepoint (hr) Value: 6
  misc_feature: MA Experiment 108573 PARAMETER Experiment Name: At_Drought_cDNA_P Parameter: Tissue Value: Aerial
  misc_feature: MA Experiment 108573 PARAMETER Experiment Name: At_Drought_cDNA_P Parameter: Treatment Value: Drought vs. No Drought
  misc_feature: MA Experiment ID: 108585 Result: Up-regulated in Transcription
  misc_feature: MA Experiment 108585 PARAMETER Experiment Name: At_5mM_NaNP_cDNA_P Parameter: Timepoint (hr) Value: 6
  misc_feature: MA Experiment 108585 PARAMETER Experiment Name: At_5mM_NaNP_cDNA_P Parameter: Tissue Value: Aerial
  misc_feature: MA Experiment 108585 PARAMETER Experiment Name: At_5mM_NaNP_cDNA_P Parameter: Treatment Value: null
  misc_feature: MA Experiment ID: 108595 Result: Up-regulated in Transcription
  misc_feature: MA Experiment 108595 PARAMETER Experiment Name: At_Ler-pi_Ovule_cDNA_P Parameter: Plant Line Value: null
  misc_feature: MA Experiment ID: 108668 Result: Up-regulated in Transcription
  misc_feature: MA Experiment 108668 PARAMETER Experiment Name: At_2mM_SA_cDNA_P Parameter: Plant Line Value: WS
  misc_feature: MA Experiment 108668 PARAMETER Experiment Name: At_2mM_SA_cDNA_P Parameter: Timepoint (hr) Value: 6
  misc_feature: MA Experiment 108668 PARAMETER Experiment Name: At_2mM_SA_cDNA_P Parameter: Treatment Value: 2mM SA vs. No Treatment
agatctgaatcaacctcttaagaagaagagaaaggaatgatgattagtgaaagagatgattttagtctcactggaccattacacttaacatctatagattgggctaatgaacatcatcgacgatccgtagctggatctttggttcaaggaatctatgtagctgagcgtgaccgtcagctacaaagagaaggtcctgagttagctttatctccaatatggtctgagtttttccatttccgcctcattcgtaagtttgtcgatgacgcggataactctatcttcggaggaatctatgagtacaaactgccgcaacagctctctcaaaccgtcaaatcaatggaatttagtccacgttttgtgattgctttcagaggaacggttacaaaagtggactccatttcccgtgacatcgagcatgacatccatgttattagaaacgggcttcacacgacaacacggtttgagatagctatccaagcagtgagaaacattgttgcttcggttggtggttctagtgtttggcttgctggtcattctcttggtgcatctatggcattacttaccgggaaaaccatcgctagaaccgggttttttcctgagtgtttcgcattcaatccgccgtttttgtctgcccctatcgaaaaaattaaggataagaggattaaacatgggatacgcattgcaggcagtgtgatcacagctggacttgctctagccaaaaaagccacccaacactacagccaaaacgaccgtgcattacccgcacctcctgatccatttgaagctttatccgactggttcccgcggctgtatgtcaaccctggtgaccacttatgctcagagtatgttggttactttgagcaccgaaacaagatggaagaaatcgggattgggtttgtagagcgggtagcgacgcagcactcgttgggcggtatgctgttaggaggacaagagccggtacatctgattccatcttcggttttgacggtgaacttaagctcctcgagagatttcaaacaagctcatgggattcatcagtggtggagggaagataacaagtttgagactaaaccttcgattccgccgtttttacctccatcgccgtcgcgcagagcacaatctccgacggtgaagccgtctttgccatttgtaccggcgttgttcgttttcggagattcctcagtcgatagcggaaccaataactttcttggaaccttagcgagagcagatcggcttccctacggtcgcgatttcgatacgcatcaaccaacgggaaggttttgcaatggaagaatcccagttgattatctagctgatcgtttaggcttaccattcgttcctagctatcttggacaaactgggactgttgaagacatgtttcaaggagtaaactatgcatcagctggtgctggaatcatcttatcaagtggatctgaattgggccagcgggtttcatttgcgatgcaagttgagcagtttgttgatacgtttcagcagatgatactgagtattggggagaaagcttcggaacgtttagtgtcaaactcggttttctacatatcgattggagtgaatgattacatacatttctacatcagaaacatctccaatgtgcagaatctctatactccatggaattttaatcagttcttggcttctaatatgagacaggagctcaagaccttgtacaatgtcaaggtgaggaggatggtggtgatgggactgccacctattggctgtgcaccatactacatgtggaaatacagaagccagaacggagaatgtgcagaagaagtgaacagcatgatcatggaatccaactttgtcatgagatacactgtagataaactcaaccgtgagcttccaggggcatccattatctactgtgacgtgttccaaagcgctatggacattctcaggaaccaccaacactacggttttaatgagacgacagatgcgtgttgtgggctagggaggtacaaaggatggcttccatgcatctcgccggagatggcttgctctgacgcctccggtcacctctggtgggaccagtttcatcctacagacgccgttaacgccattctagccgacaatgtatggaatggtcgccacgtggacatgtgttaccctactaacctagaaactatgcttcattcttaa

SEQ ID NO: 41040 - protein, 707 aa, Arabidopsis thaliana
  peptide (1)..(707): Ceres Seq. ID no. 13487430
  misc_feature (375)..(687): Pfam Name: GDSL-like Lipase/Acylhydrolase Pfam Description: GDSL-like Lipase/Acylhydrolase
  misc_feature (370)..(704): Homolog of NCBI NO: 7485419 NR Description: hypothetical protein F13C5.140 - Arabidopsis
  misc_feature (1)..(237): Homolog of NCBI NO: 10177082 NR Description: gene_id:MOP9.4~pir||T04290~similar to unknown
  misc_feature (373)..(704): Homolog of NCBI NO: 15241626 NR Description: GDSL-motif lipase/hydrolase protein [Arabidopsis
  misc_feature (5)..(340): Homolog of NCBI NO: 15237909 NR Description: lipase (class 3) family [Arabidopsis thaliana]
  misc_feature (4)..(340): Homolog of NCBI NO: 15237918 NR Description: lipase (class 3) family [Arabidopsis thaliana]
  misc_feature (34)..(343): Homolog of NCBI NO: 34910674 NR Description: P0690B02.1 [Oryza sativa (japonica
  misc_feature (1)..(336): Homolog of NCBI NO: 30689345 NR Description: expressed protein [Arabidopsis thaliana]
  misc_feature (2)..(339): Homolog of NCBI NO: 18396010 NR Description: lipase (class 3) family [Arabidopsis thaliana]
  misc_feature (1)..(345): Homolog of NCBI NO: 18413406 NR Description: lipase (class 3) family [Arabidopsis thaliana]
  misc_feature (345)..(707): Homolog of NCBI NO: 18413404 NR Description: GDSL-motif lipase/hydrolase protein [Arabidopsis
MMISERDDFSLTGPLHLTSIDWANEHHRRSVAGSLVQGIYVAERDRQLQREGPELALSPIWSEFFHFRLIRKFVDDADNSIFGGIYEYKLPQQLSQTVKSMEFSPRFVIAFRGTVTKVDSISRDIEHDIHVIRNGLHTTTRFEIAIQAVRNIVASVGGSSVWLAGHSLGASMALLTGKTIARTGFFPECFAFNPPFLSAPIEKIKDKRIKHGIRIAGSVITAGLALAKKATQHYSQNDRALPAPPDPFEALSDWFPRLYVNPGDHLCSEYVGYFEHRNKMEEIGIGFVERVATQHSLGGMLLGGQEPVHLIPSSVLTVNLSSSRDFKQAHGIHQWWREDNKFETKPSIPPFLPPSPSRRAQSPTVKPSLPFVPALFVFGDSSVDSGTNNFLGTLARADRLPYGRDFDTHQPTGRFCNGRIPVDYLADRLGLPFVPSYLGQTGTVEDMFQGVNYASAGAGIILSSGSELGQRVSFAMQVEQFVDTFQQMILSIGEKASERLVSNSVFYISIGVNDYIHFYIRNISNVQNLYTPWNFNQFLASNMRQELKTLYNVKVRRMVVMGLPPIGCAPYYMWKYRSQNGECAEEVNSMIMESNFVMRYTVDKLNRELPGASIIYCDVFQSAMDILRNHQHYGFNETTDACCGLGRYKGWLPCISPEMACSDASGHLWWDQFHPTDAVNAILADNVWNGRHVDMCYPTNLETMLHS

SEQ ID NO: 41041 - protein, 706 aa, Arabidopsis thaliana
  peptide (1)..(706): Ceres Seq. ID no. 13487431
  misc_feature (374)..(686): Pfam Name: GDSL-like Lipase/Acylhydrolase Pfam Description: GDSL-like Lipase/Acylhydrolase
  misc_feature (369)..(703): Homolog of NCBI NO: 7485419 NR Description: hypothetical protein F13C5.140 - Arabidopsis
  misc_feature (1)..(236): Homolog of NCBI NO: 10177082 NR Description: gene_id:MOP9.4~pir||T04290~similar to unknown
  misc_feature (372)..(703): Homolog of NCBI NO: 15241626 NR Description: GDSL-motif lipase/hydrolase protein [Arabidopsis
  misc_feature (4)..(339): Homolog of NCBI NO: 15237909 NR Description: lipase (class 3) family [Arabidopsis thaliana]
  misc_feature (3)..(339): Homolog of NCBI NO: 15237918 NR Description: lipase (class 3) family [Arabidopsis thaliana]
  misc_feature (33)..(342): Homolog of NCBI NO: 34910674 NR Description: P0690B02.1 [Oryza sativa (japonica
  misc_feature (1)..(335): Homolog of NCBI NO: 30689345 NR Description: expressed protein [Arabidopsis thaliana]
  misc_feature (1)..(338): Homolog of NCBI NO: 18396010 NR Description: lipase (class 3) family [Arabidopsis thaliana]
  misc_feature (1)..(344): Homolog of NCBI NO: 18413406 NR Description: lipase (class 3) family [Arabidopsis thaliana]
  misc_feature (344)..(706): Homolog of NCBI NO: 18413404 NR Description: GDSL-motif lipase/hydrolase protein [Arabidopsis
MISERDDFSLTGPLHLTSIDWANEHHRRSVAGSLVQGIYVAERDRQLQREGPELALSPIWSEFFHFRLIRKFVDDADNSIFGGIYEYKLPQQLSQTVKSMEFSPRFVIAFRGTVTKVDSISRDIEHDIHVIRNGLHTTTRFEIAIQAVRNIVASVGGSSVWLAGHSLGASMALLTGKTIARTGFFPECFAFNPPFLSAPIEKIKDKRIKHGIRIAGSVITAGLALAKKATQHYSQNDRALPAPPDPFEALSDWFPRLYVNPGDHLCSEYVGYFEHRNKMEEIGIGFVERVATQHSLGGMLLGGQEPVHLIPSSVLTVNLSSSRDFKQAHGIHQWWREDNKFETKPSIPPFLPPSPSRRAQSPTVKPSLPFVPALFVFGDSSVDSGTNNFLGTLARADRLPYGRDFDTHQPTGRFCNGRIPVDYLADRLGLPFVPSYLGQTGTVEDMFQGVNYASAGAGIILSSGSELGQRVSFAMQVEQFVDTFQQMILSIGEKASERLVSNSVFYISIGVNDYIHFYIRNISNVQNLYTPWNFNQFLASNMRQELKTLYNVKVRRMVVMGLPPIGCAPYYMWKYRSQNGECAEEVNSMIMESNFVMRYTVDKLNRELPGASIIYCDVFQSAMDILRNHQHYGFNETTDACCGLGRYKGWLPCISPEMACSDASGHLWWDQFHPTDAVNAILADNVWNGRHVDMCYPTNLETMLHS

SEQ ID NO: 41042 - protein, 607 aa, Arabidopsis thaliana
  peptide (1)..(607): Ceres Seq. ID no. 13487432
  misc_feature (275)..(587): Pfam Name: GDSL-like Lipase/Acylhydrolase Pfam Description: GDSL-like Lipase/Acylhydrolase
  misc_feature (270)..(604): Homolog of NCBI NO: 7485419 NR Description: hypothetical protein F13C5.140 - Arabidopsis
  misc_feature (1)..(137): Homolog of NCBI NO: 10177082 NR Description: gene_id:MOP9.4~pir||T04290~similar to unknown
  misc_feature (273)..(604): Homolog of NCBI NO: 15241626 NR Description: GDSL-motif lipase/hydrolase protein [Arabidopsis
  misc_feature (1)..(240): Homolog of NCBI NO: 15237909 NR Description: lipase (class 3) family [Arabidopsis thaliana]
  misc_feature (1)..(240): Homolog of NCBI NO: 15237918 NR Description: lipase (class 3) family [Arabidopsis thaliana]
  misc_feature (1)..(243): Homolog of NCBI NO: 34910674 NR Description: P0690B02.1 [Oryza sativa (japonica
  misc_feature (1)..(236): Homolog of NCBI NO: 30689345 NR Description: expressed protein [Arabidopsis thaliana]
  misc_feature (1)..(239): Homolog of NCBI NO: 18396010 NR Description: lipase (class 3) family [Arabidopsis thaliana]
  misc_feature (1)..(245): Homolog of NCBI NO: 18413406 NR Description: lipase (class 3) family [Arabidopsis thaliana]
  misc_feature (245)..(607): Homolog of NCBI NO: 18413404 NR Description: GDSL-motif lipase/hydrolase protein [Arabidopsis
MEFSPRFVIAFRGTVTKVDSISRDIEHDIHVIRNGLHTTTRFEIAIQAVRNIVASVGGSSVWLAGHSLGASMALLTGKTIARTGFFPECFAFNPPFLSAPIEKIKDKRIKHGIRIAGSVITAGLALAKKATQHYSQNDRALPAPPDPFEALSDWFPRLYVNPGDHLCSEYVGYFEHRNKMEEIGIGFVERVATQHSLGGMLLGGQEPVHLIPSSVLTVNLSSSRDFKQAHGIHQWWREDNKFETKPSIPPFLPPSPSRRAQSPTVKPSLPFVPALFVFGDSSVDSGTNNFLGTLARADRLPYGRDFDTHQPTGRFCNGRIPVDYLADRLGLPFVPSYLGQTGTVEDMFQGVNYASAGAGIILSSGSELGQRVSFAMQVEQFVDTFQQMILSIGEKASERLVSNSVFYISIGVNDYIHFYIRNISNVQNLYTPWNFNQFLASNMRQELKTLYNVKVRRMVVMGLPPIGCAPYYMWKYRSQNGECAEEVNSMIMESNFVMRYTVDKLNRELPGASIIYCDVFQSAMDILRNHQHYGFNETTDACCGLGRYKGWLPCISPEMACSDASGHLWWDQFHPTDAVNAILADNVWNGRHVDMCYPTNLETMLHS

SEQ ID NO: 41043 - DNA, 1253 bp, Arabidopsis thaliana
  misc_feature (1)..(1253): Ceres Seq. ID no. 12422100
  misc_feature: MA Experiment ID: 108462 Result: Up-regulated in Transcription
  misc_feature: MA Experiment 108462 PARAMETER Experiment Name: At_Germinating_Seeds_cDNA_P Parameter: Age (day) Value: 2 vs. 0
  misc_feature: MA Experiment 108462 PARAMETER Experiment Name: At_Germinating_Seeds_cDNA_P Parameter: Tissue Value: Germinating Seeds
  misc_feature: MA Experiment ID: 108463 Result: Up-regulated in Transcription
  misc_feature: MA Experiment 108463 PARAMETER Experiment Name: At_Germinating_Seeds_cDNA_P Parameter: Age (day) Value: 3 vs. 0
  misc_feature: MA Experiment 108463 PARAMETER Experiment Name: At_Germinating_Seeds_cDNA_P Parameter: Tissue Value: Germinating Seeds
  misc_feature: MA Experiment ID: 108464 Result: Up-regulated in Transcription
  misc_feature: MA Experiment 108464 PARAMETER Experiment Name: At_Germinating_Seeds_cDNA_P Parameter: Age (day) Value: 4 vs. 0
  misc_feature: MA Experiment 108464 PARAMETER Experiment Name: At_Germinating_Seeds_cDNA_P Parameter: Tissue Value: Germinating Seeds
  misc_feature: MA Experiment ID: 108488 Result: Down-regulated in Transcription
  misc_feature: MA Experiment ID: 108579 Result: Up-regulated in Transcription
  misc_feature: MA Experiment 108579 PARAMETER Experiment Name: At_4deg_Cold_cDNA_P Parameter: Temperature (deg C) Value: 4 vs. 22
  misc_feature: MA Experiment 108579 PARAMETER Experiment Name: At_4deg_Cold_cDNA_P Parameter: Timepoint (hr) Value: 6
  misc_feature: MA Experiment 108579 PARAMETER Experiment Name: At_4deg_Cold_cDNA_P Parameter: Tissue Value: Aerial
  misc_feature: MA Experiment ID: 108595 Result: Up-regulated in Transcription
  misc_feature: MA Experiment 108595 PARAMETER Experiment Name: At_Ler-pi_Ovule_cDNA_P Parameter: Plant Line Value: null
  misc_feature: MA Experiment ID: 20000264 Result: Up-regulated in Transcription
  misc_feature: MA Experiment 20000264 PARAMETER Experiment Name: At_Open_Flower_P Parameter: Age (day) Value: 21
  misc_feature: MA Experiment 20000264 PARAMETER Experiment Name: At_Open_Flower_P Parameter: Plant Line Value: WS
  misc_feature: MA Experiment 20000264 PARAMETER Experiment Name: At_Open_Flower_P Parameter: Tissue Value: Open Flower vs. Whole Plant
  misc_feature: MA Experiment ID: 20000286 Result: Up-regulated in Transcription
  misc_feature: MA Experiment 20000286 PARAMETER Experiment Name: At_Open_Flower_P Parameter: Age (day) Value: 21
  misc_feature: MA Experiment 20000286 PARAMETER Experiment Name: At_Open_Flower_P Parameter: Plant Line Value: WS
  misc_feature: MA Experiment 20000286 PARAMETER Experiment Name: At_Open_Flower_P Parameter: Tissue Value: Half Open vs. Whole Plant
  misc_feature: MA Experiment ID: 20000794 Result: Up-regulated in Transcription
  misc_feature: MA Experiment 20000794 PARAMETER Experiment Name: At_Petals_P Parameter: Age (day) Value: 23-25 days
  misc_feature: MA Experiment 20000794 PARAMETER Experiment Name: At_Petals_P Parameter: Plant Line Value: WS
  misc_feature: MA Experiment 20000794 PARAMETER Experiment Name: At_Petals_P Parameter: Tissue Value: Petals vs. Whole plant
  misc_feature: MA Experiment ID: 20001757 Result: Down-regulated in Transcription
  misc_feature: MA Experiment 20001757 PARAMETER Experiment Name: At_50mM_NH4NO3_L-to-H_P Parameter: Timepoint (hr) Value: 6
  misc_feature: MA Experiment 20001757 PARAMETER Experiment Name: At_50mM_NH4NO3_L-to-H_P Parameter: Tissue Value: Leaf
  misc_feature: MA Experiment 20001757 PARAMETER Experiment Name: At_50mM_NH4NO3_L-to-H_P Parameter: Treatment Value: 50mM NH4NO3 vs 100mM Mannitol
caaagagcaaagagctaaagtccaaaaccaaacacaaaaacaaaaatctaaatttctttcttggtctgctttcaatatggctcctctacctatttcttcgattagagttgggaaaatagatgatgttcaagaactcataaaatccaaaccaaacaaagttccagagagattcattagagaagagtatgagagaggagtcgttgtgtcgtctcttaagactcatcatcttcatcatcagattcctgttattgatctctctaagctctctaaacccgacaatgatgattttttctttgagattcttaagctctcacaagcttgtgaagactggggatttttccaggttataaatcatgggatagaagtggaggttgtggaagatatagaggaagtggcttcagagttctttgatatgccattggaggagaagaagaagtatccaatggagccaggtaccgtacaaggttatggtcaagctttcatattctccgaagatcagaaacttgattggtgcaacatgtttgcccttggtgttcatcctccacaaattcgcaaccccaaactatggccctctaaaccggcccggttcagtgaaagtcttgaaggttactcaaaagagataagggaactatgcaaaaggttgttgaagtatatagcaataagcttgggtctaaaagaagagagatttgaggaaatgtttggggaggcagtgcaagcagtgaggatgaattattaccctccatgttcaagtcctgatcttgtcttaggacttagtccacattctgatggaagtgctctcactgttcttcaacagagcaagaacagttgtgttggccttcagatcctcaaagacaacacttgggtccctgttaaacctcttcccaatgcccttgtcatcaacattggtgataccattgaggtgctaagtaatgggaaatacaagagtgtagagcatagggcagtaacaaacagggaaaaggagaggcttacaatagtgacattctatgcaccaaactatgaggttgaaatagaaccaatgagtgagttggttgatgatgagaccaacccatgcaagtatagaagctacaatcatggtgactatagttatcactatgtctccaacaagctccaaggcaagaagtcccttgattttgccaagattctcaattaaactattattaatttcaccccatcaaatctccattaactagttaccacttaatttgctttctttaataagaaaaattatttgt

SEQ ID NO: 41044 - protein, 389 aa, Arabidopsis thaliana
  peptide (1)..(389): Ceres Seq. ID no. 12422101
  misc_feature (236)..(337): Pfam Name: 2OG-Fe(II) oxygenase superfamily Pfam Description: 2OG-Fe(II) oxygenase superfamily
  misc_feature (42)..(387): Homolog of NCBI NO: 15218400 NR Description: flavanone 3-hydroxylase, putative
  misc_feature (30)..(387): Homolog of NCBI NO: 15219986 NR Description: SRG1-like protein; protein id: At1g17010.1
  misc_feature (42)..(387): Homolog of NCBI NO: 37536820 NR Description: putative ethylene-forming enzyme
  misc_feature (39)..(387): Homolog of NCBI NO: 37536804 NR Description: putative ethylene-forming enzyme
  misc_feature (39)..(387): Homolog of NCBI NO: 15235014 NR Description: SRG1-like protein; protein id: At4g25300.1
  misc_feature (39)..(387): Homolog of NCBI NO: 15235017 NR Description: SRG1-like protein; protein id: At4g25310.1
  misc_feature (39)..(387): Homolog of NCBI NO: 15219988 NR Description: SRG1-like protein
  misc_feature (99)..(387): Homolog of NCBI NO: 7433229 NR Description: ethylene-forming enzyme - white spruce
  misc_feature (34)..(387): Homolog of NCBI NO: 34907194 NR Description: putative ethylene-forming enzyme
  misc_feature (26)..(389): Homolog of NCBI NO: 18402992 NR Description: expressed protein
KEQRAKVQNQTQKQKSKFLSWSAFNMAPLPISSIRVGKIDDVQELIKSKPNKVPERFIREEYERGVVVSSLKTHHLHHQIPVIDLSKLSKPDNDDFFFEILKLSQACEDWGFFQVINHGIEVEVVEDIEEVASEFFDMPLEEKKKYPMEPGTVQGYGQAFIFSEDQKLDWCNMFALGVHPPQIRNPKLWPSKPARFSESLEGYSKEIRELCKRLLKYIAISLGLKEERFEEMFGEAVQAVRMNYYPPCSSPDLVLGLSPHSDGSALTVLQQSKNSCVGLQILKDNTWVPVKPLPNALVINIGDTIEVLSNGKYKSVEHRAVTNREKERLTIVTFYAPNYEVEIEPMSELVDDETNPCKYRSYNHGDYSYHYVSNKLQGKKSLDFAKILN

SEQ ID NO: 41045 - protein, 364 aa, Arabidopsis thaliana
  peptide (1)..(364): Ceres Seq. ID no. 12422102
  misc_feature (211)..(312): Pfam Name: 2OG-Fe(II) oxygenase superfamily Pfam Description: 2OG-Fe(II) oxygenase superfamily
  misc_feature (17)..(362): Homolog of NCBI NO: 15218400 NR Description: flavanone 3-hydroxylase, putative
  misc_feature (5)..(362): Homolog of NCBI NO: 15219986 NR Description: SRG1-like protein; protein id: At1g17010.1
  misc_feature (17)..(362): Homolog of NCBI NO: 37536820 NR Description: putative ethylene-forming enzyme
  misc_feature (14)..(362): Homolog of NCBI NO: 37536804 NR Description: putative ethylene-forming enzyme
  misc_feature (14)..(362): Homolog of NCBI NO: 15235014 NR Description: SRG1-like protein; protein id: At4g25300.1
  misc_feature (14)..(362): Homolog of NCBI NO: 15235017 NR Description: SRG1-like protein; protein id: At4g25310.1
  misc_feature (14)..(362): Homolog of NCBI NO: 15219988 NR Description: SRG1-like protein
  misc_feature (74)..(362): Homolog of NCBI NO: 7433229 NR Description: ethylene-forming enzyme - white spruce
  misc_feature (9)..(362): Homolog of NCBI NO: 34907194 NR Description: putative ethylene-forming enzyme
  misc_feature (1)..(364): Homolog of NCBI NO: 18402992 NR Description: expressed protein
MAPLPISSIRVGKIDDVQELIKSKPNKVPERFIREEYERGVVVSSLKTHHLHHQIPVIDLSKLSKPDNDDFFFEILKLSQACEDWGFFQVINHGIEVEVVEDIEEVASEFFDMPLEEKKKYPMEPGTVQGYGQAFIFSEDQKLDWCNMFALGVHPPQIRNPKLWPSKPARFSESLEGYSKEIRELCKRLLKYIAISLGLKEERFEEMFGEAVQAVRMNYYPPCSSPDLVLGLSPHSDGSALTVLQQSKNSCVGLQILKDNTWVPVKPLPNALVINIGDTIEVLSNGKYKSVEHRAVTNREKERLTIVTFYAPNYEVEIEPMSELVDDETNPCKYRSYNHGDYSYHYVSNKLQGKKSLDFAKILN

SEQ ID NO: 41046 - protein, 252 aa, Arabidopsis thaliana
  peptide (1)..(252): Ceres Seq. ID no. 12422103
  misc_feature (99)..(200): Pfam Name: 2OG-Fe(II) oxygenase superfamily Pfam Description: 2OG-Fe(II) oxygenase superfamily
  misc_feature (1)..(250): Homolog of NCBI NO: 15218400 NR Description: flavanone 3-hydroxylase, putative
  misc_feature (1)..(250): Homolog of NCBI NO: 15219986 NR Description: SRG1-like protein; protein id: At1g17010.1
  misc_feature (1)..(250): Homolog of NCBI NO: 37536820 NR Description: putative ethylene-forming enzyme
  misc_feature (1)..(250): Homolog of NCBI NO: 37536804 NR Description: putative ethylene-forming enzyme
  misc_feature (1)..(250): Homolog of NCBI NO: 15235014 NR Description: SRG1-like protein; protein id: At4g25300.1
  misc_feature (1)..(250): Homolog of NCBI NO: 15235017 NR Description: SRG1-like protein; protein id: At4g25310.1
  misc_feature (1)..(250): Homolog of NCBI NO: 15219988 NR Description: SRG1-like protein
  misc_feature (1)..(250): Homolog of NCBI NO: 7433229 NR Description: ethylene-forming enzyme - white spruce
  misc_feature (1)..(250): Homolog of NCBI NO: 34907194 NR Description: putative ethylene-forming enzyme
  misc_feature (1)..(252): Homolog of NCBI NO: 18402992 NR Description: expressed protein
MPLEEKKKYPMEPGTVQGYGQAFIFSEDQKLDWCNMFALGVHPPQIRNPKLWPSKPARFSESLEGYSKEIRELCKRLLKYIAISLGLKEERFEEMFGEAVQAVRMNYYPPCSSPDLVLGLSPHSDGSALTVLQQSKNSCVGLQILKDNTWVPVKPLPNALVINIGDTIEVLSNGKYKSVEHRAVTNREKERLTIVTFYAPNYEVEIEPMSELVDDETNPCKYRSYNHGDYSYHYVSNKLQGKKSLDFAKILN

SEQ ID NO: 41047 - DNA, 738 bp, Arabidopsis thaliana
  misc_feature (1)..(738): Ceres Seq. ID no. 13575763
  misc_feature: MA Experiment ID: 108464 Result: Down-regulated in Transcription
  misc_feature: MA Experiment 108464 PARAMETER Experiment Name: At_Germinating_Seeds_cDNA_P Parameter: Age (day) Value: 4 vs. 0
  misc_feature: MA Experiment 108464 PARAMETER Experiment Name: At_Germinating_Seeds_cDNA_P Parameter: Tissue Value: Germinating Seeds
  misc_feature: MA Experiment ID: 108488 Result: Down-regulated in Transcription
  misc_feature: MA Experiment ID: 108576 Result: Up-regulated in Transcription
  misc_feature: MA Experiment 108576 PARAMETER Experiment Name: At_42deg_Heat_cDNA_P Parameter: Temperature (deg C) Value: 42 vs. 22
  misc_feature: MA Experiment 108576 PARAMETER Experiment Name: At_42deg_Heat_cDNA_P Parameter: Timepoint (hr) Value: 1
  misc_feature: MA Experiment 108576 PARAMETER Experiment Name: At_42deg_Heat_cDNA_P Parameter: Tissue Value: Aerial
  misc_feature: MA Experiment ID: 108577 Result: Up-regulated in Transcription
  misc_feature: MA Experiment 108577 PARAMETER Experiment Name: At_42deg_Heat_cDNA_P Parameter: Temperature (deg C) Value: 42 vs. 22
  misc_feature: MA Experiment 108577 PARAMETER Experiment Name: At_42deg_Heat_cDNA_P Parameter: Timepoint (hr) Value: 6
  misc_feature: MA Experiment 108577 PARAMETER Experiment Name: At_42deg_Heat_cDNA_P Parameter: Tissue Value: Aerial
  misc_feature: MA Experiment ID: 108585 Result: Up-regulated in Transcription
  misc_feature: MA Experiment 108585 PARAMETER Experiment Name: At_5mM_NaNP_cDNA_P Parameter: Timepoint (hr) Value: 6
  misc_feature: MA Experiment 108585 PARAMETER Experiment Name: At_5mM_NaNP_cDNA_P Parameter: Tissue Value: Aerial
  misc_feature: MA Experiment 108585 PARAMETER Experiment Name: At_5mM_NaNP_cDNA_P Parameter: Treatment Value: null
  misc_feature: MA Experiment ID: 20000112 Result: Up-regulated in Transcription
  misc_feature: MA Experiment 20000112 PARAMETER Experiment Name: At_42deg_Heat_cDNA_P Parameter: Temperature (deg C) Value: 42 vs. 22
  misc_feature: MA Experiment 20000112 PARAMETER Experiment Name: At_42deg_Heat_cDNA_P Parameter: Timepoint (hr) Value: 2
  misc_feature: MA Experiment 20000112 PARAMETER Experiment Name: At_42deg_Heat_cDNA_P Parameter: Tissue Value: Aerial
  misc_feature: MA Experiment ID: 20000113 Result: Up-regulated in Transcription
  misc_feature: MA Experiment 20000113 PARAMETER Experiment Name: At_42deg_Heat_cDNA_P Parameter: Temperature (deg C) Value: 42 vs. 22
  misc_feature: MA Experiment 20000113 PARAMETER Experiment Name: At_42deg_Heat_cDNA_P Parameter: Timepoint (hr) Value: 8
  misc_feature: MA Experiment 20000113 PARAMETER Experiment Name: At_42deg_Heat_cDNA_P Parameter: Tissue Value: Aerial
  misc_feature: MA Experiment ID: 20000117 Result: Up-regulated in Transcription
  misc_feature: MA Experiment 20000117 PARAMETER Experiment Name: At_100uM_ABA_Mutants_cDNA_P Parameter: Plant Line Value: Columbia
  misc_feature: MA Experiment 20000117 PARAMETER Experiment Name: At_100uM_ABA_Mutants_cDNA_P Parameter: Timepoint (hr) Value: 6
  misc_feature: MA Experiment 20000117 PARAMETER Experiment Name: At_100uM_ABA_Mutants_cDNA_P Parameter: Tissue Value: Aerial
  misc_feature: MA Experiment 20000117 PARAMETER Experiment Name: At_100uM_ABA_Mutants_cDNA_P Parameter: Treatment Value: 100uM ABA vs. No Treatment
  misc_feature: MA Experiment ID: 20000144 Result: Up-regulated in Transcription
  misc_feature: MA Experiment 20000144 PARAMETER Experiment Name: At_42deg_Heat_cDNA_P Parameter: Temperature (deg C) Value: 42 vs. 22
  misc_feature: MA Experiment 20000144 PARAMETER Experiment Name: At_42deg_Heat_cDNA_P Parameter: Timepoint (hr) Value: 1
  misc_feature: MA Experiment 20000144 PARAMETER Experiment Name: At_42deg_Heat_cDNA_P Parameter: Tissue Value: Aerial
  misc_feature: MA Experiment ID: 20000171 Result: Up-regulated in Transcription
  misc_feature: MA Experiment 20000171 PARAMETER Experiment Name: At_42deg_Heat_P Parameter: Age (day) Value: 14
  misc_feature: MA Experiment 20000171 PARAMETER Experiment Name: At_42deg_Heat_P Parameter: Organism Value: A. thaliana
  misc_feature: MA Experiment 20000171 PARAMETER Experiment Name: At_42deg_Heat_P Parameter: Plant Line Value: WS
  misc_feature: MA Experiment 20000171 PARAMETER Experiment Name: At_42deg_Heat_P Parameter: Temperature (deg C) Value: 42 vs. 22
  misc_feature: MA Experiment 20000171 PARAMETER Experiment Name: At_42deg_Heat_P Parameter: Timepoint (hr) Value: 1
  misc_feature: MA Experiment 20000171 PARAMETER Experiment Name: At_42deg_Heat_P Parameter: Tissue Value: Aerial
  misc_feature: MA Experiment ID: 20000173 Result: Up-regulated in Transcription
  misc_feature: MA Experiment 20000173 PARAMETER Experiment Name: At_42deg_Heat_P Parameter: Age (day) Value: 14
  misc_feature: MA Experiment 20000173 PARAMETER Experiment Name: At_42deg_Heat_P Parameter: Organism Value: A. thaliana
  misc_feature: MA Experiment 20000173 PARAMETER Experiment Name: At_42deg_Heat_P Parameter: Plant Line Value: WS
  misc_feature: MA Experiment 20000173 PARAMETER Experiment Name: At_42deg_Heat_P Parameter: Temperature (deg C) Value: 42 vs. 22
  misc_feature: MA Experiment 20000173 PARAMETER Experiment Name: At_42deg_Heat_P Parameter: Timepoint (hr) Value: 6
  misc_feature: MA Experiment 20000173 PARAMETER Experiment Name: At_42deg_Heat_P Parameter: Tissue Value: Aerial
  misc_feature: MA Experiment ID: 20000180 Result: Down-regulated in Transcription
  misc_feature: MA Experiment 20000180 PARAMETER Experiment Name: At_Germinating_Seeds_P Parameter: Age (hr) Value: 24 vs. 0
  misc_feature: MA Experiment 20000180 PARAMETER Experiment Name: At_Germinating_Seeds_P Parameter: Tissue Value: Germinating Seeds
  misc_feature: MA Experiment ID: 20000184 Result: Down-regulated in Transcription
  misc_feature: MA Experiment 20000184 PARAMETER Experiment Name: At_Shoots__P Parameter: Age (day) Value: 7
  misc_feature: MA Experiment 20000184 PARAMETER Experiment Name: At_Shoots__P Parameter: Tissue Value: Shoots vs. Whole Plant
  misc_feature: MA Experiment ID: 20000436 Result: Up-regulated in Transcription
  misc_feature: MA Experiment 20000436 PARAMETER Experiment Name: At_Drought_P Parameter: Age (day) Value: 7
  misc_feature: MA Experiment 20000436 PARAMETER Experiment Name: At_Drought_P Parameter: Organism Value: A. thaliana
  misc_feature: MA Experiment 20000436 PARAMETER Experiment Name: At_Drought_P Parameter: Plant Line Value: WS
  misc_feature: MA Experiment 20000436 PARAMETER Experiment Name: At_Drought_P Parameter: Timepoint (hr) Value: 12
  misc_feature: MA Experiment 20000436 PARAMETER Experiment Name: At_Drought_P Parameter: Tissue Value: Whole Plant
  misc_feature: MA Experiment 20000436 PARAMETER Experiment Name: At_Drought_P Parameter: Treatment Value: Drought vs. No Drought
  misc_feature: MA Experiment ID: 20000437 Result: Up-regulated in Transcription
  misc_feature: MA Experiment 20000437 PARAMETER Experiment Name: At_Drought_P Parameter: Age (day) Value: 8
  misc_feature: MA Experiment 20000437 PARAMETER Experiment Name: At_Drought_P Parameter: Organism Value: A. thaliana
  misc_feature: MA Experiment 20000437 PARAMETER Experiment Name: At_Drought_P Parameter: Plant Line Value: WS
  misc_feature: MA Experiment 20000437 PARAMETER Experiment Name: At_Drought_P Parameter: Timepoint (hr) Value: 24
  misc_feature: MA Experiment 20000437 PARAMETER Experiment Name: At_Drought_P Parameter: Tissue Value: Whole Plant
  misc_feature: MA Experiment 20000437 PARAMETER Experiment Name: At_Drought_P Parameter: Treatment Value: Drought vs. No Drought
  misc_feature: MA Experiment ID: 20000495 Result: Down-regulated in Transcription
  misc_feature: MA Experiment 20000495 PARAMETER Experiment Name: At_Guard_Cells_P Parameter: Harvest Date Value: 8/2/2002
  misc_feature: MA Experiment 20000495 PARAMETER Experiment Name: At_Guard_Cells_P Parameter: Organism Value: A. thaliana
  misc_feature: MA Experiment 20000495 PARAMETER Experiment Name: At_Guard_Cells_P Parameter: Tissue Value: Guard Cells vs. Leaves
  misc_feature: MA Experiment ID: 20001904 Result: Up-regulated in Transcription
  misc_feature: MA Experiment 20001904 PARAMETER Experiment Name: At_Drought_Reproduction_P Parameter: Age (day) Value: 37
  misc_feature: MA Experiment 20001904 PARAMETER Experiment Name: At_Drought_Reproduction_P Parameter: Organism Value: A. thaliana
  misc_feature: MA Experiment 20001904 PARAMETER Experiment Name: At_Drought_Reproduction_P Parameter: Plant Line Value: WS
  misc_feature: MA Experiment 20001904 PARAMETER Experiment Name: At_Drought_Reproduction_P Parameter: Timepoint (day) Value: 7
  misc_feature: MA Experiment 20001904 PARAMETER Experiment Name: At_Drought_Reproduction_P Parameter: Tissue Value: Rosettes
  misc_feature: MA Experiment 20001904 PARAMETER Experiment Name: At_Drought_Reproduction_P Parameter: Treatment Value: Drought vs. No Drought
  misc_feature: MA Experiment ID: 20001911 Result: Up-regulated in Transcription
  misc_feature: MA Experiment 20001911 PARAMETER Experiment Name: At_Drought_Reproduction_P Parameter: Age (day) Value: 40
  misc_feature: MA Experiment 20001911 PARAMETER Experiment Name: At_Drought_Reproduction_P Parameter: Organism Value: A. thaliana
  misc_feature: MA Experiment 20001911 PARAMETER Experiment Name: At_Drought_Reproduction_P Parameter: Plant Line Value: WS
  misc_feature: MA Experiment 20001911 PARAMETER Experiment Name: At_Drought_Reproduction_P Parameter: Timepoint (day) Value: 10
  misc_feature: MA Experiment 20001911 PARAMETER Experiment Name: At_Drought_Reproduction_P Parameter: Tissue Value: Flowers
  misc_feature: MA Experiment 20001911 PARAMETER Experiment Name: At_Drought_Reproduction_P Parameter: Treatment Value: Drought vs. No Drought
gtttcgtgtttggtcatcggtgttccgtgtttctcccaaacttttattacacgaacacaacaaaacaacacaagtgagagaaccctagattcttcttctattcccttcttccttcaagtcctttttatttctctaccaacctcgaaaacgaatcaagagattagcatcttatcgagatttaaaccatcaattaatcggctgccatggctgggagactacttgcaaatttgattgtgatgggttctgggatcattggtcgtgctgtctttcaagcctatcgtcaagcacttgctaatgcgtctaaatctggtgttgcgcaggaagcaatgcaaaatggagtacgtcaagcagggaaagccatcactgagcaagaggctaggcagattcttggtgtaaccgagaagacctcttgggaagagatattacagaaatatgacaaactgtttgagaataatgcgaaagcagggagcttttaccttcaatctaaagttcatcgagccaaagaatgtctagaagttgtgtacagaagccaaggcaacggtacacctagttaagaccttactctttttgttttccagactcaaaattcttgctcttaatgtaaaatcaagacgagttcatggtttctttgagatgatgtggaacttacaaaacggccatagttttcttcacacattaaattagtaataactaagacaggtttgctctgatcagttgatcagtgtcaaagaacctctg

SEQ ID NO: 41048 - protein, 116 aa, Arabidopsis thaliana; identical to SEQ ID NO: 37830
  peptide (1)..(116): Ceres Seq. ID no. 13575764
  misc_feature (1)..(114): Pfam Name: Uncharacterised protein family (UPF0108) Pfam Description: Uncharacterised protein family (UPF0108)
  misc_feature (1)..(104): Homolog of NCBI NO: 6322357 NR Description: Hypothetical ORF; Yjl104wp [Saccharomyces
  misc_feature (4)..(104): Homolog of NCBI NO: 19112141 NR Description: conserved hypothetical protein; similar to S.
  misc_feature (12)..(108): Homolog of NCBI NO: 10176880 NR Description: gene_id:MAC9.20~unknown protein [Arabidopsis
  misc_feature (12)..(115): Homolog of NCBI NO: 37535410 NR Description: putative pol polyprotein [Oryza sativa (japonica
  misc_feature (1)..(108): Homolog of NCBI NO: 18424521 NR Description: auxin-regulated protein [Arabidopsis thaliana]
  misc_feature (2)..(108): Homolog of NCBI NO: 34905796 NR Description: P0401G10.24 [Oryza sativa (japonica
  misc_feature (2)..(116): Homolog of NCBI NO: 11357639 NR Description: hypothetical protein F25L23.140 - Arabidopsis
  misc_feature (1)..(116): Homolog of NCBI NO: 18411133 NR Description: expressed protein [Arabidopsis thaliana]

SEQ ID NO: 41049 - protein, 105 aa, Arabidopsis thaliana; identical to SEQ ID NO: 37831
  peptide (1)..(105): Ceres Seq. ID no. 13575765
  misc_feature (1)..(103): Pfam Name: Uncharacterised protein family (UPF0108) Pfam Description: Uncharacterised protein family (UPF0108)
  misc_feature (1)..(93): Homolog of NCBI NO: 6322357 NR Description: Hypothetical ORF; Yjl104wp [Saccharomyces
  misc_feature (1)..(93): Homolog of NCBI NO: 19112141 NR Description: conserved hypothetical protein; similar to S.
  misc_feature (1)..(97): Homolog of NCBI NO: 10176880 NR Description: gene_id:MAC9.20~unknown protein [Arabidopsis
  misc_feature (1)..(104): Homolog of NCBI NO: 37535410 NR Description: putative pol polyprotein [Oryza sativa (japonica
  misc_feature (1)..(97): Homolog of NCBI NO: 18424521 NR Description: auxin-regulated protein [Arabidopsis thaliana]
  misc_feature (1)..(97): Homolog of NCBI NO: 34905796 NR Description: P0401G10.24 [Oryza sativa (japonica
  misc_feature (1)..(105): Homolog of NCBI NO: 11357639 NR Description: hypothetical protein F25L23.140 - Arabidopsis
  misc_feature (1)..(105): Homolog of NCBI NO: 18411133 NR Description: expressed protein [Arabidopsis thaliana]

SEQ ID NO: 41050 - protein, 76 aa, Arabidopsis thaliana
  peptide (1)..(76): Ceres Seq. ID no. 13575766
VSCLVIGVPCFSQTFITRTQQNNTSERTLDSSSIPFFLQVLFISLPTSKTNQEISILSRFKPSINRLPWLGDYLQI

SEQ ID NO: 41051 - DNA, 707 bp, Arabidopsis thaliana
  misc_feature (1)..(707): Ceres Seq. ID no. 12466508
  misc_feature: MA Experiment ID: 108434 Result: Down-regulated in Transcription
  misc_feature: MA Experiment 108434 PARAMETER Experiment Name: At_Root_Tips_cDNA_P Parameter: Tissue Value: Root Tips
  misc_feature: MA Experiment ID: 108561 Result: Up-regulated in Transcription
  misc_feature: MA Experiment 108561 PARAMETER Experiment Name: At_100uM_ABA_cDNA_P Parameter: Timepoint (hr) Value: 6
  misc_feature: MA Experiment 108561 PARAMETER Experiment Name: At_100uM_ABA_cDNA_P Parameter: Tissue Value: Aerial
  misc_feature: MA Experiment 108561 PARAMETER Experiment Name: At_100uM_ABA_cDNA_P Parameter: Treatment Value: 100uM ABA vs. No Treatment
  misc_feature: MA Experiment ID: 108576 Result: Up-regulated in Transcription
  misc_feature: MA Experiment 108576 PARAMETER Experiment Name: At_42deg_Heat_cDNA_P Parameter: Temperature (deg C) Value: 42 vs. 22
  misc_feature: MA Experiment 108576 PARAMETER Experiment Name: At_42deg_Heat_cDNA_P Parameter: Timepoint (hr) Value: 1
  misc_feature: MA Experiment 108576 PARAMETER Experiment Name: At_42deg_Heat_cDNA_P Parameter: Tissue Value: Aerial
  misc_feature: MA Experiment ID: 108577 Result: Up-regulated in Transcription
  misc_feature: MA Experiment 108577 PARAMETER Experiment Name: At_42deg_Heat_cDNA_P Parameter: Temperature (deg C) Value: 42 vs. 22
  misc_feature: MA Experiment 108577 PARAMETER Experiment Name: At_42deg_Heat_cDNA_P Parameter: Timepoint (hr) Value: 6
  misc_feature: MA Experiment 108577 PARAMETER Experiment Name: At_42deg_Heat_cDNA_P Parameter: Tissue Value: Aerial
  misc_feature: MA Experiment ID: 108585 Result: Up-regulated in Transcription
  misc_feature: MA Experiment 108585 PARAMETER Experiment Name: At_5mM_NaNP_cDNA_P Parameter: Timepoint (hr) Value: 6
  misc_feature: MA Experiment 108585 PARAMETER Experiment Name: At_5mM_NaNP_cDNA_P Parameter: Tissue Value: Aerial
  misc_feature: MA Experiment 108585 PARAMETER Experiment Name: At_5mM_NaNP_cDNA_P Parameter: Treatment Value: null
  misc_feature: MA Experiment ID: 108595 Result: Up-regulated in Transcription
  misc_feature: MA Experiment 108595 PARAMETER Experiment Name: At_Ler-pi_Ovule_cDNA_P Parameter: Plant Line Value: null
  misc_feature: MA Experiment ID: 20000069 Result: Up-regulated in Transcription
  misc_feature: MA Experiment 20000069 PARAMETER Experiment Name: At_100uM_ABA_Mutants_cDNA_P Parameter: Plant Line Value: CS23
  misc_feature: MA Experiment 20000069 PARAMETER Experiment Name: At_100uM_ABA_Mutants_cDNA_P Parameter: Timepoint (hr) Value: 6
  misc_feature: MA Experiment 20000069 PARAMETER Experiment Name: At_100uM_ABA_Mutants_cDNA_P Parameter: Tissue Value: Aerial
  misc_feature: MA Experiment 20000069 PARAMETER Experiment Name: At_100uM_ABA_Mutants_cDNA_P Parameter: Treatment Value: 100uM ABA vs. No Treatment
  misc_feature: MA Experiment ID: 20000070 Result: Up-regulated in Transcription
  misc_feature: MA Experiment 20000070 PARAMETER Experiment Name: At_100uM_ABA_Mutants_cDNA_P Parameter: Plant Line Value: CS24
  misc_feature: MA Experiment 20000070 PARAMETER Experiment Name: At_100uM_ABA_Mutants_cDNA_P Parameter: Timepoint (hr) Value: 6
  misc_feature: MA Experiment 20000070 PARAMETER Experiment Name: At_100uM_ABA_Mutants_cDNA_P Parameter: Tissue Value: Aerial
  misc_feature: MA Experiment 20000070 PARAMETER Experiment Name: At_100uM_ABA_Mutants_cDNA_P Parameter: Treatment Value: 100uM ABA vs. No Treatment
  misc_feature: MA Experiment ID: 20000071 Result: Up-regulated in Transcription
  misc_feature: MA Experiment 20000071 PARAMETER Experiment Name: At_100uM_ABA_Mutants_cDNA_P Parameter: Plant Line Value: CS8104
  misc_feature: MA Experiment 20000071 PARAMETER Experiment Name: At_100uM_ABA_Mutants_cDNA_P Parameter: Timepoint (hr) Value: 6
  misc_feature: MA Experiment 20000071 PARAMETER Experiment Name: At_100uM_ABA_Mutants_cDNA_P Parameter: Tissue Value: Aerial
  misc_feature: MA Experiment 20000071 PARAMETER Experiment Name: At_100uM_ABA_Mutants_cDNA_P Parameter: Treatment Value: 100uM ABA vs. No Treatment
  misc_feature: MA Experiment ID: 20000072 Result: Up-regulated in Transcription
  misc_feature: MA Experiment 20000072 PARAMETER Experiment Name: At_100uM_ABA_Mutants_cDNA_P Parameter: Plant Line Value: CS8105
  misc_feature: MA Experiment 20000072 PARAMETER Experiment Name: At_100uM_ABA_Mutants_cDNA_P Parameter: Timepoint (hr) Value: 6
  misc_feature: MA Experiment 20000072 PARAMETER Experiment Name: At_100uM_ABA_Mutants_cDNA_P Parameter: Tissue Value: Aerial
  misc_feature: MA Experiment 20000072 PARAMETER Experiment Name: At_100uM_ABA_Mutants_cDNA_P Parameter: Treatment Value: 100uM ABA vs. No Treatment
  misc_feature: MA Experiment ID: 20000086 Result: Up-regulated in Transcription
  misc_feature: MA Experiment 20000086 PARAMETER Experiment Name: At_100uM_ABA_Mutants_cDNA_P Parameter: Plant Line Value: CS22
  misc_feature: MA Experiment 20000086 PARAMETER Experiment Name: At_100uM_ABA_Mutants_cDNA_P Parameter: Timepoint (hr) Value: 6
  misc_feature: MA Experiment 20000086 PARAMETER Experiment Name: At_100uM_ABA_Mutants_cDNA_P Parameter: Tissue Value: Aerial
  misc_feature: MA Experiment 20000086 PARAMETER Experiment Name: At_100uM_ABA_Mutants_cDNA_P Parameter: Treatment Value: 100uM ABA vs. No Treatment
  misc_feature: MA Experiment ID: 20000087 Result: Up-regulated in Transcription
  misc_feature: MA Experiment 20000087 PARAMETER Experiment Name: At_100uM_ABA_Mutants_cDNA_P Parameter: Plant Line Value: WS
  misc_feature: MA Experiment 20000087 PARAMETER Experiment Name: At_100uM_ABA_Mutants_cDNA_P Parameter: Timepoint (hr) Value: 6
  misc_feature: MA Experiment 20000087 PARAMETER Experiment Name: At_100uM_ABA_Mutants_cDNA_P Parameter: Tissue Value: Aerial
  misc_feature: MA Experiment 20000087 PARAMETER Experiment Name: At_100uM_ABA_Mutants_cDNA_P Parameter: Treatment Value: 100uM ABA vs. No Treatment
  misc_feature: MA Experiment ID: 20000088 Result: Up-regulated in Transcription
  misc_feature: MA Experiment 20000088 PARAMETER Experiment Name: At_100uM_ABA_Mutants_cDNA_P Parameter: Plant Line Value: Landsberg
  misc_feature: MA Experiment 20000088 PARAMETER Experiment Name: At_100uM_ABA_Mutants_cDNA_P Parameter: Timepoint (hr) Value: 6
  misc_feature: MA Experiment 20000088 PARAMETER Experiment Name: At_100uM_ABA_Mutants_cDNA_P Parameter: Tissue Value: Aerial
  misc_feature: MA Experiment 20000088 PARAMETER Experiment Name: At_100uM_ABA_Mutants_cDNA_P Parameter: Treatment Value: 100uM ABA vs. No Treatment
  misc_feature: MA Experiment ID: 20000093 Result: Up-regulated in Transcription
  misc_feature: MA Experiment 20000093 PARAMETER Experiment Name: At_42deg_Heat_cDNA_P Parameter: Temperature (deg C) Value: 42 vs. 22
  misc_feature: MA Experiment 20000093 PARAMETER Experiment Name: At_42deg_Heat_cDNA_P Parameter: Timepoint (hr) Value: 0.5
  misc_feature: MA Experiment 20000093 PARAMETER Experiment Name: At_42deg_Heat_cDNA_P Parameter: Tissue Value: Aerial
  misc_feature: MA Experiment ID: 20000111 Result: Up-regulated in Transcription
  misc_feature: MA Experiment 20000111 PARAMETER Experiment Name: At_42deg_Heat_cDNA_P Parameter: Temperature (deg C) Value: 42 vs. 22
  misc_feature: MA Experiment 20000111 PARAMETER Experiment Name: At_42deg_Heat_cDNA_P Parameter: Timepoint (hr) Value: 6
  misc_feature: MA Experiment 20000111 PARAMETER Experiment Name: At_42deg_Heat_cDNA_P Parameter: Tissue Value: Aerial
  misc_feature: MA Experiment ID: 20000112 Result: Up-regulated in Transcription
  misc_feature: MA Experiment 20000112 PARAMETER Experiment Name: At_42deg_Heat_cDNA_P Parameter: Temperature (deg C) Value: 42 vs. 22
  misc_feature: MA Experiment 20000112 PARAMETER Experiment Name: At_42deg_Heat_cDNA_P Parameter: Timepoint (hr) Value: 2
  misc_feature: MA Experiment 20000112 PARAMETER Experiment Name: At_42deg_Heat_cDNA_P Parameter: Tissue Value: Aerial
  misc_feature: MA Experiment ID: 20000117 Result: Up-regulated in Transcription
  misc_feature: MA Experiment 20000117 PARAMETER Experiment Name: At_100uM_ABA_Mutants_cDNA_P Parameter: Plant Line Value: Columbia
  misc_feature: MA Experiment 20000117 PARAMETER Experiment Name: At_100uM_ABA_Mutants_cDNA_P Parameter: Timepoint (hr) Value: 6
  misc_feature: MA Experiment 20000117 PARAMETER Experiment Name: At_100uM_ABA_Mutants_cDNA_P Parameter: Tissue Value: Aerial
  misc_feature: MA Experiment 20000117 PARAMETER Experiment Name: At_100uM_ABA_Mutants_cDNA_P Parameter: Treatment Value: 100uM ABA vs. No Treatment
  misc_feature: MA Experiment ID: 20000144 Result: Up-regulated in Transcription
  misc_feature: MA Experiment 20000144 PARAMETER Experiment Name: At_42deg_Heat_cDNA_P Parameter: Temperature (deg C) Value: 42 vs. 22
  misc_feature: MA Experiment 20000144 PARAMETER Experiment Name: At_42deg_Heat_cDNA_P Parameter: Timepoint (hr) Value: 1
  misc_feature: MA Experiment 20000144 PARAMETER Experiment Name: At_42deg_Heat_cDNA_P Parameter: Tissue Value: Aerial
  misc_feature: MA Experiment ID: 20000437 Result: Up-regulated in Transcription
  misc_feature: MA Experiment 20000437 PARAMETER Experiment Name: At_Drought_P Parameter: Age (day) Value: 8
  misc_feature: MA Experiment 20000437 PARAMETER Experiment Name: At_Drought_P Parameter: Organism Value: A. thaliana
  misc_feature: MA Experiment 20000437 PARAMETER Experiment Name: At_Drought_P Parameter: Plant Line Value: WS
  misc_feature: MA Experiment 20000437 PARAMETER Experiment Name: At_Drought_P Parameter: Timepoint (hr) Value: 24
  misc_feature: MA Experiment 20000437 PARAMETER Experiment Name: At_Drought_P Parameter: Tissue Value: Whole Plant
  misc_feature: MA Experiment 20000437 PARAMETER Experiment Name: At_Drought_P Parameter: Treatment Value: Drought vs. No Drought
agagatcatcgagagggcaagagagaaaaatgggaaaggcacgtacggtgggagtgggaatggactattctccgacgagcaaattagctctccggtgggcggcggagaatctccttgaagacggcgacaccgtcatcttgattcacgtccaaccacaaaacgccgatcatacccgcaaaatcctcttcgaggaaaccggttcaccgctaattcctttggaggaatttagagaggttaatttgtctaaacagtatggacttgcttacgatcctgaggttcttgatgttcttgatactctctctagggctaaaaaggtgaaggttgtagcaaaggtgtattggggagatccaagggagaaactttgtgatgctgtcgaaaatctaaaactcgattccattgttcttggcagtcgaggtttgggttctctcaaaaggccgaatcataatggattcatgatcattatgtttgatcatagcctagttggacttgtatccctagatcatgatcaaagtgggcttataaacatggccgagatgggtagttctaaatcaatttgttggatcagaagaaatcaagaaagagacagtcgttggagcttttctgatctgcttttggatgatcacccattagattgaaaattaaatttttcattctccgctcgatggctgatttgtaaacttgttccttcatgatagaaatttatgggc

SEQ ID NO: 41052 - protein, 210 aa, Arabidopsis thaliana
  peptide (1)..(210): Ceres Seq. ID no. 12466509
  misc_feature (12)..(164): Pfam Name: Universal stress protein family Pfam Description: Universal stress protein family
  misc_feature (10)..(105): Homolog of NCBI NO: 21555070 NR Description: unknown [Arabidopsis thaliana]
  misc_feature (1)..(144): Homolog of NCBI NO: 15528707 NR Description: P0583G08.8 [Oryza sativa (japonica
  misc_feature (14)..(144): Homolog of NCBI NO: 18401345 NR Description: expressed protein
  misc_feature (10)..(144): Homolog of NCBI NO: 11602749 NR Description: early nodulin ENOD18 [Vicia faba]
  misc_feature (14)..(144): Homolog of NCBI NO: 11602751 NR Description: ENOD18 protein [Vicia faba]
  misc_feature (10)..(144): Homolog of NCBI NO: 11602747 NR Description: early nodulin ENOD18 [Vicia faba]
  misc_feature (11)..(144): Homolog of NCBI NO: 20160561 NR Description: P0414E03.3 [Oryza sativa (japonica
  misc_feature (10)..(144): Homolog of NCBI NO: 30693971 NR Description: expressed protein [Arabidopsis thaliana]
  misc_feature (10)..(144): Homolog of NCBI NO: 30678807 NR Description: expressed protein [Arabidopsis thaliana]
  misc_feature (10)..(210): Homolog of NCBI NO: 18396497 NR Description: expressed protein
RSSRGQERKMGKARTVGVGMDYSPTSKLALRWAAENLLEDGDTVILIHVQPQNADHTRKILFEETGSPLIPLEEFREVNLSKQYGLAYDPEVLDVLDTLSRAKKVKVVAKVYWGDPREKLCDAVENLKLDSIVLGSRGLGSLKRPNHNGFMIIMFDHSLVGLVSLDHDQSGLINMAEMGSSKSICWIRRNQERDSRWSFSDLLLDDHPLD

SEQ ID NO: 41053 - protein, 201 aa, Arabidopsis thaliana
  peptide (1)..(201): Ceres Seq. ID no. 12466510
  misc_feature (3)..(155): Pfam Name: Universal stress protein family Pfam Description: Universal stress protein family
  misc_feature (1)..(96): Homolog of NCBI NO: 21555070 NR Description: unknown [Arabidopsis thaliana]
  misc_feature (1)..(135): Homolog of NCBI NO: 15528707 NR Description: P0583G08.8 [Oryza sativa (japonica
  misc_feature (5)..(135): Homolog of NCBI NO: 18401345 NR Description: expressed protein
  misc_feature (1)..(135): Homolog of NCBI NO: 11602749 NR Description: early nodulin ENOD18 [Vicia faba]
  misc_feature (5)..(135): Homolog of NCBI NO: 11602751 NR Description: ENOD18 protein [Vicia faba]
  misc_feature (1)..(135): Homolog of NCBI NO: 11602747 NR Description: early nodulin ENOD18 [Vicia faba]
  misc_feature (2)..(135): Homolog of NCBI NO: 20160561 NR Description: P0414E03.3 [Oryza sativa (japonica
  misc_feature (1)..(135): Homolog of NCBI NO: 30693971 NR Description: expressed protein [Arabidopsis thaliana]
  misc_feature (1)..(135): Homolog of NCBI NO: 30678807 NR Description: expressed protein [Arabidopsis thaliana]
  misc_feature (1)..(201): Homolog of NCBI NO: 18396497 NR Description: expressed protein
MGKARTVGVGMDYSPTSKLALRWAAENLLEDGDTVILIHVQPQNADHTRKILFEETGSPLIPLEEFREVNLSKQYGLAYDPEVLDVLDTLSRAKKVKVVAKVYWGDPREKLCDAVENLKLDSIVLGSRGLGSLKRPNHNGFMIIMFDHSLVGLVSLDHDQSGLINMAEMGSSKSICWIRRNQERDSRWSFSDLLLDDHPLD

SEQ ID NO: 41054 - protein, 191 aa, Arabidopsis thaliana
  peptide (1)..(191): Ceres Seq. ID no. 12466511
  misc_feature (1)..(145): Pfam Name: Universal stress protein family Pfam Description: Universal stress protein family
  misc_feature (1)..(86): Homolog of NCBI NO: 21555070 NR Description: unknown [Arabidopsis thaliana]
  misc_feature (1)..(125): Homolog of NCBI NO: 15528707 NR Description: P0583G08.8 [Oryza sativa (japonica
  misc_feature (1)..(125): Homolog of NCBI NO: 18401345 NR Description: expressed protein
  misc_feature (1)..(125): Homolog of NCBI NO: 11602749 NR Description: early nodulin ENOD18 [Vicia faba]
  misc_feature (1)..(125): Homolog of NCBI NO: 11602751 NR Description: ENOD18 protein [Vicia faba]
  misc_feature (1)..(125): Homolog of NCBI NO: 11602747 NR Description: early nodulin ENOD18 [Vicia faba]
  misc_feature (1)..(125): Homolog of NCBI NO: 20160561 NR Description: P0414E03.3 [Oryza sativa (japonica
  misc_feature (1)..(125): Homolog of NCBI NO: 30693971 NR Description: expressed protein [Arabidopsis thaliana]
  misc_feature (1)..(125): Homolog of NCBI NO: 30678807 NR Description: expressed protein [Arabidopsis thaliana]
  misc_feature (1)..(191): Homolog of NCBI NO: 18396497 NR Description: expressed protein
MDYSPTSKLALRWAAENLLEDGDTVILIHVQPQNADHTRKILFEETGSPLIPLEEFREVNLSKQYGLAYDPEVLDVLDTLSRAKKVKVVAKVYWGDPREKLCDAVENLKLDSIVLGSRGLGSLKRPNHNGFMIIMFDHSLVGLVSLDHDQSGLINMAEMGSSKSICWIRRNQERDSRWSFSDLLLDDHPLD

SEQ ID NO: 41055 - DNA, 1841 bp, Arabidopsis thaliana
  misc_feature (1)..(1841): Ceres Seq. ID no. 12329409
  misc_feature: MA Experiment ID: 108435 Result: Down-regulated in Transcription
  misc_feature: MA Experiment 108435 PARAMETER Experiment Name: At_stm_Mutants_cDNA_P Parameter: Plant Line Value: wt Landsburg vs stm
  misc_feature: MA Experiment 108435 PARAMETER Experiment Name: At_stm_Mutants_cDNA_P Parameter: Tissue Value: Shoot Apical Meristem Region
  misc_feature: MA Experiment ID: 108462 Result: Down-regulated in Transcription
  misc_feature: MA Experiment 108462 PARAMETER Experiment Name: At_Germinating_Seeds_cDNA_P Parameter: Age (day) Value: 2 vs. 0
  misc_feature: MA Experiment 108462 PARAMETER Experiment Name: At_Germinating_Seeds_cDNA_P Parameter: Tissue Value: Germinating Seeds
  misc_feature: MA Experiment ID: 108463 Result: Down-regulated in Transcription
  misc_feature: MA Experiment 108463 PARAMETER Experiment Name: At_Germinating_Seeds_cDNA_P Parameter: Age (day) Value: 3 vs. 0
  misc_feature: MA Experiment 108463 PARAMETER Experiment Name: At_Germinating_Seeds_cDNA_P Parameter: Tissue Value: Germinating Seeds
  misc_feature: MA Experiment ID: 108464 Result: Down-regulated in Transcription
  misc_feature: MA Experiment 108464 PARAMETER Experiment Name: At_Germinating_Seeds_cDNA_P Parameter: Age (day) Value: 4 vs. 0
  misc_feature: MA Experiment 108464 PARAMETER Experiment Name: At_Germinating_Seeds_cDNA_P Parameter: Tissue Value: Germinating Seeds
  misc_feature: MA Experiment ID: 108573 Result: Up-regulated in Transcription
  misc_feature: MA Experiment 108573 PARAMETER Experiment Name: At_Drought_cDNA_P Parameter: Timepoint (hr) Value: 6
  misc_feature: MA Experiment 108573 PARAMETER Experiment Name: At_Drought_cDNA_P Parameter: Tissue Value: Aerial
  misc_feature: MA Experiment 108573 PARAMETER Experiment Name: At_Drought_cDNA_P Parameter: Treatment Value: Drought vs. No Drought
  misc_feature: MA Experiment ID: 108574 Result: Down-regulated in Transcription
  misc_feature: MA Experiment 108574 PARAMETER Experiment Name: At_Wounding__cDNA_P Parameter: Timepoint (hr) Value: 1
  misc_feature: MA Experiment 108574 PARAMETER Experiment Name: At_Wounding__cDNA_P Parameter: Tissue Value: Aerial
  misc_feature: MA Experiment 108574 PARAMETER Experiment Name: At_Wounding__cDNA_P Parameter: Treatment Value: Wounding vs. No Wounding
  misc_feature: MA Experiment ID: 108579 Result: Down-regulated in Transcription
  misc_feature: MA Experiment 108579 PARAMETER Experiment Name: At_4deg_Cold_cDNA_P Parameter: Temperature (deg C) Value: 4 vs. 22
  misc_feature: MA Experiment 108579 PARAMETER Experiment Name: At_4deg_Cold_cDNA_P Parameter: Timepoint (hr) Value: 6
  misc_feature: MA Experiment 108579 PARAMETER Experiment Name: At_4deg_Cold_cDNA_P Parameter: Tissue Value: Aerial
  misc_feature: MA Experiment ID: 20000069 Result: Up-regulated in Transcription
  misc_feature: MA Experiment 20000069 PARAMETER Experiment Name: At_100uM_ABA_Mutants_cDNA_P Parameter: Plant Line Value: CS23
  misc_feature: MA Experiment 20000069 PARAMETER Experiment Name: At_100uM_ABA_Mutants_cDNA_P Parameter: Timepoint (hr) Value: 6
  misc_feature: MA Experiment 20000069 PARAMETER Experiment Name: At_100uM_ABA_Mutants_cDNA_P Parameter: Tissue Value: Aerial
  misc_feature: MA Experiment 20000069 PARAMETER Experiment Name: At_100uM_ABA_Mutants_cDNA_P Parameter: Treatment Value: 100uM ABA vs. No Treatment
  misc_feature: MA Experiment ID: 20000070 Result: Up-regulated in Transcription
  misc_feature: MA Experiment 20000070 PARAMETER Experiment Name: At_100uM_ABA_Mutants_cDNA_P Parameter: Plant Line Value: CS24
  misc_feature: MA Experiment 20000070 PARAMETER Experiment Name: At_100uM_ABA_Mutants_cDNA_P Parameter: Timepoint (hr) Value: 6
  misc_feature: MA Experiment 20000070 PARAMETER Experiment Name: At_100uM_ABA_Mutants_cDNA_P Parameter: Tissue Value: Aerial
  misc_feature: MA Experiment 20000070 PARAMETER Experiment Name: At_100uM_ABA_Mutants_cDNA_P Parameter: Treatment Value: 100uM ABA vs. No Treatment
  misc_feature: MA Experiment ID: 20000071 Result: Up-regulated in Transcription
  misc_feature: MA Experiment 20000071 PARAMETER Experiment Name: At_100uM_ABA_Mutants_cDNA_P Parameter: Plant Line Value: CS8104
  misc_feature: MA Experiment 20000071 PARAMETER Experiment Name: At_100uM_ABA_Mutants_cDNA_P Parameter: Timepoint (hr) Value: 6
  misc_feature: MA Experiment 20000071 PARAMETER Experiment Name: At_100uM_ABA_Mutants_cDNA_P Parameter: Tissue Value: Aerial
  misc_feature: MA Experiment 20000071 PARAMETER Experiment Name: At_100uM_ABA_Mutants_cDNA_P Parameter: Treatment Value: 100uM ABA vs. No Treatment
  misc_feature: MA Experiment ID: 20000072 Result: Up-regulated in Transcription
  misc_feature: MA Experiment 20000072 PARAMETER Experiment Name: At_100uM_ABA_Mutants_cDNA_P Parameter: Plant Line Value: CS8105
  misc_feature: MA Experiment 20000072 PARAMETER Experiment Name: At_100uM_ABA_Mutants_cDNA_P Parameter: Timepoint (hr) Value: 6
  misc_feature: MA Experiment 20000072 PARAMETER Experiment Name: At_100uM_ABA_Mutants_cDNA_P Parameter: Tissue Value: Aerial
  misc_feature: MA Experiment 20000072 PARAMETER Experiment Name: At_100uM_ABA_Mutants_cDNA_P Parameter: Treatment Value: 100uM ABA vs. No Treatment
  misc_feature: MA Experiment ID: 20000086 Result: Up-regulated in Transcription
  misc_feature: MA Experiment 20000086 PARAMETER Experiment Name: At_100uM_ABA_Mutants_cDNA_P Parameter: Plant Line Value: CS22
  misc_feature: MA Experiment 20000086 PARAMETER Experiment Name: At_100uM_ABA_Mutants_cDNA_P Parameter: Timepoint (hr) Value: 6
  misc_feature: MA Experiment 20000086 PARAMETER Experiment Name: At_100uM_ABA_Mutants_cDNA_P Parameter: Tissue Value: Aerial
  misc_feature: MA Experiment 20000086 PARAMETER Experiment Name: At_100uM_ABA_Mutants_cDNA_P Parameter: Treatment Value: 100uM ABA vs. No Treatment
  misc_feature: MA Experiment ID: 20000088 Result: Up-regulated in Transcription
  misc_feature: MA Experiment 20000088 PARAMETER Experiment Name: At_100uM_ABA_Mutants_cDNA_P Parameter: Plant Line Value: Landsberg
  misc_feature: MA Experiment 20000088 PARAMETER Experiment Name: At_100uM_ABA_Mutants_cDNA_P Parameter: Timepoint (hr) Value: 6
  misc_feature: MA Experiment 20000088 PARAMETER Experiment Name: At_100uM_ABA_Mutants_cDNA_P Parameter: Tissue Value: Aerial
  misc_feature: MA Experiment 20000088 PARAMETER Experiment Name: At_100uM_ABA_Mutants_cDNA_P Parameter: Treatment Value: 100uM ABA vs. No Treatment
  misc_feature: MA Experiment ID: 20000089 Result: Up-regulated in Transcription
  misc_feature: MA Experiment ID: 20000117 Result: Up-regulated in Transcription
  misc_feature: MA Experiment 20000117 PARAMETER Experiment Name: At_100uM_ABA_Mutants_cDNA_P Parameter: Plant Line Value: Columbia
  misc_feature: MA Experiment 20000117 PARAMETER Experiment Name: At_100uM_ABA_Mutants_cDNA_P Parameter: Timepoint (hr) Value: 6
  misc_feature: MA Experiment 20000117 PARAMETER Experiment Name: At_100uM_ABA_Mutants_cDNA_P Parameter: Tissue Value: Aerial
  misc_feature: MA Experiment 20000117 PARAMETER Experiment Name: At_100uM_ABA_Mutants_cDNA_P Parameter: Treatment Value: 100uM ABA vs. No Treatment
  misc_feature: MA Experiment ID: 20000180 Result: Down-regulated in Transcription
  misc_feature: MA Experiment 20000180 PARAMETER Experiment Name: At_Germinating_Seeds_P Parameter: Age (hr) Value: 24 vs. 0
  misc_feature: MA Experiment 20000180 PARAMETER Experiment Name: At_Germinating_Seeds_P Parameter: Tissue Value: Germinating Seeds
  misc_feature: MA Experiment ID: 20000184 Result: Down-regulated in Transcription
  misc_feature: MA Experiment 20000184 PARAMETER Experiment Name: At_Shoots__P Parameter: Age (day) Value: 7
  misc_feature: MA Experiment 20000184 PARAMETER Experiment Name: At_Shoots__P Parameter: Tissue Value: Shoots vs. Whole Plant
  misc_feature: MA Experiment ID: 20000213 Result: Down-regulated in Transcription
  misc_feature: MA Experiment 20000213 PARAMETER Experiment Name: At_4deg_Cold_P Parameter: Timepoint (hr) Value: 2
  misc_feature: MA Experiment ID: 20000234 Result: Down-regulated in Transcription
  misc_feature: MA Experiment 20000234 PARAMETER Experiment Name: At_Siliques_P Parameter: Age (day) Value: 21
  misc_feature: MA Experiment 20000234 PARAMETER Experiment Name: At_Siliques_P Parameter: Organism Value: A. thaliana
  misc_feature: MA Experiment 20000234 PARAMETER Experiment Name: At_Siliques_P Parameter: Plant Line Value: WS
  misc_feature: MA Experiment 20000234 PARAMETER Experiment Name: At_Siliques_P Parameter: Tissue Value: Less Than 5mm Siliques vs. Whole Plant
  misc_feature: MA Experiment ID: 20000264 Result: Down-regulated in Transcription
  misc_feature: MA Experiment 20000264 PARAMETER Experiment Name: At_Open_Flower_P Parameter: Age (day) Value: 21
  misc_feature: MA Experiment 20000264 PARAMETER Experiment Name: At_Open_Flower_P Parameter: Plant Line Value: WS
  misc_feature: MA Experiment 20000264 PARAMETER Experiment Name: At_Open_Flower_P Parameter: Tissue Value: Open Flower vs. Whole Plant
  misc_feature: MA Experiment ID: 20000265 Result: Down-regulated in Transcription
  misc_feature: MA Experiment 20000265 PARAMETER Experiment Name: At_Open_Flower_P Parameter: Age (day) Value: 21
  misc_feature: MA Experiment 20000265 PARAMETER Experiment Name: At_Open_Flower_P Parameter: Plant Line Value: WS
  misc_feature: MA Experiment 20000265 PARAMETER Experiment Name: At_Open_Flower_P Parameter: Tissue Value: Closed Flower vs. Whole Plant
  misc_feature: MA Experiment ID: 20000286 Result: Down-regulated in Transcription
  misc_feature: MA Experiment 20000286 PARAMETER Experiment Name: At_Open_Flower_P Parameter: Age (day) Value: 21
  misc_feature: MA Experiment 20000286 PARAMETER Experiment Name: At_Open_Flower_P Parameter: Plant Line Value: WS
  misc_feature: MA Experiment 20000286 PARAMETER Experiment Name: At_Open_Flower_P Parameter: Tissue Value: Half Open vs. Whole Plant
  misc_feature: MA Experiment ID: 20000438 Result: Down-regulated in Transcription
  misc_feature: MA Experiment 20000438 PARAMETER Experiment Name: At_Shoots__P Parameter: Age (day) Value: 14
  misc_feature: MA Experiment 20000438 PARAMETER Experiment Name: At_Shoots__P Parameter: Tissue Value: Shoots vs. Whole Plant
  misc_feature: MA Experiment ID: 20000439 Result: Down-regulated in Transcription
  misc_feature: MA Experiment 20000439 PARAMETER Experiment Name: At_Roots__P Parameter: Age (day) Value: 14 vs. 21
  misc_feature: MA Experiment 20000439 PARAMETER Experiment Name: At_Roots__P Parameter: Organism Value: A. thaliana
  misc_feature: MA Experiment 20000439 PARAMETER Experiment Name: At_Roots__P Parameter: Tissue Value: Roots vs. Whole Plant
  misc_feature: MA Experiment ID: 20000441 Result: Up-regulated in Transcription
  misc_feature: MA Experiment 20000441 PARAMETER Experiment Name: At_1uM_BR-BRZ__P Parameter: Tissue Value: Shoot Apices
  misc_feature: MA Experiment 20000441 PARAMETER Experiment Name: At_1uM_BR-BRZ__P Parameter: Treatment Value: 1uM BR vs. No Treatment
  misc_feature: MA Experiment ID: 20000573 Result: Up-regulated in Transcription
  misc_feature: MA Experiment 20000573 PARAMETER Experiment Name: At_100uM_ABA_Mutants__P Parameter: Organism Value: A. thaliana
  misc_feature: MA Experiment 20000573 PARAMETER Experiment Name: At_100uM_ABA_Mutants__P Parameter: Plant Line Value: CS22 vs. Ler wt
  misc_feature: MA Experiment 20000573 PARAMETER Experiment Name: At_100uM_ABA_Mutants__P Parameter: Timepoint (hr) Value: N/A
  misc_feature: MA Experiment 20000573 PARAMETER Experiment Name: At_100uM_ABA_Mutants__P Parameter: Tissue Value: Whole Plant
  misc_feature: MA Experiment 20000573 PARAMETER Experiment Name: At_100uM_ABA_Mutants__P Parameter: Treatment Value: None
  misc_feature: MA Experiment ID: 20001450 Result: Up-regulated in Transcription
  misc_feature: MA Experiment 20001450 PARAMETER Experiment Name: At_Far-red-induction_P Parameter: Age (day) Value: 7
  misc_feature: MA Experiment 20001450 PARAMETER Experiment Name: At_Far-red-induction_P Parameter: Light Value: Far-red vs. White
  misc_feature: MA Experiment 20001450 PARAMETER Experiment Name: At_Far-red-induction_P Parameter: Organism Value: A. thaliana
  misc_feature: MA Experiment 20001450 PARAMETER Experiment Name: At_Far-red-induction_P Parameter: Plant Line Value: Columbia
  misc_feature: MA Experiment 20001450 PARAMETER Experiment Name: At_Far-red-induction_P Parameter: Timepoint (hr) Value: 8
  misc_feature: MA Experiment 20001450 PARAMETER Experiment Name: At_Far-red-induction_P Parameter: Tissue Value: Whole Plant
  misc_feature: MA Experiment ID: 20001451 Result: Up-regulated in Transcription
  misc_feature: MA Experiment 20001451 PARAMETER Experiment Name: At_Far-red-induction_P Parameter: Age (day) Value: 7
  misc_feature: MA Experiment 20001451 PARAMETER Experiment Name: At_Far-red-induction_P Parameter: Light Value: Far-red vs. White
  misc_feature: MA Experiment 20001451 PARAMETER Experiment Name: At_Far-red-induction_P Parameter: Organism Value: A. thaliana
  misc_feature: MA Experiment 20001451 PARAMETER Experiment Name: At_Far-red-induction_P Parameter: Plant Line Value: Columbia
  misc_feature: MA Experiment 20001451 PARAMETER Experiment Name: At_Far-red-induction_P Parameter: Timepoint (hr) Value: 24
  misc_feature: MA Experiment 20001451 PARAMETER Experiment Name: At_Far-red-induction_P Parameter: Tissue Value: Whole Plant
  misc_feature: MA Experiment ID: 20001557 Result: Down-regulated in Transcription
  misc_feature: MA Experiment 20001557 PARAMETER Experiment Name: At_Drought_Soil_Dry_P Parameter: Age (day) Value: 27
  misc_feature: MA Experiment 20001557 PARAMETER Experiment Name: At_Drought_Soil_Dry_P Parameter: Organism Value: A. thaliana
  misc_feature: MA Experiment 20001557 PARAMETER Experiment Name: At_Drought_Soil_Dry_P Parameter: Plant Line Value: WS
  misc_feature: MA Experiment 20001557 PARAMETER Experiment Name: At_Drought_Soil_Dry_P Parameter: Post Timepoint (hr) Value: 3
  misc_feature: MA Experiment 20001557 PARAMETER Experiment Name: At_Drought_Soil_Dry_P Parameter: Post-Treatment Value: Re-Water vs. No Drought
  misc_feature: MA Experiment 20001557 PARAMETER Experiment Name: At_Drought_Soil_Dry_P Parameter: Timepoint (day) Value: 13
  misc_feature: MA Experiment 20001557 PARAMETER Experiment Name: At_Drought_Soil_Dry_P Parameter: Treatment Value: Drought vs. No Drought
aatctctgtttgtatatatattatctttgcgatttttatccaaatcttccaaagcttagctttttttttttttcaatttctctcttgcgttttcgattttattacaagaactttgttttgggcttcatccatcgttcaaggttcgttgaaaactatgaagaaagttgagttttttatgctccttctctgcttcatcgcagcgtcatctctagtgtctgctgatccaccaacatgtcctgctgatttgggaggcaagtgtagtgattctgatgactggcaaggtgatttcttccctgaaatccccaagattaagtatgagggaccttcgagtaagaacccacttgcttacaggtggtataacgctgaagaagagattcttgggaagaaaatgaaggattggtttagattcagtgttgcgttttggcatactttccgtgggactggaggtgatccatttggtgctgctactaagtattggccttgggaagatggtactaactctgtgtctatggctaagagaagaatgagagctaactttgagttcttgaagaaacttggagttgattagtggtgttttcatgacagagacatagcacctgatggcactacacttgaggaatctaacaaaaacttggatgaagttatcgaactcgccaaagaactccaaaaggggagcaaaatcaaaccattgtggggaacagctcagcttttcttgcatcctcgttacatgcacggaggagcgaccagctctgaagttggagtgtatgcttacgctgctgctcaggtgaagaaagccatggaggtaacacattacttaggtggtgaaaactacgttttttggggtggtcgtgaaggttatcagacactcttgaacactgatatgggaagagagcttgatcatctagccaggttctttgaagctgctgttgcttacaagaagaagattggattcaaaggtaagtctactgcttctttttcttgtcctgtattcagtcttatgggagttattgcacaataatcttctttttatcaggcacgcttttaatcgagcccaagcctcaagaacccaccaagcaccagtatgactgggatgctgcaacagctgccaatttcttgaggaaatatggtcttattgatgagtttaagctcaacattgagtgtaaccatgccacgctctctggtcacacttgtcatcacgagcttgaaactgcaagaattaatggtttacttggcaacattgatgcaaacactggcgatgctcaaactggatgggatacagatcagtttcttacagatgttggagaagcaaccatggttatgatgagtgtcatcaaaaatggtgggattgctccaggcggcttcaactttgacgctaaactgcgaagagagagtacagacgtggaagacttattcattgctcatattagtggaatggatacaatggctcgtggactgagaaacgcagtcaagatcttggaggagggaagtctaagtgaattggtacgcaagcgatatgcaacttgggactctgagcttgggaagcaaatagaagaaggaaaagctgattttgagtatcttgagaagaaagctaaagagtttggagaaccaaaggtttcttctgctaaacaggaactcgctgagatgatcttccaatctgcaatgtaagaagaagaacaagaaggctttttatgtttattaaaagtatcgtcttctttagtttccctcgcatctttgagaagtttgaaaaccaaaacattggaaaataagatgattagagaggttggtttcattatttcagttgatgtactatggtttcacactctaattactttaaattgaat

SEQ ID NO: 41056 - protein, 188 aa, Arabidopsis thaliana
  peptide (1)..(188): Ceres Seq. ID no. 12329410
  misc_feature (121)..(188): Pfam Name: Xylose isomerase Pfam Description: Xylose isomerase
  misc_feature (95)..(188): Homolog of NCBI NO: 1175034 NR Description: Xylose isomerase
  misc_feature (95)..(188): Homolog of NCBI NO: 15644415 NR Description: xylose isomerase [Thermotoga maritima]
  misc_feature (52)..(188): Homolog of NCBI NO: 30696901 NR Description: expressed protein [Arabidopsis thaliana]
  misc_feature (52)..(188): Homolog of NCBI NO: 2130051 NR Description: xylose isomerase (EC 5.3.1.5) - barley
  misc_feature (52)..(188): Homolog of NCBI NO: 6175480 NR Description: Xylose isomerase
  misc_feature (60)..(188): Homolog of NCBI NO: 34899308 NR Description: putative xylose isomerase [Oryza sativa (japonica
  misc_feature (60)..(188): Homolog of NCBI NO: 34395196 NR Description: putative xylose isomerase [Oryza sativa (japonica
  misc_feature (52)..(188): Homolog of NCBI NO: 17433690 NR Description: Xylose isomerase
  misc_feature (52)..(188): Homolog of NCBI NO: 21537178 NR Description: xylose isomerase [Arabidopsis thaliana]
  misc_feature (52)..(188): Homolog of NCBI NO: 30696904 NR Description: expressed protein [Arabidopsis thaliana]
ISVCIYIIFAIFIQIFQSLAFFFFQFLSCVFDFITRTLFWASSIVQGSLKTMKKVEFFMLLLCFIAASSLVSADPPTCPADLGGKCSDSDDWQGDFFPEIPKIKYEGPSSKNPLAYRWYNAEEEILGKKMKDWFRFSVAFWHTFRGTGGDPFGAATKYWPWEDGTNSVSMAKRRMRANFEFLKKLGVD

SEQ ID NO: 41057 - protein, 137 aa, Arabidopsis thaliana
  peptide (1)..(137): Ceres Seq. ID no. 12329411
  misc_feature (70)..(137): Pfam Name: Xylose isomerase Pfam Description: Xylose isomerase
  misc_feature (44)..(137): Homolog of NCBI NO: 1175034 NR Description: Xylose isomerase
  misc_feature (44)..(137): Homolog of NCBI NO: 15644415 NR Description: xylose isomerase [Thermotoga maritima]
  misc_feature (1)..(137): Homolog of NCBI NO: 30696901 NR Description: expressed protein [Arabidopsis thaliana]
  misc_feature (1)..(137): Homolog of NCBI NO: 2130051 NR Description: xylose isomerase (EC 5.3.1.5) - barley
  misc_feature (1)..(137): Homolog of NCBI NO: 6175480 NR Description: Xylose isomerase
  misc_feature (9)..(137): Homolog of NCBI NO: 34899308 NR Description: putative xylose isomerase [Oryza sativa (japonica
  misc_feature (9)..(137): Homolog of NCBI NO: 34395196 NR Description: putative xylose isomerase [Oryza sativa (japonica
  misc_feature (1)..(137): Homolog of NCBI NO: 17433690 NR Description: Xylose isomerase
  misc_feature (1)..(137): Homolog of NCBI NO: 21537178 NR Description: xylose isomerase [Arabidopsis thaliana]
  misc_feature (1)..(137): Homolog of NCBI NO: 30696904 NR Description: expressed protein [Arabidopsis thaliana]
MKKVEFFMLLLCFIAASSLVSADPPTCPADLGGKCSDSDDWQGDFFPEIPKIKYEGPSSKNPLAYRWYNAEEEILGKKMKDWFRFSVAFWHTFRGTGGDPFGAATKYWPWEDGTNSVSMAKRRMRANFEFLKKLGVD

SEQ ID NO: 41058 - protein, 130 aa, Arabidopsis thaliana
  peptide (1)..(130): Ceres Seq. ID no. 12329412
  misc_feature (63)..(130): Pfam Name: Xylose isomerase Pfam Description: Xylose isomerase
  misc_feature (37)..(130): Homolog of NCBI NO: 1175034 NR Description: Xylose isomerase
  misc_feature (37)..(130): Homolog of NCBI NO: 15644415 NR Description: xylose isomerase [Thermotoga maritima]
  misc_feature (1)..(130): Homolog of NCBI NO: 30696901 NR Description: expressed protein [Arabidopsis thaliana]
  misc_feature (1)..(130): Homolog of NCBI NO: 2130051 NR Description: xylose isomerase (EC 5.3.1.5) - barley
  misc_feature (1)..(130): Homolog of NCBI NO: 6175480 NR Description: Xylose isomerase
  misc_feature (2)..(130): Homolog of NCBI NO: 34899308 NR Description: putative xylose isomerase [Oryza sativa (japonica
  misc_feature (2)..(130): Homolog of NCBI NO: 34395196 NR Description: putative xylose isomerase [Oryza sativa (japonica
  misc_feature (1)..(130): Homolog of NCBI NO: 17433690 NR Description: Xylose isomerase
  misc_feature (1)..(130): Homolog of NCBI NO: 21537178 NR Description: xylose isomerase [Arabidopsis thaliana]
  misc_feature (1)..(130): Homolog of NCBI NO: 30696904 NR Description: expressed protein [Arabidopsis thaliana]
MLLLCFIAASSLVSADPPTCPADLGGKCSDSDDWQGDFFPEIPKIKYEGPSSKNPLAYRWYNAEEEILGKKMKDWFRFSVAFWHTFRGTGGDPFGAATKYWPWEDGTNSVSMAKRRMRANFEFLKKLGVD

SEQ ID NO: 41059 - DNA, 1650 bp, Arabidopsis thaliana
  misc_feature (1)..(1650): Ceres Seq. ID no. 12330640
  misc_feature: MA Experiment ID: 108573 Result: Up-regulated in Transcription
  misc_feature: MA Experiment 108573 PARAMETER Experiment Name: At_Drought_cDNA_P Parameter: Timepoint (hr) Value: 6
  misc_feature: MA Experiment 108573 PARAMETER Experiment Name: At_Drought_cDNA_P Parameter: Tissue Value: Aerial
  misc_feature: MA Experiment 108573 PARAMETER Experiment Name: At_Drought_cDNA_P Parameter: Treatment Value: Drought vs. No Drought
  misc_feature: MA Experiment ID: 108576 Result: Down-regulated in Transcription
  misc_feature: MA Experiment 108576 PARAMETER Experiment Name: At_42deg_Heat_cDNA_P Parameter: Temperature (deg C) Value: 42 vs. 22
  misc_feature: MA Experiment 108576 PARAMETER Experiment Name: At_42deg_Heat_cDNA_P Parameter: Timepoint (hr) Value: 1
  misc_feature: MA Experiment 108576 PARAMETER Experiment Name: At_42deg_Heat_cDNA_P Parameter: Tissue Value: Aerial
  misc_feature: MA Experiment ID: 20000111 Result: Down-regulated in Transcription
  misc_feature: MA Experiment 20000111 PARAMETER Experiment Name: At_42deg_Heat_cDNA_P Parameter: Temperature (deg C) Value: 42 vs. 22
  misc_feature: MA Experiment 20000111 PARAMETER Experiment Name: At_42deg_Heat_cDNA_P Parameter: Timepoint (hr) Value: 6
  misc_feature: MA Experiment 20000111 PARAMETER Experiment Name: At_42deg_Heat_cDNA_P Parameter: Tissue Value: Aerial
  misc_feature: MA Experiment ID: 20000113 Result: Down-regulated in Transcription
  misc_feature: MA Experiment 20000113 PARAMETER Experiment Name: At_42deg_Heat_cDNA_P Parameter: Temperature (deg C) Value: 42 vs. 22
  misc_feature: MA Experiment 20000113 PARAMETER Experiment Name: At_42deg_Heat_cDNA_P Parameter: Timepoint (hr) Value: 8
  misc_feature: MA Experiment 20000113 PARAMETER Experiment Name: At_42deg_Heat_cDNA_P Parameter: Tissue Value: Aerial
  misc_feature: MA Experiment ID: 20000173 Result: Down-regulated in Transcription
  misc_feature: MA Experiment 20000173 PARAMETER Experiment Name: At_42deg_Heat_P Parameter: Age (day) Value: 14
  misc_feature: MA Experiment 20000173 PARAMETER Experiment Name: At_42deg_Heat_P Parameter: Organism Value: A. thaliana
  misc_feature: MA Experiment 20000173 PARAMETER Experiment Name: At_42deg_Heat_P Parameter: Plant Line Value: WS
  misc_feature: MA Experiment 20000173 PARAMETER Experiment Name: At_42deg_Heat_P Parameter: Temperature (deg C) Value: 42 vs. 22
  misc_feature: MA Experiment 20000173 PARAMETER Experiment Name: At_42deg_Heat_P Parameter: Timepoint (hr) Value: 6
  misc_feature: MA Experiment 20000173 PARAMETER Experiment Name: At_42deg_Heat_P Parameter: Tissue Value: Aerial
  misc_feature: MA Experiment ID: 20001451 Result: Up-regulated in Transcription
  misc_feature: MA Experiment 20001451 PARAMETER Experiment Name: At_Far-red-induction_P Parameter: Age (day) Value: 7
  misc_feature: MA Experiment 20001451 PARAMETER Experiment Name: At_Far-red-induction_P Parameter: Light Value: Far-red vs. White
  misc_feature: MA Experiment 20001451 PARAMETER Experiment Name: At_Far-red-induction_P Parameter: Organism Value: A. thaliana
  misc_feature: MA Experiment 20001451 PARAMETER Experiment Name: At_Far-red-induction_P Parameter: Plant Line Value: Columbia
  misc_feature: MA Experiment 20001451 PARAMETER Experiment Name: At_Far-red-induction_P Parameter: Timepoint (hr) Value: 24
  misc_feature: MA Experiment 20001451 PARAMETER Experiment Name: At_Far-red-induction_P Parameter: Tissue Value: Whole Plant
aaaattgggatcattttgataggagcgactctgttccttcgccgccgatacgcactcttcttcatcggatttgttcctctggggttcgcttctggaagaaatatgggtgagactctcatcaccaccctgtctatggagaactatcacccgtcaacactgctatccatggattcaggtgcttttactcatgaagaatcagagagggctatgaatgggtctctcatacttactggaccgcctgatattaatctaccactctcttctgaagctaggccatctctgcttttgtggaacgaacactgtgacatcttagacgttggacttggacctcagctatatgagcctgaggctgttgttcatgtgcctaaggttgctaagaagtacaacaagcgtgttgatagtgcatggggtgcttggcttttcttcagtttctacttcaaacctgttttggatgagaagtctaaaagtaagttaacgagggacagcaatggcttgtctgggtatgataaatctgatttgcagctcgactcgttcttggttcagcatgacatggagaatatgtacatgtgggtgttcaaggaaaagcctgaaaatgcccttggcaagatgcagctgcggagctacatgaacggacactcacgcgagggtgagcgtcctttcccttttagtgtggacaaaggttttgtccgctctcataggatgcagaggaaacattaccgtggtctctctaacccacagtgcctccatggaatcgaagttgtttattcacccaacctttctgtactcagcgaggatgaaaagaagaagtggacagaactcacaggtcgagatgtgaactttgctattccagctgaagctagtgattacggttcatggaggaatctcccaaacaccgaatttgaggctgagagacctcttcctctggctaaagctaacgggcacacccacctgaaaaagctgaatggtacctgtctaaatctgtctacacattccccagaccatgcagttgatacagtggaagttcaactcgctggtagcaataaacgcaaagggattgtcttgctctaggaaactgcgatgactcgagctcaagtgagaaatctctggacatgaaaatccatgcaacggagctgccttggtcaaatgattttagcggggtgatgaagaatgtgtacggtccagtcacagccgcaaaaacgatatatgaagacgacagagggttcttgatagttatgagcctgccattttttgattccggaagggtgaaagtgacatggaggaatacaccagcacatggaatagtgaagatatcatgtgtaagtacagcatgtgagccattcatcaagagacatgatagaacatttaagctaacagatccaacaccagagcattgcccaccgggggaatttgtccgcgaagtctccctgccgaacaggattccagatgacgccaagcttgaagcttaccgggacgaaacaggaacaacactagaggttttagtgcctaaacaccgaatgggaccagaggagcatgaggttcgcgtctgtctccgaccgttcgtgctagagtgagattgtagcgcataacttcttaaaagaattttattgttcatgtatcattggattattcatatttaatcatatttactcc

SEQ ID NO: 41060 - protein, 355 aa, Arabidopsis thaliana
  peptide (1)..(355): Ceres Seq. ID no. 12330641
  misc_feature (68)..(352): Homolog of NCBI NO: 34908142 NR Description: putative SLT1 protein (ion homeostasis related
  misc_feature (97)..(350): Homolog of NCBI NO: 34895866 NR Description: P0009G03.13 [Oryza sativa (japonica
  misc_feature (45)..(331): Homolog of NCBI NO: 11280862 NR Description: hypothetical protein T22P11.70 - Arabidopsis
  misc_feature (35)..(331): Homolog of NCBI NO: 18413934 NR Description: putative protein
  misc_feature (35)..(350): Homolog of NCBI NO: 11611667 NR Description: SLT1 protein [Nicotiana tabacum]
  misc_feature (45)..(352): Homolog of NCBI NO: 18404463 NR Description: expressed protein
  misc_feature (35)..(350): Homolog of NCBI NO: 18399669 NR Description: expressed protein
KIGIILIGATLFLRRRYALFFIGFVPLGFASGRNMGETLITTLSMENYHPSTLLSMDSGAFTHEESERAMNGSLILTGPPDINLPLSSEARPSLLLWNEHCDILDVGLGPQLYEPEAVVHVPKVAKKYNKRVDSAWGAWLFFSFYFKPVLDEKSKSKLTRDSNGLSGYDKSDLQLDSFLVQHDMENMYMWVFKEKPENALGKMQLRSYMNGHSREGERPFPFSVDKGFVRSHRMQRKHYRGLSNPQCLHGIEVVYSPNLSVLSEDEKKKWTELTGRDVNFAIPAEASDYGSWRNLPNTEFEAERPLPLAKANGHTHLKKLNGTCLNLSTHSPDHAVDTVEVQLAGSNKRKGIVLL

SEQ ID NO: 41061 - protein, 321 aa, Arabidopsis thaliana
  peptide (1)..(321): Ceres Seq. ID no. 12330642
  misc_feature (34)..(318): Homolog of NCBI NO: 34908142 NR Description: putative SLT1 protein (ion homeostasis related
  misc_feature (63)..(316): Homolog of NCBI NO: 34895866 NR Description: P0009G03.13 [Oryza sativa (japonica
  misc_feature (11)..(297): Homolog of NCBI NO: 11280862 NR Description: hypothetical protein T22P11.70 - Arabidopsis
  misc_feature (1)..(297): Homolog of NCBI NO: 18413934 NR Description: putative protein
  misc_feature (1)..(316): Homolog of NCBI NO: 11611667 NR Description: SLT1 protein [Nicotiana tabacum]
  misc_feature (11)..(318): Homolog of NCBI NO: 18404463 NR Description: expressed protein
  misc_feature (1)..(316): Homolog of NCBI NO: 18399669 NR Description: expressed protein
MGETLITTLSMENYHPSTLLSMDSGAFTHEESERAMNGSLILTGPPDINLPLSSEARPSLLLWNEHCDILDVGLGPQLYEPEAVVHVPKVAKKYNKRVDSAWGAWLFFSFYFKPVLDEKSKSKLTRDSNGLSGYDKSDLQLDSFLVQHDMENMYMWVFKEKPENALGKMQLRSYMNGHSREGERPFPFSVDKGFVRSHRMQRKHYRGLSNPQCLHGIEVVYSPNLSVLSEDEKKKWTELTGRDVNFAIPAEASDYGSWRNLPNTEFEAERPLPLAKANGHTHLKKLNGTCLNLSTHSPDHAVDTVEVQLAGSNKRKGIVLL

SEQ ID NO: 41062 - protein, 311 aa, Arabidopsis thaliana
  peptide (1)..(311): Ceres Seq. ID no. 12330643
  misc_feature (24)..(308): Homolog of NCBI NO: 34908142 NR Description: putative SLT1 protein (ion homeostasis related
  misc_feature (53)..(306): Homolog of NCBI NO: 34895866 NR Description: P0009G03.13 [Oryza sativa (japonica
  misc_feature (1)..(287): Homolog of NCBI NO: 11280862 NR Description: hypothetical protein T22P11.70 - Arabidopsis
  misc_feature (1)..(287): Homolog of NCBI NO: 18413934 NR Description: putative protein
  misc_feature (1)..(306): Homolog of NCBI NO: 11611667 NR Description: SLT1 protein [Nicotiana tabacum]
  misc_feature (1)..(308): Homolog of NCBI NO: 18404463 NR Description: expressed protein
  misc_feature (1)..(306): Homolog of NCBI NO: 18399669 NR Description: expressed protein
MENYHPSTLLSMDSGAFTHEESERAMNGSLILTGPPDINLPLSSEARPSLLLWNEHCDILDVGLGPQLYEPEAVVHVPKVAKKYNKRVDSAWGAWLFFSFYFKPVLDEKSKSKLTRDSNGLSGYDKSDLQLDSFLVQHDMENMYMWVFKEKPENALGKMQLRSYMNGHSREGERPFPFSVDKGFVRSHRMQRKHYRGLSNPQCLHGIEVVYSPNLSVLSEDEKKKWTELTGRDVNFAIPAEASDYGSWRNLPNTEFEAERPLPLAKANGHTHLKKLNGTCLNLSTHSPDHAVDTVEVQLAGSNKRKGIVLL

SEQ ID NO: 41063 - DNA, 1280 bp, Arabidopsis thaliana
  misc_feature (1)..(1280): Ceres Seq. ID no. 12329398
  misc_feature: MA Experiment ID: 108462 Result: Up-regulated in Transcription
  misc_feature: MA Experiment 108462 PARAMETER Experiment Name: At_Germinating_Seeds_cDNA_P Parameter: Age (day) Value: 2 vs. 0
  misc_feature: MA Experiment 108462 PARAMETER Experiment Name: At_Germinating_Seeds_cDNA_P Parameter: Tissue Value: Germinating Seeds
  misc_feature: MA Experiment ID: 108576 Result: Up-regulated in Transcription
  misc_feature: MA Experiment 108576 PARAMETER Experiment Name: At_42deg_Heat_cDNA_P Parameter: Temperature (deg C) Value: 42 vs. 22
  misc_feature: MA Experiment 108576 PARAMETER Experiment Name: At_42deg_Heat_cDNA_P Parameter: Timepoint (hr) Value: 1
  misc_feature: MA Experiment 108576 PARAMETER Experiment Name: At_42deg_Heat_cDNA_P Parameter: Tissue Value: Aerial
  misc_feature: MA Experiment ID: 20000265 Result: Up-regulated in Transcription
  misc_feature: MA Experiment 20000265 PARAMETER Experiment Name: At_Open_Flower_P Parameter: Age (day) Value: 21
  misc_feature: MA Experiment 20000265 PARAMETER Experiment Name: At_Open_Flower_P Parameter: Plant Line Value: WS
  misc_feature: MA Experiment 20000265 PARAMETER Experiment Name: At_Open_Flower_P Parameter: Tissue Value: Closed Flower vs. Whole Plant
  misc_feature: MA Experiment ID: 20000286 Result: Up-regulated in Transcription
  misc_feature: MA Experiment 20000286 PARAMETER Experiment Name: At_Open_Flower_P Parameter: Age (day) Value: 21
  misc_feature: MA Experiment 20000286 PARAMETER Experiment Name: At_Open_Flower_P Parameter: Plant Line Value: WS
  misc_feature: MA Experiment 20000286 PARAMETER Experiment Name: At_Open_Flower_P Parameter: Tissue Value: Half Open vs. Whole Plant
gaaagagataaagatagtaaccaagcatgaaaagtttgttgatttgtcttgtgttgttagagcttgtctggttaggcaatggccaatctagagatcatcaacctcttgctccagctttctttgtctttggagattctttagttgatagtggaaacaacaattacattccaactcttgcacgagctaattatttcccttatggaattgattttggcttccccactggtcgtttctgcaatggccgtaccgttgttgattatggagcaacgtacctcggcttgccattggtgccaccatacttatctcctttatccattgggcaaaatgccttacgaggggttaactacgcatctgcagcagctgggattttagatgaaaccggtcgacattatggagcaagaactacatttaatggacagatatcgcagtttgagattacgatcgagttacgcctccggcgtttctttcaaaaccctgcagatctgagaaagtatcttgcaaaatcgataattgggatcaatataggaagcaatgactatatcaacaactaccttatgcctgagagatactccaccagccaaacctacagtggagaagattatgcagatctcttgatcaagactctctcagctcaaatatccagactatacaacttaggtgcaagaaaaatggtgttagctgggtcaggaccattaggttgcatacctagtcagctatctatggtaactggcaacaacaccagcgggtgtgtgacaaaaatcaacaatatggtttcaatgttcaatagccgtctgaaagatctagcaaatactctcaacacaactctgccaggatctttctttgtctatcaaaacgtctttgatctatttcatgatatggttgtgaatccttctagatatggtcttgtagtatcaaacgaagcgtgctgcggtaacgggagatatggaggagccttaacatgccttccattgcagcaaccttgcttggataggaatcaatatgtcttttgggatgcatttcatccaacagaaactgccaacaaaataatagctcacaataccttcagcaagtctgcaaactactcctaccctatcagtgtctatgaattagctaaattgtagagaaatgtatctcaaagctagattacctccccatttcaagagtctcctcggttttctagtttctagttagaagacattaagtatgggatttgtatgtaccaattgcccaaatgtttaagatcacatctatattccaatgttataacttaaaactttctc

SEQ ID NO: 41064 - protein, 364 aa, Arabidopsis thaliana
  peptide (1)..(364): Ceres Seq. ID no. 12329399
  misc_feature (31)..(345): Pfam Name: GDSL-like Lipase/Acylhydrolase Pfam Description: GDSL-like Lipase/Acylhydrolase
  misc_feature (27)..(364): Homolog of NCBI NO: 18409881 NR Description: hypothetical protein; protein id: At1g71691.1
  misc_feature (6)..(364): Homolog of NCBI NO: 18398991 NR Description: unknown protein
  misc_feature (26)..(364): Homolog of NCBI NO: 18415211 NR Description: Expressed protein
  misc_feature (26)..(364): Homolog of NCBI NO: 7485419 NR Description: hypothetical protein F13C5.140 - Arabidopsis
  misc_feature (7)..(364): Homolog of NCBI NO: 15220512 NR Description: lipase/hydrolase, putative
  misc_feature (7)..(364): Homolog of NCBI NO: 21594055 NR Description: lipase/hydrolase, putative [Arabidopsis thaliana]
  misc_feature (1)..(364): Homolog of NCBI NO: 21592417 NR Description: lipase/hydrolase, putative [Arabidopsis thaliana]
  misc_feature (1)..(364): Homolog of NCBI NO: 15220514 NR Description: lipase/hydrolase, putative
  misc_feature (1)..(364): Homolog of NCBI NO: 11280578 NR Description: hypothetical protein F14F8_100 - Arabidopsis
  misc_feature (1)..(364): Homolog of NCBI NO: 18417760 NR Description: putative protein
MKSLLICLVLLELVWLGNGQSRDHQPLAPAFFVFGDSLVDSGNNNYIPTLARANYFPYGIDFGFPTGRFCNGRTVVDYGATYLGLPLVPPYLSPLSIGQNALRGVNYASAAAGILDETGRHYGARTTFNGQISQFEITIELRLRRFFQNPADLRKYLAKSIIGINIGSNDYINNYLMPERYSTSQTYSGEDYADLLIKTLSAQISRLYNLGARKMVLAGSGPLGCIPSQLSMVTGNNTSGCVTKINNMVSMFNSRLKDLANTLNTTLPGSFFVYQNVFDLFHDMVVNPSRYGLVVSNEACCGNGRYGGALTCLPLQQPCLDRNQYVFWDAFHPTETANKIIAHNTFSKSANYSYPISVYELAKL

SEQ ID NO: 41065 - protein, 188 aa, Arabidopsis thaliana
  peptide (1)..(188): Ceres Seq. ID no. 12329400
  misc_feature (1)..(169): Pfam Name: GDSL-like Lipase/Acylhydrolase Pfam Description: GDSL-like Lipase/Acylhydrolase
  misc_feature (1)..(188): Homolog of NCBI NO: 18409881 NR Description: hypothetical protein; protein id: At1g71691.1
  misc_feature (1)..(188): Homolog of NCBI NO: 18398991 NR Description: unknown protein
  misc_feature (1)..(188): Homolog of NCBI NO: 18415211 NR Description: Expressed protein
  misc_feature (1)..(188): Homolog of NCBI NO: 7485419 NR Description: hypothetical protein F13C5.140 - Arabidopsis
  misc_feature (1)..(188): Homolog of NCBI NO: 15220512 NR Description: lipase/hydrolase, putative
  misc_feature (1)..(188): Homolog of NCBI NO: 21594055 NR Description: lipase/hydrolase, putative [Arabidopsis thaliana]
  misc_feature (1)..(188): Homolog of NCBI NO: 21592417 NR Description: lipase/hydrolase, putative [Arabidopsis thaliana]
  misc_feature (1)..(188): Homolog of NCBI NO: 15220514 NR Description: lipase/hydrolase, putative
  misc_feature (1)..(188): Homolog of NCBI NO: 11280578 NR Description: hypothetical protein F14F8_100 - Arabidopsis
  misc_feature (1)..(188): Homolog of NCBI NO: 18417760 NR Description: putative protein
MPERYSTSQTYSGEDYADLLIKTLSAQISRLYNLGARKMVLAGSGPLGCIPSQLSMVTGNNTSGCVTKINNMVSMFNSRLKDLANTLNTTLPGSFFVYQNVFDLFHDMVVNPSRYGLVVSNEACCGNGRYGGALTCLPLQQPCLDRNQYVFWDAFHPTETANKIIAHNTFSKSANYSYPISVYELAKL

SEQ ID NO: 41066 - DNA, 777 bp, Arabidopsis thaliana
  misc_feature (1)..(777): Ceres Seq. ID no. 12396300
  misc_feature: MA Experiment ID: 108434 Result: Up-regulated in Transcription
  misc_feature: MA Experiment 108434 PARAMETER Experiment Name: At_Root_Tips_cDNA_P Parameter: Tissue Value: Root Tips
  misc_feature: MA Experiment ID: 108462 Result: Down-regulated in Transcription
  misc_feature: MA Experiment 108462 PARAMETER Experiment Name: At_Germinating_Seeds_cDNA_P Parameter: Age (day) Value: 2 vs. 0
  misc_feature: MA Experiment 108462 PARAMETER Experiment Name: At_Germinating_Seeds_cDNA_P Parameter: Tissue Value: Germinating Seeds
  misc_feature: MA Experiment ID: 108463 Result: Down-regulated in Transcription
  misc_feature: MA Experiment 108463 PARAMETER Experiment Name: At_Germinating_Seeds_cDNA_P Parameter: Age (day) Value: 3 vs. 0
  misc_feature: MA Experiment 108463 PARAMETER Experiment Name: At_Germinating_Seeds_cDNA_P Parameter: Tissue Value: Germinating Seeds
  misc_feature: MA Experiment ID: 108464 Result: Down-regulated in Transcription
  misc_feature: MA Experiment 108464 PARAMETER Experiment Name: At_Germinating_Seeds_cDNA_P Parameter: Age (day) Value: 4 vs. 0
  misc_feature: MA Experiment 108464 PARAMETER Experiment Name: At_Germinating_Seeds_cDNA_P Parameter: Tissue Value: Germinating Seeds
  misc_feature: MA Experiment ID: 108577 Result: Up-regulated in Transcription
  misc_feature: MA Experiment 108577 PARAMETER Experiment Name: At_42deg_Heat_cDNA_P Parameter: Temperature (deg C) Value: 42 vs. 22
  misc_feature: MA Experiment 108577 PARAMETER Experiment Name: At_42deg_Heat_cDNA_P Parameter: Timepoint (hr) Value: 6
  misc_feature: MA Experiment 108577 PARAMETER Experiment Name: At_42deg_Heat_cDNA_P Parameter: Tissue Value: Aerial
  misc_feature: MA Experiment ID: 20000111 Result: Up-regulated in Transcription
  misc_feature: MA Experiment 20000111 PARAMETER Experiment Name: At_42deg_Heat_cDNA_P Parameter: Temperature (deg C) Value: 42 vs. 22
  misc_feature: MA Experiment 20000111 PARAMETER Experiment Name: At_42deg_Heat_cDNA_P Parameter: Timepoint (hr) Value: 6
  misc_feature: MA Experiment 20000111 PARAMETER Experiment Name: At_42deg_Heat_cDNA_P Parameter: Tissue Value: Aerial
  misc_feature: MA Experiment ID: 20000113 Result: Up-regulated in Transcription
  misc_feature: MA Experiment 20000113 PARAMETER Experiment Name: At_42deg_Heat_cDNA_P Parameter: Temperature (deg C) Value: 42 vs. 22
  misc_feature: MA Experiment 20000113 PARAMETER Experiment Name: At_42deg_Heat_cDNA_P Parameter: Timepoint (hr) Value: 8
  misc_feature: MA Experiment 20000113 PARAMETER Experiment Name: At_42deg_Heat_cDNA_P Parameter: Tissue Value: Aerial
  misc_feature: MA Experiment ID: 20000224 Result: Down-regulated in Transcription
  misc_feature: Phenotype: WHOLE PLANT Color-Dark Green
  misc_feature: Phenotype: ROSETTE LEAVES Shape-Oval
  misc_feature: Phenotype: WHOLE PLANT Color-Dark Green
  misc_feature: Phenotype: INFLORESCENCE Height-Short
  misc_feature: Phenotype: INFLORESCENCE Internode Length-Short Internode
  misc_feature: Phenotype: WHOLE PLANT Color-Dark Green
  misc_feature: Phenotype: ROSETTE LEAVES Shape-Oval
ctctctcttaggttttttttcccttctcccaatctcatcttctccgaaaacctttcttctctcaaatttctgtgaaaacatgtctgacgacgagcaccactttgaggccagcgaatccggagcttccaagacctatcctcaatcagccggtaacatccgtaaaggtggtcacatcgtcatcaaaaaccgtccctgcaaggttgttgaggtttcgacttccaaaactggcaagcacggtcacgccaaatgtcactttgttgctattgatatcttcactgctaagaagcttgaagatattgttccatcttcccacaattgtgatgttccacatgtgaaccgtgttgattaccagttgattgatatcactgaggatggcttcgtgagccttctcactgacagtggtggcaccaaggatgatctcaagcttcccaccgatgatggtctcaccgcccagttgttgtgttttgttaatgcacatgaggcttggattcgatgagggaaaggatattgtggtgtctgtcatgtcttccatgggagaggagcagatctgtgccgtcaaggaagttggtggtggcaagtaaacaagtatcattcgatatattattaccagtttgacaacggacgtcaatgttataagaaccaaaagatgtttttctttttcctaatttagaccctttgtgtgtgtttcttgttgcaagacaaccatatctattggttttggattgttggaaaagtttgtgttgaaacattcaaagtttcttatgagatgttattctc

SEQ ID NO: 41067 - protein, 164 aa, Arabidopsis thaliana
  peptide (1)..(164): Ceres Seq. ID no. 12396301
  misc_feature (52)..(88): Pfam Name: KOW motif Pfam Description: KOW motif
  misc_feature (27)..(152): Homolog of NCBI NO: 20138664 NR Description: Eukaryotic translation initiation factor 5A-2
  misc_feature (27)..(152): Homolog of NCBI NO: 3024022 NR Description: Eukaryotic translation initiation factor 5A-5
  misc_feature (27)..(152): Homolog of NCBI NO: 15223002 NR Description: initiation factor 5A-4
  misc_feature (27)..(152): Homolog of NCBI NO: 20138708 NR Description: Eukaryotic translation initiation factor 5A-1
  misc_feature (27)..(152): Homolog of NCBI NO: 20138709 NR Description: Eukaryotic translation initiation factor 5A
  misc_feature (27)..(152): Homolog of NCBI NO: 13937159 NR Description: At1g69410/F10D13.8 [Arabidopsis thaliana]
  misc_feature (27)..(152): Homolog of NCBI NO: 15222317 NR Description: Eukaryotic initiation  factor 5A , putative
  misc_feature (27)..(150): Homolog of NCBI NO: 40805177 NR Description: eukaryotic translation initiation factor-5A
  misc_feature (27)..(152): Homolog of NCBI NO: 15222741 NR Description: initiation factor 5A-4, putative
  misc_feature (27)..(152): Homolog of NCBI NO: 9295717 NR Description: T24P13.1 [Arabidopsis thaliana]
SLLGFFSLLPISSSPKTFLLSNFCENMSDDEHHFEASESGASKTYPQSAGNIRKGGHIVIKNRPCKVVEVSTSKTGKHGHAKCHFVAIDIFTAKKLEDIVPSSHNCDVPHVNRVDYQLIDITEDGFVSLLTDSGGTKDDLKLPTDDGLTAQLLCFVNAHEAWIR

SEQ ID NO: 41068 - protein, 138 aa, Arabidopsis thaliana
  peptide (1)..(138): Ceres Seq. ID no. 12396302
  misc_feature (26)..(62): Pfam Name: KOW motif Pfam Description: KOW motif
  misc_feature (1)..(126): Homolog of NCBI NO: 20138664 NR Description: Eukaryotic translation initiation factor 5A-2
  misc_feature (1)..(126): Homolog of NCBI NO: 3024022 NR Description: Eukaryotic translation initiation factor 5A-5
  misc_feature (1)..(126): Homolog of NCBI NO: 15223002 NR Description: initiation factor 5A-4
  misc_feature (1)..(126): Homolog of NCBI NO: 20138708 NR Description: Eukaryotic translation initiation factor 5A-1
  misc_feature (1)..(126): Homolog of NCBI NO: 20138709 NR Description: Eukaryotic translation initiation factor 5A
  misc_feature (1)..(126): Homolog of NCBI NO: 13937159 NR Description: At1g69410/F10D13.8 [Arabidopsis thaliana]
  misc_feature (1)..(126): Homolog of NCBI NO: 15222317 NR Description: Eukaryotic initiation  factor 5A , putative
  misc_feature (1)..(124): Homolog of NCBI NO: 40805177 NR Description: eukaryotic translation initiation factor-5A
  misc_feature (1)..(126): Homolog of NCBI NO: 15222741 NR Description: initiation factor 5A-4, putative
  misc_feature (1)..(126): Homolog of NCBI NO: 9295717 NR Description: T24P13.1 [Arabidopsis thaliana]
MSDDEHHFEASESGASKTYPQSAGNIRKGGHIVIKNRPCKVVEVSTSKTGKHGHAKCHFVAIDIFTAKKLEDIVPSSHNCDVPHVNRVDYQLIDITEDGFVSLLTDSGGTKDDLKLPTDDGLTAQLLCFVNAHEAWIR

SEQ ID NO: 41069 - DNA, 883 bp, Arabidopsis thaliana
  misc_feature (1)..(883): Ceres Seq. ID no. 12371464
  misc_feature: MA Experiment ID: 108434 Result: Down-regulated in Transcription
  misc_feature: MA Experiment 108434 PARAMETER Experiment Name: At_Root_Tips_cDNA_P Parameter: Tissue Value: Root Tips
  misc_feature: MA Experiment ID: 108464 Result: Up-regulated in Transcription
  misc_feature: MA Experiment 108464 PARAMETER Experiment Name: At_Germinating_Seeds_cDNA_P Parameter: Age (day) Value: 4 vs. 0
  misc_feature: MA Experiment 108464 PARAMETER Experiment Name: At_Germinating_Seeds_cDNA_P Parameter: Tissue Value: Germinating Seeds
  misc_feature: MA Experiment ID: 20000264 Result: Down-regulated in Transcription
  misc_feature: MA Experiment 20000264 PARAMETER Experiment Name: At_Open_Flower_P Parameter: Age (day) Value: 21
  misc_feature: MA Experiment 20000264 PARAMETER Experiment Name: At_Open_Flower_P Parameter: Plant Line Value: WS
  misc_feature: MA Experiment 20000264 PARAMETER Experiment Name: At_Open_Flower_P Parameter: Tissue Value: Open Flower vs. Whole Plant
  misc_feature: MA Experiment ID: 20000265 Result: Down-regulated in Transcription
  misc_feature: MA Experiment 20000265 PARAMETER Experiment Name: At_Open_Flower_P Parameter: Age (day) Value: 21
  misc_feature: MA Experiment 20000265 PARAMETER Experiment Name: At_Open_Flower_P Parameter: Plant Line Value: WS
  misc_feature: MA Experiment 20000265 PARAMETER Experiment Name: At_Open_Flower_P Parameter: Tissue Value: Closed Flower vs. Whole Plant
  misc_feature: MA Experiment ID: 20000286 Result: Down-regulated in Transcription
  misc_feature: MA Experiment 20000286 PARAMETER Experiment Name: At_Open_Flower_P Parameter: Age (day) Value: 21
  misc_feature: MA Experiment 20000286 PARAMETER Experiment Name: At_Open_Flower_P Parameter: Plant Line Value: WS
  misc_feature: MA Experiment 20000286 PARAMETER Experiment Name: At_Open_Flower_P Parameter: Tissue Value: Half Open vs. Whole Plant
  misc_feature: MA Experiment ID: 20000438 Result: Down-regulated in Transcription
  misc_feature: MA Experiment 20000438 PARAMETER Experiment Name: At_Shoots__P Parameter: Age (day) Value: 14
  misc_feature: MA Experiment 20000438 PARAMETER Experiment Name: At_Shoots__P Parameter: Tissue Value: Shoots vs. Whole Plant
  misc_feature: MA Experiment ID: 20000794 Result: Down-regulated in Transcription
  misc_feature: MA Experiment 20000794 PARAMETER Experiment Name: At_Petals_P Parameter: Age (day) Value: 23-25 days
  misc_feature: MA Experiment 20000794 PARAMETER Experiment Name: At_Petals_P Parameter: Plant Line Value: WS
  misc_feature: MA Experiment 20000794 PARAMETER Experiment Name: At_Petals_P Parameter: Tissue Value: Petals vs. Whole plant
  misc_feature: MA Experiment ID: 20001556 Result: Down-regulated in Transcription
  misc_feature: MA Experiment 20001556 PARAMETER Experiment Name: At_Drought_Soil_Dry_P Parameter: Age (day) Value: 26
  misc_feature: MA Experiment 20001556 PARAMETER Experiment Name: At_Drought_Soil_Dry_P Parameter: Organism Value: A. thaliana
  misc_feature: MA Experiment 20001556 PARAMETER Experiment Name: At_Drought_Soil_Dry_P Parameter: Plant Line Value: WS
  misc_feature: MA Experiment 20001556 PARAMETER Experiment Name: At_Drought_Soil_Dry_P Parameter: Post Timepoint (hr) Value: None
  misc_feature: MA Experiment 20001556 PARAMETER Experiment Name: At_Drought_Soil_Dry_P Parameter: Post-Treatment Value: None
  misc_feature: MA Experiment 20001556 PARAMETER Experiment Name: At_Drought_Soil_Dry_P Parameter: Timepoint (day) Value: 12
  misc_feature: MA Experiment 20001556 PARAMETER Experiment Name: At_Drought_Soil_Dry_P Parameter: Treatment Value: Drought vs. No Drought
  misc_feature: MA Experiment ID: 20001773 Result: Up-regulated in Transcription
  misc_feature: MA Experiment 20001773 PARAMETER Experiment Name: At_Far-red-enriched-adult_P Parameter: Age (day) Value: 30
  misc_feature: MA Experiment 20001773 PARAMETER Experiment Name: At_Far-red-enriched-adult_P Parameter: Light Value: Far-red enriched vs. White
  misc_feature: MA Experiment 20001773 PARAMETER Experiment Name: At_Far-red-enriched-adult_P Parameter: Organism Value: A. thaliana
  misc_feature: MA Experiment 20001773 PARAMETER Experiment Name: At_Far-red-enriched-adult_P Parameter: Plant Line Value: Columbia
  misc_feature: MA Experiment 20001773 PARAMETER Experiment Name: At_Far-red-enriched-adult_P Parameter: Timepoint (hr) Value: 48
  misc_feature: MA Experiment 20001773 PARAMETER Experiment Name: At_Far-red-enriched-adult_P Parameter: Tissue Value: Aerial
  misc_feature: MA Experiment ID: 20001906 Result: Down-regulated in Transcription
  misc_feature: MA Experiment 20001906 PARAMETER Experiment Name: At_Drought_Reproduction_P Parameter: Age (day) Value: 35
  misc_feature: MA Experiment 20001906 PARAMETER Experiment Name: At_Drought_Reproduction_P Parameter: Organism Value: A. thaliana
  misc_feature: MA Experiment 20001906 PARAMETER Experiment Name: At_Drought_Reproduction_P Parameter: Plant Line Value: WS
  misc_feature: MA Experiment 20001906 PARAMETER Experiment Name: At_Drought_Reproduction_P Parameter: Timepoint (day) Value: 5
  misc_feature: MA Experiment 20001906 PARAMETER Experiment Name: At_Drought_Reproduction_P Parameter: Tissue Value: Siliques
  misc_feature: MA Experiment 20001906 PARAMETER Experiment Name: At_Drought_Reproduction_P Parameter: Treatment Value: Drought vs. No Drought
  misc_feature: MA Experiment ID: 20001911 Result: Down-regulated in Transcription
  misc_feature: MA Experiment 20001911 PARAMETER Experiment Name: At_Drought_Reproduction_P Parameter: Age (day) Value: 40
  misc_feature: MA Experiment 20001911 PARAMETER Experiment Name: At_Drought_Reproduction_P Parameter: Organism Value: A. thaliana
  misc_feature: MA Experiment 20001911 PARAMETER Experiment Name: At_Drought_Reproduction_P Parameter: Plant Line Value: WS
  misc_feature: MA Experiment 20001911 PARAMETER Experiment Name: At_Drought_Reproduction_P Parameter: Timepoint (day) Value: 10
  misc_feature: MA Experiment 20001911 PARAMETER Experiment Name: At_Drought_Reproduction_P Parameter: Tissue Value: Flowers
  misc_feature: MA Experiment 20001911 PARAMETER Experiment Name: At_Drought_Reproduction_P Parameter: Treatment Value: Drought vs. No Drought
aaaacaaaagaggaacttgagaattttatgcttgagacaaaatggcagaagatacgtacgaggaagagtgcgactacttgtttaaggcggtgttgatcggagactcagccgtcggaaaatcaaacctcttgtctagattttctaaagacgagttccggtttgactctaaaccaaccatcggagtagagtttgcttaccggaatgttcacgtcggagataaaatcatcaaggctcagatttgggacaccgccggccaagaaagatttcgagcaatcacaagttcgtactaccgtggagcattaggggcattactgatttacgacatcactagacgaacaactttcgacaacatcaagaaatggcttttcgagcttagagacttcgccaatcccgaaaccgtcgttgtcctcgtcggaaacaaatctgatctccgacaatctagagaagttgaagaagacgagggtaagactctagcagaatcagaaggtctctacttcctcgagacttcggctttagagaatgttaacgtcgaagaagcgtttctagtgatgatcggacggatacatgaggttgttactcagaggatagcttcggaaaacaaatccaacggtgctgcgacgcctcacattaacggtaatgggaacggtacggtccttccggttggtaaagaaattgtgaatatacacgaagtcactgctactcaacccttattaagctcatcttccaactgttgttttaagtaaataattaatgtatttttttcgtttattgttttggaatactttgatgatgtttttatttgcctgtgtattcgtgaaaattttgccttggttgagtacatgaatttaaatcatacaattatatccaaataaatatgaaaatc

SEQ ID NO: 41070 - protein, 233 aa, Arabidopsis thaliana
  peptide (1)..(233): Ceres Seq. ID no. 12371465
  misc_feature (15)..(176): Pfam Name: Ras family Pfam Description: Ras family
  misc_feature (1)..(190): Homolog of NCBI NO: 15234020 NR Description: ras-related GTP binding protein, putative
  misc_feature (7)..(189): Homolog of NCBI NO: 34909538 NR Description: putative GTP-binding protein
  misc_feature (1)..(211): Homolog of NCBI NO: 21536533 NR Description: Rab-type small GTP-binding protein-like
  misc_feature (7)..(191): Homolog of NCBI NO: 13195452 NR Description: GTP-binding protein [Oryza sativa]
  misc_feature (7)..(191): Homolog of NCBI NO: 730512 NR Description: RAS-RELATED PROTEIN RIC2
  misc_feature (1)..(211): Homolog of NCBI NO: 15242483 NR Description: GTP-binding protein, putative
  misc_feature (1)..(231): Homolog of NCBI NO: 1370152 NR Description: RAB11F [Lotus japonicus]
  misc_feature (1)..(211): Homolog of NCBI NO: 15221005 NR Description: small GTP-binding protein (RAB11F), putative
  misc_feature (1)..(211): Homolog of NCBI NO: 9719734 NR Description: Contains similarity to ras-related GTP binding from Oryza sativa gb|D13758 and is a member of the Ras PF|00071
  misc_feature (1)..(233): Homolog of NCBI NO: 15219515 NR Description: putative ras-related GTP-binding protein
MAEDTYEEECDYLFKAVLIGDSAVGKSNLLSRFSKDEFRFDSKPTIGVEFAYRNVHVGDKIIKAQIWDTAGQERFRAITSSYYRGALGALLIYDITRRTTFDNIKKWLFELRDFANPETVVVLVGNKSDLRQSREVEEDEGKTLAESEGLYFLETSALENVNVEEAFLVMIGRIHEVVTQRIASENKSNGAATPHINGNGNGTVLPVGKEIVNIHEVTATQPLLSSSSNCCFK

SEQ ID NO: 41071 - DNA, 1168 bp, Arabidopsis thaliana
  misc_feature (1)..(1168): Ceres Seq. ID no. 13499832
  misc_feature: MA Experiment ID: 108434 Result: Up-regulated in Transcription
  misc_feature: MA Experiment 108434 PARAMETER Experiment Name: At_Root_Tips_cDNA_P Parameter: Tissue Value: Root Tips
  misc_feature: MA Experiment ID: 108462 Result: Down-regulated in Transcription
  misc_feature: MA Experiment 108462 PARAMETER Experiment Name: At_Germinating_Seeds_cDNA_P Parameter: Age (day) Value: 2 vs. 0
  misc_feature: MA Experiment 108462 PARAMETER Experiment Name: At_Germinating_Seeds_cDNA_P Parameter: Tissue Value: Germinating Seeds
  misc_feature: MA Experiment ID: 108463 Result: Down-regulated in Transcription
  misc_feature: MA Experiment 108463 PARAMETER Experiment Name: At_Germinating_Seeds_cDNA_P Parameter: Age (day) Value: 3 vs. 0
  misc_feature: MA Experiment 108463 PARAMETER Experiment Name: At_Germinating_Seeds_cDNA_P Parameter: Tissue Value: Germinating Seeds
  misc_feature: MA Experiment ID: 108464 Result: Down-regulated in Transcription
  misc_feature: MA Experiment 108464 PARAMETER Experiment Name: At_Germinating_Seeds_cDNA_P Parameter: Age (day) Value: 4 vs. 0
  misc_feature: MA Experiment 108464 PARAMETER Experiment Name: At_Germinating_Seeds_cDNA_P Parameter: Tissue Value: Germinating Seeds
  misc_feature: MA Experiment ID: 20000111 Result: Down-regulated in Transcription
  misc_feature: MA Experiment 20000111 PARAMETER Experiment Name: At_42deg_Heat_cDNA_P Parameter: Temperature (deg C) Value: 42 vs. 22
  misc_feature: MA Experiment 20000111 PARAMETER Experiment Name: At_42deg_Heat_cDNA_P Parameter: Timepoint (hr) Value: 6
  misc_feature: MA Experiment 20000111 PARAMETER Experiment Name: At_42deg_Heat_cDNA_P Parameter: Tissue Value: Aerial
  misc_feature: MA Experiment ID: 20000794 Result: Up-regulated in Transcription
  misc_feature: MA Experiment 20000794 PARAMETER Experiment Name: At_Petals_P Parameter: Age (day) Value: 23-25 days
  misc_feature: MA Experiment 20000794 PARAMETER Experiment Name: At_Petals_P Parameter: Plant Line Value: WS
  misc_feature: MA Experiment 20000794 PARAMETER Experiment Name: At_Petals_P Parameter: Tissue Value: Petals vs. Whole plant
aacttgagatttgagaataagaaaagttgaaatttgtaaaagatatgagaaattagtaaattccagaaacttattagaagcggcggatcgaattcgcgacgagcgttccattagggtttcgaatcaacatcaacaaacgacgagagaaaactttttaaaacatgtacggaggcgattttgacggcaacgctgctttcgccggcggcggcttcatgccttctcaggcgactacgcaagcccatgaatcctcatcttccctcaagaaccgcgatgtacgtaccttgcttcccctgacactgaagcagttgagcagcgcatcaaccactggcgaatcaaatttctctattgatggcgttgatattaaaactgttgtaatcgttggacggatttctagaatggagaacagaatcactcaggtcgattttgttgttgatgacggtacaggctgggttgattgtgtcagatggtgtcacgctcggcaagaaactgaagaaatggaagcagtcaagctgggaatgtatgttcgcttacatggacacctgaaaatttttcaagggaaacgatctgtgaatgttttttcagtcaggcctgtcactgacttcaatgagattgtacaccactttaccgagtgtatgtatgtccacatgtacaacaccaagttacggggtggttctattactcaagatactgctactcctaggccccaaatgccatattcaacaatgccaacccctgcaaagccctaccaaaccggtccatctaatcagttcccgaaccaattcaatgattcaatgcatggtgtaaagcagacggtcttgaattacctgaatcaacctatgcacattgtatctgaagctggagttcactgtgatataattgcccgtgaactcaggattccgctgcttcaagtcaaggaagcgttagaacagctctcaaacgatggttgcatatactcgactttggacgagacatgcttcaaatcgactgctaacgcttgatgaaaattgatttatatgtcaacacatatcaatcctcctctcatgttcaaaagtcttttgtataggccctaaggtagaacaatatgtagttttaagactaaaaatctttcttatggcttttggatttttttaaagggaactaaactcaaaagttcaaaatcattttcgcc

SEQ ID NO: 41072 - protein, 278 aa, Arabidopsis thaliana
  peptide (1)..(278): Ceres Seq. ID no. 13499833
  misc_feature (70)..(144): Pfam Name: OB-fold nucleic acid binding domain Pfam Description: OB-fold nucleic acid binding domain
  misc_feature (2)..(274): Homolog of NCBI NO: 2498849 NR Description: Replication factor-A protein 2 (Single-stranded
  misc_feature (1)..(269): Homolog of NCBI NO: 21627816 NR Description: possible replication factor-a protein
  misc_feature (2)..(269): Homolog of NCBI NO: 40747525 NR Description: hypothetical protein AN0582.2 [Aspergillus
  misc_feature (17)..(277): Homolog of NCBI NO: 9801268 NR Description: replication protein A2 [Oryza sativa]
  misc_feature (17)..(277): Homolog of NCBI NO: 13516746 NR Description: replication protein A 30kDa
  misc_feature (6)..(273): Homolog of NCBI NO: 18400560 NR Description: replication protein, putative [Arabidopsis
  misc_feature (196)..(273): Homolog of NCBI NO: 25347925 NR Description: probable replication protein A1 [imported] -
  misc_feature (6)..(166): Homolog of NCBI NO: 25347925 NR Description: probable replication protein A1 [imported] -
  misc_feature (1)..(278): Homolog of NCBI NO: 6728969 NR Description: putative replication factor A [Arabidopsis
  misc_feature (1)..(278): Homolog of NCBI NO: 18396383 NR Description: replication factor - related [Arabidopsis
MYGGDFDGNAAFAGGGFMPSQATTQAHESSSSLKNRDVRTLLPLTLKQLSSASTTGESNFSIDGVDIKTVVIVGRISRMENRITQVDFVVDDGTGWVDCVRWCHARQETEEMEAVKLGMYVRLHGHLKIFQGKRSVNVFSVRPVTDFNEIVHHFTECMYVHMYNTKLRGGSITQDTATPRPQMPYSTMPTPAKPYQTGPSNQFPNQFNDSMHGVKQTVLNYLNQPMHIVSEAGVHCDIIARELRIPLLQVKEALEQLSNDGCIYSTLDETCFKSTANA

SEQ ID NO: 41073 - protein, 261 aa, Arabidopsis thaliana
  peptide (1)..(261): Ceres Seq. ID no. 13499834
  misc_feature (53)..(127): Pfam Name: OB-fold nucleic acid binding domain Pfam Description: OB-fold nucleic acid binding domain
  misc_feature (1)..(257): Homolog of NCBI NO: 2498849 NR Description: Replication factor-A protein 2 (Single-stranded
  misc_feature (1)..(252): Homolog of NCBI NO: 21627816 NR Description: possible replication factor-a protein
  misc_feature (1)..(252): Homolog of NCBI NO: 40747525 NR Description: hypothetical protein AN0582.2 [Aspergillus
  misc_feature (1)..(260): Homolog of NCBI NO: 9801268 NR Description: replication protein A2 [Oryza sativa]
  misc_feature (1)..(260): Homolog of NCBI NO: 13516746 NR Description: replication protein A 30kDa
  misc_feature (1)..(256): Homolog of NCBI NO: 18400560 NR Description: replication protein, putative [Arabidopsis
  misc_feature (179)..(256): Homolog of NCBI NO: 25347925 NR Description: probable replication protein A1 [imported] -
  misc_feature (1)..(149): Homolog of NCBI NO: 25347925 NR Description: probable replication protein A1 [imported] -
  misc_feature (1)..(261): Homolog of NCBI NO: 6728969 NR Description: putative replication factor A [Arabidopsis
  misc_feature (1)..(261): Homolog of NCBI NO: 18396383 NR Description: replication factor - related [Arabidopsis
MPSQATTQAHESSSSLKNRDVRTLLPLTLKQLSSASTTGESNFSIDGVDIKTVVIVGRISRMENRITQVDFVVDDGTGWVDCVRWCHARQETEEMEAVKLGMYVRLHGHLKIFQGKRSVNVFSVRPVTDFNEIVHHFTECMYVHMYNTKLRGGSITQDTATPRPQMPYSTMPTPAKPYQTGPSNQFPNQFNDSMHGVKQTVLNYLNQPMHIVSEAGVHCDIIARELRIPLLQVKEALEQLSNDGCIYSTLDETCFKSTANA

SEQ ID NO: 41074 - protein, 200 aa, Arabidopsis thaliana
  peptide (1)..(200): Ceres Seq. ID no. 13499835
  misc_feature (1)..(66): Pfam Name: OB-fold nucleic acid binding domain Pfam Description: OB-fold nucleic acid binding domain
  misc_feature (1)..(196): Homolog of NCBI NO: 2498849 NR Description: Replication factor-A protein 2 (Single-stranded
  misc_feature (1)..(191): Homolog of NCBI NO: 21627816 NR Description: possible replication factor-a protein
  misc_feature (1)..(191): Homolog of NCBI NO: 40747525 NR Description: hypothetical protein AN0582.2 [Aspergillus
  misc_feature (1)..(199): Homolog of NCBI NO: 9801268 NR Description: replication protein A2 [Oryza sativa]
  misc_feature (1)..(199): Homolog of NCBI NO: 13516746 NR Description: replication protein A 30kDa
  misc_feature (1)..(195): Homolog of NCBI NO: 18400560 NR Description: replication protein, putative [Arabidopsis
  misc_feature (118)..(195): Homolog of NCBI NO: 25347925 NR Description: probable replication protein A1 [imported] -
  misc_feature (1)..(88): Homolog of NCBI NO: 25347925 NR Description: probable replication protein A1 [imported] -
  misc_feature (1)..(200): Homolog of NCBI NO: 6728969 NR Description: putative replication factor A [Arabidopsis
  misc_feature (1)..(200): Homolog of NCBI NO: 18396383 NR Description: replication factor - related [Arabidopsis
MENRITQVDFVVDDGTGWVDCVRWCHARQETEEMEAVKLGMYVRLHGHLKIFQGKRSVNVFSVRPVTDFNEIVHHFTECMYVHMYNTKLRGGSITQDTATPRPQMPYSTMPTPAKPYQTGPSNQFPNQFNDSMHGVKQTVLNYLNQPMHIVSEAGVHCDIIARELRIPLLQVKEALEQLSNDGCIYSTLDETCFKSTANA

SEQ ID NO: 41075 - DNA, 1276 bp, Arabidopsis thaliana
  misc_feature (1)..(1276): Ceres Seq. ID no. 12482073
  misc_feature: MA Experiment ID: 108572 Result: Up-regulated in Transcription
  misc_feature: MA Experiment 108572 PARAMETER Experiment Name: At_Drought_cDNA_P Parameter: Timepoint (hr) Value: 1
  misc_feature: MA Experiment 108572 PARAMETER Experiment Name: At_Drought_cDNA_P Parameter: Tissue Value: Aerial
  misc_feature: MA Experiment 108572 PARAMETER Experiment Name: At_Drought_cDNA_P Parameter: Treatment Value: Drought vs. No Drought
  misc_feature: MA Experiment ID: 108573 Result: Up-regulated in Transcription
  misc_feature: MA Experiment 108573 PARAMETER Experiment Name: At_Drought_cDNA_P Parameter: Timepoint (hr) Value: 6
  misc_feature: MA Experiment 108573 PARAMETER Experiment Name: At_Drought_cDNA_P Parameter: Tissue Value: Aerial
  misc_feature: MA Experiment 108573 PARAMETER Experiment Name: At_Drought_cDNA_P Parameter: Treatment Value: Drought vs. No Drought
  misc_feature: MA Experiment ID: 108579 Result: Down-regulated in Transcription
  misc_feature: MA Experiment 108579 PARAMETER Experiment Name: At_4deg_Cold_cDNA_P Parameter: Temperature (deg C) Value: 4 vs. 22
  misc_feature: MA Experiment 108579 PARAMETER Experiment Name: At_4deg_Cold_cDNA_P Parameter: Timepoint (hr) Value: 6
  misc_feature: MA Experiment 108579 PARAMETER Experiment Name: At_4deg_Cold_cDNA_P Parameter: Tissue Value: Aerial
  misc_feature: MA Experiment ID: 108595 Result: Down-regulated in Transcription
  misc_feature: MA Experiment 108595 PARAMETER Experiment Name: At_Ler-pi_Ovule_cDNA_P Parameter: Plant Line Value: null
  misc_feature: MA Experiment ID: 20000072 Result: Up-regulated in Transcription
  misc_feature: MA Experiment 20000072 PARAMETER Experiment Name: At_100uM_ABA_Mutants_cDNA_P Parameter: Plant Line Value: CS8105
  misc_feature: MA Experiment 20000072 PARAMETER Experiment Name: At_100uM_ABA_Mutants_cDNA_P Parameter: Timepoint (hr) Value: 6
  misc_feature: MA Experiment 20000072 PARAMETER Experiment Name: At_100uM_ABA_Mutants_cDNA_P Parameter: Tissue Value: Aerial
  misc_feature: MA Experiment 20000072 PARAMETER Experiment Name: At_100uM_ABA_Mutants_cDNA_P Parameter: Treatment Value: 100uM ABA vs. No Treatment
  misc_feature: MA Experiment ID: 20000437 Result: Up-regulated in Transcription
  misc_feature: MA Experiment 20000437 PARAMETER Experiment Name: At_Drought_P Parameter: Age (day) Value: 8
  misc_feature: MA Experiment 20000437 PARAMETER Experiment Name: At_Drought_P Parameter: Organism Value: A. thaliana
  misc_feature: MA Experiment 20000437 PARAMETER Experiment Name: At_Drought_P Parameter: Plant Line Value: WS
  misc_feature: MA Experiment 20000437 PARAMETER Experiment Name: At_Drought_P Parameter: Timepoint (hr) Value: 24
  misc_feature: MA Experiment 20000437 PARAMETER Experiment Name: At_Drought_P Parameter: Tissue Value: Whole Plant
  misc_feature: MA Experiment 20000437 PARAMETER Experiment Name: At_Drought_P Parameter: Treatment Value: Drought vs. No Drought
  misc_feature: MA Experiment ID: 20001248 Result: Up-regulated in Transcription
  misc_feature: MA Experiment 20001248 PARAMETER Experiment Name: At_Far-red-induction_P Parameter: Age (day) Value: 7
  misc_feature: MA Experiment 20001248 PARAMETER Experiment Name: At_Far-red-induction_P Parameter: Light Value: Far-red vs. White
  misc_feature: MA Experiment 20001248 PARAMETER Experiment Name: At_Far-red-induction_P Parameter: Organism Value: A. thaliana
  misc_feature: MA Experiment 20001248 PARAMETER Experiment Name: At_Far-red-induction_P Parameter: Plant Line Value: Columbia
  misc_feature: MA Experiment 20001248 PARAMETER Experiment Name: At_Far-red-induction_P Parameter: Timepoint (hr) Value: 4
  misc_feature: MA Experiment 20001248 PARAMETER Experiment Name: At_Far-red-induction_P Parameter: Tissue Value: Whole Plant
  misc_feature: MA Experiment ID: 20001450 Result: Up-regulated in Transcription
  misc_feature: MA Experiment 20001450 PARAMETER Experiment Name: At_Far-red-induction_P Parameter: Age (day) Value: 7
  misc_feature: MA Experiment 20001450 PARAMETER Experiment Name: At_Far-red-induction_P Parameter: Light Value: Far-red vs. White
  misc_feature: MA Experiment 20001450 PARAMETER Experiment Name: At_Far-red-induction_P Parameter: Organism Value: A. thaliana
  misc_feature: MA Experiment 20001450 PARAMETER Experiment Name: At_Far-red-induction_P Parameter: Plant Line Value: Columbia
  misc_feature: MA Experiment 20001450 PARAMETER Experiment Name: At_Far-red-induction_P Parameter: Timepoint (hr) Value: 8
  misc_feature: MA Experiment 20001450 PARAMETER Experiment Name: At_Far-red-induction_P Parameter: Tissue Value: Whole Plant
agtaattagaaaactcatcgtcctcattgagctgcagatcccataatctctctcgccaatcatctcccttgcatcttaatcaaaggtgtattatatccgcaacaagatcattagagaaggctgttacaagtttgttttatgaccgcgtaacagctcacttaataattgatgtggcctctttgttttctgcttaacaagctattaagagttgaggagaggaatcaggggatattagacggaaatggagattcgacttttccgaaatactgcctattcgatgatcccttggtgagtgatggaaagtacagagatgcagggttgccatcctcgtcccacatggatgtccctcatgtacatcagttagcttcatgggattgcggtctcgcttgtgttcttatggttctcagagcaagtggcatcgcaagctgcactcttgaggatttggctgagatatgctccacaaatagcatttggactgtcgatctcgcatatttactgcagaagttctgtgtggaattttcatattacacgataacatttggagcaaacccgaattattccatagaggaattttacaaggagcagctccctgaagatctggtgcgtgtcgatttgctcttcaggaaagcacatgaatctggcattattatacagtgcagatcagttagtatccatgagatttcttgtttgctattgtcggggaactatattgccattgcgttagtcgaccaggacaagctaagcaagtcttggttggaggaagtgcttgtctctggtcttcactccagcaattcttgttacactggtcactatgtcgtgatatgtggctatgatgctgttagggatgagttcgagatcagagatcccgccagttccaagatacatgagaggatctcgtcaaaatgcctggagaatgcccggaaatcgtttggcacagacgaagatcttctcctgataaacttggagaatatgaggaaccagaacggatattagaatagttgtcatcatcatcatcaaatcagttctggatgagaatgaaacctgagtgttttctcccagaagaacatgaggtgaaaagtatacgtctctatacatacgtctttacatatggatgctgccaaagaagaaggaaaagatatacatatgtcatgaaatatctcagtatctgtttgcgtttatgagattcttgtgttggcagttataattccttgttgtacaaattggtgaatagaaaagatttgattgattaaagtgttcgagcaataagagtgattcc

SEQ ID NO: 41076 - protein, 274 aa, Arabidopsis thaliana
  peptide (1)..(274): Ceres Seq. ID no. 12482074
  misc_feature (57)..(267): Homolog of NCBI NO: 33877361 NR Description: Unknown (protein for IMAGE:3956179) [Homo sapiens]
  misc_feature (57)..(267): Homolog of NCBI NO: 27695043 NR Description: Unknown (protein for IMAGE:5042988) [Mus musculus]
  misc_feature (57)..(267): Homolog of NCBI NO: 26329995 NR Description: unnamed protein product [Mus musculus]
  misc_feature (57)..(267): Homolog of NCBI NO: 16549275 NR Description: unnamed protein product [Homo sapiens]
  misc_feature (50)..(263): Homolog of NCBI NO: 23397433 NR Description: CG13760-PB [Drosophila melanogaster]
  misc_feature (21)..(274): Homolog of NCBI NO: 10177566 NR Description: gene_id:K18J17.8~unknown protein [Arabidopsis
  misc_feature (1)..(237): Homolog of NCBI NO: 10177566 NR Description: gene_id:K18J17.8~unknown protein [Arabidopsis
  misc_feature (1)..(274): Homolog of NCBI NO: 21537032 NR Description: unknown [Arabidopsis thaliana]
  misc_feature (1)..(274): Homolog of NCBI NO: 18415044 NR Description: expressed protein
MWPLCFLLNKLLRVEERNQGILDGNGDSTFPKYCLFDDPLVSDGKYRDAGLPSSSHMDVPHVHQLASWDCGLACVLMVLRASGIASCTLEDLAEICSTNSIWTVDLAYLLQKFCVEFSYYTITFGANPNYSIEEFYKEQLPEDLVRVDLLFRKAHESGIIIQCRSVSIHEISCLLLSGNYIAIALVDQDKLSKSWLEEVLVSGLHSSNSCYTGHYVVICGYDAVRDEFEIRDPASSKIHERISSKCLENARKSFGTDEDLLLINLENMRNQNGY

SEQ ID NO: 41077 - protein, 218 aa, Arabidopsis thaliana
  peptide (1)..(218): Ceres Seq. ID no. 12482075
  misc_feature (1)..(211): Homolog of NCBI NO: 33877361 NR Description: Unknown (protein for IMAGE:3956179) [Homo sapiens]
  misc_feature (1)..(211): Homolog of NCBI NO: 27695043 NR Description: Unknown (protein for IMAGE:5042988) [Mus musculus]
  misc_feature (1)..(211): Homolog of NCBI NO: 26329995 NR Description: unnamed protein product [Mus musculus]
  misc_feature (1)..(211): Homolog of NCBI NO: 16549275 NR Description: unnamed protein product [Homo sapiens]
  misc_feature (1)..(207): Homolog of NCBI NO: 23397433 NR Description: CG13760-PB [Drosophila melanogaster]
  misc_feature (1)..(218): Homolog of NCBI NO: 10177566 NR Description: gene_id:K18J17.8~unknown protein [Arabidopsis
  misc_feature (1)..(181): Homolog of NCBI NO: 10177566 NR Description: gene_id:K18J17.8~unknown protein [Arabidopsis
  misc_feature (1)..(218): Homolog of NCBI NO: 21537032 NR Description: unknown [Arabidopsis thaliana]
  misc_feature (1)..(218): Homolog of NCBI NO: 18415044 NR Description: expressed protein
MDVPHVHQLASWDCGLACVLMVLRASGIASCTLEDLAEICSTNSIWTVDLAYLLQKFCVEFSYYTITFGANPNYSIEEFYKEQLPEDLVRVDLLFRKAHESGIIIQCRSVSIHEISCLLLSGNYIAIALVDQDKLSKSWLEEVLVSGLHSSNSCYTGHYVVICGYDAVRDEFEIRDPASSKIHERISSKCLENARKSFGTDEDLLLINLENMRNQNGY

SEQ ID NO: 41078 - protein, 198 aa, Arabidopsis thaliana
  peptide (1)..(198): Ceres Seq. ID no. 12482076
  misc_feature (1)..(191): Homolog of NCBI NO: 33877361 NR Description: Unknown (protein for IMAGE:3956179) [Homo sapiens]
  misc_feature (1)..(191): Homolog of NCBI NO: 27695043 NR Description: Unknown (protein for IMAGE:5042988) [Mus musculus]
  misc_feature (1)..(191): Homolog of NCBI NO: 26329995 NR Description: unnamed protein product [Mus musculus]
  misc_feature (1)..(191): Homolog of NCBI NO: 16549275 NR Description: unnamed protein product [Homo sapiens]
  misc_feature (1)..(187): Homolog of NCBI NO: 23397433 NR Description: CG13760-PB [Drosophila melanogaster]
  misc_feature (1)..(198): Homolog of NCBI NO: 10177566 NR Description: gene_id:K18J17.8~unknown protein [Arabidopsis
  misc_feature (1)..(161): Homolog of NCBI NO: 10177566 NR Description: gene_id:K18J17.8~unknown protein [Arabidopsis
  misc_feature (1)..(198): Homolog of NCBI NO: 21537032 NR Description: unknown [Arabidopsis thaliana]
  misc_feature (1)..(198): Homolog of NCBI NO: 18415044 NR Description: expressed protein
MVLRASGIASCTLEDLAEICSTNSIWTVDLAYLLQKFCVEFSYYTITFGANPNYSIEEFYKEQLPEDLVRVDLLFRKAHESGIIIQCRSVSIHEISCLLLSGNYIAIALVDQDKLSKSWLEEVLVSGLHSSNSCYTGHYVVICGYDAVRDEFEIRDPASSKIHERISSKCLENARKSFGTDEDLLLINLENMRNQNGY

SEQ ID NO: 41079 - DNA, 1595 bp, Arabidopsis thaliana
  misc_feature (1)..(1595): Ceres Seq. ID no. 12558455
  misc_feature: MA Experiment ID: 20000171 Result: Down-regulated in Transcription
  misc_feature: MA Experiment 20000171 PARAMETER Experiment Name: At_42deg_Heat_P Parameter: Age (day) Value: 14
  misc_feature: MA Experiment 20000171 PARAMETER Experiment Name: At_42deg_Heat_P Parameter: Organism Value: A. thaliana
  misc_feature: MA Experiment 20000171 PARAMETER Experiment Name: At_42deg_Heat_P Parameter: Plant Line Value: WS
  misc_feature: MA Experiment 20000171 PARAMETER Experiment Name: At_42deg_Heat_P Parameter: Temperature (deg C) Value: 42 vs. 22
  misc_feature: MA Experiment 20000171 PARAMETER Experiment Name: At_42deg_Heat_P Parameter: Timepoint (hr) Value: 1
  misc_feature: MA Experiment 20000171 PARAMETER Experiment Name: At_42deg_Heat_P Parameter: Tissue Value: Aerial
  misc_feature: MA Experiment ID: 20000437 Result: Down-regulated in Transcription
  misc_feature: MA Experiment 20000437 PARAMETER Experiment Name: At_Drought_P Parameter: Age (day) Value: 8
  misc_feature: MA Experiment 20000437 PARAMETER Experiment Name: At_Drought_P Parameter: Organism Value: A. thaliana
  misc_feature: MA Experiment 20000437 PARAMETER Experiment Name: At_Drought_P Parameter: Plant Line Value: WS
  misc_feature: MA Experiment 20000437 PARAMETER Experiment Name: At_Drought_P Parameter: Timepoint (hr) Value: 24
  misc_feature: MA Experiment 20000437 PARAMETER Experiment Name: At_Drought_P Parameter: Tissue Value: Whole Plant
  misc_feature: MA Experiment 20000437 PARAMETER Experiment Name: At_Drought_P Parameter: Treatment Value: Drought vs. No Drought
gttagtagaaaaggagaagacacaactgtggaattgaaactgaacagcgaaggaggagccgcttgaagaagaacggggcatgggtcgactctcatgggccagtccgattcagagattccgtttcttctcttacttatctcagctgaatggaagaagaagcgttttggcttgctctggctatgaaaatcgttatctttcgtctttagttgaagcttcagattgtgaacttgatgaagttccagatgatagaaaagtagcggagaaagacactgctctacatttagcattgtcacagctttcaggtgattttgataaagactctaagttgtcattgcagcggttttacagaaaaaggagagtttctgtgatatccacgggttccctcaaccttgatctagctcttggagttggaggattgccaaagggaagaatggttgaggtttacggaaaagaagcatctggaaagacaactctagctctgcatatcatcaaggaagctcaaaagcttggaggttattgcgcttatcttgatgcagagaatgccatggatccttctctagcagaatcaataggtgtgaacacagaagagcttctgatatcacgacctagttctgctgaaaagatgctaaatattgttgatgtgctgaccaagagtgggtcagtagacgtaattgtggtagacagtgttgctgctcttgcccctcaatgtgaacttgatgctcctgtaggagaaagatacagagacacacaatcaagaataatgacacaggcgctcagaaaaatccattactcagttggctattctcagacactgatcgtttttcttaatcaggtcagatcacatgtgaaatctaacatgcatttcccgcacgccgaagaagtgacttgtggaggaaacgcattaccgtttcatgcagctatacgtctcaaaatgataagaaccgggctaataaagactgccaataagataagtggtctcaatgtctgcgtccaagtggtgaagaataaactggcgcccggaaagaagaaatctgaattggggattcactttggtcatggtttctacgtggagcgagaggtattagaattggcttgtgagcatggagttatcttaagagaaggaactagctatttcattgaaggcgaggtcattgaagggaaagacgcagctgagaagtatctggtggaaaataaagaggctctcgatactgtcgttgcaatcctgaggaaccagctcttcaagatgtgacagagggaatgtatttcgagttctccaaacaaatgtgtatgtttcgataaagccaaaaaccaattgagcttttcatcaaccctgacgtccctattaaacaacgtggaagggacagaagcagttagggaatgctaactaaaaggaggatcagagaagatgtgcaaaagctggttgtcattagatgatatcatcatagtcattgttcttgttagagattctccatcatgtatactgcagagattccggtttccttaatgggtttgaaccgttttatcaagcattctttccttttgtcttgaaccaatcatcagttcatttattggcttatggaaagcagtttttcttg

SEQ ID NO: 41080 - protein, 389 aa, Arabidopsis thaliana
  peptide (1)..(389): Ceres Seq. ID no. 12558456
  misc_feature (64)..(388): Pfam Name: recA bacterial DNA recombination protein Pfam Description: recA bacterial DNA recombination protein
  misc_feature (55)..(383): Homolog of NCBI NO: 15889174 NR Description: AGR_C_3441p [Agrobacterium tumefaciens]
  misc_feature (61)..(389): Homolog of NCBI NO: 22961065 NR Description: hypothetical protein [Rhodopseudomonas palustris]
  misc_feature (61)..(374): Homolog of NCBI NO: 23000205 NR Description: hypothetical protein [Magnetococcus sp. MC-1]
  misc_feature (65)..(386): Homolog of NCBI NO: 3219848 NR Description: RecA protein (Recombinase A)
  misc_feature (61)..(389): Homolog of NCBI NO: 11387044 NR Description: RecA protein (Recombinase A)
  misc_feature (55)..(373): Homolog of NCBI NO: 33860196 NR Description: RecA protein (Recombinase A)
  misc_feature (85)..(383): Homolog of NCBI NO: 34907710 NR Description: putative RecA protein [Oryza sativa (japonica
  misc_feature (59)..(386): Homolog of NCBI NO: 15224783 NR Description: putative recA protein; protein id: At2g19490.1
  misc_feature (1)..(389): Homolog of NCBI NO: 6143863 NR Description: putative RecA protein [Arabidopsis thaliana]
  misc_feature (1)..(389): Homolog of NCBI NO: 22330951 NR Description: putative RecA protein
MGRLSWASPIQRFRFFSYLSQLNGRRSVLACSGYENRYLSSLVEASDCELDEVPDDRKVAEKDTALHLALSQLSGDFDKDSKLSLQRFYRKRRVSVISTGSLNLDLALGVGGLPKGRMVEVYGKEASGKTTLALHIIKEAQKLGGYCAYLDAENAMDPSLAESIGVNTEELLISRPSSAEKMLNIVDVLTKSGSVDVIVVDSVAALAPQCELDAPVGERYRDTQSRIMTQALRKIHYSVGYSQTLIVFLNQVRSHVKSNMHFPHAEEVTCGGNALPFHAAIRLKMIRTGLIKTANKISGLNVCVQVVKNKLAPGKKKSELGIHFGHGFYVEREVLELACEHGVILREGTSYFIEGEVIEGKDAAEKYLVENKEALDTVVAILRNQLFKM

SEQ ID NO: 41081 - protein, 272 aa, Arabidopsis thaliana
  peptide (1)..(272): Ceres Seq. ID no. 12558457
  misc_feature (1)..(271): Pfam Name: recA bacterial DNA recombination protein Pfam Description: recA bacterial DNA recombination protein
  misc_feature (1)..(266): Homolog of NCBI NO: 15889174 NR Description: AGR_C_3441p [Agrobacterium tumefaciens]
  misc_feature (1)..(272): Homolog of NCBI NO: 22961065 NR Description: hypothetical protein [Rhodopseudomonas palustris]
  misc_feature (1)..(257): Homolog of NCBI NO: 23000205 NR Description: hypothetical protein [Magnetococcus sp. MC-1]
  misc_feature (1)..(269): Homolog of NCBI NO: 3219848 NR Description: RecA protein (Recombinase A)
  misc_feature (1)..(272): Homolog of NCBI NO: 11387044 NR Description: RecA protein (Recombinase A)
  misc_feature (1)..(256): Homolog of NCBI NO: 33860196 NR Description: RecA protein (Recombinase A)
  misc_feature (1)..(266): Homolog of NCBI NO: 34907710 NR Description: putative RecA protein [Oryza sativa (japonica
  misc_feature (1)..(269): Homolog of NCBI NO: 15224783 NR Description: putative recA protein; protein id: At2g19490.1
  misc_feature (1)..(272): Homolog of NCBI NO: 6143863 NR Description: putative RecA protein [Arabidopsis thaliana]
  misc_feature (1)..(272): Homolog of NCBI NO: 22330951 NR Description: putative RecA protein
MVEVYGKEASGKTTLALHIIKEAQKLGGYCAYLDAENAMDPSLAESIGVNTEELLISRPSSAEKMLNIVDVLTKSGSVDVIVVDSVAALAPQCELDAPVGERYRDTQSRIMTQALRKIHYSVGYSQTLIVFLNQVRSHVKSNMHFPHAEEVTCGGNALPFHAAIRLKMIRTGLIKTANKISGLNVCVQVVKNKLAPGKKKSELGIHFGHGFYVEREVLELACEHGVILREGTSYFIEGEVIEGKDAAEKYLVENKEALDTVVAILRNQLFKM

SEQ ID NO: 41082 - protein, 234 aa, Arabidopsis thaliana
  peptide (1)..(234): Ceres Seq. ID no. 12558458
  misc_feature (1)..(233): Pfam Name: recA bacterial DNA recombination protein Pfam Description: recA bacterial DNA recombination protein
  misc_feature (1)..(228): Homolog of NCBI NO: 15889174 NR Description: AGR_C_3441p [Agrobacterium tumefaciens]
  misc_feature (1)..(234): Homolog of NCBI NO: 22961065 NR Description: hypothetical protein [Rhodopseudomonas palustris]
  misc_feature (1)..(219): Homolog of NCBI NO: 23000205 NR Description: hypothetical protein [Magnetococcus sp. MC-1]
  misc_feature (1)..(231): Homolog of NCBI NO: 3219848 NR Description: RecA protein (Recombinase A)
  misc_feature (1)..(234): Homolog of NCBI NO: 11387044 NR Description: RecA protein (Recombinase A)
  misc_feature (1)..(218): Homolog of NCBI NO: 33860196 NR Description: RecA protein (Recombinase A)
  misc_feature (1)..(228): Homolog of NCBI NO: 34907710 NR Description: putative RecA protein [Oryza sativa (japonica
  misc_feature (1)..(231): Homolog of NCBI NO: 15224783 NR Description: putative recA protein; protein id: At2g19490.1
  misc_feature (1)..(234): Homolog of NCBI NO: 6143863 NR Description: putative RecA protein [Arabidopsis thaliana]
  misc_feature (1)..(234): Homolog of NCBI NO: 22330951 NR Description: putative RecA protein
MDPSLAESIGVNTEELLISRPSSAEKMLNIVDVLTKSGSVDVIVVDSVAALAPQCELDAPVGERYRDTQSRIMTQALRKIHYSVGYSQTLIVFLNQVRSHVKSNMHFPHAEEVTCGGNALPFHAAIRLKMIRTGLIKTANKISGLNVCVQVVKNKLAPGKKKSELGIHFGHGFYVEREVLELACEHGVILREGTSYFIEGEVIEGKDAAEKYLVENKEALDTVVAILRNQLFKM

SEQ ID NO: 41083 - DNA, 1205 bp, Arabidopsis thaliana
  misc_feature (1)..(1205): Ceres Seq. ID no. 12348459
  misc_feature: MA Experiment ID: 108434 Result: Up-regulated in Transcription
  misc_feature: MA Experiment 108434 PARAMETER Experiment Name: At_Root_Tips_cDNA_P Parameter: Tissue Value: Root Tips
  misc_feature: MA Experiment ID: 108461 Result: Up-regulated in Transcription
  misc_feature: MA Experiment 108461 PARAMETER Experiment Name: At_Germinating_Seeds_cDNA_P Parameter: Age (day) Value: 1 vs. 0
  misc_feature: MA Experiment 108461 PARAMETER Experiment Name: At_Germinating_Seeds_cDNA_P Parameter: Tissue Value: Germinating Seeds
  misc_feature: MA Experiment ID: 108462 Result: Up-regulated in Transcription
  misc_feature: MA Experiment 108462 PARAMETER Experiment Name: At_Germinating_Seeds_cDNA_P Parameter: Age (day) Value: 2 vs. 0
  misc_feature: MA Experiment 108462 PARAMETER Experiment Name: At_Germinating_Seeds_cDNA_P Parameter: Tissue Value: Germinating Seeds
  misc_feature: MA Experiment ID: 20000030 Result: Up-regulated in Transcription
  misc_feature: MA Experiment 20000030 PARAMETER Experiment Name: At_CS6630_Roots_cDNA_P Parameter: Plant Line Value: CS6630 vs. WS
  misc_feature: MA Experiment 20000030 PARAMETER Experiment Name: At_CS6630_Roots_cDNA_P Parameter: Tissue Value: Roots
  misc_feature: MA Experiment ID: 20000171 Result: Down-regulated in Transcription
  misc_feature: MA Experiment 20000171 PARAMETER Experiment Name: At_42deg_Heat_P Parameter: Age (day) Value: 14
  misc_feature: MA Experiment 20000171 PARAMETER Experiment Name: At_42deg_Heat_P Parameter: Organism Value: A. thaliana
  misc_feature: MA Experiment 20000171 PARAMETER Experiment Name: At_42deg_Heat_P Parameter: Plant Line Value: WS
  misc_feature: MA Experiment 20000171 PARAMETER Experiment Name: At_42deg_Heat_P Parameter: Temperature (deg C) Value: 42 vs. 22
  misc_feature: MA Experiment 20000171 PARAMETER Experiment Name: At_42deg_Heat_P Parameter: Timepoint (hr) Value: 1
  misc_feature: MA Experiment 20000171 PARAMETER Experiment Name: At_42deg_Heat_P Parameter: Tissue Value: Aerial
  misc_feature: MA Experiment ID: 20000227 Result: Up-regulated in Transcription
  misc_feature: MA Experiment 20000227 PARAMETER Experiment Name: At_Root-Tips-vs-Tops_P Parameter: Tissue Value: Root Tips vs. Root Tops
  misc_feature: MA Experiment ID: 20000234 Result: Up-regulated in Transcription
  misc_feature: MA Experiment 20000234 PARAMETER Experiment Name: At_Siliques_P Parameter: Age (day) Value: 21
  misc_feature: MA Experiment 20000234 PARAMETER Experiment Name: At_Siliques_P Parameter: Organism Value: A. thaliana
  misc_feature: MA Experiment 20000234 PARAMETER Experiment Name: At_Siliques_P Parameter: Plant Line Value: WS
  misc_feature: MA Experiment 20000234 PARAMETER Experiment Name: At_Siliques_P Parameter: Tissue Value: Less Than 5mm Siliques vs. Whole Plant
  misc_feature: MA Experiment ID: 20000264 Result: Up-regulated in Transcription
  misc_feature: MA Experiment 20000264 PARAMETER Experiment Name: At_Open_Flower_P Parameter: Age (day) Value: 21
  misc_feature: MA Experiment 20000264 PARAMETER Experiment Name: At_Open_Flower_P Parameter: Plant Line Value: WS
  misc_feature: MA Experiment 20000264 PARAMETER Experiment Name: At_Open_Flower_P Parameter: Tissue Value: Open Flower vs. Whole Plant
  misc_feature: MA Experiment ID: 20000265 Result: Up-regulated in Transcription
  misc_feature: MA Experiment 20000265 PARAMETER Experiment Name: At_Open_Flower_P Parameter: Age (day) Value: 21
  misc_feature: MA Experiment 20000265 PARAMETER Experiment Name: At_Open_Flower_P Parameter: Plant Line Value: WS
  misc_feature: MA Experiment 20000265 PARAMETER Experiment Name: At_Open_Flower_P Parameter: Tissue Value: Closed Flower vs. Whole Plant
  misc_feature: MA Experiment ID: 20000286 Result: Up-regulated in Transcription
  misc_feature: MA Experiment 20000286 PARAMETER Experiment Name: At_Open_Flower_P Parameter: Age (day) Value: 21
  misc_feature: MA Experiment 20000286 PARAMETER Experiment Name: At_Open_Flower_P Parameter: Plant Line Value: WS
  misc_feature: MA Experiment 20000286 PARAMETER Experiment Name: At_Open_Flower_P Parameter: Tissue Value: Half Open vs. Whole Plant
  misc_feature: MA Experiment ID: 20000438 Result: Up-regulated in Transcription
  misc_feature: MA Experiment 20000438 PARAMETER Experiment Name: At_Shoots__P Parameter: Age (day) Value: 14
  misc_feature: MA Experiment 20000438 PARAMETER Experiment Name: At_Shoots__P Parameter: Tissue Value: Shoots vs. Whole Plant
  misc_feature: MA Experiment ID: 20000794 Result: Down-regulated in Transcription
  misc_feature: MA Experiment 20000794 PARAMETER Experiment Name: At_Petals_P Parameter: Age (day) Value: 23-25 days
  misc_feature: MA Experiment 20000794 PARAMETER Experiment Name: At_Petals_P Parameter: Plant Line Value: WS
  misc_feature: MA Experiment 20000794 PARAMETER Experiment Name: At_Petals_P Parameter: Tissue Value: Petals vs. Whole plant
  misc_feature: MA Experiment ID: 20001451 Result: Down-regulated in Transcription
  misc_feature: MA Experiment 20001451 PARAMETER Experiment Name: At_Far-red-induction_P Parameter: Age (day) Value: 7
  misc_feature: MA Experiment 20001451 PARAMETER Experiment Name: At_Far-red-induction_P Parameter: Light Value: Far-red vs. White
  misc_feature: MA Experiment 20001451 PARAMETER Experiment Name: At_Far-red-induction_P Parameter: Organism Value: A. thaliana
  misc_feature: MA Experiment 20001451 PARAMETER Experiment Name: At_Far-red-induction_P Parameter: Plant Line Value: Columbia
  misc_feature: MA Experiment 20001451 PARAMETER Experiment Name: At_Far-red-induction_P Parameter: Timepoint (hr) Value: 24
  misc_feature: MA Experiment 20001451 PARAMETER Experiment Name: At_Far-red-induction_P Parameter: Tissue Value: Whole Plant
acatcatcttcattaatctgatcaaataatagggttaatcaaaagtccagaaaccaacacagttcaattttacgaaaactctcagaaatggagaagtacgagaagctagagaaggtcggagaaggaacatacgggaaagtctacaaagcgatggagaaaggaactggtaagcttgttgctctgaagaaaactcgtctcgagatggacgaagaaggtattccaccaactgctcttcgtgagatctcgcttctccagatgttatcaacatcgatctatgttgttcgattactctgcgtcgaacatgttcatcaaccatcaaccaaatctcaatctaccaaatccaatctctatctcgttttcgagtatctcgatactgatcttaagaaattcatcgattcgtataggaaaggacctaatcctaagcctcttgagccttttttgattcagaagttgatgtttcagctttgtaaaggtgttgcgcattgtcatagtcatggtgtgcttcaccgtgatcttaaaccgcagaatcttcttctggtgaaagataaagagcttcttaagattgctgatttgggtcttggtcgtgcttttactgttcctcttaagtcttatacgcatgagattgttactctttggtatagagctcctgaagttcttcttggatctactcattattcaactggtgttgacatgtggtctgttggttgtatctttgctgagatggttcggaggcaagctcttttccctggtgattctgagtttcgacaattgcttcatatcttcaggttgctaggaacaccaactgagcagcaatggccgggtgtttccacactgcgtgactggcatgtttaccctaagtgggagccgcaagacttaactcttgctgttccttctctttcacctcaaggagttgatcttctcacgaaaatgctcaagtacaatccagccgaaagaatttcagcaaaaacagcacttgatcacccatattttgacagccttgacaagtctcagttctgaagttcattgctgtatctgttgtcatcgtcttggtgaatttaaacatttgatctatctttgtttccgacacattagtgtcttatgtttggtttagagatttgtagtctttcagaagaaactggtaaagcttgtattctcaagtgaatgtaaaacacaatggtgtggtagcaatgagatgattttctatc

SEQ ID NO: 41084 - protein, 309 aa, Arabidopsis thaliana
  peptide (1)..(309): Ceres Seq. ID no. 12348460
  misc_feature (4)..(301): Pfam Name: Protein kinase domain Pfam Description: Protein kinase domain
  misc_feature (1)..(309): Homolog of NCBI NO: 27542763 NR Description: cyclin-dependent kinase-like protein [Sorghum
  misc_feature (1)..(309): Homolog of NCBI NO: 34907628 NR Description: putative cyclin-dependent kinase B1-1
  misc_feature (1)..(309): Homolog of NCBI NO: 5921446 NR Description: CELL DIVISION CONTROL PROTEIN 2 HOMOLOG C
  misc_feature (2)..(309): Homolog of NCBI NO: 25989353 NR Description: cyclin-dependent kinase [Helianthus tuberosus]
  misc_feature (1)..(309): Homolog of NCBI NO: 11125683 NR Description: B1-type cyclin dependent kinase [Lycopersicon
  misc_feature (1)..(309): Homolog of NCBI NO: 7434326 NR Description: probable cdc2-like protein kinase cdc2MsD -
  misc_feature (1)..(309): Homolog of NCBI NO: 9885801 NR Description: cyclin-dependent kinase B1-2 [Nicotiana tabacum]
  misc_feature (1)..(309): Homolog of NCBI NO: 9885799 NR Description: cyclin-dependent kinase B1-1 [Nicotiana tabacum]
  misc_feature (1)..(309): Homolog of NCBI NO: 15224912 NR Description: Cyclin-dependent kinase B1;2; protein id:
  misc_feature (1)..(309): Homolog of NCBI NO: 15232441 NR Description: Cyclin-dependent kinase B1
MEKYEKLEKVGEGTYGKVYKAMEKGTGKLVALKKTRLEMDEEGIPPTALREISLLQMLSTSIYVVRLLCVEHVHQPSTKSQSTKSNLYLVFEYLDTDLKKFIDSYRKGPNPKPLEPFLIQKLMFQLCKGVAHCHSHGVLHRDLKPQNLLLVKDKELLKIADLGLGRAFTVPLKSYTHEIVTLWYRAPEVLLGSTHYSTGVDMWSVGCIFAEMVRRQALFPGDSEFRQLLHIFRLLGTPTEQQWPGVSTLRDWHVYPKWEPQDLTLAVPSLSPQGVDLLTKMLKYNPAERISAKTALDHPYFDSLDKSQF

SEQ ID NO: 41085 - protein, 288 aa, Arabidopsis thaliana
  peptide (1)..(288): Ceres Seq. ID no. 12348461
  misc_feature (1)..(280): Pfam Name: Protein kinase domain Pfam Description: Protein kinase domain
  misc_feature (1)..(288): Homolog of NCBI NO: 27542763 NR Description: cyclin-dependent kinase-like protein [Sorghum
  misc_feature (1)..(288): Homolog of NCBI NO: 34907628 NR Description: putative cyclin-dependent kinase B1-1
  misc_feature (1)..(288): Homolog of NCBI NO: 5921446 NR Description: CELL DIVISION CONTROL PROTEIN 2 HOMOLOG C
  misc_feature (1)..(288): Homolog of NCBI NO: 25989353 NR Description: cyclin-dependent kinase [Helianthus tuberosus]
  misc_feature (1)..(288): Homolog of NCBI NO: 11125683 NR Description: B1-type cyclin dependent kinase [Lycopersicon
  misc_feature (1)..(288): Homolog of NCBI NO: 7434326 NR Description: probable cdc2-like protein kinase cdc2MsD -
  misc_feature (1)..(288): Homolog of NCBI NO: 9885801 NR Description: cyclin-dependent kinase B1-2 [Nicotiana tabacum]
  misc_feature (1)..(288): Homolog of NCBI NO: 9885799 NR Description: cyclin-dependent kinase B1-1 [Nicotiana tabacum]
  misc_feature (1)..(288): Homolog of NCBI NO: 15224912 NR Description: Cyclin-dependent kinase B1;2; protein id:
  misc_feature (1)..(288): Homolog of NCBI NO: 15232441 NR Description: Cyclin-dependent kinase B1
MEKGTGKLVALKKTRLEMDEEGIPPTALREISLLQMLSTSIYVVRLLCVEHVHQPSTKSQSTKSNLYLVFEYLDTDLKKFIDSYRKGPNPKPLEPFLIQKLMFQLCKGVAHCHSHGVLHRDLKPQNLLLVKDKELLKIADLGLGRAFTVPLKSYTHEIVTLWYRAPEVLLGSTHYSTGVDMWSVGCIFAEMVRRQALFPGDSEFRQLLHIFRLLGTPTEQQWPGVSTLRDWHVYPKWEPQDLTLAVPSLSPQGVDLLTKMLKYNPAERISAKTALDHPYFDSLDKSQF

SEQ ID NO: 41086 - protein, 271 aa, Arabidopsis thaliana
  peptide (1)..(271): Ceres Seq. ID no. 12348462
  misc_feature (1)..(263): Pfam Name: Protein kinase domain Pfam Description: Protein kinase domain
  misc_feature (1)..(271): Homolog of NCBI NO: 27542763 NR Description: cyclin-dependent kinase-like protein [Sorghum
  misc_feature (1)..(271): Homolog of NCBI NO: 34907628 NR Description: putative cyclin-dependent kinase B1-1
  misc_feature (1)..(271): Homolog of NCBI NO: 5921446 NR Description: CELL DIVISION CONTROL PROTEIN 2 HOMOLOG C
  misc_feature (1)..(271): Homolog of NCBI NO: 25989353 NR Description: cyclin-dependent kinase [Helianthus tuberosus]
  misc_feature (1)..(271): Homolog of NCBI NO: 11125683 NR Description: B1-type cyclin dependent kinase [Lycopersicon
  misc_feature (1)..(271): Homolog of NCBI NO: 7434326 NR Description: probable cdc2-like protein kinase cdc2MsD -
  misc_feature (1)..(271): Homolog of NCBI NO: 9885801 NR Description: cyclin-dependent kinase B1-2 [Nicotiana tabacum]
  misc_feature (1)..(271): Homolog of NCBI NO: 9885799 NR Description: cyclin-dependent kinase B1-1 [Nicotiana tabacum]
  misc_feature (1)..(271): Homolog of NCBI NO: 15224912 NR Description: Cyclin-dependent kinase B1;2; protein id:
  misc_feature (1)..(271): Homolog of NCBI NO: 15232441 NR Description: Cyclin-dependent kinase B1
MDEEGIPPTALREISLLQMLSTSIYVVRLLCVEHVHQPSTKSQSTKSNLYLVFEYLDTDLKKFIDSYRKGPNPKPLEPFLIQKLMFQLCKGVAHCHSHGVLHRDLKPQNLLLVKDKELLKIADLGLGRAFTVPLKSYTHEIVTLWYRAPEVLLGSTHYSTGVDMWSVGCIFAEMVRRQALFPGDSEFRQLLHIFRLLGTPTEQQWPGVSTLRDWHVYPKWEPQDLTLAVPSLSPQGVDLLTKMLKYNPAERISAKTALDHPYFDSLDKSQF

SEQ ID NO: 41087 - DNA, 1085 bp, Arabidopsis thaliana
  misc_feature (1)..(1085): Ceres Seq. ID no. 12329021
  misc_feature: MA Experiment ID: 108474 Result: Down-regulated in Transcription
  misc_feature: MA Experiment 108474 PARAMETER Experiment Name: At_Drought_Flowers_cDNA_P Parameter: Timepoint (hr) Value: null
  misc_feature: MA Experiment 108474 PARAMETER Experiment Name: At_Drought_Flowers_cDNA_P Parameter: Treatment Value: Drought vs. No Drought
  misc_feature: MA Experiment ID: 108501 Result: Down-regulated in Transcription
  misc_feature: MA Experiment 108501 PARAMETER Experiment Name: At_ap2_floral_buds_cDNA_P Parameter: Plant Line Value: ap2 (Ler.)
  misc_feature: MA Experiment 108501 PARAMETER Experiment Name: At_ap2_floral_buds_cDNA_P Parameter: Tissue Value: Closed Flower
  misc_feature: MA Experiment ID: 20000265 Result: Up-regulated in Transcription
  misc_feature: MA Experiment 20000265 PARAMETER Experiment Name: At_Open_Flower_P Parameter: Age (day) Value: 21
  misc_feature: MA Experiment 20000265 PARAMETER Experiment Name: At_Open_Flower_P Parameter: Plant Line Value: WS
  misc_feature: MA Experiment 20000265 PARAMETER Experiment Name: At_Open_Flower_P Parameter: Tissue Value: Closed Flower vs. Whole Plant
  misc_feature: MA Experiment ID: 20000709 Result: Down-regulated in Transcription
  misc_feature: MA Experiment 20000709 PARAMETER Experiment Name: At_15mM_NH4NO3_L-to-H_P Parameter: Age (hr) Value: 14
  misc_feature: MA Experiment 20000709 PARAMETER Experiment Name: At_15mM_NH4NO3_L-to-H_P Parameter: Organism Value: A. thaliana
  misc_feature: MA Experiment 20000709 PARAMETER Experiment Name: At_15mM_NH4NO3_L-to-H_P Parameter: Plant Line Value: WS
  misc_feature: MA Experiment 20000709 PARAMETER Experiment Name: At_15mM_NH4NO3_L-to-H_P Parameter: Timepoint (hr) Value: 4
  misc_feature: MA Experiment 20000709 PARAMETER Experiment Name: At_15mM_NH4NO3_L-to-H_P Parameter: Tissue Value: Aerial
  misc_feature: MA Experiment 20000709 PARAMETER Experiment Name: At_15mM_NH4NO3_L-to-H_P Parameter: Treatment Value: 15mM NH4NO3 vs. 30mM Mannitol
  misc_feature: MA Experiment ID: 20001910 Result: Down-regulated in Transcription
  misc_feature: MA Experiment 20001910 PARAMETER Experiment Name: At_Drought_Reproduction_P Parameter: Age (day) Value: 37
  misc_feature: MA Experiment 20001910 PARAMETER Experiment Name: At_Drought_Reproduction_P Parameter: Organism Value: A. thaliana
  misc_feature: MA Experiment 20001910 PARAMETER Experiment Name: At_Drought_Reproduction_P Parameter: Plant Line Value: WS
  misc_feature: MA Experiment 20001910 PARAMETER Experiment Name: At_Drought_Reproduction_P Parameter: Timepoint (day) Value: 7
  misc_feature: MA Experiment 20001910 PARAMETER Experiment Name: At_Drought_Reproduction_P Parameter: Tissue Value: Flowers
  misc_feature: MA Experiment 20001910 PARAMETER Experiment Name: At_Drought_Reproduction_P Parameter: Treatment Value: Drought vs. No Drought
gatcaacatctccttgaagttgtttcataagaataagagctataaaagaggataaaaccaaaatttgaatttttttcttctatctctctccccaagatatatagcacaagaaaatgaagataccatcaattggctatgtctttttccttatcttcatctctattacaattgtttcgagttcaccagatcatggagaagttgaggacgaaacgcagtttaactacgagaagaaaggagagaaggggccagagaactggggaagactaaagccagagtgggcaatgtgtggaaaaggcaacatgcagtctccgattgatcttacggacaaaagagtcttgattgatcataatcttggataccttcgtagccagtatttaccttcaaatgccaccattaagaacagaggccatgatatcatgatgaaatttgaaggaggaaatgcaggtttaggtatcactattaatggtactgaatataaacttcaacagattcattggcactctccttccgaacacacactcaatgccaaaaggtttgttcttgaggaacacatggttcatcagagcaaagatggacgcaacgctgttgtcgctttcttttacaaattgggaaaacctgactattttctcctcacgttggaaagatacttgaagaggataactgatacacacgaatcccaggaatttgtcgagatggttcatcctagaacattcggttttgaatcaaaacactattatagatttatcggatcacttacaactccaccgtgttctgaaaatgtgatttggacgatttccaaagagatgaggactgtgacattaaaacaattgatcatgcttcgagtgactgtacacgatcaatctaactcaaatgctagaccgcttcagcgtaaaaatgagcgtccggtggcactttacataccaacatggcatagtaaactatattaaatatttaagtttggtttatattctttctagtaatctttgaaatattgtaagagataatgcttctaataaataacattggatttattggaattaatgtattgaaaaaactatgcaaatactacagtgtattttggaacg

SEQ ID NO: 41088 - protein, 277 aa, Arabidopsis thaliana
  peptide (1)..(277): Ceres Seq. ID no. 12329022
  misc_feature (42)..(268): Pfam Name: Eukaryotic-type carbonic anhydrase Pfam Description: Eukaryotic-type carbonic anhydrase
  misc_feature (1)..(274): Homolog of NCBI NO: 29468280 NR Description: nectarin III [Nicotiana langsdorffii x Nicotiana
  misc_feature (9)..(270): Homolog of NCBI NO: 15233471 NR Description: carbonic anhydrase -like protein; protein id:
  misc_feature (29)..(233): Homolog of NCBI NO: 30683808 NR Description: carbonic anhydrase -related [Arabidopsis thaliana]
  misc_feature (5)..(270): Homolog of NCBI NO: 25407021 NR Description: protein T6D22.16 [imported] - Arabidopsis
  misc_feature (29)..(270): Homolog of NCBI NO: 25291473 NR Description: probable carbonic anhydrase [imported] -
  misc_feature (5)..(270): Homolog of NCBI NO: 15223122 NR Description: storage protein, putative; protein id:
  misc_feature (1)..(24): Homolog of NCBI NO: 15241186 NR Description: putative protein; protein id: At5g56330.1
  misc_feature (229)..(270): Homolog of NCBI NO: 15241186 NR Description: putative protein; protein id: At5g56330.1
  misc_feature (27)..(195): Homolog of NCBI NO: 15241186 NR Description: putative protein; protein id: At5g56330.1
  misc_feature (29)..(277): Homolog of NCBI NO: 15223097 NR Description: carbonic anhydrase, putative; protein id:
MKIPSIGYVFFLIFISITIVSSSPDHGEVEDETQFNYEKKGEKGPENWGRLKPEWAMCGKGNMQSPIDLTDKRVLIDHNLGYLRSQYLPSNATIKNRGHDIMMKFEGGNAGLGITINGTEYKLQQIHWHSPSEHTLNAKRFVLEEHMVHQSKDGRNAVVAFFYKLGKPDYFLLTLERYLKRITDTHESQEFVEMVHPRTFGFESKHYYRFIGSLTTPPCSENVIWTISKEMRTVTLKQLIMLRVTVHDQSNSNARPLQRKNERPVALYIPTWHSKLY

SEQ ID NO: 41089 - protein, 221 aa, Arabidopsis thaliana
  peptide (1)..(221): Ceres Seq. ID no. 12329023
  misc_feature (1)..(212): Pfam Name: Eukaryotic-type carbonic anhydrase Pfam Description: Eukaryotic-type carbonic anhydrase
  misc_feature (1)..(97): Homolog of NCBI NO: 25407019 NR Description: protein T6D22.14 [imported] - Arabidopsis
  misc_feature (1)..(218): Homolog of NCBI NO: 29468280 NR Description: nectarin III [Nicotiana langsdorffii x Nicotiana
  misc_feature (1)..(214): Homolog of NCBI NO: 15233471 NR Description: carbonic anhydrase -like protein; protein id:
  misc_feature (1)..(177): Homolog of NCBI NO: 30683808 NR Description: carbonic anhydrase -related [Arabidopsis thaliana]
  misc_feature (1)..(214): Homolog of NCBI NO: 25407021 NR Description: protein T6D22.16 [imported] - Arabidopsis
  misc_feature (1)..(214): Homolog of NCBI NO: 25291473 NR Description: probable carbonic anhydrase [imported] -
  misc_feature (1)..(214): Homolog of NCBI NO: 15223122 NR Description: storage protein, putative; protein id:
  misc_feature (173)..(214): Homolog of NCBI NO: 15241186 NR Description: putative protein; protein id: At5g56330.1
  misc_feature (1)..(139): Homolog of NCBI NO: 15241186 NR Description: putative protein; protein id: At5g56330.1
  misc_feature (1)..(221): Homolog of NCBI NO: 15223097 NR Description: carbonic anhydrase, putative; protein id:
MCGKGNMQSPIDLTDKRVLIDHNLGYLRSQYLPSNATIKNRGHDIMMKFEGGNAGLGITINGTEYKLQQIHWHSPSEHTLNAKRFVLEEHMVHQSKDGRNAVVAFFYKLGKPDYFLLTLERYLKRITDTHESQEFVEMVHPRTFGFESKHYYRFIGSLTTPPCSENVIWTISKEMRTVTLKQLIMLRVTVHDQSNSNARPLQRKNERPVALYIPTWHSKLY

SEQ ID NO: 41090 - protein, 215 aa, Arabidopsis thaliana
  peptide (1)..(215): Ceres Seq. ID no. 12329024
  misc_feature (1)..(206): Pfam Name: Eukaryotic-type carbonic anhydrase Pfam Description: Eukaryotic-type carbonic anhydrase
  misc_feature (1)..(91): Homolog of NCBI NO: 25407019 NR Description: protein T6D22.14 [imported] - Arabidopsis
  misc_feature (1)..(212): Homolog of NCBI NO: 29468280 NR Description: nectarin III [Nicotiana langsdorffii x Nicotiana
  misc_feature (1)..(208): Homolog of NCBI NO: 15233471 NR Description: carbonic anhydrase -like protein; protein id:
  misc_feature (1)..(171): Homolog of NCBI NO: 30683808 NR Description: carbonic anhydrase -related [Arabidopsis thaliana]
  misc_feature (1)..(208): Homolog of NCBI NO: 25407021 NR Description: protein T6D22.16 [imported] - Arabidopsis
  misc_feature (1)..(208): Homolog of NCBI NO: 25291473 NR Description: probable carbonic anhydrase [imported] -
  misc_feature (1)..(208): Homolog of NCBI NO: 15223122 NR Description: storage protein, putative; protein id:
  misc_feature (167)..(208): Homolog of NCBI NO: 15241186 NR Description: putative protein; protein id: At5g56330.1
  misc_feature (1)..(133): Homolog of NCBI NO: 15241186 NR Description: putative protein; protein id: At5g56330.1
  misc_feature (1)..(215): Homolog of NCBI NO: 15223097 NR Description: carbonic anhydrase, putative; protein id:
MQSPIDLTDKRVLIDHNLGYLRSQYLPSNATIKNRGHDIMMKFEGGNAGLGITINGTEYKLQQIHWHSPSEHTLNAKRFVLEEHMVHQSKDGRNAVVAFFYKLGKPDYFLLTLERYLKRITDTHESQEFVEMVHPRTFGFESKHYYRFIGSLTTPPCSENVIWTISKEMRTVTLKQLIMLRVTVHDQSNSNARPLQRKNERPVALYIPTWHSKLY

SEQ ID NO: 41091 - DNA, 1172 bp, Arabidopsis thaliana
  misc_feature (1)..(1172): Ceres Seq. ID no. 12327612
  misc_feature: MA Experiment ID: 108434 Result: Down-regulated in Transcription
  misc_feature: MA Experiment 108434 PARAMETER Experiment Name: At_Root_Tips_cDNA_P Parameter: Tissue Value: Root Tips
  misc_feature: MA Experiment ID: 108461 Result: Up-regulated in Transcription
  misc_feature: MA Experiment 108461 PARAMETER Experiment Name: At_Germinating_Seeds_cDNA_P Parameter: Age (day) Value: 1 vs. 0
  misc_feature: MA Experiment 108461 PARAMETER Experiment Name: At_Germinating_Seeds_cDNA_P Parameter: Tissue Value: Germinating Seeds
  misc_feature: MA Experiment ID: 108594 Result: Down-regulated in Transcription
  misc_feature: MA Experiment 108594 PARAMETER Experiment Name: At_Ler-rhl_Root_cDNA_P Parameter: Plant Line Value: null
  misc_feature: MA Experiment ID: 20000227 Result: Up-regulated in Transcription
  misc_feature: MA Experiment 20000227 PARAMETER Experiment Name: At_Root-Tips-vs-Tops_P Parameter: Tissue Value: Root Tips vs. Root Tops
tttcctctgcttctcaacatctctaagctttcattgaacaaggaatatgaaatcttctccaagatcagaaggaagaaagttcattatcccttctttcttcttcatcatagctctttgtgtactagctttcatcaacgggatcagattcgatagcttattgagttttggaagatgtgctttgtcaaatgttcctatgaataatggttcatcagagactccattgttgtcttcttctcctgttgatgatgagattaggattcttattggaatccttacacttcctgatcagtattcacgtcgccattttctccggatgatctacgggacacaaaatgttccggacggtgttaaggttgatgtgaagtttgtgttctgtaatttgactaaagaagaccagaaagtgcttgttgctttggagattatgcgttatgatgacatcattatactcaactgcaatgagaatatgaacaaaggcaagacttacacatacttctcaagcttaccagacatattcaatgagaccgatgcacaaaaaccaccgtaccattacgtaatgaaagccgacgacgacacatacataagactagaaagtctcgttgcatctttgagaccactccctcgagaagatctttactacggctatgtaattccatgtccaagcatggacccatttgttcattacatgtcaggaatgggttacttagtgtcatgggatattgcggtttggctcaaagactcggaaattcccaagaaacatctagaaggtcctgaagacaaagtgtttggcgattggattcgagaaggaagacgaggaaaaaaccggtttaacgctaagtggtccatgtataatttccctgagccaccgactagatgcacacatgagctttggccagacactattgccgttcatttgttaaagaaccaagagaagtggatacgtacattgaactatttcaatgttactagcaatctcaagccttctaaactataccacataccgtagatagtctttttgtttgcttttaccggattcttatatttatactttacattgtttctcttgaaattggtaagaaatgttctttaataatcgattttttgggagggatttgtagtacactaattaaggattgttcaaacatgtttaatagtcaatctggttgggttttttc

SEQ ID NO: 41092 - protein, 318 aa, Arabidopsis thaliana
  peptide (1)..(318): Ceres Seq. ID no. 12327613
  misc_feature (83)..(259): Pfam Name: Galactosyltransferase Pfam Description: Galactosyltransferase
  misc_feature (168)..(314): Homolog of NCBI NO: 14719291 NR Description: unknown [Zea mays]
  misc_feature (71)..(314): Homolog of NCBI NO: 18092341 NR Description: hypothetical protein [Zea mays]
  misc_feature (1)..(318): Homolog of NCBI NO: 15242148 NR Description: putative protein
  misc_feature (1)..(318): Homolog of NCBI NO: 21537037 NR Description: unknown [Arabidopsis thaliana]
MKSSPRSEGRKFIIPSFFFIIALCVLAFINGIRFDSLLSFGRCALSNVPMNNGSSETPLLSSSPVDDEIRILIGILTLPDQYSRRHFLRMIYGTQNVPDGVKVDVKFVFCNLTKEDQKVLVALEIMRYDDIIILNCNENMNKGKTYTYFSSLPDIFNETDAQKPPYHYVMKADDDTYIRLESLVASLRPLPREDLYYGYVIPCPSMDPFVHYMSGMGYLVSWDIAVWLKDSEIPKKHLEGPEDKVFGDWIREGRRGKNRFNAKWSMYNFPEPPTRCTHELWPDTIAVHLLKNQEKWIRTLNYFNVTSNLKPSKLYHIP

SEQ ID NO: 41093 - protein, 269 aa, Arabidopsis thaliana
  peptide (1)..(269): Ceres Seq. ID no. 12327614
  misc_feature (34)..(210): Pfam Name: Galactosyltransferase Pfam Description: Galactosyltransferase
  misc_feature (119)..(265): Homolog of NCBI NO: 14719291 NR Description: unknown [Zea mays]
  misc_feature (22)..(265): Homolog of NCBI NO: 18092341 NR Description: hypothetical protein [Zea mays]
  misc_feature (1)..(269): Homolog of NCBI NO: 15242148 NR Description: putative protein
  misc_feature (1)..(269): Homolog of NCBI NO: 21537037 NR Description: unknown [Arabidopsis thaliana]
MNNGSSETPLLSSSPVDDEIRILIGILTLPDQYSRRHFLRMIYGTQNVPDGVKVDVKFVFCNLTKEDQKVLVALEIMRYDDIIILNCNENMNKGKTYTYFSSLPDIFNETDAQKPPYHYVMKADDDTYIRLESLVASLRPLPREDLYYGYVIPCPSMDPFVHYMSGMGYLVSWDIAVWLKDSEIPKKHLEGPEDKVFGDWIREGRRGKNRFNAKWSMYNFPEPPTRCTHELWPDTIAVHLLKNQEKWIRTLNYFNVTSNLKPSKLYHIP

SEQ ID NO: 41094 - protein, 229 aa, Arabidopsis thaliana
  peptide (1)..(229): Ceres Seq. ID no. 12327615
  misc_feature (1)..(170): Pfam Name: Galactosyltransferase Pfam Description: Galactosyltransferase
  misc_feature (79)..(225): Homolog of NCBI NO: 14719291 NR Description: unknown [Zea mays]
  misc_feature (1)..(225): Homolog of NCBI NO: 18092341 NR Description: hypothetical protein [Zea mays]
  misc_feature (1)..(229): Homolog of NCBI NO: 15242148 NR Description: putative protein
  misc_feature (1)..(229): Homolog of NCBI NO: 21537037 NR Description: unknown [Arabidopsis thaliana]
MIYGTQNVPDGVKVDVKFVFCNLTKEDQKVLVALEIMRYDDIIILNCNENMNKGKTYTYFSSLPDIFNETDAQKPPYHYVMKADDDTYIRLESLVASLRPLPREDLYYGYVIPCPSMDPFVHYMSGMGYLVSWDIAVWLKDSEIPKKHLEGPEDKVFGDWIREGRRGKNRFNAKWSMYNFPEPPTRCTHELWPDTIAVHLLKNQEKWIRTLNYFNVTSNLKPSKLYHIP

SEQ ID NO: 41095 - DNA, 906 bp, Arabidopsis thaliana
  misc_feature (1)..(906): Ceres Seq. ID no. 13576756
  misc_feature: MA Experiment ID: 20000069 Result: Up-regulated in Transcription
  misc_feature: MA Experiment 20000069 PARAMETER Experiment Name: At_100uM_ABA_Mutants_cDNA_P Parameter: Plant Line Value: CS23
  misc_feature: MA Experiment 20000069 PARAMETER Experiment Name: At_100uM_ABA_Mutants_cDNA_P Parameter: Timepoint (hr) Value: 6
  misc_feature: MA Experiment 20000069 PARAMETER Experiment Name: At_100uM_ABA_Mutants_cDNA_P Parameter: Tissue Value: Aerial
  misc_feature: MA Experiment 20000069 PARAMETER Experiment Name: At_100uM_ABA_Mutants_cDNA_P Parameter: Treatment Value: 100uM ABA vs. No Treatment
  misc_feature: MA Experiment ID: 20000070 Result: Up-regulated in Transcription
  misc_feature: MA Experiment 20000070 PARAMETER Experiment Name: At_100uM_ABA_Mutants_cDNA_P Parameter: Plant Line Value: CS24
  misc_feature: MA Experiment 20000070 PARAMETER Experiment Name: At_100uM_ABA_Mutants_cDNA_P Parameter: Timepoint (hr) Value: 6
  misc_feature: MA Experiment 20000070 PARAMETER Experiment Name: At_100uM_ABA_Mutants_cDNA_P Parameter: Tissue Value: Aerial
  misc_feature: MA Experiment 20000070 PARAMETER Experiment Name: At_100uM_ABA_Mutants_cDNA_P Parameter: Treatment Value: 100uM ABA vs. No Treatment
  misc_feature: MA Experiment ID: 20000071 Result: Up-regulated in Transcription
  misc_feature: MA Experiment 20000071 PARAMETER Experiment Name: At_100uM_ABA_Mutants_cDNA_P Parameter: Plant Line Value: CS8104
  misc_feature: MA Experiment 20000071 PARAMETER Experiment Name: At_100uM_ABA_Mutants_cDNA_P Parameter: Timepoint (hr) Value: 6
  misc_feature: MA Experiment 20000071 PARAMETER Experiment Name: At_100uM_ABA_Mutants_cDNA_P Parameter: Tissue Value: Aerial
  misc_feature: MA Experiment 20000071 PARAMETER Experiment Name: At_100uM_ABA_Mutants_cDNA_P Parameter: Treatment Value: 100uM ABA vs. No Treatment
  misc_feature: MA Experiment ID: 20000117 Result: Up-regulated in Transcription
  misc_feature: MA Experiment 20000117 PARAMETER Experiment Name: At_100uM_ABA_Mutants_cDNA_P Parameter: Plant Line Value: Columbia
  misc_feature: MA Experiment 20000117 PARAMETER Experiment Name: At_100uM_ABA_Mutants_cDNA_P Parameter: Timepoint (hr) Value: 6
  misc_feature: MA Experiment 20000117 PARAMETER Experiment Name: At_100uM_ABA_Mutants_cDNA_P Parameter: Tissue Value: Aerial
  misc_feature: MA Experiment 20000117 PARAMETER Experiment Name: At_100uM_ABA_Mutants_cDNA_P Parameter: Treatment Value: 100uM ABA vs. No Treatment
  misc_feature: MA Experiment ID: 20000171 Result: Down-regulated in Transcription
  misc_feature: MA Experiment 20000171 PARAMETER Experiment Name: At_42deg_Heat_P Parameter: Age (day) Value: 14
  misc_feature: MA Experiment 20000171 PARAMETER Experiment Name: At_42deg_Heat_P Parameter: Organism Value: A. thaliana
  misc_feature: MA Experiment 20000171 PARAMETER Experiment Name: At_42deg_Heat_P Parameter: Plant Line Value: WS
  misc_feature: MA Experiment 20000171 PARAMETER Experiment Name: At_42deg_Heat_P Parameter: Temperature (deg C) Value: 42 vs. 22
  misc_feature: MA Experiment 20000171 PARAMETER Experiment Name: At_42deg_Heat_P Parameter: Timepoint (hr) Value: 1
  misc_feature: MA Experiment 20000171 PARAMETER Experiment Name: At_42deg_Heat_P Parameter: Tissue Value: Aerial
  misc_feature: MA Experiment ID: 20000173 Result: Down-regulated in Transcription
  misc_feature: MA Experiment 20000173 PARAMETER Experiment Name: At_42deg_Heat_P Parameter: Age (day) Value: 14
  misc_feature: MA Experiment 20000173 PARAMETER Experiment Name: At_42deg_Heat_P Parameter: Organism Value: A. thaliana
  misc_feature: MA Experiment 20000173 PARAMETER Experiment Name: At_42deg_Heat_P Parameter: Plant Line Value: WS
  misc_feature: MA Experiment 20000173 PARAMETER Experiment Name: At_42deg_Heat_P Parameter: Temperature (deg C) Value: 42 vs. 22
  misc_feature: MA Experiment 20000173 PARAMETER Experiment Name: At_42deg_Heat_P Parameter: Timepoint (hr) Value: 6
  misc_feature: MA Experiment 20000173 PARAMETER Experiment Name: At_42deg_Heat_P Parameter: Tissue Value: Aerial
  misc_feature: MA Experiment ID: 20000224 Result: Down-regulated in Transcription
  misc_feature: MA Experiment ID: 20000234 Result: Up-regulated in Transcription
  misc_feature: MA Experiment 20000234 PARAMETER Experiment Name: At_Siliques_P Parameter: Age (day) Value: 21
  misc_feature: MA Experiment 20000234 PARAMETER Experiment Name: At_Siliques_P Parameter: Organism Value: A. thaliana
  misc_feature: MA Experiment 20000234 PARAMETER Experiment Name: At_Siliques_P Parameter: Plant Line Value: WS
  misc_feature: MA Experiment 20000234 PARAMETER Experiment Name: At_Siliques_P Parameter: Tissue Value: Less Than 5mm Siliques vs. Whole Plant
  misc_feature: MA Experiment ID: 20000235 Result: Up-regulated in Transcription
  misc_feature: MA Experiment 20000235 PARAMETER Experiment Name: At_Siliques_P Parameter: Age (day) Value: 21
  misc_feature: MA Experiment 20000235 PARAMETER Experiment Name: At_Siliques_P Parameter: Organism Value: A. thaliana
  misc_feature: MA Experiment 20000235 PARAMETER Experiment Name: At_Siliques_P Parameter: Plant Line Value: WS
  misc_feature: MA Experiment 20000235 PARAMETER Experiment Name: At_Siliques_P Parameter: Tissue Value: 5-10mm Siliques vs. Whole Plant
  misc_feature: MA Experiment ID: 20000437 Result: Up-regulated in Transcription
  misc_feature: MA Experiment 20000437 PARAMETER Experiment Name: At_Drought_P Parameter: Age (day) Value: 8
  misc_feature: MA Experiment 20000437 PARAMETER Experiment Name: At_Drought_P Parameter: Organism Value: A. thaliana
  misc_feature: MA Experiment 20000437 PARAMETER Experiment Name: At_Drought_P Parameter: Plant Line Value: WS
  misc_feature: MA Experiment 20000437 PARAMETER Experiment Name: At_Drought_P Parameter: Timepoint (hr) Value: 24
  misc_feature: MA Experiment 20000437 PARAMETER Experiment Name: At_Drought_P Parameter: Tissue Value: Whole Plant
  misc_feature: MA Experiment 20000437 PARAMETER Experiment Name: At_Drought_P Parameter: Treatment Value: Drought vs. No Drought
  misc_feature: MA Experiment ID: 20000439 Result: Up-regulated in Transcription
  misc_feature: MA Experiment 20000439 PARAMETER Experiment Name: At_Roots__P Parameter: Age (day) Value: 14 vs. 21
  misc_feature: MA Experiment 20000439 PARAMETER Experiment Name: At_Roots__P Parameter: Organism Value: A. thaliana
  misc_feature: MA Experiment 20000439 PARAMETER Experiment Name: At_Roots__P Parameter: Tissue Value: Roots vs. Whole Plant
aatcgaaaaattcttcttcttcttcttcttccattgtctcttgggttgagattccgatctcaatgtcgatcaatatcggagaaatctcaattccagaccttcctatcttcttctccatgttcttaaccatctacctaatcgcttacttcatcgtcttccgcaattggaaaccacaaatccgtcccgaagcttcaagctgcctgatctcaatcttccatggatctccagcggttttcctcgccacacgcgcagttttctcctcctccgaacgctccttcgcctccgcaaacaccgccgcacaaaacaccgtcctcgatttcagcgtcgcttacttcctcaccgatctcttccactacatcgtcttcaaccctaacgacgtactcttcatcggccatcacgtagccactctattcgtcttcctaacctgcagattcctcgtcttccacggggcttgcgccatcttaggcctcctgattctagctgaagtaacaagcgcgtgtaagaacgcgtggacgctcgccggagcaaggaagaatgatccggaatcacgattagctgtgaaagtgtacgatctcttgtctcctccgttttacgccttctacagtatcgttaggggtgtgttgggacctttgtttttcgggaaaatggtagcgttttacgctcgaggtggtgctcatggtgtgatacctaattggttgtggatttcttgggcaattgttgttggaactgctattactgttagtatactttggatttggaatctctggatagaattgtttagtgaaaggaaagctaacaaaatcagagtagacaagaaaattagatagtttcttctttcttctctagatcattgtttgatcttccttttcatgtactatatataatatatataccattattattctc

SEQ ID NO: 41096 - protein, 274 aa, Arabidopsis thaliana
  peptide (1)..(274): Ceres Seq. ID no. 13576757
  misc_feature (34)..(274): Homolog of NCBI NO: 9279600 NR Description: gene_id:MPE11.12~unknown protein [Arabidopsis
  misc_feature (34)..(266): Homolog of NCBI NO: 15230950 NR Description: hypothetical protein [Arabidopsis thaliana]
  misc_feature (32)..(274): Homolog of NCBI NO: 15232128 NR Description: expressed protein [Arabidopsis thaliana]
  misc_feature (21)..(274): Homolog of NCBI NO: 26450181 NR Description: unknown protein [Arabidopsis thaliana]
  misc_feature (4)..(274): Homolog of NCBI NO: 15241364 NR Description: expressed protein [Arabidopsis thaliana]
SKNSSSSSSSIVSWVEIPISMSINIGEISIPDLPIFFSMFLTIYLIAYFIVFRNWKPQIRPEASSCLISIFHGSPAVFLATRAVFSSSERSFASANTAAQNTVLDFSVAYFLTDLFHYIVFNPNDVLFIGHHVATLFVFLTCRFLVFHGACAILGLLILAEVTSACKNAWTLAGARKNDPESRLAVKVYDLLSPPFYAFYSIVRGVLGPLFFGKMVAFYARGGAHGVIPNWLWISWAIVVGTAITVSILWIWNLWIELFSERKANKIRVDKKIR

SEQ ID NO: 41097 - protein, 254 aa, Arabidopsis thaliana
  peptide (1)..(254): Ceres Seq. ID no. 13576758
  misc_feature (14)..(254): Homolog of NCBI NO: 9279600 NR Description: gene_id:MPE11.12~unknown protein [Arabidopsis
  misc_feature (14)..(246): Homolog of NCBI NO: 15230950 NR Description: hypothetical protein [Arabidopsis thaliana]
  misc_feature (12)..(254): Homolog of NCBI NO: 15232128 NR Description: expressed protein [Arabidopsis thaliana]
  misc_feature (1)..(254): Homolog of NCBI NO: 26450181 NR Description: unknown protein [Arabidopsis thaliana]
  misc_feature (1)..(254): Homolog of NCBI NO: 15241364 NR Description: expressed protein [Arabidopsis thaliana]
MSINIGEISIPDLPIFFSMFLTIYLIAYFIVFRNWKPQIRPEASSCLISIFHGSPAVFLATRAVFSSSERSFASANTAAQNTVLDFSVAYFLTDLFHYIVFNPNDVLFIGHHVATLFVFLTCRFLVFHGACAILGLLILAEVTSACKNAWTLAGARKNDPESRLAVKVYDLLSPPFYAFYSIVRGVLGPLFFGKMVAFYARGGAHGVIPNWLWISWAIVVGTAITVSILWIWNLWIELFSERKANKIRVDKKIR

SEQ ID NO: 41098 - protein, 236 aa, Arabidopsis thaliana
  peptide (1)..(236): Ceres Seq. ID no. 13576759
  misc_feature (1)..(236): Homolog of NCBI NO: 9279600 NR Description: gene_id:MPE11.12~unknown protein [Arabidopsis
  misc_feature (1)..(228): Homolog of NCBI NO: 15230950 NR Description: hypothetical protein [Arabidopsis thaliana]
  misc_feature (1)..(236): Homolog of NCBI NO: 15232128 NR Description: expressed protein [Arabidopsis thaliana]
  misc_feature (1)..(236): Homolog of NCBI NO: 26450181 NR Description: unknown protein [Arabidopsis thaliana]
  misc_feature (1)..(236): Homolog of NCBI NO: 15241364 NR Description: expressed protein [Arabidopsis thaliana]
MFLTIYLIAYFIVFRNWKPQIRPEASSCLISIFHGSPAVFLATRAVFSSSERSFASANTAAQNTVLDFSVAYFLTDLFHYIVFNPNDVLFIGHHVATLFVFLTCRFLVFHGACAILGLLILAEVTSACKNAWTLAGARKNDPESRLAVKVYDLLSPPFYAFYSIVRGVLGPLFFGKMVAFYARGGAHGVIPNWLWISWAIVVGTAITVSILWIWNLWIELFSERKANKIRVDKKIR

SEQ ID NO: 41099 - DNA, 1349 bp, Arabidopsis thaliana
  misc_feature (1)..(1349): Ceres Seq. ID no. 12395579
  misc_feature: MA Experiment ID: 108462 Result: Down-regulated in Transcription
  misc_feature: MA Experiment 108462 PARAMETER Experiment Name: At_Germinating_Seeds_cDNA_P Parameter: Age (day) Value: 2 vs. 0
  misc_feature: MA Experiment 108462 PARAMETER Experiment Name: At_Germinating_Seeds_cDNA_P Parameter: Tissue Value: Germinating Seeds
  misc_feature: MA Experiment ID: 108463 Result: Down-regulated in Transcription
  misc_feature: MA Experiment 108463 PARAMETER Experiment Name: At_Germinating_Seeds_cDNA_P Parameter: Age (day) Value: 3 vs. 0
  misc_feature: MA Experiment 108463 PARAMETER Experiment Name: At_Germinating_Seeds_cDNA_P Parameter: Tissue Value: Germinating Seeds
  misc_feature: MA Experiment ID: 108464 Result: Down-regulated in Transcription
  misc_feature: MA Experiment 108464 PARAMETER Experiment Name: At_Germinating_Seeds_cDNA_P Parameter: Age (day) Value: 4 vs. 0
  misc_feature: MA Experiment 108464 PARAMETER Experiment Name: At_Germinating_Seeds_cDNA_P Parameter: Tissue Value: Germinating Seeds
  misc_feature: MA Experiment ID: 108473 Result: Down-regulated in Transcription
  misc_feature: MA Experiment 108473 PARAMETER Experiment Name: At_Drought_Flowers_cDNA_P Parameter: Timepoint (hr) Value: 7 d
  misc_feature: MA Experiment 108473 PARAMETER Experiment Name: At_Drought_Flowers_cDNA_P Parameter: Tissue Value: Flower
  misc_feature: MA Experiment 108473 PARAMETER Experiment Name: At_Drought_Flowers_cDNA_P Parameter: Treatment Value: Drought vs. No Drought
  misc_feature: MA Experiment ID: 108605 Result: Up-regulated in Transcription
  misc_feature: MA Experiment 108605 PARAMETER Experiment Name: At_100uM_ABA_cDNA_P Parameter: Timepoint (hr) Value: 6
  misc_feature: MA Experiment 108605 PARAMETER Experiment Name: At_100uM_ABA_cDNA_P Parameter: Tissue Value: Aerial
  misc_feature: MA Experiment 108605 PARAMETER Experiment Name: At_100uM_ABA_cDNA_P Parameter: Treatment Value: 100uM ABA vs. No Treatment
  misc_feature: MA Experiment ID: 108668 Result: Down-regulated in Transcription
  misc_feature: MA Experiment 108668 PARAMETER Experiment Name: At_2mM_SA_cDNA_P Parameter: Plant Line Value: WS
  misc_feature: MA Experiment 108668 PARAMETER Experiment Name: At_2mM_SA_cDNA_P Parameter: Timepoint (hr) Value: 6
  misc_feature: MA Experiment 108668 PARAMETER Experiment Name: At_2mM_SA_cDNA_P Parameter: Treatment Value: 2mM SA vs. No Treatment
  misc_feature: MA Experiment ID: 20000069 Result: Down-regulated in Transcription
  misc_feature: MA Experiment 20000069 PARAMETER Experiment Name: At_100uM_ABA_Mutants_cDNA_P Parameter: Plant Line Value: CS23
  misc_feature: MA Experiment 20000069 PARAMETER Experiment Name: At_100uM_ABA_Mutants_cDNA_P Parameter: Timepoint (hr) Value: 6
  misc_feature: MA Experiment 20000069 PARAMETER Experiment Name: At_100uM_ABA_Mutants_cDNA_P Parameter: Tissue Value: Aerial
  misc_feature: MA Experiment 20000069 PARAMETER Experiment Name: At_100uM_ABA_Mutants_cDNA_P Parameter: Treatment Value: 100uM ABA vs. No Treatment
  misc_feature: MA Experiment ID: 20000072 Result: Down-regulated in Transcription
  misc_feature: MA Experiment 20000072 PARAMETER Experiment Name: At_100uM_ABA_Mutants_cDNA_P Parameter: Plant Line Value: CS8105
  misc_feature: MA Experiment 20000072 PARAMETER Experiment Name: At_100uM_ABA_Mutants_cDNA_P Parameter: Timepoint (hr) Value: 6
  misc_feature: MA Experiment 20000072 PARAMETER Experiment Name: At_100uM_ABA_Mutants_cDNA_P Parameter: Tissue Value: Aerial
  misc_feature: MA Experiment 20000072 PARAMETER Experiment Name: At_100uM_ABA_Mutants_cDNA_P Parameter: Treatment Value: 100uM ABA vs. No Treatment
  misc_feature: MA Experiment ID: 20000087 Result: Down-regulated in Transcription
  misc_feature: MA Experiment 20000087 PARAMETER Experiment Name: At_100uM_ABA_Mutants_cDNA_P Parameter: Plant Line Value: WS
  misc_feature: MA Experiment 20000087 PARAMETER Experiment Name: At_100uM_ABA_Mutants_cDNA_P Parameter: Timepoint (hr) Value: 6
  misc_feature: MA Experiment 20000087 PARAMETER Experiment Name: At_100uM_ABA_Mutants_cDNA_P Parameter: Tissue Value: Aerial
  misc_feature: MA Experiment 20000087 PARAMETER Experiment Name: At_100uM_ABA_Mutants_cDNA_P Parameter: Treatment Value: 100uM ABA vs. No Treatment
  misc_feature: MA Experiment ID: 20000089 Result: Down-regulated in Transcription
  misc_feature: MA Experiment ID: 20000090 Result: Down-regulated in Transcription
  misc_feature: MA Experiment ID: 20000179 Result: Up-regulated in Transcription
  misc_feature: MA Experiment 20000179 PARAMETER Experiment Name: At_Germinating_Seeds_P Parameter: Age (hr) Value: 6 vs. 0
  misc_feature: MA Experiment 20000179 PARAMETER Experiment Name: At_Germinating_Seeds_P Parameter: Tissue Value: Germinating Seeds
  misc_feature: MA Experiment ID: 20000182 Result: Down-regulated in Transcription
  misc_feature: MA Experiment 20000182 PARAMETER Experiment Name: At_2mM_SA_P Parameter: Age (day) Value: 14
  misc_feature: MA Experiment 20000182 PARAMETER Experiment Name: At_2mM_SA_P Parameter: Organism Value: A. thaliana
  misc_feature: MA Experiment 20000182 PARAMETER Experiment Name: At_2mM_SA_P Parameter: Plant Line Value: WS
  misc_feature: MA Experiment 20000182 PARAMETER Experiment Name: At_2mM_SA_P Parameter: Timepoint (hr) Value: 6
  misc_feature: MA Experiment 20000182 PARAMETER Experiment Name: At_2mM_SA_P Parameter: Tissue Value: Aerial
  misc_feature: MA Experiment 20000182 PARAMETER Experiment Name: At_2mM_SA_P Parameter: Treatment Value: 2mM SA vs. No Treatment
  misc_feature: MA Experiment ID: 20000224 Result: Up-regulated in Transcription
  misc_feature: MA Experiment ID: 20000234 Result: Up-regulated in Transcription
  misc_feature: MA Experiment 20000234 PARAMETER Experiment Name: At_Siliques_P Parameter: Age (day) Value: 21
  misc_feature: MA Experiment 20000234 PARAMETER Experiment Name: At_Siliques_P Parameter: Organism Value: A. thaliana
  misc_feature: MA Experiment 20000234 PARAMETER Experiment Name: At_Siliques_P Parameter: Plant Line Value: WS
  misc_feature: MA Experiment 20000234 PARAMETER Experiment Name: At_Siliques_P Parameter: Tissue Value: Less Than 5mm Siliques vs. Whole Plant
  misc_feature: MA Experiment ID: 20000235 Result: Up-regulated in Transcription
  misc_feature: MA Experiment 20000235 PARAMETER Experiment Name: At_Siliques_P Parameter: Age (day) Value: 21
  misc_feature: MA Experiment 20000235 PARAMETER Experiment Name: At_Siliques_P Parameter: Organism Value: A. thaliana
  misc_feature: MA Experiment 20000235 PARAMETER Experiment Name: At_Siliques_P Parameter: Plant Line Value: WS
  misc_feature: MA Experiment 20000235 PARAMETER Experiment Name: At_Siliques_P Parameter: Tissue Value: 5-10mm Siliques vs. Whole Plant
  misc_feature: MA Experiment ID: 20000437 Result: Down-regulated in Transcription
  misc_feature: MA Experiment 20000437 PARAMETER Experiment Name: At_Drought_P Parameter: Age (day) Value: 8
  misc_feature: MA Experiment 20000437 PARAMETER Experiment Name: At_Drought_P Parameter: Organism Value: A. thaliana
  misc_feature: MA Experiment 20000437 PARAMETER Experiment Name: At_Drought_P Parameter: Plant Line Value: WS
  misc_feature: MA Experiment 20000437 PARAMETER Experiment Name: At_Drought_P Parameter: Timepoint (hr) Value: 24
  misc_feature: MA Experiment 20000437 PARAMETER Experiment Name: At_Drought_P Parameter: Tissue Value: Whole Plant
  misc_feature: MA Experiment 20000437 PARAMETER Experiment Name: At_Drought_P Parameter: Treatment Value: Drought vs. No Drought
  misc_feature: MA Experiment ID: 20000573 Result: Down-regulated in Transcription
  misc_feature: MA Experiment 20000573 PARAMETER Experiment Name: At_100uM_ABA_Mutants__P Parameter: Organism Value: A. thaliana
  misc_feature: MA Experiment 20000573 PARAMETER Experiment Name: At_100uM_ABA_Mutants__P Parameter: Plant Line Value: CS22 vs. Ler wt
  misc_feature: MA Experiment 20000573 PARAMETER Experiment Name: At_100uM_ABA_Mutants__P Parameter: Timepoint (hr) Value: N/A
  misc_feature: MA Experiment 20000573 PARAMETER Experiment Name: At_100uM_ABA_Mutants__P Parameter: Tissue Value: Whole Plant
  misc_feature: MA Experiment 20000573 PARAMETER Experiment Name: At_100uM_ABA_Mutants__P Parameter: Treatment Value: None
  misc_feature: MA Experiment ID: 20000574 Result: Down-regulated in Transcription
  misc_feature: MA Experiment 20000574 PARAMETER Experiment Name: At_100uM_ABA_Mutants__P Parameter: Organism Value: A. thaliana
  misc_feature: MA Experiment 20000574 PARAMETER Experiment Name: At_100uM_ABA_Mutants__P Parameter: Plant Line Value: CS23 vs. Ler wt
  misc_feature: MA Experiment 20000574 PARAMETER Experiment Name: At_100uM_ABA_Mutants__P Parameter: Timepoint (hr) Value: N/A
  misc_feature: MA Experiment 20000574 PARAMETER Experiment Name: At_100uM_ABA_Mutants__P Parameter: Tissue Value: Whole Plant
  misc_feature: MA Experiment 20000574 PARAMETER Experiment Name: At_100uM_ABA_Mutants__P Parameter: Treatment Value: None
  misc_feature: MA Experiment ID: 20001248 Result: Down-regulated in Transcription
  misc_feature: MA Experiment 20001248 PARAMETER Experiment Name: At_Far-red-induction_P Parameter: Age (day) Value: 7
  misc_feature: MA Experiment 20001248 PARAMETER Experiment Name: At_Far-red-induction_P Parameter: Light Value: Far-red vs. White
  misc_feature: MA Experiment 20001248 PARAMETER Experiment Name: At_Far-red-induction_P Parameter: Organism Value: A. thaliana
  misc_feature: MA Experiment 20001248 PARAMETER Experiment Name: At_Far-red-induction_P Parameter: Plant Line Value: Columbia
  misc_feature: MA Experiment 20001248 PARAMETER Experiment Name: At_Far-red-induction_P Parameter: Timepoint (hr) Value: 4
  misc_feature: MA Experiment 20001248 PARAMETER Experiment Name: At_Far-red-induction_P Parameter: Tissue Value: Whole Plant
  misc_feature: MA Experiment ID: 20001450 Result: Down-regulated in Transcription
  misc_feature: MA Experiment 20001450 PARAMETER Experiment Name: At_Far-red-induction_P Parameter: Age (day) Value: 7
  misc_feature: MA Experiment 20001450 PARAMETER Experiment Name: At_Far-red-induction_P Parameter: Light Value: Far-red vs. White
  misc_feature: MA Experiment 20001450 PARAMETER Experiment Name: At_Far-red-induction_P Parameter: Organism Value: A. thaliana
  misc_feature: MA Experiment 20001450 PARAMETER Experiment Name: At_Far-red-induction_P Parameter: Plant Line Value: Columbia
  misc_feature: MA Experiment 20001450 PARAMETER Experiment Name: At_Far-red-induction_P Parameter: Timepoint (hr) Value: 8
  misc_feature: MA Experiment 20001450 PARAMETER Experiment Name: At_Far-red-induction_P Parameter: Tissue Value: Whole Plant
  misc_feature: MA Experiment ID: 20001451 Result: Down-regulated in Transcription
  misc_feature: MA Experiment 20001451 PARAMETER Experiment Name: At_Far-red-induction_P Parameter: Age (day) Value: 7
  misc_feature: MA Experiment 20001451 PARAMETER Experiment Name: At_Far-red-induction_P Parameter: Light Value: Far-red vs. White
  misc_feature: MA Experiment 20001451 PARAMETER Experiment Name: At_Far-red-induction_P Parameter: Organism Value: A. thaliana
  misc_feature: MA Experiment 20001451 PARAMETER Experiment Name: At_Far-red-induction_P Parameter: Plant Line Value: Columbia
  misc_feature: MA Experiment 20001451 PARAMETER Experiment Name: At_Far-red-induction_P Parameter: Timepoint (hr) Value: 24
  misc_feature: MA Experiment 20001451 PARAMETER Experiment Name: At_Far-red-induction_P Parameter: Tissue Value: Whole Plant
  misc_feature: MA Experiment ID: 20001558 Result: Up-regulated in Transcription
  misc_feature: MA Experiment 20001558 PARAMETER Experiment Name: At_Drought_Soil_Dry_P Parameter: Age (day) Value: 27
  misc_feature: MA Experiment 20001558 PARAMETER Experiment Name: At_Drought_Soil_Dry_P Parameter: Organism Value: A. thaliana
  misc_feature: MA Experiment 20001558 PARAMETER Experiment Name: At_Drought_Soil_Dry_P Parameter: Plant Line Value: WS
  misc_feature: MA Experiment 20001558 PARAMETER Experiment Name: At_Drought_Soil_Dry_P Parameter: Post Timepoint (hr) Value: 6
  misc_feature: MA Experiment 20001558 PARAMETER Experiment Name: At_Drought_Soil_Dry_P Parameter: Post-Treatment Value: Re-Water vs. No Drought
  misc_feature: MA Experiment 20001558 PARAMETER Experiment Name: At_Drought_Soil_Dry_P Parameter: Timepoint (day) Value: 13
  misc_feature: MA Experiment 20001558 PARAMETER Experiment Name: At_Drought_Soil_Dry_P Parameter: Treatment Value: Drought vs. No Drought
  misc_feature: MA Experiment ID: 20001911 Result: Down-regulated in Transcription
  misc_feature: MA Experiment 20001911 PARAMETER Experiment Name: At_Drought_Reproduction_P Parameter: Age (day) Value: 40
  misc_feature: MA Experiment 20001911 PARAMETER Experiment Name: At_Drought_Reproduction_P Parameter: Organism Value: A. thaliana
  misc_feature: MA Experiment 20001911 PARAMETER Experiment Name: At_Drought_Reproduction_P Parameter: Plant Line Value: WS
  misc_feature: MA Experiment 20001911 PARAMETER Experiment Name: At_Drought_Reproduction_P Parameter: Timepoint (day) Value: 10
  misc_feature: MA Experiment 20001911 PARAMETER Experiment Name: At_Drought_Reproduction_P Parameter: Tissue Value: Flowers
  misc_feature: MA Experiment 20001911 PARAMETER Experiment Name: At_Drought_Reproduction_P Parameter: Treatment Value: Drought vs. No Drought
attaactacacgagctaaatctgttttagtcagaagcaaaaaattgaaaaaacttgtgtaaaaagcatgcagcgaaacagagttcttgcgttcttgttgctagcagctcagctcttggtgaagatacctgaaacgtgtgcaaaatttcccgcacttatcgtatttggtgactcaactgttgattcaggcaacaacaaccagatttctactgttctgaagagcaatttccagccatatggccgggattactttgacggcaaagcgactgggagattttcaaatggccggattgcaccagacttcatttctgaaggtttgggactcaagaacgcagtccctgcctacctagatccagcatacaacattgcagactttgccactggtgtctgtttcgcttcagctggaaccggcttagacaatgcaacctctgccgtgttatctgtaatgccgctatggaaggaagtggaatactacaaagaataccaaaccaggctaagaagctacttgggtgaagagaaagctaatgagattattagtgaatcactttacctgattagtatcggaaccaacgatttcctggagaattactatcttcttccccgcaagttacggaagtactcagtgaacgagtaccaatatttcctgataggaatagcagcagatttcgtgacagatatatacagactcggagctcggaagatgtctttgtcgggactctctccttttggatgcttacccctggaaagaacaactcagctcttttatggaagcaaatgtattgaagaatacaacattgtggctagagatttcaacatcaagatggaagagaaagtcttccagttgaacagagatctgaacggaatccagctggtgttttcaaatccatatgaccttgtttcagaaatcatataccatcctgaagcattcggtttcgaaaacgtaagaagtgcgtgttgcggaacgggatactatgagatgagctacttgtgtgataaaatgaacccattcacatgttcggatgcaagcaaatatgtattttgggactcatttcacccaacagagaagacaaacgccatcgtagcaaatcatgttctgaaatacgacttatctcggtttcagtgataaaataagaaattgctacaccacaagcactatagttattagttaacctactaaattctttcctccacaacatatatatttttttctgtgagtttcttgtctagatatcactcaaatcaagcttccaaaatgttgtacaagaaccattcttcttactctatgttcgtgtgactacataaagatgctactgtgatgttataaaaatggacaagatcaaactttaaaat

SEQ ID NO: 41100 - protein, 351 aa, Arabidopsis thaliana; identical to SEQ ID NO: 26354
  peptide (1)..(351): Ceres Seq. ID no. 12395580
  misc_feature (30)..(342): Pfam Name: GDSL-like Lipase/Acylhydrolase Pfam Description: GDSL-like Lipase/Acylhydrolase
  misc_feature (250)..(349): Homolog of NCBI NO: 15229719 NR Description: putative protein; protein id: At3g43570.1
  misc_feature (25)..(236): Homolog of NCBI NO: 15229719 NR Description: putative protein; protein id: At3g43570.1
  misc_feature (28)..(343): Homolog of NCBI NO: 9758010 NR Description: proline-rich protein APG-like [Arabidopsis
  misc_feature (6)..(349): Homolog of NCBI NO: 15217977 NR Description: proline-rich protein, putative; protein id:
  misc_feature (28)..(349): Homolog of NCBI NO: 18406327 NR Description: proline-rich protein, putative; protein id:
  misc_feature (51)..(345): Homolog of NCBI NO: 15224201 NR Description: putative APG isolog protein; protein id:
  misc_feature (26)..(350): Homolog of NCBI NO: 15228157 NR Description: putative GDSL-motif lipase/hydrolase
  misc_feature (26)..(350): Homolog of NCBI NO: 21593518 NR Description: putative GDSL-motif lipase/hydrolase [Arabidopsis
  misc_feature (1)..(351): Homolog of NCBI NO: 7485330 NR Description: hypothetical protein F10M23.130 - Arabidopsis
  misc_feature (1)..(351): Homolog of NCBI NO: 18416824 NR Description: putative APG protein

SEQ ID NO: 41101 - protein, 225 aa, Arabidopsis thaliana; identical to SEQ ID NO: 26355
  peptide (1)..(225): Ceres Seq. ID no. 12395581
  misc_feature (1)..(216): Pfam Name: GDSL-like Lipase/Acylhydrolase Pfam Description: GDSL-like Lipase/Acylhydrolase
  misc_feature (124)..(223): Homolog of NCBI NO: 15229719 NR Description: putative protein; protein id: At3g43570.1
  misc_feature (1)..(110): Homolog of NCBI NO: 15229719 NR Description: putative protein; protein id: At3g43570.1
  misc_feature (1)..(217): Homolog of NCBI NO: 9758010 NR Description: proline-rich protein APG-like [Arabidopsis
  misc_feature (1)..(223): Homolog of NCBI NO: 15217977 NR Description: proline-rich protein, putative; protein id:
  misc_feature (1)..(223): Homolog of NCBI NO: 18406327 NR Description: proline-rich protein, putative; protein id:
  misc_feature (1)..(219): Homolog of NCBI NO: 15224201 NR Description: putative APG isolog protein; protein id:
  misc_feature (1)..(224): Homolog of NCBI NO: 15228157 NR Description: putative GDSL-motif lipase/hydrolase
  misc_feature (1)..(224): Homolog of NCBI NO: 21593518 NR Description: putative GDSL-motif lipase/hydrolase [Arabidopsis
  misc_feature (1)..(225): Homolog of NCBI NO: 7485330 NR Description: hypothetical protein F10M23.130 - Arabidopsis
  misc_feature (1)..(225): Homolog of NCBI NO: 18416824 NR Description: putative APG protein

SEQ ID NO: 41102 - DNA, 1071 bp, Arabidopsis thaliana
  misc_feature (1)..(1071): Ceres Seq. ID no. 12559556
  misc_feature: MA Experiment ID: 20001557 Result: Up-regulated in Transcription
  misc_feature: MA Experiment 20001557 PARAMETER Experiment Name: At_Drought_Soil_Dry_P Parameter: Age (day) Value: 27
  misc_feature: MA Experiment 20001557 PARAMETER Experiment Name: At_Drought_Soil_Dry_P Parameter: Organism Value: A. thaliana
  misc_feature: MA Experiment 20001557 PARAMETER Experiment Name: At_Drought_Soil_Dry_P Parameter: Plant Line Value: WS
  misc_feature: MA Experiment 20001557 PARAMETER Experiment Name: At_Drought_Soil_Dry_P Parameter: Post Timepoint (hr) Value: 3
  misc_feature: MA Experiment 20001557 PARAMETER Experiment Name: At_Drought_Soil_Dry_P Parameter: Post-Treatment Value: Re-Water vs. No Drought
  misc_feature: MA Experiment 20001557 PARAMETER Experiment Name: At_Drought_Soil_Dry_P Parameter: Timepoint (day) Value: 13
  misc_feature: MA Experiment 20001557 PARAMETER Experiment Name: At_Drought_Soil_Dry_P Parameter: Treatment Value: Drought vs. No Drought
  misc_feature: MA Experiment ID: 20001558 Result: Up-regulated in Transcription
  misc_feature: MA Experiment 20001558 PARAMETER Experiment Name: At_Drought_Soil_Dry_P Parameter: Age (day) Value: 27
  misc_feature: MA Experiment 20001558 PARAMETER Experiment Name: At_Drought_Soil_Dry_P Parameter: Organism Value: A. thaliana
  misc_feature: MA Experiment 20001558 PARAMETER Experiment Name: At_Drought_Soil_Dry_P Parameter: Plant Line Value: WS
  misc_feature: MA Experiment 20001558 PARAMETER Experiment Name: At_Drought_Soil_Dry_P Parameter: Post Timepoint (hr) Value: 6
  misc_feature: MA Experiment 20001558 PARAMETER Experiment Name: At_Drought_Soil_Dry_P Parameter: Post-Treatment Value: Re-Water vs. No Drought
  misc_feature: MA Experiment 20001558 PARAMETER Experiment Name: At_Drought_Soil_Dry_P Parameter: Timepoint (day) Value: 13
  misc_feature: MA Experiment 20001558 PARAMETER Experiment Name: At_Drought_Soil_Dry_P Parameter: Treatment Value: Drought vs. No Drought
  misc_feature: MA Experiment ID: 20001911 Result: Down-regulated in Transcription
  misc_feature: MA Experiment 20001911 PARAMETER Experiment Name: At_Drought_Reproduction_P Parameter: Age (day) Value: 40
  misc_feature: MA Experiment 20001911 PARAMETER Experiment Name: At_Drought_Reproduction_P Parameter: Organism Value: A. thaliana
  misc_feature: MA Experiment 20001911 PARAMETER Experiment Name: At_Drought_Reproduction_P Parameter: Plant Line Value: WS
  misc_feature: MA Experiment 20001911 PARAMETER Experiment Name: At_Drought_Reproduction_P Parameter: Timepoint (day) Value: 10
  misc_feature: MA Experiment 20001911 PARAMETER Experiment Name: At_Drought_Reproduction_P Parameter: Tissue Value: Flowers
  misc_feature: MA Experiment 20001911 PARAMETER Experiment Name: At_Drought_Reproduction_P Parameter: Treatment Value: Drought vs. No Drought
ctgcaactcagccatggaagaagcagatcagttatgtttagctgctaaatccggcgacttgaaaaaggttcaaactttaatttactccggcgccgacgttactcactttgataacgacggtttaacgccgttaatgcacgccgctaaaatcggaaacgcagagatagtaacggcgttactcgaatccggagctccatggaacgcattatctccatcgaatctctcagcaggagatttcgccatggaagcaggacatcaagaaactttcgatcttcttctcaaaaccgggatccaatcagagctaatcttaggaacaatcgcaagaaaccaaacaaagaacgaatattctaatcaagaatatcttcaagatagagttagtttcagtgaagacaagttaatggatagtgaaagcaaagggtgtgatgatggcttgggaaaaacccttaatggaagctccccgctaaagctatttgtctcaacggtggtcacattcttaacgttggtttcggtatgggacttgtcgatacagcgattcaaccgatacaatccggttaaacacacgatcattgaagctcatcctgaagtttataagccgtatgattgaatctggttggggagagaaagaaaatgtgaagattggtttttggaagatggcaagaaggtcttgataagcttgatgataattcttttgatgggatcttttttgatacttatggtgagtattataaagatttaagagagtttcatcagcatcttccgaggctgttgaagcctgatggtttttattcgtatttcaatgggttttgtggaagcaacgccttttttcatgttgtgtattgcaatttggtgactttggagattgagaatttagggtttagcactcagttgattccattgccggttaaggattgtcttggggatgaagtttgggaaggtgtcaagcaaaagtattggcagcttgatacttattatctccctgtttgtcagtttagtgactgaagaagttttatgataccagcaattttgcgatattgtaatttttcttactcataaaaagtagattttttattc

SEQ ID NO: 41103 - protein, 200 aa, Arabidopsis thaliana
  peptide (1)..(200): Ceres Seq. ID no. 12559557
  misc_feature (39)..(71): Pfam Name: Ankyrin repeat Pfam Description: Ankyrin repeat
  misc_feature (11)..(96): Homolog of NCBI NO: 28373837 NR Description: Chain A, 4ank: A Designed Ankyrin Repeat Protein
  misc_feature (11)..(96): Homolog of NCBI NO: 28373835 NR Description: Chain A, 3ank: A Designed Ankyrin Repeat Protein
  misc_feature (10)..(96): Homolog of NCBI NO: 28373666 NR Description: Chain A, Sank E3_5: An Artificial Ankyrin Repeat
  misc_feature (11)..(92): Homolog of NCBI NO: 28373666 NR Description: Chain A, Sank E3_5: An Artificial Ankyrin Repeat
  misc_feature (3)..(124): Homolog of NCBI NO: 40738857 NR Description: hypothetical protein AN6072.2 [Aspergillus
  misc_feature (6)..(200): Homolog of NCBI NO: 12644401 NR Description: Hypothetical protein C26A3.17c in chromosome I
  misc_feature (59)..(200): Homolog of NCBI NO: 19115072 NR Description: hypothetical protein [Schizosaccharomyces pombe]
  misc_feature (6)..(200): Homolog of NCBI NO: 25777560 NR Description: hypothetical protein SPAC26A3.17c - fission yeast
  misc_feature (11)..(196): Homolog of NCBI NO: 14488376 NR Description: putative methyltransferase
  misc_feature (5)..(197): Homolog of NCBI NO: 15239183 NR Description: putative protein; protein id: At5g65860.1
CNSAMEEADQLCLAAKSGDLKKVQTLIYSGADVTHFDNDGLTPLMHAAKIGNAEIVTALLESGAPWNALSPSNLSAGDFAMEAGHQETFDLLLKTGIQSELILGTIARNQTKNEYSNQEYLQDRVSFSEDKLMDSESKGCDDGLGKTLNGSSPLKLFVSTVVTFLTLVSVWDLSIQRFNRYNPVKHTIIEAHPEVYKPYD

SEQ ID NO: 41104 - protein, 196 aa, Arabidopsis thaliana
  peptide (1)..(196): Ceres Seq. ID no. 12559558
  misc_feature (35)..(67): Pfam Name: Ankyrin repeat Pfam Description: Ankyrin repeat
  misc_feature (7)..(92): Homolog of NCBI NO: 28373837 NR Description: Chain A, 4ank: A Designed Ankyrin Repeat Protein
  misc_feature (7)..(92): Homolog of NCBI NO: 28373835 NR Description: Chain A, 3ank: A Designed Ankyrin Repeat Protein
  misc_feature (6)..(92): Homolog of NCBI NO: 28373666 NR Description: Chain A, Sank E3_5: An Artificial Ankyrin Repeat
  misc_feature (7)..(88): Homolog of NCBI NO: 28373666 NR Description: Chain A, Sank E3_5: An Artificial Ankyrin Repeat
  misc_feature (1)..(120): Homolog of NCBI NO: 40738857 NR Description: hypothetical protein AN6072.2 [Aspergillus
  misc_feature (2)..(196): Homolog of NCBI NO: 12644401 NR Description: Hypothetical protein C26A3.17c in chromosome I
  misc_feature (55)..(196): Homolog of NCBI NO: 19115072 NR Description: hypothetical protein [Schizosaccharomyces pombe]
  misc_feature (2)..(196): Homolog of NCBI NO: 25777560 NR Description: hypothetical protein SPAC26A3.17c - fission yeast
  misc_feature (7)..(192): Homolog of NCBI NO: 14488376 NR Description: putative methyltransferase
  misc_feature (1)..(193): Homolog of NCBI NO: 15239183 NR Description: putative protein; protein id: At5g65860.1
MEEADQLCLAAKSGDLKKVQTLIYSGADVTHFDNDGLTPLMHAAKIGNAEIVTALLESGAPWNALSPSNLSAGDFAMEAGHQETFDLLLKTGIQSELILGTIARNQTKNEYSNQEYLQDRVSFSEDKLMDSESKGCDDGLGKTLNGSSPLKLFVSTVVTFLTLVSVWDLSIQRFNRYNPVKHTIIEAHPEVYKPYD

SEQ ID NO: 41105 - protein, 156 aa, Arabidopsis thaliana
  peptide (1)..(156): Ceres Seq. ID no. 12559559
  misc_feature (1)..(27): Pfam Name: Ankyrin repeat Pfam Description: Ankyrin repeat
  misc_feature (1)..(52): Homolog of NCBI NO: 28373837 NR Description: Chain A, 4ank: A Designed Ankyrin Repeat Protein
  misc_feature (1)..(52): Homolog of NCBI NO: 28373835 NR Description: Chain A, 3ank: A Designed Ankyrin Repeat Protein
  misc_feature (1)..(52): Homolog of NCBI NO: 28373666 NR Description: Chain A, Sank E3_5: An Artificial Ankyrin Repeat
  misc_feature (1)..(48): Homolog of NCBI NO: 28373666 NR Description: Chain A, Sank E3_5: An Artificial Ankyrin Repeat
  misc_feature (1)..(80): Homolog of NCBI NO: 40738857 NR Description: hypothetical protein AN6072.2 [Aspergillus
  misc_feature (1)..(156): Homolog of NCBI NO: 12644401 NR Description: Hypothetical protein C26A3.17c in chromosome I
  misc_feature (15)..(156): Homolog of NCBI NO: 19115072 NR Description: hypothetical protein [Schizosaccharomyces pombe]
  misc_feature (1)..(156): Homolog of NCBI NO: 25777560 NR Description: hypothetical protein SPAC26A3.17c - fission yeast
  misc_feature (1)..(152): Homolog of NCBI NO: 14488376 NR Description: putative methyltransferase
  misc_feature (1)..(153): Homolog of NCBI NO: 15239183 NR Description: putative protein; protein id: At5g65860.1
MHAAKIGNAEIVTALLESGAPWNALSPSNLSAGDFAMEAGHQETFDLLLKTGIQSELILGTIARNQTKNEYSNQEYLQDRVSFSEDKLMDSESKGCDDGLGKTLNGSSPLKLFVSTVVTFLTLVSVWDLSIQRFNRYNPVKHTIIEAHPEVYKPYD

SEQ ID NO: 41106 - DNA, 2799 bp, Arabidopsis thaliana; identical to SEQ ID NO: 29864
  misc_feature (1)..(2799): Ceres Seq. ID no. 12329264
  misc_feature: MA Experiment ID: 108561 Result: Up-regulated in Transcription
  misc_feature: MA Experiment 108561 PARAMETER Experiment Name: At_100uM_ABA_cDNA_P Parameter: Timepoint (hr) Value: 6
  misc_feature: MA Experiment 108561 PARAMETER Experiment Name: At_100uM_ABA_cDNA_P Parameter: Tissue Value: Aerial
  misc_feature: MA Experiment 108561 PARAMETER Experiment Name: At_100uM_ABA_cDNA_P Parameter: Treatment Value: 100uM ABA vs. No Treatment
  misc_feature: MA Experiment ID: 108572 Result: Up-regulated in Transcription
  misc_feature: MA Experiment 108572 PARAMETER Experiment Name: At_Drought_cDNA_P Parameter: Timepoint (hr) Value: 1
  misc_feature: MA Experiment 108572 PARAMETER Experiment Name: At_Drought_cDNA_P Parameter: Tissue Value: Aerial
  misc_feature: MA Experiment 108572 PARAMETER Experiment Name: At_Drought_cDNA_P Parameter: Treatment Value: Drought vs. No Drought
  misc_feature: MA Experiment ID: 108573 Result: Up-regulated in Transcription
  misc_feature: MA Experiment 108573 PARAMETER Experiment Name: At_Drought_cDNA_P Parameter: Timepoint (hr) Value: 6
  misc_feature: MA Experiment 108573 PARAMETER Experiment Name: At_Drought_cDNA_P Parameter: Tissue Value: Aerial
  misc_feature: MA Experiment 108573 PARAMETER Experiment Name: At_Drought_cDNA_P Parameter: Treatment Value: Drought vs. No Drought
  misc_feature: MA Experiment ID: 108585 Result: Up-regulated in Transcription
  misc_feature: MA Experiment 108585 PARAMETER Experiment Name: At_5mM_NaNP_cDNA_P Parameter: Timepoint (hr) Value: 6
  misc_feature: MA Experiment 108585 PARAMETER Experiment Name: At_5mM_NaNP_cDNA_P Parameter: Tissue Value: Aerial
  misc_feature: MA Experiment 108585 PARAMETER Experiment Name: At_5mM_NaNP_cDNA_P Parameter: Treatment Value: null
  misc_feature: MA Experiment ID: 108595 Result: Up-regulated in Transcription
  misc_feature: MA Experiment 108595 PARAMETER Experiment Name: At_Ler-pi_Ovule_cDNA_P Parameter: Plant Line Value: null
  misc_feature: MA Experiment ID: 108668 Result: Up-regulated in Transcription
  misc_feature: MA Experiment 108668 PARAMETER Experiment Name: At_2mM_SA_cDNA_P Parameter: Plant Line Value: WS
  misc_feature: MA Experiment 108668 PARAMETER Experiment Name: At_2mM_SA_cDNA_P Parameter: Timepoint (hr) Value: 6
  misc_feature: MA Experiment 108668 PARAMETER Experiment Name: At_2mM_SA_cDNA_P Parameter: Treatment Value: 2mM SA vs. No Treatment
  misc_feature: MA Experiment ID: 20000166 Result: Up-regulated in Transcription
  misc_feature: MA Experiment 20000166 PARAMETER Experiment Name: At_100uM_ABA_P Parameter: Age (day) Value: 14
  misc_feature: MA Experiment 20000166 PARAMETER Experiment Name: At_100uM_ABA_P Parameter: Organism Value: A. thaliana
  misc_feature: MA Experiment 20000166 PARAMETER Experiment Name: At_100uM_ABA_P Parameter: Plant Line Value: WS
  misc_feature: MA Experiment 20000166 PARAMETER Experiment Name: At_100uM_ABA_P Parameter: Timepoint (hr) Value: 1
  misc_feature: MA Experiment 20000166 PARAMETER Experiment Name: At_100uM_ABA_P Parameter: Tissue Value: Aerial
  misc_feature: MA Experiment 20000166 PARAMETER Experiment Name: At_100uM_ABA_P Parameter: Treatment Value: 100uM ABA vs. No Treatment
  misc_feature: MA Experiment ID: 20000169 Result: Up-regulated in Transcription
  misc_feature: MA Experiment 20000169 PARAMETER Experiment Name: At_100uM_ABA_P Parameter: Age (day) Value: 14
  misc_feature: MA Experiment 20000169 PARAMETER Experiment Name: At_100uM_ABA_P Parameter: Organism Value: A. thaliana
  misc_feature: MA Experiment 20000169 PARAMETER Experiment Name: At_100uM_ABA_P Parameter: Plant Line Value: WS
  misc_feature: MA Experiment 20000169 PARAMETER Experiment Name: At_100uM_ABA_P Parameter: Timepoint (hr) Value: 6
  misc_feature: MA Experiment 20000169 PARAMETER Experiment Name: At_100uM_ABA_P Parameter: Tissue Value: Aerial
  misc_feature: MA Experiment 20000169 PARAMETER Experiment Name: At_100uM_ABA_P Parameter: Treatment Value: 100uM ABA vs. No Treatment
  misc_feature: MA Experiment ID: 20000182 Result: Up-regulated in Transcription
  misc_feature: MA Experiment 20000182 PARAMETER Experiment Name: At_2mM_SA_P Parameter: Age (day) Value: 14
  misc_feature: MA Experiment 20000182 PARAMETER Experiment Name: At_2mM_SA_P Parameter: Organism Value: A. thaliana
  misc_feature: MA Experiment 20000182 PARAMETER Experiment Name: At_2mM_SA_P Parameter: Plant Line Value: WS
  misc_feature: MA Experiment 20000182 PARAMETER Experiment Name: At_2mM_SA_P Parameter: Timepoint (hr) Value: 6
  misc_feature: MA Experiment 20000182 PARAMETER Experiment Name: At_2mM_SA_P Parameter: Tissue Value: Aerial
  misc_feature: MA Experiment 20000182 PARAMETER Experiment Name: At_2mM_SA_P Parameter: Treatment Value: 2mM SA vs. No Treatment
  misc_feature: MA Experiment ID: 20000184 Result: Down-regulated in Transcription
  misc_feature: MA Experiment 20000184 PARAMETER Experiment Name: At_Shoots__P Parameter: Age (day) Value: 7
  misc_feature: MA Experiment 20000184 PARAMETER Experiment Name: At_Shoots__P Parameter: Tissue Value: Shoots vs. Whole Plant
  misc_feature: MA Experiment ID: 20000185 Result: Up-regulated in Transcription
  misc_feature: MA Experiment 20000185 PARAMETER Experiment Name: At_Roots__P Parameter: Age (day) Value: 7 vs. 21
  misc_feature: MA Experiment 20000185 PARAMETER Experiment Name: At_Roots__P Parameter: Organism Value: A. thaliana
  misc_feature: MA Experiment 20000185 PARAMETER Experiment Name: At_Roots__P Parameter: Tissue Value: Roots vs. Whole Plant
  misc_feature: MA Experiment ID: 20000234 Result: Down-regulated in Transcription
  misc_feature: MA Experiment 20000234 PARAMETER Experiment Name: At_Siliques_P Parameter: Age (day) Value: 21
  misc_feature: MA Experiment 20000234 PARAMETER Experiment Name: At_Siliques_P Parameter: Organism Value: A. thaliana
  misc_feature: MA Experiment 20000234 PARAMETER Experiment Name: At_Siliques_P Parameter: Plant Line Value: WS
  misc_feature: MA Experiment 20000234 PARAMETER Experiment Name: At_Siliques_P Parameter: Tissue Value: Less Than 5mm Siliques vs. Whole Plant
  misc_feature: MA Experiment ID: 20000235 Result: Down-regulated in Transcription
  misc_feature: MA Experiment 20000235 PARAMETER Experiment Name: At_Siliques_P Parameter: Age (day) Value: 21
  misc_feature: MA Experiment 20000235 PARAMETER Experiment Name: At_Siliques_P Parameter: Organism Value: A. thaliana
  misc_feature: MA Experiment 20000235 PARAMETER Experiment Name: At_Siliques_P Parameter: Plant Line Value: WS
  misc_feature: MA Experiment 20000235 PARAMETER Experiment Name: At_Siliques_P Parameter: Tissue Value: 5-10mm Siliques vs. Whole Plant
  misc_feature: MA Experiment ID: 20000264 Result: Up-regulated in Transcription
  misc_feature: MA Experiment 20000264 PARAMETER Experiment Name: At_Open_Flower_P Parameter: Age (day) Value: 21
  misc_feature: MA Experiment 20000264 PARAMETER Experiment Name: At_Open_Flower_P Parameter: Plant Line Value: WS
  misc_feature: MA Experiment 20000264 PARAMETER Experiment Name: At_Open_Flower_P Parameter: Tissue Value: Open Flower vs. Whole Plant
  misc_feature: MA Experiment ID: 20000267 Result: Up-regulated in Transcription
  misc_feature: MA Experiment 20000267 PARAMETER Experiment Name: At_Drought_P Parameter: Age (day) Value: 7
  misc_feature: MA Experiment 20000267 PARAMETER Experiment Name: At_Drought_P Parameter: Organism Value: A. thaliana
  misc_feature: MA Experiment 20000267 PARAMETER Experiment Name: At_Drought_P Parameter: Plant Line Value: WS
  misc_feature: MA Experiment 20000267 PARAMETER Experiment Name: At_Drought_P Parameter: Timepoint (hr) Value: 6
  misc_feature: MA Experiment 20000267 PARAMETER Experiment Name: At_Drought_P Parameter: Tissue Value: Whole Plant
  misc_feature: MA Experiment 20000267 PARAMETER Experiment Name: At_Drought_P Parameter: Treatment Value: Drought vs. No Drought
  misc_feature: MA Experiment ID: 20000268 Result: Up-regulated in Transcription
  misc_feature: MA Experiment 20000268 PARAMETER Experiment Name: At_100mM_NaCl__P Parameter: Age (day) Value: 14
  misc_feature: MA Experiment 20000268 PARAMETER Experiment Name: At_100mM_NaCl__P Parameter: Organism Value: A. thaliana
  misc_feature: MA Experiment 20000268 PARAMETER Experiment Name: At_100mM_NaCl__P Parameter: Plant Line Value: WS
  misc_feature: MA Experiment 20000268 PARAMETER Experiment Name: At_100mM_NaCl__P Parameter: Timepoint (hr) Value: 6
  misc_feature: MA Experiment 20000268 PARAMETER Experiment Name: At_100mM_NaCl__P Parameter: Tissue Value: Whole Plant
  misc_feature: MA Experiment 20000268 PARAMETER Experiment Name: At_100mM_NaCl__P Parameter: Treatment Value: 100mM NaCl vs. No Treatment
  misc_feature: MA Experiment ID: 20000436 Result: Up-regulated in Transcription
  misc_feature: MA Experiment 20000436 PARAMETER Experiment Name: At_Drought_P Parameter: Age (day) Value: 7
  misc_feature: MA Experiment 20000436 PARAMETER Experiment Name: At_Drought_P Parameter: Organism Value: A. thaliana
  misc_feature: MA Experiment 20000436 PARAMETER Experiment Name: At_Drought_P Parameter: Plant Line Value: WS
  misc_feature: MA Experiment 20000436 PARAMETER Experiment Name: At_Drought_P Parameter: Timepoint (hr) Value: 12
  misc_feature: MA Experiment 20000436 PARAMETER Experiment Name: At_Drought_P Parameter: Tissue Value: Whole Plant
  misc_feature: MA Experiment 20000436 PARAMETER Experiment Name: At_Drought_P Parameter: Treatment Value: Drought vs. No Drought
  misc_feature: MA Experiment ID: 20000437 Result: Up-regulated in Transcription
  misc_feature: MA Experiment 20000437 PARAMETER Experiment Name: At_Drought_P Parameter: Age (day) Value: 8
  misc_feature: MA Experiment 20000437 PARAMETER Experiment Name: At_Drought_P Parameter: Organism Value: A. thaliana
  misc_feature: MA Experiment 20000437 PARAMETER Experiment Name: At_Drought_P Parameter: Plant Line Value: WS
  misc_feature: MA Experiment 20000437 PARAMETER Experiment Name: At_Drought_P Parameter: Timepoint (hr) Value: 24
  misc_feature: MA Experiment 20000437 PARAMETER Experiment Name: At_Drought_P Parameter: Tissue Value: Whole Plant
  misc_feature: MA Experiment 20000437 PARAMETER Experiment Name: At_Drought_P Parameter: Treatment Value: Drought vs. No Drought
  misc_feature: MA Experiment ID: 20000438 Result: Down-regulated in Transcription
  misc_feature: MA Experiment 20000438 PARAMETER Experiment Name: At_Shoots__P Parameter: Age (day) Value: 14
  misc_feature: MA Experiment 20000438 PARAMETER Experiment Name: At_Shoots__P Parameter: Tissue Value: Shoots vs. Whole Plant
  misc_feature: MA Experiment ID: 20000445 Result: Up-regulated in Transcription
  misc_feature: MA Experiment 20000445 PARAMETER Experiment Name: At_100uM_NAA__P Parameter: Age (day) Value: 14
  misc_feature: MA Experiment 20000445 PARAMETER Experiment Name: At_100uM_NAA__P Parameter: Organism Value: A. thaliana
  misc_feature: MA Experiment 20000445 PARAMETER Experiment Name: At_100uM_NAA__P Parameter: Plant Line Value: WS
  misc_feature: MA Experiment 20000445 PARAMETER Experiment Name: At_100uM_NAA__P Parameter: Timepoint (hr) Value: 6
  misc_feature: MA Experiment 20000445 PARAMETER Experiment Name: At_100uM_NAA__P Parameter: Tissue Value: Aerial
  misc_feature: MA Experiment 20000445 PARAMETER Experiment Name: At_100uM_NAA__P Parameter: Treatment Value: 100uM NAA vs. No Treatment
  misc_feature: MA Experiment ID: 20000453 Result: Up-regulated in Transcription
  misc_feature: MA Experiment 20000453 PARAMETER Experiment Name: At_100uM_ABA_P Parameter: Age (day) Value: 15
  misc_feature: MA Experiment 20000453 PARAMETER Experiment Name: At_100uM_ABA_P Parameter: Organism Value: A. thaliana
  misc_feature: MA Experiment 20000453 PARAMETER Experiment Name: At_100uM_ABA_P Parameter: Plant Line Value: WS
  misc_feature: MA Experiment 20000453 PARAMETER Experiment Name: At_100uM_ABA_P Parameter: Timepoint (hr) Value: 24
  misc_feature: MA Experiment 20000453 PARAMETER Experiment Name: At_100uM_ABA_P Parameter: Tissue Value: Aerial
  misc_feature: MA Experiment 20000453 PARAMETER Experiment Name: At_100uM_ABA_P Parameter: Treatment Value: 100uM ABA vs. No Treatment
  misc_feature: MA Experiment ID: 20000527 Result: Down-regulated in Transcription
  misc_feature: MA Experiment 20000527 PARAMETER Experiment Name: At_10percent_PEG_P Parameter: Age (day) Value: 20
  misc_feature: MA Experiment 20000527 PARAMETER Experiment Name: At_10percent_PEG_P Parameter: Organism Value: A. thaliana
  misc_feature: MA Experiment 20000527 PARAMETER Experiment Name: At_10percent_PEG_P Parameter: Plant Line Value: WS
  misc_feature: MA Experiment 20000527 PARAMETER Experiment Name: At_10percent_PEG_P Parameter: Timepoint (day) Value: 20
  misc_feature: MA Experiment 20000527 PARAMETER Experiment Name: At_10percent_PEG_P Parameter: Tissue Value: Whole Plant
  misc_feature: MA Experiment 20000527 PARAMETER Experiment Name: At_10percent_PEG_P Parameter: Treatment Value: 10percent PEG vs. No Treatment
  misc_feature: MA Experiment ID: 20000794 Result: Up-regulated in Transcription
  misc_feature: MA Experiment 20000794 PARAMETER Experiment Name: At_Petals_P Parameter: Age (day) Value: 23-25 days
  misc_feature: MA Experiment 20000794 PARAMETER Experiment Name: At_Petals_P Parameter: Plant Line Value: WS
  misc_feature: MA Experiment 20000794 PARAMETER Experiment Name: At_Petals_P Parameter: Tissue Value: Petals vs. Whole plant
  misc_feature: MA Experiment ID: 20001757 Result: Down-regulated in Transcription
  misc_feature: MA Experiment 20001757 PARAMETER Experiment Name: At_50mM_NH4NO3_L-to-H_P Parameter: Timepoint (hr) Value: 6
  misc_feature: MA Experiment 20001757 PARAMETER Experiment Name: At_50mM_NH4NO3_L-to-H_P Parameter: Tissue Value: Leaf
  misc_feature: MA Experiment 20001757 PARAMETER Experiment Name: At_50mM_NH4NO3_L-to-H_P Parameter: Treatment Value: 50mM NH4NO3 vs 100mM Mannitol
  misc_feature: MA Experiment ID: 20001904 Result: Up-regulated in Transcription
  misc_feature: MA Experiment 20001904 PARAMETER Experiment Name: At_Drought_Reproduction_P Parameter: Age (day) Value: 37
  misc_feature: MA Experiment 20001904 PARAMETER Experiment Name: At_Drought_Reproduction_P Parameter: Organism Value: A. thaliana
  misc_feature: MA Experiment 20001904 PARAMETER Experiment Name: At_Drought_Reproduction_P Parameter: Plant Line Value: WS
  misc_feature: MA Experiment 20001904 PARAMETER Experiment Name: At_Drought_Reproduction_P Parameter: Timepoint (day) Value: 7
  misc_feature: MA Experiment 20001904 PARAMETER Experiment Name: At_Drought_Reproduction_P Parameter: Tissue Value: Rosettes
  misc_feature: MA Experiment 20001904 PARAMETER Experiment Name: At_Drought_Reproduction_P Parameter: Treatment Value: Drought vs. No Drought
  misc_feature: MA Experiment ID: 20001906 Result: Up-regulated in Transcription
  misc_feature: MA Experiment 20001906 PARAMETER Experiment Name: At_Drought_Reproduction_P Parameter: Age (day) Value: 35
  misc_feature: MA Experiment 20001906 PARAMETER Experiment Name: At_Drought_Reproduction_P Parameter: Organism Value: A. thaliana
  misc_feature: MA Experiment 20001906 PARAMETER Experiment Name: At_Drought_Reproduction_P Parameter: Plant Line Value: WS
  misc_feature: MA Experiment 20001906 PARAMETER Experiment Name: At_Drought_Reproduction_P Parameter: Timepoint (day) Value: 5
  misc_feature: MA Experiment 20001906 PARAMETER Experiment Name: At_Drought_Reproduction_P Parameter: Tissue Value: Siliques
  misc_feature: MA Experiment 20001906 PARAMETER Experiment Name: At_Drought_Reproduction_P Parameter: Treatment Value: Drought vs. No Drought
  misc_feature: MA Experiment ID: 20001908 Result: Up-regulated in Transcription
  misc_feature: MA Experiment 20001908 PARAMETER Experiment Name: At_Drought_Reproduction_P Parameter: Age (day) Value: 40
  misc_feature: MA Experiment 20001908 PARAMETER Experiment Name: At_Drought_Reproduction_P Parameter: Organism Value: A. thaliana
  misc_feature: MA Experiment 20001908 PARAMETER Experiment Name: At_Drought_Reproduction_P Parameter: Plant Line Value: WS
  misc_feature: MA Experiment 20001908 PARAMETER Experiment Name: At_Drought_Reproduction_P Parameter: Timepoint (day) Value: 10
  misc_feature: MA Experiment 20001908 PARAMETER Experiment Name: At_Drought_Reproduction_P Parameter: Tissue Value: Siliques
  misc_feature: MA Experiment 20001908 PARAMETER Experiment Name: At_Drought_Reproduction_P Parameter: Treatment Value: Drought vs. No Drought

SEQ ID NO: 41107 - protein, 378 aa, Arabidopsis thaliana; identical to SEQ ID NO: 29865
  peptide (1)..(378): Ceres Seq. ID no. 12329265
  misc_feature (33)..(366): Pfam Name: NAD dependent epimerase/dehydratase family Pfam Description: NAD dependent epimerase/dehydratase family
  misc_feature (33)..(366): Pfam Name: NAD dependent epimerase/dehydratase family Pfam Description: NAD dependent epimerase/dehydratase family
  misc_feature (3)..(369): Homolog of NCBI NO: 9965188 NR Description: UDP-glucose 4-epimerase [Moraxella catarrhalis]
  misc_feature (29)..(373): Homolog of NCBI NO: 30186144 NR Description: Unknown (protein for MGC:53114) [Xenopus laevis]
  misc_feature (27)..(369): Homolog of NCBI NO: 11386762 NR Description: UDP-glucose 4-epimerase (Galactowaldenase)
  misc_feature (29)..(372): Homolog of NCBI NO: 15217653 NR Description: UDP-galactose 4-epimerase, putative; protein id:
  misc_feature (28)..(378): Homolog of NCBI NO: 11386775 NR Description: UDP-glucose 4-epimerase GEPI48 (Galactowaldenase)
  misc_feature (3)..(369): Homolog of NCBI NO: 9965188 NR Description: UDP-glucose 4-epimerase [Moraxella catarrhalis]
  misc_feature (27)..(369): Homolog of NCBI NO: 11386762 NR Description: UDP-glucose 4-epimerase (Galactowaldenase)
  misc_feature (28)..(378): Homolog of NCBI NO: 11386775 NR Description: UDP-glucose 4-epimerase GEPI48 (Galactowaldenase)
  misc_feature (28)..(378): Homolog of NCBI NO: 15236988 NR Description: UDP-galactose 4-epimerase - like protein
  misc_feature (29)..(378): Homolog of NCBI NO: 12643850 NR Description: Probable UDP-glucose 4-epimerase At4g10960
  misc_feature (29)..(378): Homolog of NCBI NO: 21553659 NR Description: UDP-galactose 4-epimerase-like protein
  misc_feature (29)..(377): Homolog of NCBI NO: 15236663 NR Description: UDPglucose 4-epimerase - like protein
  misc_feature (29)..(377): Homolog of NCBI NO: 21536846 NR Description: UDPglucose 4-epimerase-like protein [Arabidopsis
  misc_feature (29)..(372): Homolog of NCBI NO: 15217653 NR Description: UDP-galactose 4-epimerase, putative; protein id:
  misc_feature (29)..(373): Homolog of NCBI NO: 30186144 NR Description: Unknown (protein for MGC:53114) [Xenopus laevis]
  misc_feature (29)..(377): Homolog of NCBI NO: 21536846 NR Description: UDPglucose 4-epimerase-like protein [Arabidopsis
  misc_feature (29)..(377): Homolog of NCBI NO: 15236663 NR Description: UDPglucose 4-epimerase - like protein
  misc_feature (29)..(378): Homolog of NCBI NO: 21553659 NR Description: UDP-galactose 4-epimerase-like protein
  misc_feature (29)..(378): Homolog of NCBI NO: 12643850 NR Description: Probable UDP-glucose 4-epimerase At4g10960
  misc_feature (28)..(378): Homolog of NCBI NO: 15236988 NR Description: UDP-galactose 4-epimerase - like protein

SEQ ID NO: 41108 - protein, 351 aa, Arabidopsis thaliana; identical to SEQ ID NO: 29866
  peptide (1)..(351): Ceres Seq. ID no. 12329266
  misc_feature (6)..(339): Pfam Name: NAD dependent epimerase/dehydratase family Pfam Description: NAD dependent epimerase/dehydratase family
  misc_feature (6)..(339): Pfam Name: NAD dependent epimerase/dehydratase family Pfam Description: NAD dependent epimerase/dehydratase family
  misc_feature (1)..(342): Homolog of NCBI NO: 9965188 NR Description: UDP-glucose 4-epimerase [Moraxella catarrhalis]
  misc_feature (2)..(346): Homolog of NCBI NO: 30186144 NR Description: Unknown (protein for MGC:53114) [Xenopus laevis]
  misc_feature (1)..(342): Homolog of NCBI NO: 11386762 NR Description: UDP-glucose 4-epimerase (Galactowaldenase)
  misc_feature (2)..(345): Homolog of NCBI NO: 15217653 NR Description: UDP-galactose 4-epimerase, putative; protein id:
  misc_feature (1)..(351): Homolog of NCBI NO: 11386775 NR Description: UDP-glucose 4-epimerase GEPI48 (Galactowaldenase)
  misc_feature (1)..(342): Homolog of NCBI NO: 9965188 NR Description: UDP-glucose 4-epimerase [Moraxella catarrhalis]
  misc_feature (1)..(342): Homolog of NCBI NO: 11386762 NR Description: UDP-glucose 4-epimerase (Galactowaldenase)
  misc_feature (1)..(351): Homolog of NCBI NO: 11386775 NR Description: UDP-glucose 4-epimerase GEPI48 (Galactowaldenase)
  misc_feature (1)..(351): Homolog of NCBI NO: 15236988 NR Description: UDP-galactose 4-epimerase - like protein
  misc_feature (2)..(351): Homolog of NCBI NO: 12643850 NR Description: Probable UDP-glucose 4-epimerase At4g10960
  misc_feature (2)..(351): Homolog of NCBI NO: 21553659 NR Description: UDP-galactose 4-epimerase-like protein
  misc_feature (2)..(350): Homolog of NCBI NO: 15236663 NR Description: UDPglucose 4-epimerase - like protein
  misc_feature (2)..(350): Homolog of NCBI NO: 21536846 NR Description: UDPglucose 4-epimerase-like protein [Arabidopsis
  misc_feature (2)..(345): Homolog of NCBI NO: 15217653 NR Description: UDP-galactose 4-epimerase, putative; protein id:
  misc_feature (2)..(346): Homolog of NCBI NO: 30186144 NR Description: Unknown (protein for MGC:53114) [Xenopus laevis]
  misc_feature (2)..(350): Homolog of NCBI NO: 21536846 NR Description: UDPglucose 4-epimerase-like protein [Arabidopsis
  misc_feature (2)..(350): Homolog of NCBI NO: 15236663 NR Description: UDPglucose 4-epimerase - like protein
  misc_feature (2)..(351): Homolog of NCBI NO: 21553659 NR Description: UDP-galactose 4-epimerase-like protein
  misc_feature (2)..(351): Homolog of NCBI NO: 12643850 NR Description: Probable UDP-glucose 4-epimerase At4g10960
  misc_feature (1)..(351): Homolog of NCBI NO: 15236988 NR Description: UDP-galactose 4-epimerase - like protein

SEQ ID NO: 41109 - protein, 350 aa, Arabidopsis thaliana; identical to SEQ ID NO: 29867
  peptide (1)..(350): Ceres Seq. ID no. 12329267
  misc_feature (5)..(338): Pfam Name: NAD dependent epimerase/dehydratase family Pfam Description: NAD dependent epimerase/dehydratase family
  misc_feature (5)..(338): Pfam Name: NAD dependent epimerase/dehydratase family Pfam Description: NAD dependent epimerase/dehydratase family
  misc_feature (1)..(341): Homolog of NCBI NO: 9965188 NR Description: UDP-glucose 4-epimerase [Moraxella catarrhalis]
  misc_feature (1)..(345): Homolog of NCBI NO: 30186144 NR Description: Unknown (protein for MGC:53114) [Xenopus laevis]
  misc_feature (1)..(341): Homolog of NCBI NO: 11386762 NR Description: UDP-glucose 4-epimerase (Galactowaldenase)
  misc_feature (1)..(344): Homolog of NCBI NO: 15217653 NR Description: UDP-galactose 4-epimerase, putative; protein id:
  misc_feature (1)..(350): Homolog of NCBI NO: 11386775 NR Description: UDP-glucose 4-epimerase GEPI48 (Galactowaldenase)
  misc_feature (1)..(341): Homolog of NCBI NO: 9965188 NR Description: UDP-glucose 4-epimerase [Moraxella catarrhalis]
  misc_feature (1)..(341): Homolog of NCBI NO: 11386762 NR Description: UDP-glucose 4-epimerase (Galactowaldenase)
  misc_feature (1)..(350): Homolog of NCBI NO: 11386775 NR Description: UDP-glucose 4-epimerase GEPI48 (Galactowaldenase)
  misc_feature (1)..(350): Homolog of NCBI NO: 15236988 NR Description: UDP-galactose 4-epimerase - like protein
  misc_feature (1)..(350): Homolog of NCBI NO: 12643850 NR Description: Probable UDP-glucose 4-epimerase At4g10960
  misc_feature (1)..(350): Homolog of NCBI NO: 21553659 NR Description: UDP-galactose 4-epimerase-like protein
  misc_feature (1)..(349): Homolog of NCBI NO: 15236663 NR Description: UDPglucose 4-epimerase - like protein
  misc_feature (1)..(349): Homolog of NCBI NO: 21536846 NR Description: UDPglucose 4-epimerase-like protein [Arabidopsis
  misc_feature (1)..(344): Homolog of NCBI NO: 15217653 NR Description: UDP-galactose 4-epimerase, putative; protein id:
  misc_feature (1)..(345): Homolog of NCBI NO: 30186144 NR Description: Unknown (protein for MGC:53114) [Xenopus laevis]
  misc_feature (1)..(349): Homolog of NCBI NO: 21536846 NR Description: UDPglucose 4-epimerase-like protein [Arabidopsis
  misc_feature (1)..(349): Homolog of NCBI NO: 15236663 NR Description: UDPglucose 4-epimerase - like protein
  misc_feature (1)..(350): Homolog of NCBI NO: 21553659 NR Description: UDP-galactose 4-epimerase-like protein
  misc_feature (1)..(350): Homolog of NCBI NO: 12643850 NR Description: Probable UDP-glucose 4-epimerase At4g10960
  misc_feature (1)..(350): Homolog of NCBI NO: 15236988 NR Description: UDP-galactose 4-epimerase - like protein

SEQ ID NO: 41110 - DNA, 1173 bp, Arabidopsis thaliana
  misc_feature (1)..(1173): Ceres Seq. ID no. 13509224
  misc_feature: MA Experiment ID: 20000111 Result: Down-regulated in Transcription
  misc_feature: MA Experiment 20000111 PARAMETER Experiment Name: At_42deg_Heat_cDNA_P Parameter: Temperature (deg C) Value: 42 vs. 22
  misc_feature: MA Experiment 20000111 PARAMETER Experiment Name: At_42deg_Heat_cDNA_P Parameter: Timepoint (hr) Value: 6
  misc_feature: MA Experiment 20000111 PARAMETER Experiment Name: At_42deg_Heat_cDNA_P Parameter: Tissue Value: Aerial
aacggacggcaaaactcggagtcggagatcgtaccggaggacggcgaatctttcatcttctgtcctttcgttttttatacgcgtcagatgagtctttaacttccgattagctttgtaaacaatcgcgattagtcgggattacatctaaaggattcgttgatggcggcgtcgtggcaatgggaaaatgccaccgccggcgccgtcgctggattcgccaccgtagctgctatgcaccctcttgatgttgttcgtacgagattccaagtcaacgatggtagagggtcaagtctcccaacgtacaagaacactgctcacgctgtcttcaccattgcccgtctcgagggtttgagagggctttatgcaggcttcttccctgcagttatcggttctactgtttcctggggcttatacttctttttttatggaagagccaagcagagatacgctagaggcagggatgatgagaaactcagccctgctctccaccttgcttctgctgctgaagcaggggccttggtctgtttatgcacaaatcctatttggcttgtcaaaacaaggttacagcttcagacacctcttcatcaaactcaaccatactcagggcttttagatgcctttagaaccatagtgaaagaggaaggacccagggcgctctacaagggtattgtccctggtcttgtactggtttctcatggtgctattcagttcacagcttatgaggaactccgtaaaatcattgtggatttgaaagaaaggagaagaaagtccgaatccactgataatctattgaactcagcagattacgctgcacttggcggctcctccaaagtcgctgcagttctacttacgtatccatttcaagttattcgagcacgattacagcaacgacctagtaccaacggaatcccaagatatatagacagcttacatgtcgtcagagaaaccgcaagatatgaaggtctcaggggtttctacaggggactaacggctaatcttttgaaaaatgttcctgcgtcttccatcacattcatcgtctatgaaaacgttttgaaattgctaaaacagcatccaacaacaaaagattagatccttcctcttcctttatcgttatttcttagactcaacaagcacgcggttgacttgtcactcctaatactaaagaattattctttg

SEQ ID NO: 41111 - protein, 308 aa, Arabidopsis thaliana
  peptide (1)..(308): Ceres Seq. ID no. 13509225
  misc_feature (6)..(300): Homolog of NCBI NO: 34222684 NR Description: Mitochondrial folate transporter/carrier
  misc_feature (6)..(300): Homolog of NCBI NO: 14042724 NR Description: unnamed protein product [Homo sapiens]
  misc_feature (6)..(300): Homolog of NCBI NO: 34866087 NR Description: similar to mitochondrial folate
  misc_feature (6)..(300): Homolog of NCBI NO: 34222668 NR Description: Mitochondrial folate transporter/carrier
  misc_feature (6)..(300): Homolog of NCBI NO: 27369517 NR Description: mitochondrial folate transporter/carrier [Mus
  misc_feature (265)..(300): Homolog of NCBI NO: 24652037 NR Description: CG8026-PA [Drosophila melanogaster]
  misc_feature (6)..(284): Homolog of NCBI NO: 24652037 NR Description: CG8026-PA [Drosophila melanogaster]
  misc_feature (1)..(308): Homolog of NCBI NO: 10177519 NR Description: contains similarity to peroxisomal membrane
  misc_feature (1)..(308): Homolog of NCBI NO: 18425065 NR Description: mitochondrial carrier protein family [Arabidopsis
  misc_feature (1)..(308): Homolog of NCBI NO: 21537040 NR Description: contains similarity to peroxisomal membrane
  misc_feature (6)..(300): Homolog of NCBI NO: 34222684 NR Description: Mitochondrial folate transporter/carrier
  misc_feature (6)..(300): Homolog of NCBI NO: 14042724 NR Description: unnamed protein product [Homo sapiens]
  misc_feature (6)..(300): Homolog of NCBI NO: 34866087 NR Description: similar to mitochondrial folate
  misc_feature (6)..(300): Homolog of NCBI NO: 34222668 NR Description: Mitochondrial folate transporter/carrier
  misc_feature (6)..(300): Homolog of NCBI NO: 27369517 NR Description: mitochondrial folate transporter/carrier [Mus
  misc_feature (265)..(300): Homolog of NCBI NO: 24652037 NR Description: CG8026-PA [Drosophila melanogaster]
  misc_feature (6)..(284): Homolog of NCBI NO: 24652037 NR Description: CG8026-PA [Drosophila melanogaster]
  misc_feature (1)..(308): Homolog of NCBI NO: 10177519 NR Description: contains similarity to peroxisomal membrane
  misc_feature (1)..(308): Homolog of NCBI NO: 18425065 NR Description: mitochondrial carrier protein family [Arabidopsis
  misc_feature (1)..(308): Homolog of NCBI NO: 21537040 NR Description: contains similarity to peroxisomal membrane
MAASWQWENATAGAVAGFATVAAMHPLDVVRTRFQVNDGRGSSLPTYKNTAHAVFTIARLEGLRGLYAGFFPAVIGSTVSWGLYFFFYGRAKQRYARGRDDEKLSPALHLASAAEAGALVCLCTNPIWLVKTRLQLQTPLHQTQPYSGLLDAFRTIVKEEGPRALYKGIVPGLVLVSHGAIQFTAYEELRKIIVDLKERRRKSESTDNLLNSADYAALGGSSKVAAVLLTYPFQVIRARLQQRPSTNGIPRYIDSLHVVRETARYEGLRGFYRGLTANLLKNVPASSITFIVYENVLKLLKQHPTTKD

SEQ ID NO: 41112 - protein, 285 aa, Arabidopsis thaliana
  peptide (1)..(285): Ceres Seq. ID no. 13509226
  misc_feature (1)..(277): Homolog of NCBI NO: 34222684 NR Description: Mitochondrial folate transporter/carrier
  misc_feature (1)..(277): Homolog of NCBI NO: 14042724 NR Description: unnamed protein product [Homo sapiens]
  misc_feature (1)..(277): Homolog of NCBI NO: 34866087 NR Description: similar to mitochondrial folate
  misc_feature (1)..(277): Homolog of NCBI NO: 34222668 NR Description: Mitochondrial folate transporter/carrier
  misc_feature (1)..(277): Homolog of NCBI NO: 27369517 NR Description: mitochondrial folate transporter/carrier [Mus
  misc_feature (242)..(277): Homolog of NCBI NO: 24652037 NR Description: CG8026-PA [Drosophila melanogaster]
  misc_feature (1)..(261): Homolog of NCBI NO: 24652037 NR Description: CG8026-PA [Drosophila melanogaster]
  misc_feature (1)..(285): Homolog of NCBI NO: 10177519 NR Description: contains similarity to peroxisomal membrane
  misc_feature (1)..(285): Homolog of NCBI NO: 18425065 NR Description: mitochondrial carrier protein family [Arabidopsis
  misc_feature (1)..(285): Homolog of NCBI NO: 21537040 NR Description: contains similarity to peroxisomal membrane
  misc_feature (1)..(277): Homolog of NCBI NO: 34222684 NR Description: Mitochondrial folate transporter/carrier
  misc_feature (1)..(277): Homolog of NCBI NO: 14042724 NR Description: unnamed protein product [Homo sapiens]
  misc_feature (1)..(277): Homolog of NCBI NO: 34866087 NR Description: similar to mitochondrial folate
  misc_feature (1)..(277): Homolog of NCBI NO: 34222668 NR Description: Mitochondrial folate transporter/carrier
  misc_feature (1)..(277): Homolog of NCBI NO: 27369517 NR Description: mitochondrial folate transporter/carrier [Mus
  misc_feature (242)..(277): Homolog of NCBI NO: 24652037 NR Description: CG8026-PA [Drosophila melanogaster]
  misc_feature (1)..(261): Homolog of NCBI NO: 24652037 NR Description: CG8026-PA [Drosophila melanogaster]
  misc_feature (1)..(285): Homolog of NCBI NO: 10177519 NR Description: contains similarity to peroxisomal membrane
  misc_feature (1)..(285): Homolog of NCBI NO: 18425065 NR Description: mitochondrial carrier protein family [Arabidopsis
  misc_feature (1)..(285): Homolog of NCBI NO: 21537040 NR Description: contains similarity to peroxisomal membrane
MHPLDVVRTRFQVNDGRGSSLPTYKNTAHAVFTIARLEGLRGLYAGFFPAVIGSTVSWGLYFFFYGRAKQRYARGRDDEKLSPALHLASAAEAGALVCLCTNPIWLVKTRLQLQTPLHQTQPYSGLLDAFRTIVKEEGPRALYKGIVPGLVLVSHGAIQFTAYEELRKIIVDLKERRRKSESTDNLLNSADYAALGGSSKVAAVLLTYPFQVIRARLQQRPSTNGIPRYIDSLHVVRETARYEGLRGFYRGLTANLLKNVPASSITFIVYENVLKLLKQHPTTKD

SEQ ID NO: 41113 - DNA, 1147 bp, Arabidopsis thaliana
  misc_feature (1)..(1147): Ceres Seq. ID no. 12395398
  misc_feature: MA Experiment ID: 108573 Result: Up-regulated in Transcription
  misc_feature: MA Experiment 108573 PARAMETER Experiment Name: At_Drought_cDNA_P Parameter: Timepoint (hr) Value: 6
  misc_feature: MA Experiment 108573 PARAMETER Experiment Name: At_Drought_cDNA_P Parameter: Tissue Value: Aerial
  misc_feature: MA Experiment 108573 PARAMETER Experiment Name: At_Drought_cDNA_P Parameter: Treatment Value: Drought vs. No Drought
  misc_feature: MA Experiment ID: 108577 Result: Down-regulated in Transcription
  misc_feature: MA Experiment 108577 PARAMETER Experiment Name: At_42deg_Heat_cDNA_P Parameter: Temperature (deg C) Value: 42 vs. 22
  misc_feature: MA Experiment 108577 PARAMETER Experiment Name: At_42deg_Heat_cDNA_P Parameter: Timepoint (hr) Value: 6
  misc_feature: MA Experiment 108577 PARAMETER Experiment Name: At_42deg_Heat_cDNA_P Parameter: Tissue Value: Aerial
  misc_feature: MA Experiment ID: 108595 Result: Up-regulated in Transcription
  misc_feature: MA Experiment 108595 PARAMETER Experiment Name: At_Ler-pi_Ovule_cDNA_P Parameter: Plant Line Value: null
  misc_feature: MA Experiment ID: 20000224 Result: Down-regulated in Transcription
atctccaatcgctctctctctctctctctctctctcgctcggtgtgatccgtgtagagagattggatttgctgagtaacggtgcaatgtctcgctaccagtctcattcctttgatgacggagaaattaatccttttgcgaatcctacaagtgtcccagctgcaacgtcaaagctttctcctcttccccctgagccgtacgaccgtggtgccacaatggatattcctcttgactctggaaaggatctgaaagctaaggagaaggaactccgggaaaaggaggctgaattgaagaggcgggagcaggaaatcaagcggaaagaagatgctatagcacaggccggaattgtgatagaagagaaaaactggccaccgttttttcctctcatccatcatgacatttcaaatgagatacccatccatctgcagagaatccaatatgttgctttcacatcaatgctgggtcttgtggtgtgcctgttatggaacattgtcgcagttactactgcgtggattaagggagaaggtccaacaatatggtttctagctattatctatttcatatcaggggttcctggagcgtatgttatgtggtatcgccctctttatcgtgccatgaggactgatagtgctctgaattttgggtggtttttcttcacgtatctgtttcacatagcgttttgtgtgtttgcggcggtggctcctccaattatcttcaagggaaaatcgctgacaggaatattgccggcgatcgacgtattgagtgggaatatcttggtcgggatattttacttcattgggtttgggttcttctgtctggagtcactcgtcagcatctgggttattcagcaagtgtacatgtacttcagggggagcgggaaagcagcagagatgaagcaggaggccacaagacgagcaatgatggcagctctctgaccaatgaccacatacacacaccttttaacccatctccaattttttcccatttaacatacaaacaaacagtgaacgttagatcctcttgaagggattgattatactccgctactcacttcatttttgttttcctcccgatttcatttaactaagattccagtgaactcaacttcttacttttttttggtaaaaggtgaagtcaacttcttactc

SEQ ID NO: 41114 - protein, 310 aa, Arabidopsis thaliana
  peptide (1)..(310): Ceres Seq. ID no. 12395399
  misc_feature (118)..(292): Pfam Name: SCAMP family Pfam Description: SCAMP family
  misc_feature (175)..(310): Homolog of NCBI NO: 7485909 NR Description: hypothetical protein F21B7.17 - Arabidopsis
  misc_feature (29)..(291): Homolog of NCBI NO: 15222550 NR Description: secretory carrier membrane protein, putative
  misc_feature (31)..(310): Homolog of NCBI NO: 25402653 NR Description: hypothetical protein [imported] - Arabidopsis
  misc_feature (31)..(310): Homolog of NCBI NO: 3941289 NR Description: similarity to SCAMP37 [Pisum sativum]
  misc_feature (47)..(309): Homolog of NCBI NO: 34899754 NR Description: putative secretory carrier membrane protein
  misc_feature (31)..(309): Homolog of NCBI NO: 7109232 NR Description: secretory carrier membrane protein [Oryza sativa]
  misc_feature (31)..(310): Homolog of NCBI NO: 15220305 NR Description: secretory carrier membrane protein, putative
  misc_feature (30)..(310): Homolog of NCBI NO: 15219893 NR Description: secretory carrier membrane protein
  misc_feature (29)..(310): Homolog of NCBI NO: 18379111 NR Description: expressed protein
  misc_feature (29)..(310): Homolog of NCBI NO: 15226410 NR Description: putative secretory carrier-associated membrane
SPIALSLSLSLSLGVIRVERLDLLSNGAMSRYQSHSFDDGEINPFANPTSVPAATSKLSPLPPEPYDRGATMDIPLDSGKDLKAKEKELREKEAELKRREQEIKRKEDAIAQAGIVIEEKNWPPFFPLIHHDISNEIPIHLQRIQYVAFTSMLGLVVCLLWNIVAVTTAWIKGEGPTIWFLAIIYFISGVPGAYVMWYRPLYRAMRTDSALNFGWFFFTYLFHIAFCVFAAVAPPIIFKGKSLTGILPAIDVLSGNILVGIFYFIGFGFFCLESLVSIWVIQQVYMYFRGSGKAAEMKQEATRRAMMAAL

SEQ ID NO: 41115 - protein, 282 aa, Arabidopsis thaliana
  peptide (1)..(282): Ceres Seq. ID no. 12395400
  misc_feature (90)..(264): Pfam Name: SCAMP family Pfam Description: SCAMP family
  misc_feature (147)..(282): Homolog of NCBI NO: 7485909 NR Description: hypothetical protein F21B7.17 - Arabidopsis
  misc_feature (1)..(263): Homolog of NCBI NO: 15222550 NR Description: secretory carrier membrane protein, putative
  misc_feature (3)..(282): Homolog of NCBI NO: 25402653 NR Description: hypothetical protein [imported] - Arabidopsis
  misc_feature (3)..(282): Homolog of NCBI NO: 3941289 NR Description: similarity to SCAMP37 [Pisum sativum]
  misc_feature (19)..(281): Homolog of NCBI NO: 34899754 NR Description: putative secretory carrier membrane protein
  misc_feature (3)..(281): Homolog of NCBI NO: 7109232 NR Description: secretory carrier membrane protein [Oryza sativa]
  misc_feature (3)..(282): Homolog of NCBI NO: 15220305 NR Description: secretory carrier membrane protein, putative
  misc_feature (2)..(282): Homolog of NCBI NO: 15219893 NR Description: secretory carrier membrane protein
  misc_feature (1)..(282): Homolog of NCBI NO: 18379111 NR Description: expressed protein
  misc_feature (1)..(282): Homolog of NCBI NO: 15226410 NR Description: putative secretory carrier-associated membrane
MSRYQSHSFDDGEINPFANPTSVPAATSKLSPLPPEPYDRGATMDIPLDSGKDLKAKEKELREKEAELKRREQEIKRKEDAIAQAGIVIEEKNWPPFFPLIHHDISNEIPIHLQRIQYVAFTSMLGLVVCLLWNIVAVTTAWIKGEGPTIWFLAIIYFISGVPGAYVMWYRPLYRAMRTDSALNFGWFFFTYLFHIAFCVFAAVAPPIIFKGKSLTGILPAIDVLSGNILVGIFYFIGFGFFCLESLVSIWVIQQVYMYFRGSGKAAEMKQEATRRAMMAAL

SEQ ID NO: 41116 - protein, 239 aa, Arabidopsis thaliana
  peptide (1)..(239): Ceres Seq. ID no. 12395401
  misc_feature (47)..(221): Pfam Name: SCAMP family Pfam Description: SCAMP family
  misc_feature (104)..(239): Homolog of NCBI NO: 7485909 NR Description: hypothetical protein F21B7.17 - Arabidopsis
  misc_feature (1)..(220): Homolog of NCBI NO: 15222550 NR Description: secretory carrier membrane protein, putative
  misc_feature (1)..(239): Homolog of NCBI NO: 25402653 NR Description: hypothetical protein [imported] - Arabidopsis
  misc_feature (1)..(239): Homolog of NCBI NO: 3941289 NR Description: similarity to SCAMP37 [Pisum sativum]
  misc_feature (1)..(238): Homolog of NCBI NO: 34899754 NR Description: putative secretory carrier membrane protein
  misc_feature (1)..(238): Homolog of NCBI NO: 7109232 NR Description: secretory carrier membrane protein [Oryza sativa]
  misc_feature (1)..(239): Homolog of NCBI NO: 15220305 NR Description: secretory carrier membrane protein, putative
  misc_feature (1)..(239): Homolog of NCBI NO: 15219893 NR Description: secretory carrier membrane protein
  misc_feature (1)..(239): Homolog of NCBI NO: 18379111 NR Description: expressed protein
  misc_feature (1)..(239): Homolog of NCBI NO: 15226410 NR Description: putative secretory carrier-associated membrane
MDIPLDSGKDLKAKEKELREKEAELKRREQEIKRKEDAIAQAGIVIEEKNWPPFFPLIHHDISNEIPIHLQRIQYVAFTSMLGLVVCLLWNIVAVTTAWIKGEGPTIWFLAIIYFISGVPGAYVMWYRPLYRAMRTDSALNFGWFFFTYLFHIAFCVFAAVAPPIIFKGKSLTGILPAIDVLSGNILVGIFYFIGFGFFCLESLVSIWVIQQVYMYFRGSGKAAEMKQEATRRAMMAAL

SEQ ID NO: 41117 - DNA, 1236 bp, Arabidopsis thaliana
  misc_feature (1)..(1236): Ceres Seq. ID no. 13497425
  misc_feature: MA Experiment ID: 108433 Result: Up-regulated in Transcription
  misc_feature: MA Experiment 108433 PARAMETER Experiment Name: At_rhl_Mutant2_cDNA_P Parameter: Age (day) Value: 7
  misc_feature: MA Experiment 108433 PARAMETER Experiment Name: At_rhl_Mutant2_cDNA_P Parameter: Organism Value: A. thaliana
  misc_feature: MA Experiment 108433 PARAMETER Experiment Name: At_rhl_Mutant2_cDNA_P Parameter: Plant Line Value: rhl Mutant vs. wt landsburg
  misc_feature: MA Experiment 108433 PARAMETER Experiment Name: At_rhl_Mutant2_cDNA_P Parameter: Tissue Value: Roots
  misc_feature: MA Experiment ID: 108434 Result: Down-regulated in Transcription
  misc_feature: MA Experiment 108434 PARAMETER Experiment Name: At_Root_Tips_cDNA_P Parameter: Tissue Value: Root Tips
  misc_feature: MA Experiment ID: 108435 Result: Up-regulated in Transcription
  misc_feature: MA Experiment 108435 PARAMETER Experiment Name: At_stm_Mutants_cDNA_P Parameter: Plant Line Value: wt Landsburg vs stm
  misc_feature: MA Experiment 108435 PARAMETER Experiment Name: At_stm_Mutants_cDNA_P Parameter: Tissue Value: Shoot Apical Meristem Region
  misc_feature: MA Experiment ID: 108461 Result: Up-regulated in Transcription
  misc_feature: MA Experiment 108461 PARAMETER Experiment Name: At_Germinating_Seeds_cDNA_P Parameter: Age (day) Value: 1 vs. 0
  misc_feature: MA Experiment 108461 PARAMETER Experiment Name: At_Germinating_Seeds_cDNA_P Parameter: Tissue Value: Germinating Seeds
  misc_feature: MA Experiment ID: 108462 Result: Up-regulated in Transcription
  misc_feature: MA Experiment 108462 PARAMETER Experiment Name: At_Germinating_Seeds_cDNA_P Parameter: Age (day) Value: 2 vs. 0
  misc_feature: MA Experiment 108462 PARAMETER Experiment Name: At_Germinating_Seeds_cDNA_P Parameter: Tissue Value: Germinating Seeds
  misc_feature: MA Experiment ID: 108463 Result: Up-regulated in Transcription
  misc_feature: MA Experiment 108463 PARAMETER Experiment Name: At_Germinating_Seeds_cDNA_P Parameter: Age (day) Value: 3 vs. 0
  misc_feature: MA Experiment 108463 PARAMETER Experiment Name: At_Germinating_Seeds_cDNA_P Parameter: Tissue Value: Germinating Seeds
  misc_feature: MA Experiment ID: 108464 Result: Up-regulated in Transcription
  misc_feature: MA Experiment 108464 PARAMETER Experiment Name: At_Germinating_Seeds_cDNA_P Parameter: Age (day) Value: 4 vs. 0
  misc_feature: MA Experiment 108464 PARAMETER Experiment Name: At_Germinating_Seeds_cDNA_P Parameter: Tissue Value: Germinating Seeds
  misc_feature: MA Experiment ID: 108489 Result: Up-regulated in Transcription
  misc_feature: MA Experiment ID: 108577 Result: Down-regulated in Transcription
  misc_feature: MA Experiment 108577 PARAMETER Experiment Name: At_42deg_Heat_cDNA_P Parameter: Temperature (deg C) Value: 42 vs. 22
  misc_feature: MA Experiment 108577 PARAMETER Experiment Name: At_42deg_Heat_cDNA_P Parameter: Timepoint (hr) Value: 6
  misc_feature: MA Experiment 108577 PARAMETER Experiment Name: At_42deg_Heat_cDNA_P Parameter: Tissue Value: Aerial
  misc_feature: MA Experiment ID: 108595 Result: Down-regulated in Transcription
  misc_feature: MA Experiment 108595 PARAMETER Experiment Name: At_Ler-pi_Ovule_cDNA_P Parameter: Plant Line Value: null
  misc_feature: MA Experiment ID: 20000111 Result: Down-regulated in Transcription
  misc_feature: MA Experiment 20000111 PARAMETER Experiment Name: At_42deg_Heat_cDNA_P Parameter: Temperature (deg C) Value: 42 vs. 22
  misc_feature: MA Experiment 20000111 PARAMETER Experiment Name: At_42deg_Heat_cDNA_P Parameter: Timepoint (hr) Value: 6
  misc_feature: MA Experiment 20000111 PARAMETER Experiment Name: At_42deg_Heat_cDNA_P Parameter: Tissue Value: Aerial
  misc_feature: MA Experiment ID: 20000113 Result: Down-regulated in Transcription
  misc_feature: MA Experiment 20000113 PARAMETER Experiment Name: At_42deg_Heat_cDNA_P Parameter: Temperature (deg C) Value: 42 vs. 22
  misc_feature: MA Experiment 20000113 PARAMETER Experiment Name: At_42deg_Heat_cDNA_P Parameter: Timepoint (hr) Value: 8
  misc_feature: MA Experiment 20000113 PARAMETER Experiment Name: At_42deg_Heat_cDNA_P Parameter: Tissue Value: Aerial
  misc_feature: MA Experiment ID: 20000224 Result: Down-regulated in Transcription
atcctgtctctcttcagtgacacaaacccaaagaaaagtagtgagaaacaaaatcgaggtaactactagatgaagacgatgacgcaattaaatattgcggttgtggttgtagtgacggttcttattggaatgttgagatcatcggaggctcaacttcaaatgaatttctacgcgaagagctgtccaaacgcagagaaaatcatttcagatcatattcaaaatcatatccacaatggtccttctcttgcagctcctctcatccgaatgcacttccatgattgcttcgttaggggatgtgacggatcggtgttgataaattcaacatctggtaacgcagagagagatgcaccaccgaatctaacacttagaggattcggtttcgtggaaaggattaaggctcttcttgaaaaagtgtgtcctaagactgtttcttgcgcagatatcattgctttgactgctagagacacagttgtcgccaccggaggtccttcatggagtgttccaacgggaagaagagacggtaggatctcaaatttgaaggaggctacgaataacattccacctccaacgagtaatttcacgactttacgacgacttttcaaaaaccaaggccttaatctcaaggaccttgttctgctctctggggctcacacgattggtgtctcacattgttcttccatgaatactcgtctctacaacttctcgactacagtcaaacaagatccatctctcgatagccagtacgcagctaatctaaaggctaacaaatgtaagagcctaaacgacaatagcaccatcctggagatggatcccggtagtagcagaagcttcgatctcagttattataggcttgtcttgaagaggagaggcttgttccaatctgattctgccttgacaacgaactcagcgacgttgaaggtgatcaacgacttggtcaacggttctgaaaagaagtttttcaaagcttttgctaagtcaatrggagaagatggggagagttaawgtgacagactggctcagctggtgtgatcaggacacggtgttctgtcgctggaagttagtaagcttggtcggaatgtggtgtgttatggtcattgttgttttgtgtgactttcggaaaaaacaaatgttgttaatttaattttgttgttgtttgatttgtgtttatgcacccaagaatgatgtgttatggttcaattaatatgtgaatcatttaaatttacaataattcttatt

SEQ ID NO: 41118 - protein, 310 aa, Arabidopsis thaliana
  peptide (1)..(310): Ceres Seq. ID no. 15223011
  misc_feature (9)..(308): Homolog of NCBI NO: 15220463 NR Description: peroxidase, putative [Arabidopsis thaliana]
  misc_feature (9)..(308): Homolog of NCBI NO: 21536908 NR Description: putative peroxidase [Arabidopsis thaliana]
  misc_feature (4)..(308): Homolog of NCBI NO: 1546704 NR Description: peroxidase ATP7a [Arabidopsis thaliana]
  misc_feature (1)..(308): Homolog of NCBI NO: 1402920 NR Description: peroxidase [Arabidopsis thaliana]
  misc_feature (1)..(308): Homolog of NCBI NO: 15233153 NR Description: peroxidase, putative [Arabidopsis thaliana]
  misc_feature (4)..(308): Homolog of NCBI NO: 21537041 NR Description: putative peroxidase [Arabidopsis thaliana]
  misc_feature (304)..(304): Xaa is any aa, unknown or other
MKTMTQLNIAVVVVVTVLIGMLRSSEAQLQMNFYAKSCPNAEKIISDHIQNHIHNGPSLAAPLIRMHFHDCFVRGCDGSVLINSTSGNAERDAPPNLTLRGFGFVERIKALLEKVCPKTVSCADIIALTARDTVVATGGPSWSVPTGRRDGRISNLKEATNNIPPPTSNFTTLRRLFKNQGLNLKDLVLLSGAHTIGVSHCSSMNTRLYNFSTTVKQDPSLDSQYAANLKANKCKSLNDNSTILEMDPGSSRSFDLSYYRLVLKRRGLFQSDSALTTNSATLKVINDLVNGSEKKFFKAFAKSXGEDGES

SEQ ID NO: 41119 - protein, 307 aa, Arabidopsis thaliana
  peptide (1)..(307): Ceres Seq. ID no. 15223012
  misc_feature (6)..(305): Homolog of NCBI NO: 15220463 NR Description: peroxidase, putative [Arabidopsis thaliana]
  misc_feature (6)..(305): Homolog of NCBI NO: 21536908 NR Description: putative peroxidase [Arabidopsis thaliana]
  misc_feature (1)..(305): Homolog of NCBI NO: 1546704 NR Description: peroxidase ATP7a [Arabidopsis thaliana]
  misc_feature (1)..(305): Homolog of NCBI NO: 1402920 NR Description: peroxidase [Arabidopsis thaliana]
  misc_feature (1)..(305): Homolog of NCBI NO: 15233153 NR Description: peroxidase, putative [Arabidopsis thaliana]
  misc_feature (1)..(305): Homolog of NCBI NO: 21537041 NR Description: putative peroxidase [Arabidopsis thaliana]
  misc_feature (301)..(301): Xaa is any aa, unknown or other
MTQLNIAVVVVVTVLIGMLRSSEAQLQMNFYAKSCPNAEKIISDHIQNHIHNGPSLAAPLIRMHFHDCFVRGCDGSVLINSTSGNAERDAPPNLTLRGFGFVERIKALLEKVCPKTVSCADIIALTARDTVVATGGPSWSVPTGRRDGRISNLKEATNNIPPPTSNFTTLRRLFKNQGLNLKDLVLLSGAHTIGVSHCSSMNTRLYNFSTTVKQDPSLDSQYAANLKANKCKSLNDNSTILEMDPGSSRSFDLSYYRLVLKRRGLFQSDSALTTNSATLKVINDLVNGSEKKFFKAFAKSXGEDGES

SEQ ID NO: 41120 - protein, 290 aa, Arabidopsis thaliana
  peptide (1)..(290): Ceres Seq. ID no. 15223013
  misc_feature (1)..(288): Homolog of NCBI NO: 15220463 NR Description: peroxidase, putative [Arabidopsis thaliana]
  misc_feature (1)..(288): Homolog of NCBI NO: 21536908 NR Description: putative peroxidase [Arabidopsis thaliana]
  misc_feature (1)..(288): Homolog of NCBI NO: 1546704 NR Description: peroxidase ATP7a [Arabidopsis thaliana]
  misc_feature (1)..(288): Homolog of NCBI NO: 1402920 NR Description: peroxidase [Arabidopsis thaliana]
  misc_feature (1)..(288): Homolog of NCBI NO: 15233153 NR Description: peroxidase, putative [Arabidopsis thaliana]
  misc_feature (1)..(288): Homolog of NCBI NO: 21537041 NR Description: putative peroxidase [Arabidopsis thaliana]
  misc_feature (284)..(284): Xaa is any aa, unknown or other
MLRSSEAQLQMNFYAKSCPNAEKIISDHIQNHIHNGPSLAAPLIRMHFHDCFVRGCDGSVLINSTSGNAERDAPPNLTLRGFGFVERIKALLEKVCPKTVSCADIIALTARDTVVATGGPSWSVPTGRRDGRISNLKEATNNIPPPTSNFTTLRRLFKNQGLNLKDLVLLSGAHTIGVSHCSSMNTRLYNFSTTVKQDPSLDSQYAANLKANKCKSLNDNSTILEMDPGSSRSFDLSYYRLVLKRRGLFQSDSALTTNSATLKVINDLVNGSEKKFFKAFAKSXGEDGES

SEQ ID NO: 41121 - DNA, 2066 bp, Arabidopsis thaliana
  misc_feature (1)..(2066): Ceres Seq. ID no. 13575096
  misc_feature: MA Experiment ID: 20000171 Result: Down-regulated in Transcription
  misc_feature: MA Experiment 20000171 PARAMETER Experiment Name: At_42deg_Heat_P Parameter: Age (day) Value: 14
  misc_feature: MA Experiment 20000171 PARAMETER Experiment Name: At_42deg_Heat_P Parameter: Organism Value: A. thaliana
  misc_feature: MA Experiment 20000171 PARAMETER Experiment Name: At_42deg_Heat_P Parameter: Plant Line Value: WS
  misc_feature: MA Experiment 20000171 PARAMETER Experiment Name: At_42deg_Heat_P Parameter: Temperature (deg C) Value: 42 vs. 22
  misc_feature: MA Experiment 20000171 PARAMETER Experiment Name: At_42deg_Heat_P Parameter: Timepoint (hr) Value: 1
  misc_feature: MA Experiment 20000171 PARAMETER Experiment Name: At_42deg_Heat_P Parameter: Tissue Value: Aerial
  misc_feature: MA Experiment ID: 20000173 Result: Down-regulated in Transcription
  misc_feature: MA Experiment 20000173 PARAMETER Experiment Name: At_42deg_Heat_P Parameter: Age (day) Value: 14
  misc_feature: MA Experiment 20000173 PARAMETER Experiment Name: At_42deg_Heat_P Parameter: Organism Value: A. thaliana
  misc_feature: MA Experiment 20000173 PARAMETER Experiment Name: At_42deg_Heat_P Parameter: Plant Line Value: WS
  misc_feature: MA Experiment 20000173 PARAMETER Experiment Name: At_42deg_Heat_P Parameter: Temperature (deg C) Value: 42 vs. 22
  misc_feature: MA Experiment 20000173 PARAMETER Experiment Name: At_42deg_Heat_P Parameter: Timepoint (hr) Value: 6
  misc_feature: MA Experiment 20000173 PARAMETER Experiment Name: At_42deg_Heat_P Parameter: Tissue Value: Aerial
  misc_feature: MA Experiment ID: 20000211 Result: Up-regulated in Transcription
  misc_feature: MA Experiment 20000211 PARAMETER Experiment Name: At_0.001percent_MeJA__P Parameter: Age (day) Value: 14
  misc_feature: MA Experiment 20000211 PARAMETER Experiment Name: At_0.001percent_MeJA__P Parameter: Organism Value: A. thaliana
  misc_feature: MA Experiment 20000211 PARAMETER Experiment Name: At_0.001percent_MeJA__P Parameter: Plant Line Value: WS
  misc_feature: MA Experiment 20000211 PARAMETER Experiment Name: At_0.001percent_MeJA__P Parameter: Timepoint (hr) Value: 1
  misc_feature: MA Experiment 20000211 PARAMETER Experiment Name: At_0.001percent_MeJA__P Parameter: Tissue Value: Aerial
  misc_feature: MA Experiment 20000211 PARAMETER Experiment Name: At_0.001percent_MeJA__P Parameter: Treatment Value: 0.001percent MeJA vs. No Treatment
  misc_feature: MA Experiment ID: 20000227 Result: Down-regulated in Transcription
  misc_feature: MA Experiment 20000227 PARAMETER Experiment Name: At_Root-Tips-vs-Tops_P Parameter: Tissue Value: Root Tips vs. Root Tops
  misc_feature: MA Experiment ID: 20000269 Result: Down-regulated in Transcription
  misc_feature: MA Experiment 20000269 PARAMETER Experiment Name: At_1mM_KNO3_L-vs-H_Roots_P Parameter: Age (day) Value: 7,10,12
  misc_feature: MA Experiment 20000269 PARAMETER Experiment Name: At_1mM_KNO3_L-vs-H_Roots_P Parameter: Organism Value: A. thaliana
  misc_feature: MA Experiment 20000269 PARAMETER Experiment Name: At_1mM_KNO3_L-vs-H_Roots_P Parameter: Plant Line Value: WS
  misc_feature: MA Experiment 20000269 PARAMETER Experiment Name: At_1mM_KNO3_L-vs-H_Roots_P Parameter: Timepoint (day) Value: 7,10,12
  misc_feature: MA Experiment 20000269 PARAMETER Experiment Name: At_1mM_KNO3_L-vs-H_Roots_P Parameter: Tissue Value: Roots
  misc_feature: MA Experiment 20000269 PARAMETER Experiment Name: At_1mM_KNO3_L-vs-H_Roots_P Parameter: Treatment Value: 1mM KNO3 vs. 50mM KNO3
  misc_feature: MA Experiment ID: 20000439 Result: Up-regulated in Transcription
  misc_feature: MA Experiment 20000439 PARAMETER Experiment Name: At_Roots__P Parameter: Age (day) Value: 14 vs. 21
  misc_feature: MA Experiment 20000439 PARAMETER Experiment Name: At_Roots__P Parameter: Organism Value: A. thaliana
  misc_feature: MA Experiment 20000439 PARAMETER Experiment Name: At_Roots__P Parameter: Tissue Value: Roots vs. Whole Plant
  misc_feature: MA Experiment ID: 20000573 Result: Down-regulated in Transcription
  misc_feature: MA Experiment 20000573 PARAMETER Experiment Name: At_100uM_ABA_Mutants__P Parameter: Organism Value: A. thaliana
  misc_feature: MA Experiment 20000573 PARAMETER Experiment Name: At_100uM_ABA_Mutants__P Parameter: Plant Line Value: CS22 vs. Ler wt
  misc_feature: MA Experiment 20000573 PARAMETER Experiment Name: At_100uM_ABA_Mutants__P Parameter: Timepoint (hr) Value: N/A
  misc_feature: MA Experiment 20000573 PARAMETER Experiment Name: At_100uM_ABA_Mutants__P Parameter: Tissue Value: Whole Plant
  misc_feature: MA Experiment 20000573 PARAMETER Experiment Name: At_100uM_ABA_Mutants__P Parameter: Treatment Value: None
  misc_feature: MA Experiment ID: 20000574 Result: Down-regulated in Transcription
  misc_feature: MA Experiment 20000574 PARAMETER Experiment Name: At_100uM_ABA_Mutants__P Parameter: Organism Value: A. thaliana
  misc_feature: MA Experiment 20000574 PARAMETER Experiment Name: At_100uM_ABA_Mutants__P Parameter: Plant Line Value: CS23 vs. Ler wt
  misc_feature: MA Experiment 20000574 PARAMETER Experiment Name: At_100uM_ABA_Mutants__P Parameter: Timepoint (hr) Value: N/A
  misc_feature: MA Experiment 20000574 PARAMETER Experiment Name: At_100uM_ABA_Mutants__P Parameter: Tissue Value: Whole Plant
  misc_feature: MA Experiment 20000574 PARAMETER Experiment Name: At_100uM_ABA_Mutants__P Parameter: Treatment Value: None
  misc_feature: MA Experiment ID: 20001248 Result: Down-regulated in Transcription
  misc_feature: MA Experiment 20001248 PARAMETER Experiment Name: At_Far-red-induction_P Parameter: Age (day) Value: 7
  misc_feature: MA Experiment 20001248 PARAMETER Experiment Name: At_Far-red-induction_P Parameter: Light Value: Far-red vs. White
  misc_feature: MA Experiment 20001248 PARAMETER Experiment Name: At_Far-red-induction_P Parameter: Organism Value: A. thaliana
  misc_feature: MA Experiment 20001248 PARAMETER Experiment Name: At_Far-red-induction_P Parameter: Plant Line Value: Columbia
  misc_feature: MA Experiment 20001248 PARAMETER Experiment Name: At_Far-red-induction_P Parameter: Timepoint (hr) Value: 4
  misc_feature: MA Experiment 20001248 PARAMETER Experiment Name: At_Far-red-induction_P Parameter: Tissue Value: Whole Plant
  misc_feature: MA Experiment ID: 20001450 Result: Down-regulated in Transcription
  misc_feature: MA Experiment 20001450 PARAMETER Experiment Name: At_Far-red-induction_P Parameter: Age (day) Value: 7
  misc_feature: MA Experiment 20001450 PARAMETER Experiment Name: At_Far-red-induction_P Parameter: Light Value: Far-red vs. White
  misc_feature: MA Experiment 20001450 PARAMETER Experiment Name: At_Far-red-induction_P Parameter: Organism Value: A. thaliana
  misc_feature: MA Experiment 20001450 PARAMETER Experiment Name: At_Far-red-induction_P Parameter: Plant Line Value: Columbia
  misc_feature: MA Experiment 20001450 PARAMETER Experiment Name: At_Far-red-induction_P Parameter: Timepoint (hr) Value: 8
  misc_feature: MA Experiment 20001450 PARAMETER Experiment Name: At_Far-red-induction_P Parameter: Tissue Value: Whole Plant
  misc_feature: MA Experiment ID: 20001911 Result: Down-regulated in Transcription
  misc_feature: MA Experiment 20001911 PARAMETER Experiment Name: At_Drought_Reproduction_P Parameter: Age (day) Value: 40
  misc_feature: MA Experiment 20001911 PARAMETER Experiment Name: At_Drought_Reproduction_P Parameter: Organism Value: A. thaliana
  misc_feature: MA Experiment 20001911 PARAMETER Experiment Name: At_Drought_Reproduction_P Parameter: Plant Line Value: WS
  misc_feature: MA Experiment 20001911 PARAMETER Experiment Name: At_Drought_Reproduction_P Parameter: Timepoint (day) Value: 10
  misc_feature: MA Experiment 20001911 PARAMETER Experiment Name: At_Drought_Reproduction_P Parameter: Tissue Value: Flowers
  misc_feature: MA Experiment 20001911 PARAMETER Experiment Name: At_Drought_Reproduction_P Parameter: Treatment Value: Drought vs. No Drought
aatagctaaactaagcaaatctctaagacttgttctcattttgtttgttcaaaatcccattaaaaaaaaacacaatgcaaccttaaattatttccgtttagtctctctcttcacagtcctgacctctctcaactctcacaacattaccaaatacatcccataaaaaaacaattctttaaaaaaaaaatattttgatataaacagaaaaaacaattaatggaggctgcaaaagtttacacacaagatggcaccgtcgacctccaaggccgtcccgtcctcgcctccaagaccggtcgttggagagcttgctctttcctcctcgggtatgaagcgtttgagaggatggcgttttatggaatagcgtcgaacttagtgaattatttgactaaaagacttcacgaagatacgatctcttcggttagaaatgtgaataattggtccggtgcggtttggatcactcccatagccggagcttacatcgctgactcatacatcggtcgcttctggacttttactgcctcctctctcatctacgtcctggggatgattctcttgacaatggcggtaacagtaaaatccctaagaccgacatgcgaaaacggggtatgcaacaaggcctcctcgttacaagtaacatttttctacatatccctctataccatagctattggagccggtggaacaaaacctaacatttccacatttggagcggaccaattcgacagttatagcattgaagaaaaaaagcaaaaggtttcattcttcaattggtggatgtttagctctttcttaggcgcgttgtttgcgacattggggctcgtctacatccaagagaatctcggatggggtttaggttatggcatccctaccgtaggactcttggtttctctcgttgtgttctatattggaacaccattttacaggcataaggttatcaaaacagacaatttggcgaaagatttggttcaagttcctatcgcggcattcaaaaaccgaaagcttcagtgtcctgatgaccacttggagctttatgagcttgactctcattattacaaaagcaatggtaagcatcaagttcatcacacgcccgtcttcaggttcttggataaagcggccattaagacaagttcaagagtgccatgtacggtgacaaaagtggaagtggcaaagcgtgtgctaggacttatctttatatggcttgtcactttgatcccaagcaccttgtgggcacaagtcaacactctcttcgtcaaacaagggaccacgctggaccgaaaaattggatccaacttccagatccccgcggcttcattgggaagctttgttacgctctccatgcttctctctgtgcccatgtacgaccaatcctttgttcccttcatgcgcaagaaaaccggaaaccctagagggattactttactccaaagactaggggtagggtttgcgatacaaattgttgcaatcgcgattgcttcggctgtggaggtcaagaggatgcgcgtgataaaggaatttcacataactagtccgacacaagttgtgcctatgagcattttctggttgctccctcagtactctcttctaggcattggggatgtgtttaacgcaattggtttgcttgagtttttctatgatcagtcacctgaggagatgcagagccttggaacaacgtttttcacgagtggaatcggtcttgggaatttcttgaacagctttttggtgacaatgattgataagatcacgagtaaaggtggagggaagagttggattgggaataatttgaatgattcgaggcttgattactattatggatttctagtggtgatttcgatagtgaacatgggacttttcgtgtgggcagcgagtaagtatgtttacaagagtgatgatgacaccaaggagtttagtggaggaggatgtgttcaaatggaggccaaagccttagacacatctcctcttagtatctaattatagcaatgagagatgtgtatatatggttttcaagaaaatttgaagttgtgctattctaattaacatgatgaataaaacttgaagttggaagtacc

SEQ ID NO: 41122 - protein, 583 aa, Arabidopsis thaliana
  peptide (1)..(583): Ceres Seq. ID no. 15222613
  misc_feature (96)..(491): Pfam Name: POT family Pfam Description: POT family
  misc_feature (96)..(491): Pfam Name: POT family Pfam Description: POT family
  misc_feature (2)..(557): Homolog of NCBI NO: 17381202 NR Description: putative peptide transporter protein [Arabidopsis
  misc_feature (2)..(557): Homolog of NCBI NO: 15237370 NR Description: peptide transporter [Arabidopsis thaliana]
  misc_feature (7)..(557): Homolog of NCBI NO: 37535270 NR Description: putative peptide transport protein
  misc_feature (2)..(557): Homolog of NCBI NO: 17381202 NR Description: putative peptide transporter protein [Arabidopsis
  misc_feature (7)..(557): Homolog of NCBI NO: 37535270 NR Description: putative peptide transport protein
  misc_feature (1)..(583): Homolog of NCBI NO: 17380882 NR Description: putative PTR2 family peptide transporter protein
  misc_feature (1)..(583): Homolog of NCBI NO: 15226687 NR Description: PTR2 family peptide transporter -related
  misc_feature (1)..(558): Homolog of NCBI NO: 2367418 NR Description: peptide transporter [Lotus japonicus]
  misc_feature (2)..(557): Homolog of NCBI NO: 15237370 NR Description: peptide transporter [Arabidopsis thaliana]
  misc_feature (1)..(558): Homolog of NCBI NO: 2367418 NR Description: peptide transporter [Lotus japonicus]
  misc_feature (1)..(583): Homolog of NCBI NO: 17380882 NR Description: putative PTR2 family peptide transporter protein
  misc_feature (1)..(583): Homolog of NCBI NO: 15226687 NR Description: PTR2 family peptide transporter -related
MEAAKVYTQDGTVDLQGRPVLASKTGRWRACSFLLGYEAFERMAFYGIASNLVNYLTKRLHEDTISSVRNVNNWSGAVWITPIAGAYIADSYIGRFWTFTASSLIYVLGMILLTMAVTVKSLRPTCENGVCNKASSLQVTFFYISLYTIAIGAGGTKPNISTFGADQFDSYSIEEKKQKVSFFNWWMFSSFLGALFATLGLVYIQENLGWGLGYGIPTVGLLVSLVVFYIGTPFYRHKVIKTDNLAKDLVQVPIAAFKNRKLQCPDDHLELYELDSHYYKSNGKHQVHHTPVFRFLDKAAIKTSSRVPCTVTKVEVAKRVLGLIFIWLVTLIPSTLWAQVNTLFVKQGTTLDRKIGSNFQIPAASLGSFVTLSMLLSVPMYDQSFVPFMRKKTGNPRGITLLQRLGVGFAIQIVAIAIASAVEVKRMRVIKEFHITSPTQVVPMSIFWLLPQYSLLGIGDVFNAIGLLEFFYDQSPEEMQSLGTTFFTSGIGLGNFLNSFLVTMIDKITSKGGGKSWIGNNLNDSRLDYYYGFLVVISIVNMGLFVWAASKYVYKSDDDTKEFSGGGCVQMEAKALDTSPLSI

SEQ ID NO: 41123 - protein, 541 aa, Arabidopsis thaliana
  peptide (1)..(541): Ceres Seq. ID no. 15222614
  misc_feature (54)..(449): Pfam Name: POT family Pfam Description: POT family
  misc_feature (54)..(449): Pfam Name: POT family Pfam Description: POT family
  misc_feature (1)..(515): Homolog of NCBI NO: 17381202 NR Description: putative peptide transporter protein [Arabidopsis
  misc_feature (1)..(515): Homolog of NCBI NO: 15237370 NR Description: peptide transporter [Arabidopsis thaliana]
  misc_feature (1)..(515): Homolog of NCBI NO: 37535270 NR Description: putative peptide transport protein
  misc_feature (1)..(515): Homolog of NCBI NO: 17381202 NR Description: putative peptide transporter protein [Arabidopsis
  misc_feature (1)..(515): Homolog of NCBI NO: 37535270 NR Description: putative peptide transport protein
  misc_feature (1)..(541): Homolog of NCBI NO: 17380882 NR Description: putative PTR2 family peptide transporter protein
  misc_feature (1)..(541): Homolog of NCBI NO: 15226687 NR Description: PTR2 family peptide transporter -related
  misc_feature (1)..(516): Homolog of NCBI NO: 2367418 NR Description: peptide transporter [Lotus japonicus]
  misc_feature (1)..(515): Homolog of NCBI NO: 15237370 NR Description: peptide transporter [Arabidopsis thaliana]
  misc_feature (1)..(516): Homolog of NCBI NO: 2367418 NR Description: peptide transporter [Lotus japonicus]
  misc_feature (1)..(541): Homolog of NCBI NO: 17380882 NR Description: putative PTR2 family peptide transporter protein
  misc_feature (1)..(541): Homolog of NCBI NO: 15226687 NR Description: PTR2 family peptide transporter -related
MAFYGIASNLVNYLTKRLHEDTISSVRNVNNWSGAVWITPIAGAYIADSYIGRFWTFTASSLIYVLGMILLTMAVTVKSLRPTCENGVCNKASSLQVTFFYISLYTIAIGAGGTKPNISTFGADQFDSYSIEEKKQKVSFFNWWMFSSFLGALFATLGLVYIQENLGWGLGYGIPTVGLLVSLVVFYIGTPFYRHKVIKTDNLAKDLVQVPIAAFKNRKLQCPDDHLELYELDSHYYKSNGKHQVHHTPVFRFLDKAAIKTSSRVPCTVTKVEVAKRVLGLIFIWLVTLIPSTLWAQVNTLFVKQGTTLDRKIGSNFQIPAASLGSFVTLSMLLSVPMYDQSFVPFMRKKTGNPRGITLLQRLGVGFAIQIVAIAIASAVEVKRMRVIKEFHITSPTQVVPMSIFWLLPQYSLLGIGDVFNAIGLLEFFYDQSPEEMQSLGTTFFTSGIGLGNFLNSFLVTMIDKITSKGGGKSWIGNNLNDSRLDYYYGFLVVISIVNMGLFVWAASKYVYKSDDDTKEFSGGGCVQMEAKALDTSPLSI

SEQ ID NO: 41124 - protein, 474 aa, Arabidopsis thaliana
  peptide (1)..(474): Ceres Seq. ID no. 15222615
  misc_feature (1)..(382): Pfam Name: POT family Pfam Description: POT family
  misc_feature (1)..(382): Pfam Name: POT family Pfam Description: POT family
  misc_feature (1)..(448): Homolog of NCBI NO: 17381202 NR Description: putative peptide transporter protein [Arabidopsis
  misc_feature (1)..(448): Homolog of NCBI NO: 15237370 NR Description: peptide transporter [Arabidopsis thaliana]
  misc_feature (1)..(448): Homolog of NCBI NO: 37535270 NR Description: putative peptide transport protein
  misc_feature (1)..(448): Homolog of NCBI NO: 17381202 NR Description: putative peptide transporter protein [Arabidopsis
  misc_feature (1)..(448): Homolog of NCBI NO: 37535270 NR Description: putative peptide transport protein
  misc_feature (1)..(474): Homolog of NCBI NO: 17380882 NR Description: putative PTR2 family peptide transporter protein
  misc_feature (1)..(474): Homolog of NCBI NO: 15226687 NR Description: PTR2 family peptide transporter -related
  misc_feature (1)..(449): Homolog of NCBI NO: 2367418 NR Description: peptide transporter [Lotus japonicus]
  misc_feature (1)..(448): Homolog of NCBI NO: 15237370 NR Description: peptide transporter [Arabidopsis thaliana]
  misc_feature (1)..(449): Homolog of NCBI NO: 2367418 NR Description: peptide transporter [Lotus japonicus]
  misc_feature (1)..(474): Homolog of NCBI NO: 17380882 NR Description: putative PTR2 family peptide transporter protein
  misc_feature (1)..(474): Homolog of NCBI NO: 15226687 NR Description: PTR2 family peptide transporter -related
MILLTMAVTVKSLRPTCENGVCNKASSLQVTFFYISLYTIAIGAGGTKPNISTFGADQFDSYSIEEKKQKVSFFNWWMFSSFLGALFATLGLVYIQENLGWGLGYGIPTVGLLVSLVVFYIGTPFYRHKVIKTDNLAKDLVQVPIAAFKNRKLQCPDDHLELYELDSHYYKSNGKHQVHHTPVFRFLDKAAIKTSSRVPCTVTKVEVAKRVLGLIFIWLVTLIPSTLWAQVNTLFVKQGTTLDRKIGSNFQIPAASLGSFVTLSMLLSVPMYDQSFVPFMRKKTGNPRGITLLQRLGVGFAIQIVAIAIASAVEVKRMRVIKEFHITSPTQVVPMSIFWLLPQYSLLGIGDVFNAIGLLEFFYDQSPEEMQSLGTTFFTSGIGLGNFLNSFLVTMIDKITSKGGGKSWIGNNLNDSRLDYYYGFLVVISIVNMGLFVWAASKYVYKSDDDTKEFSGGGCVQMEAKALDTSPLSI

SEQ ID NO: 41125 - DNA, 1844 bp, Arabidopsis thaliana
  misc_feature (1)..(1844): Ceres Seq. ID no. 13494023
  misc_feature: MA Experiment ID: 108434 Result: Down-regulated in Transcription
  misc_feature: MA Experiment 108434 PARAMETER Experiment Name: At_Root_Tips_cDNA_P Parameter: Tissue Value: Root Tips
  misc_feature: MA Experiment ID: 108461 Result: Up-regulated in Transcription
  misc_feature: MA Experiment 108461 PARAMETER Experiment Name: At_Germinating_Seeds_cDNA_P Parameter: Age (day) Value: 1 vs. 0
  misc_feature: MA Experiment 108461 PARAMETER Experiment Name: At_Germinating_Seeds_cDNA_P Parameter: Tissue Value: Germinating Seeds
  misc_feature: MA Experiment ID: 108462 Result: Up-regulated in Transcription
  misc_feature: MA Experiment 108462 PARAMETER Experiment Name: At_Germinating_Seeds_cDNA_P Parameter: Age (day) Value: 2 vs. 0
  misc_feature: MA Experiment 108462 PARAMETER Experiment Name: At_Germinating_Seeds_cDNA_P Parameter: Tissue Value: Germinating Seeds
  misc_feature: MA Experiment ID: 108463 Result: Up-regulated in Transcription
  misc_feature: MA Experiment 108463 PARAMETER Experiment Name: At_Germinating_Seeds_cDNA_P Parameter: Age (day) Value: 3 vs. 0
  misc_feature: MA Experiment 108463 PARAMETER Experiment Name: At_Germinating_Seeds_cDNA_P Parameter: Tissue Value: Germinating Seeds
  misc_feature: MA Experiment ID: 108464 Result: Up-regulated in Transcription
  misc_feature: MA Experiment 108464 PARAMETER Experiment Name: At_Germinating_Seeds_cDNA_P Parameter: Age (day) Value: 4 vs. 0
  misc_feature: MA Experiment 108464 PARAMETER Experiment Name: At_Germinating_Seeds_cDNA_P Parameter: Tissue Value: Germinating Seeds
  misc_feature: MA Experiment ID: 108573 Result: Up-regulated in Transcription
  misc_feature: MA Experiment 108573 PARAMETER Experiment Name: At_Drought_cDNA_P Parameter: Timepoint (hr) Value: 6
  misc_feature: MA Experiment 108573 PARAMETER Experiment Name: At_Drought_cDNA_P Parameter: Tissue Value: Aerial
  misc_feature: MA Experiment 108573 PARAMETER Experiment Name: At_Drought_cDNA_P Parameter: Treatment Value: Drought vs. No Drought
  misc_feature: MA Experiment ID: 108577 Result: Up-regulated in Transcription
  misc_feature: MA Experiment 108577 PARAMETER Experiment Name: At_42deg_Heat_cDNA_P Parameter: Temperature (deg C) Value: 42 vs. 22
  misc_feature: MA Experiment 108577 PARAMETER Experiment Name: At_42deg_Heat_cDNA_P Parameter: Timepoint (hr) Value: 6
  misc_feature: MA Experiment 108577 PARAMETER Experiment Name: At_42deg_Heat_cDNA_P Parameter: Tissue Value: Aerial
  misc_feature: MA Experiment ID: 108579 Result: Up-regulated in Transcription
  misc_feature: MA Experiment 108579 PARAMETER Experiment Name: At_4deg_Cold_cDNA_P Parameter: Temperature (deg C) Value: 4 vs. 22
  misc_feature: MA Experiment 108579 PARAMETER Experiment Name: At_4deg_Cold_cDNA_P Parameter: Timepoint (hr) Value: 6
  misc_feature: MA Experiment 108579 PARAMETER Experiment Name: At_4deg_Cold_cDNA_P Parameter: Tissue Value: Aerial
  misc_feature: MA Experiment ID: 108585 Result: Up-regulated in Transcription
  misc_feature: MA Experiment 108585 PARAMETER Experiment Name: At_5mM_NaNP_cDNA_P Parameter: Timepoint (hr) Value: 6
  misc_feature: MA Experiment 108585 PARAMETER Experiment Name: At_5mM_NaNP_cDNA_P Parameter: Tissue Value: Aerial
  misc_feature: MA Experiment 108585 PARAMETER Experiment Name: At_5mM_NaNP_cDNA_P Parameter: Treatment Value: null
  misc_feature: MA Experiment ID: 108594 Result: Down-regulated in Transcription
  misc_feature: MA Experiment 108594 PARAMETER Experiment Name: At_Ler-rhl_Root_cDNA_P Parameter: Plant Line Value: null
  misc_feature: MA Experiment ID: 108595 Result: Down-regulated in Transcription
  misc_feature: MA Experiment 108595 PARAMETER Experiment Name: At_Ler-pi_Ovule_cDNA_P Parameter: Plant Line Value: null
  misc_feature: MA Experiment ID: 20000086 Result: Down-regulated in Transcription
  misc_feature: MA Experiment 20000086 PARAMETER Experiment Name: At_100uM_ABA_Mutants_cDNA_P Parameter: Plant Line Value: CS22
  misc_feature: MA Experiment 20000086 PARAMETER Experiment Name: At_100uM_ABA_Mutants_cDNA_P Parameter: Timepoint (hr) Value: 6
  misc_feature: MA Experiment 20000086 PARAMETER Experiment Name: At_100uM_ABA_Mutants_cDNA_P Parameter: Tissue Value: Aerial
  misc_feature: MA Experiment 20000086 PARAMETER Experiment Name: At_100uM_ABA_Mutants_cDNA_P Parameter: Treatment Value: 100uM ABA vs. No Treatment
  misc_feature: MA Experiment ID: 20000087 Result: Down-regulated in Transcription
  misc_feature: MA Experiment 20000087 PARAMETER Experiment Name: At_100uM_ABA_Mutants_cDNA_P Parameter: Plant Line Value: WS
  misc_feature: MA Experiment 20000087 PARAMETER Experiment Name: At_100uM_ABA_Mutants_cDNA_P Parameter: Timepoint (hr) Value: 6
  misc_feature: MA Experiment 20000087 PARAMETER Experiment Name: At_100uM_ABA_Mutants_cDNA_P Parameter: Tissue Value: Aerial
  misc_feature: MA Experiment 20000087 PARAMETER Experiment Name: At_100uM_ABA_Mutants_cDNA_P Parameter: Treatment Value: 100uM ABA vs. No Treatment
  misc_feature: MA Experiment ID: 20000089 Result: Down-regulated in Transcription
  misc_feature: MA Experiment ID: 20000090 Result: Down-regulated in Transcription
  misc_feature: MA Experiment ID: 20000111 Result: Up-regulated in Transcription
  misc_feature: MA Experiment 20000111 PARAMETER Experiment Name: At_42deg_Heat_cDNA_P Parameter: Temperature (deg C) Value: 42 vs. 22
  misc_feature: MA Experiment 20000111 PARAMETER Experiment Name: At_42deg_Heat_cDNA_P Parameter: Timepoint (hr) Value: 6
  misc_feature: MA Experiment 20000111 PARAMETER Experiment Name: At_42deg_Heat_cDNA_P Parameter: Tissue Value: Aerial
  misc_feature: MA Experiment ID: 20000113 Result: Up-regulated in Transcription
  misc_feature: MA Experiment 20000113 PARAMETER Experiment Name: At_42deg_Heat_cDNA_P Parameter: Temperature (deg C) Value: 42 vs. 22
  misc_feature: MA Experiment 20000113 PARAMETER Experiment Name: At_42deg_Heat_cDNA_P Parameter: Timepoint (hr) Value: 8
  misc_feature: MA Experiment 20000113 PARAMETER Experiment Name: At_42deg_Heat_cDNA_P Parameter: Tissue Value: Aerial
  misc_feature: MA Experiment ID: 20000117 Result: Down-regulated in Transcription
  misc_feature: MA Experiment 20000117 PARAMETER Experiment Name: At_100uM_ABA_Mutants_cDNA_P Parameter: Plant Line Value: Columbia
  misc_feature: MA Experiment 20000117 PARAMETER Experiment Name: At_100uM_ABA_Mutants_cDNA_P Parameter: Timepoint (hr) Value: 6
  misc_feature: MA Experiment 20000117 PARAMETER Experiment Name: At_100uM_ABA_Mutants_cDNA_P Parameter: Tissue Value: Aerial
  misc_feature: MA Experiment 20000117 PARAMETER Experiment Name: At_100uM_ABA_Mutants_cDNA_P Parameter: Treatment Value: 100uM ABA vs. No Treatment
  misc_feature: MA Experiment ID: 20000173 Result: Up-regulated in Transcription
  misc_feature: MA Experiment 20000173 PARAMETER Experiment Name: At_42deg_Heat_P Parameter: Age (day) Value: 14
  misc_feature: MA Experiment 20000173 PARAMETER Experiment Name: At_42deg_Heat_P Parameter: Organism Value: A. thaliana
  misc_feature: MA Experiment 20000173 PARAMETER Experiment Name: At_42deg_Heat_P Parameter: Plant Line Value: WS
  misc_feature: MA Experiment 20000173 PARAMETER Experiment Name: At_42deg_Heat_P Parameter: Temperature (deg C) Value: 42 vs. 22
  misc_feature: MA Experiment 20000173 PARAMETER Experiment Name: At_42deg_Heat_P Parameter: Timepoint (hr) Value: 6
  misc_feature: MA Experiment 20000173 PARAMETER Experiment Name: At_42deg_Heat_P Parameter: Tissue Value: Aerial
  misc_feature: MA Experiment ID: 20000264 Result: Up-regulated in Transcription
  misc_feature: MA Experiment 20000264 PARAMETER Experiment Name: At_Open_Flower_P Parameter: Age (day) Value: 21
  misc_feature: MA Experiment 20000264 PARAMETER Experiment Name: At_Open_Flower_P Parameter: Plant Line Value: WS
  misc_feature: MA Experiment 20000264 PARAMETER Experiment Name: At_Open_Flower_P Parameter: Tissue Value: Open Flower vs. Whole Plant
  misc_feature: MA Experiment ID: 20000438 Result: Up-regulated in Transcription
  misc_feature: MA Experiment 20000438 PARAMETER Experiment Name: At_Shoots__P Parameter: Age (day) Value: 14
  misc_feature: MA Experiment 20000438 PARAMETER Experiment Name: At_Shoots__P Parameter: Tissue Value: Shoots vs. Whole Plant
  misc_feature: MA Experiment ID: 20000794 Result: Up-regulated in Transcription
  misc_feature: MA Experiment 20000794 PARAMETER Experiment Name: At_Petals_P Parameter: Age (day) Value: 23-25 days
  misc_feature: MA Experiment 20000794 PARAMETER Experiment Name: At_Petals_P Parameter: Plant Line Value: WS
  misc_feature: MA Experiment 20000794 PARAMETER Experiment Name: At_Petals_P Parameter: Tissue Value: Petals vs. Whole plant
  misc_feature: MA Experiment ID: 20001247 Result: Up-regulated in Transcription
  misc_feature: MA Experiment 20001247 PARAMETER Experiment Name: At_Far-red-induction_P Parameter: Age (day) Value: 7
  misc_feature: MA Experiment 20001247 PARAMETER Experiment Name: At_Far-red-induction_P Parameter: Light Value: Far-red vs. White
  misc_feature: MA Experiment 20001247 PARAMETER Experiment Name: At_Far-red-induction_P Parameter: Organism Value: A. thaliana
  misc_feature: MA Experiment 20001247 PARAMETER Experiment Name: At_Far-red-induction_P Parameter: Plant Line Value: Columbia
  misc_feature: MA Experiment 20001247 PARAMETER Experiment Name: At_Far-red-induction_P Parameter: Timepoint (hr) Value: 1
  misc_feature: MA Experiment 20001247 PARAMETER Experiment Name: At_Far-red-induction_P Parameter: Tissue Value: Whole Plant
  misc_feature: MA Experiment ID: 20001248 Result: Down-regulated in Transcription
  misc_feature: MA Experiment 20001248 PARAMETER Experiment Name: At_Far-red-induction_P Parameter: Age (day) Value: 7
  misc_feature: MA Experiment 20001248 PARAMETER Experiment Name: At_Far-red-induction_P Parameter: Light Value: Far-red vs. White
  misc_feature: MA Experiment 20001248 PARAMETER Experiment Name: At_Far-red-induction_P Parameter: Organism Value: A. thaliana
  misc_feature: MA Experiment 20001248 PARAMETER Experiment Name: At_Far-red-induction_P Parameter: Plant Line Value: Columbia
  misc_feature: MA Experiment 20001248 PARAMETER Experiment Name: At_Far-red-induction_P Parameter: Timepoint (hr) Value: 4
  misc_feature: MA Experiment 20001248 PARAMETER Experiment Name: At_Far-red-induction_P Parameter: Tissue Value: Whole Plant
  misc_feature: MA Experiment ID: 20001560 Result: Down-regulated in Transcription
  misc_feature: MA Experiment 20001560 PARAMETER Experiment Name: At_Drought_Soil_Dry_P Parameter: Age (day) Value: 28
  misc_feature: MA Experiment 20001560 PARAMETER Experiment Name: At_Drought_Soil_Dry_P Parameter: Organism Value: A. thaliana
  misc_feature: MA Experiment 20001560 PARAMETER Experiment Name: At_Drought_Soil_Dry_P Parameter: Plant Line Value: WS
  misc_feature: MA Experiment 20001560 PARAMETER Experiment Name: At_Drought_Soil_Dry_P Parameter: Post Timepoint (hr) Value: None
  misc_feature: MA Experiment 20001560 PARAMETER Experiment Name: At_Drought_Soil_Dry_P Parameter: Post-Treatment Value: None
  misc_feature: MA Experiment 20001560 PARAMETER Experiment Name: At_Drought_Soil_Dry_P Parameter: Timepoint (day) Value: 14
  misc_feature: MA Experiment 20001560 PARAMETER Experiment Name: At_Drought_Soil_Dry_P Parameter: Treatment Value: Drought vs. No Drought
aacggcttgaaccaccggcaatagccgcgggattgcggcggaggattaatcaaaaaacgcaccacctgaaatctctctgtgtacgctaatggctccgacgatattcgttgatcactgtatcctcacaacaacgtttgtcgcatccttgttcgcgtttctgcttctatacgtcctgcgtcgccggagcaagacgattcatgggtctgtcaatgtccgtaacggaaccctaacggtgaaatctggaacagacgttgatattatcattgtcggtgctggtgtcgccggcgctgcccttgctcataccctcggcaaggaaggaagaagagttcacgttatagaaagagacttaacggagcctgatcgaattgtcggtgaattacttcagcctggtggttacttgaagttaatcgaactcgggcttgaagattgtgtgaaggatatagatgcgcagagagttcttggttatgctctctttaaagatgggaaacacactaaactctcttacccgttggatcagtttgattccgatgttgcgggtcgtagctttcacaatgggagatttgtgcagaggatgcgagagaaagcttctttacttcccaatgttcgaatggagcaaggaacagtgacatcgttggtggaagaaaacggaataatcaaaggtgttcaatacaaaaccaaagatggccaagagcttaagtcatttgctcctctcactattgtatgtgatggttgtttctccaacttgcgtcgatctctctgcaaacctaaggtggaggtgccatccaatttcgttggtctggtattggagaattgcgaactcccgtttccgaaccacgggcacgttgttcttggcgatccgtcacccattttattctatcctatcagcagctcggaagtccgttgcttggtagatgtaccaggttcaaaacttccttcagttgcaagtggtgaaatggctcaccatctcaaaacaatggttgcaccgcaggtaccacctcagatccgtgatgctttcatttctgcagtcgaaaaaggtaacataagaacaatgccgaacagaagcatgccagctgatccaattcatacacctggagctttgcttttaggtgatgcgttcaacatgcgccatcctcttactggaggtggtatgaccgttgcattgtctgatatagtcatcctccgtgatctattgaacccgctcgtcgacttaaccaacaaagagtccttatccaaatacatagaatcattctacacattgcggaaaccggttgcttcgactatcaatacactcgcaggcgctctttacaaagtctttttagcatctccagacgatgcaagaagcgaaatgcgtcgagcttgcttcgattatcttagcctcggaggggtttgctcatcaggacctgtggctttgctatctggtttgaacccacgacctatgagccttgttcttcatttcttcgcagttgcgattttcggggttggtcgtttgcttgtacctctcccgtccgttaaacggttatggcttggagctagactaatctcgagtgcttcagggatcatatttccaataataaaagcagaaggtgtgaggcaaatgttcttccctcgaactattcctgccatttacagagctcctcctactccttcttcttcttctcctcaatgatgaatcagaaacattgctttgaagatttctcaggtgttgtaagaatagctactttgcgattatggtacgaatgaaccgggtggtttgatttggtttttacgaactttggtttgaaatttgtactcagtccattacagacaaaatcatcaagtaaataagtatctctttgttaattgtt

SEQ ID NO: 41126 - protein, 525 aa, Arabidopsis thaliana
  peptide (1)..(525): Ceres Seq. ID no. 13494024
  misc_feature (205)..(403): Pfam Name: Monooxygenase Pfam Description: Monooxygenase
  misc_feature (11)..(518): Homolog of NCBI NO: 18406296 NR Description: squalene monooxygenase (squalene epoxidase) (SE),
  misc_feature (11)..(517): Homolog of NCBI NO: 27311240 NR Description: Putative Squalene monooxygenase
  misc_feature (11)..(516): Homolog of NCBI NO: 27311241 NR Description: Putative Squalene monooxygenase
  misc_feature (2)..(517): Homolog of NCBI NO: 6685403 NR Description: Squalene monooxygenase (Squalene epoxidase) (SE)
  misc_feature (10)..(517): Homolog of NCBI NO: 27475612 NR Description: squalene monooxygenase 1 [Medicago truncatula]
  misc_feature (17)..(517): Homolog of NCBI NO: 27475610 NR Description: squalene monooxygenase 2 [Medicago truncatula]
  misc_feature (16)..(517): Homolog of NCBI NO: 15227757 NR Description: squalene monooxygenase (squalene epoxidase) (SE),
  misc_feature (1)..(525): Homolog of NCBI NO: 7488348 NR Description: squalene monooxygenase (EC 1.14.99.7) -
  misc_feature (1)..(525): Homolog of NCBI NO: 21537043 NR Description: squalene epoxidase-like protein [Arabidopsis
  misc_feature (1)..(525): Homolog of NCBI NO: 18420113 NR Description: squalene monooxygenase (squalene epoxidase) (SE),
MAPTIFVDHCILTTTFVASLFAFLLLYVLRRRSKTIHGSVNVRNGTLTVKSGTDVDIIIVGAGVAGAALAHTLGKEGRRVHVIERDLTEPDRIVGELLQPGGYLKLIELGLEDCVKDIDAQRVLGYALFKDGKHTKLSYPLDQFDSDVAGRSFHNGRFVQRMREKASLLPNVRMEQGTVTSLVEENGIIKGVQYKTKDGQELKSFAPLTIVCDGCFSNLRRSLCKPKVEVPSNFVGLVLENCELPFPNHGHVVLGDPSPILFYPISSSEVRCLVDVPGSKLPSVASGEMAHHLKTMVAPQVPPQIRDAFISAVEKGNIRTMPNRSMPADPIHTPGALLLGDAFNMRHPLTGGGMTVALSDIVILRDLLNPLVDLTNKESLSKYIESFYTLRKPVASTINTLAGALYKVFLASPDDARSEMRRACFDYLSLGGVCSSGPVALLSGLNPRPMSLVLHFFAVAIFGVGRLLVPLPSVKRLWLGARLISSASGIIFPIIKAEGVRQMFFPRTIPAIYRAPPTPSSSSPQ

SEQ ID NO: 41127 - protein, 364 aa, Arabidopsis thaliana
  peptide (1)..(364): Ceres Seq. ID no. 13494025
  misc_feature (44)..(242): Pfam Name: Monooxygenase Pfam Description: Monooxygenase
  misc_feature (1)..(357): Homolog of NCBI NO: 18406296 NR Description: squalene monooxygenase (squalene epoxidase) (SE),
  misc_feature (1)..(356): Homolog of NCBI NO: 27311240 NR Description: Putative Squalene monooxygenase
  misc_feature (1)..(355): Homolog of NCBI NO: 27311241 NR Description: Putative Squalene monooxygenase
  misc_feature (1)..(356): Homolog of NCBI NO: 6685403 NR Description: Squalene monooxygenase (Squalene epoxidase) (SE)
  misc_feature (1)..(356): Homolog of NCBI NO: 27475612 NR Description: squalene monooxygenase 1 [Medicago truncatula]
  misc_feature (1)..(356): Homolog of NCBI NO: 27475610 NR Description: squalene monooxygenase 2 [Medicago truncatula]
  misc_feature (1)..(356): Homolog of NCBI NO: 15227757 NR Description: squalene monooxygenase (squalene epoxidase) (SE),
  misc_feature (1)..(364): Homolog of NCBI NO: 7488348 NR Description: squalene monooxygenase (EC 1.14.99.7) -
  misc_feature (1)..(364): Homolog of NCBI NO: 21537043 NR Description: squalene epoxidase-like protein [Arabidopsis
  misc_feature (1)..(364): Homolog of NCBI NO: 18420113 NR Description: squalene monooxygenase (squalene epoxidase) (SE),
MREKASLLPNVRMEQGTVTSLVEENGIIKGVQYKTKDGQELKSFAPLTIVCDGCFSNLRRSLCKPKVEVPSNFVGLVLENCELPFPNHGHVVLGDPSPILFYPISSSEVRCLVDVPGSKLPSVASGEMAHHLKTMVAPQVPPQIRDAFISAVEKGNIRTMPNRSMPADPIHTPGALLLGDAFNMRHPLTGGGMTVALSDIVILRDLLNPLVDLTNKESLSKYIESFYTLRKPVASTINTLAGALYKVFLASPDDARSEMRRACFDYLSLGGVCSSGPVALLSGLNPRPMSLVLHFFAVAIFGVGRLLVPLPSVKRLWLGARLISSASGIIFPIIKAEGVRQMFFPRTIPAIYRAPPTPSSSSPQ

SEQ ID NO: 41128 - protein, 352 aa, Arabidopsis thaliana
  peptide (1)..(352): Ceres Seq. ID no. 13494026
  misc_feature (32)..(230): Pfam Name: Monooxygenase Pfam Description: Monooxygenase
  misc_feature (1)..(345): Homolog of NCBI NO: 18406296 NR Description: squalene monooxygenase (squalene epoxidase) (SE),
  misc_feature (1)..(344): Homolog of NCBI NO: 27311240 NR Description: Putative Squalene monooxygenase
  misc_feature (1)..(343): Homolog of NCBI NO: 27311241 NR Description: Putative Squalene monooxygenase
  misc_feature (1)..(344): Homolog of NCBI NO: 6685403 NR Description: Squalene monooxygenase (Squalene epoxidase) (SE)
  misc_feature (1)..(344): Homolog of NCBI NO: 27475612 NR Description: squalene monooxygenase 1 [Medicago truncatula]
  misc_feature (1)..(344): Homolog of NCBI NO: 27475610 NR Description: squalene monooxygenase 2 [Medicago truncatula]
  misc_feature (1)..(344): Homolog of NCBI NO: 15227757 NR Description: squalene monooxygenase (squalene epoxidase) (SE),
  misc_feature (1)..(352): Homolog of NCBI NO: 7488348 NR Description: squalene monooxygenase (EC 1.14.99.7) -
  misc_feature (1)..(352): Homolog of NCBI NO: 21537043 NR Description: squalene epoxidase-like protein [Arabidopsis
  misc_feature (1)..(352): Homolog of NCBI NO: 18420113 NR Description: squalene monooxygenase (squalene epoxidase) (SE),
MEQGTVTSLVEENGIIKGVQYKTKDGQELKSFAPLTIVCDGCFSNLRRSLCKPKVEVPSNFVGLVLENCELPFPNHGHVVLGDPSPILFYPISSSEVRCLVDVPGSKLPSVASGEMAHHLKTMVAPQVPPQIRDAFISAVEKGNIRTMPNRSMPADPIHTPGALLLGDAFNMRHPLTGGGMTVALSDIVILRDLLNPLVDLTNKESLSKYIESFYTLRKPVASTINTLAGALYKVFLASPDDARSEMRRACFDYLSLGGVCSSGPVALLSGLNPRPMSLVLHFFAVAIFGVGRLLVPLPSVKRLWLGARLISSASGIIFPIIKAEGVRQMFFPRTIPAIYRAPPTPSSSSPQ

SEQ ID NO: 41129 - DNA, 1627 bp, Arabidopsis thaliana
  misc_feature (1)..(1627): Ceres Seq. ID no. 12395267
  misc_feature: MA Experiment ID: 108462 Result: Down-regulated in Transcription
  misc_feature: MA Experiment 108462 PARAMETER Experiment Name: At_Germinating_Seeds_cDNA_P Parameter: Age (day) Value: 2 vs. 0
  misc_feature: MA Experiment 108462 PARAMETER Experiment Name: At_Germinating_Seeds_cDNA_P Parameter: Tissue Value: Germinating Seeds
  misc_feature: MA Experiment ID: 108463 Result: Down-regulated in Transcription
  misc_feature: MA Experiment 108463 PARAMETER Experiment Name: At_Germinating_Seeds_cDNA_P Parameter: Age (day) Value: 3 vs. 0
  misc_feature: MA Experiment 108463 PARAMETER Experiment Name: At_Germinating_Seeds_cDNA_P Parameter: Tissue Value: Germinating Seeds
  misc_feature: MA Experiment ID: 108464 Result: Down-regulated in Transcription
  misc_feature: MA Experiment 108464 PARAMETER Experiment Name: At_Germinating_Seeds_cDNA_P Parameter: Age (day) Value: 4 vs. 0
  misc_feature: MA Experiment 108464 PARAMETER Experiment Name: At_Germinating_Seeds_cDNA_P Parameter: Tissue Value: Germinating Seeds
  misc_feature: MA Experiment ID: 108608 Result: Down-regulated in Transcription
  misc_feature: MA Experiment 108608 PARAMETER Experiment Name: At_100uM_ABA_cDNA_P Parameter: Timepoint (hr) Value: 1
  misc_feature: MA Experiment 108608 PARAMETER Experiment Name: At_100uM_ABA_cDNA_P Parameter: Tissue Value: Aerial
  misc_feature: MA Experiment 108608 PARAMETER Experiment Name: At_100uM_ABA_cDNA_P Parameter: Treatment Value: 100uM ABA vs. No Treatment
  misc_feature: MA Experiment ID: 20000227 Result: Up-regulated in Transcription
  misc_feature: MA Experiment 20000227 PARAMETER Experiment Name: At_Root-Tips-vs-Tops_P Parameter: Tissue Value: Root Tips vs. Root Tops
  misc_feature: MA Experiment ID: 20000438 Result: Down-regulated in Transcription
  misc_feature: MA Experiment 20000438 PARAMETER Experiment Name: At_Shoots__P Parameter: Age (day) Value: 14
  misc_feature: MA Experiment 20000438 PARAMETER Experiment Name: At_Shoots__P Parameter: Tissue Value: Shoots vs. Whole Plant
  misc_feature: MA Experiment ID: 20001557 Result: Up-regulated in Transcription
  misc_feature: MA Experiment 20001557 PARAMETER Experiment Name: At_Drought_Soil_Dry_P Parameter: Age (day) Value: 27
  misc_feature: MA Experiment 20001557 PARAMETER Experiment Name: At_Drought_Soil_Dry_P Parameter: Organism Value: A. thaliana
  misc_feature: MA Experiment 20001557 PARAMETER Experiment Name: At_Drought_Soil_Dry_P Parameter: Plant Line Value: WS
  misc_feature: MA Experiment 20001557 PARAMETER Experiment Name: At_Drought_Soil_Dry_P Parameter: Post Timepoint (hr) Value: 3
  misc_feature: MA Experiment 20001557 PARAMETER Experiment Name: At_Drought_Soil_Dry_P Parameter: Post-Treatment Value: Re-Water vs. No Drought
  misc_feature: MA Experiment 20001557 PARAMETER Experiment Name: At_Drought_Soil_Dry_P Parameter: Timepoint (day) Value: 13
  misc_feature: MA Experiment 20001557 PARAMETER Experiment Name: At_Drought_Soil_Dry_P Parameter: Treatment Value: Drought vs. No Drought
  misc_feature: MA Experiment ID: 20001558 Result: Up-regulated in Transcription
  misc_feature: MA Experiment 20001558 PARAMETER Experiment Name: At_Drought_Soil_Dry_P Parameter: Age (day) Value: 27
  misc_feature: MA Experiment 20001558 PARAMETER Experiment Name: At_Drought_Soil_Dry_P Parameter: Organism Value: A. thaliana
  misc_feature: MA Experiment 20001558 PARAMETER Experiment Name: At_Drought_Soil_Dry_P Parameter: Plant Line Value: WS
  misc_feature: MA Experiment 20001558 PARAMETER Experiment Name: At_Drought_Soil_Dry_P Parameter: Post Timepoint (hr) Value: 6
  misc_feature: MA Experiment 20001558 PARAMETER Experiment Name: At_Drought_Soil_Dry_P Parameter: Post-Treatment Value: Re-Water vs. No Drought
  misc_feature: MA Experiment 20001558 PARAMETER Experiment Name: At_Drought_Soil_Dry_P Parameter: Timepoint (day) Value: 13
  misc_feature: MA Experiment 20001558 PARAMETER Experiment Name: At_Drought_Soil_Dry_P Parameter: Treatment Value: Drought vs. No Drought
  misc_feature: MA Experiment ID: 20001560 Result: Up-regulated in Transcription
  misc_feature: MA Experiment 20001560 PARAMETER Experiment Name: At_Drought_Soil_Dry_P Parameter: Age (day) Value: 28
  misc_feature: MA Experiment 20001560 PARAMETER Experiment Name: At_Drought_Soil_Dry_P Parameter: Organism Value: A. thaliana
  misc_feature: MA Experiment 20001560 PARAMETER Experiment Name: At_Drought_Soil_Dry_P Parameter: Plant Line Value: WS
  misc_feature: MA Experiment 20001560 PARAMETER Experiment Name: At_Drought_Soil_Dry_P Parameter: Post Timepoint (hr) Value: None
  misc_feature: MA Experiment 20001560 PARAMETER Experiment Name: At_Drought_Soil_Dry_P Parameter: Post-Treatment Value: None
  misc_feature: MA Experiment 20001560 PARAMETER Experiment Name: At_Drought_Soil_Dry_P Parameter: Timepoint (day) Value: 14
  misc_feature: MA Experiment 20001560 PARAMETER Experiment Name: At_Drought_Soil_Dry_P Parameter: Treatment Value: Drought vs. No Drought
attaccagagctcaacgagctctcactttctttacgcacacttgttggaacgaaatatattcatagagaagaagaatctcgaaactcttgaatctaaaacaactcggagactctgttttccctttccggagatcagatcggatcaagatgcagacaaccaacggctcagattcgacgttggcaacttccggagccacaccgccgaatcaacaaacccctcctccacctcagcagtggcagcagcagcaacagcaacagtggatggctgccatgcaatatccaccagcggcggcgatgatgatgatgcagcagcaacagatgctgatgtatcctcatcaatatgttccgtataatcaaggtccttatcagcagcatcatcctcagcttcaccaatacgggtcttatcaacagcaccagcaccagcaacacaaggctattgaccgtggatctggagatgatgtcaagactctttgggttggtgatcttcttcattggatggatgagacttatctccattcttgcttttctcacaccggcgaggtttcttctgtgaaagttatacgtaacaagctcacttctcaatcagaagggtatgggtttgttgagtttctttcacgtgctgcagctgaagaagttcttcagaactatagtggttcagtgatgccaaactcggaccaacccttccgtataaactgggcatcttttagtactggtgaaaaaagagcagtggaaaatggtccagacctatctgtttttgtgggagacttgtctccagatgtcactgacgttttattgcatgagaccttttctgatagatatccttctgtcaaaagcgccaaagttgtgattgattccaacaccggccggtccaaaggttatggttttgtgaggttcggtgatgaaaatgagaggtcaagggctttgacagaaatgaatggagcttactgttcgaacaggcaaatgcgtgtaggtattgcaactcccaaaagagcgattgctaatcagcaacaacattcttcacaagctgtgattctggctggtggacatggatcaaatggttccatgggttatggttcgcagtctgatggcgaatcaactaacgcaacaatatttgttggcggcattgaccctgatgttattgatgaagacctcagacaacctttttcccagtttggagaggttgtttcagtgaagatcccagtagggaaaggatgtggatttgtccaatttgctgacaggaagagtgctgaagatgctatcgagagtttgaacgggacagtcatcggcaagaacactgtcagactctcctggggaagaagcccaaacaagcagtggagaggagactcagggcagcagtggaatggaggatactcacgaggacatggttacaacaatggaggaggatatgctaaccaccacgactccaacaactatcatggggagaattgaagagactcatcaagtgatcatcttcatcatggtttcacatatcaaagctaaaacctgtagtcgaaagaagaattttgttagatggatttgattttgatagacttgttgtttggaggagattcaaaaattttggttactggtttgtctcagactaatataaatggttgcaacttgttgg

SEQ ID NO: 41130 - protein, 433 aa, Arabidopsis thaliana
  peptide (1)..(433): Ceres Seq. ID no. 12395268
  misc_feature (202)..(274): Pfam Name: RNA recognition motif. (a.k.a. RRM, RBD, or RNP domain) Pfam Description: RNA recognition motif. (a.k.a. RRM, RBD, or RNP
  misc_feature (1)..(429): Homolog of NCBI NO: 25386576 NR Description: probable RNA binding protein [imported] -
  misc_feature (1)..(429): Homolog of NCBI NO: 15594035 NR Description: nucleic acid binding protein [Nicotiana tabacum]
  misc_feature (20)..(420): Homolog of NCBI NO: 40804404 NR Description: DNA-binding protein [Lycopersicon esculentum]
  misc_feature (20)..(429): Homolog of NCBI NO: 7489112 NR Description: DNA binding protein ACBF - common tobacco
  misc_feature (20)..(429): Homolog of NCBI NO: 9663769 NR Description: RNA Binding Protein 47 [Nicotiana plumbaginifolia]
  misc_feature (20)..(429): Homolog of NCBI NO: 7489196 NR Description: RNA binding protein homolog - common tobacco
  misc_feature (1)..(429): Homolog of NCBI NO: 15222783 NR Description: RNA binding protein 47 (RBP47), putative; protein
  misc_feature (42)..(433): Homolog of NCBI NO: 21618243 NR Description: nuclear acid binding protein, putative
  misc_feature (1)..(433): Homolog of NCBI NO: 15230291 NR Description: RNA binding protein 47 (RBP47), putative
  misc_feature (1)..(395): Homolog of NCBI NO: 9294614 NR Description: DNA/RNA binding protein-like [Arabidopsis
MQTTNGSDSTLATSGATPPNQQTPPPPQQWQQQQQQQWMAAMQYPPAAAMMMMQQQQMLMYPHQYVPYNQGPYQQHHPQLHQYGSYQQHQHQQHKAIDRGSGDDVKTLWVGDLLHWMDETYLHSCFSHTGEVSSVKVIRNKLTSQSEGYGFVEFLSRAAAEEVLQNYSGSVMPNSDQPFRINWASFSTGEKRAVENGPDLSVFVGDLSPDVTDVLLHETFSDRYPSVKSAKVVIDSNTGRSKGYGFVRFGDENERSRALTEMNGAYCSNRQMRVGIATPKRAIANQQQHSSQAVILAGGHGSNGSMGYGSQSDGESTNATIFVGGIDPDVIDEDLRQPFSQFGEVVSVKIPVGKGCGFVQFADRKSAEDAIESLNGTVIGKNTVRLSWGRSPNKQWRGDSGQQWNGGYSRGHGYNNGGGYANHHDSNNYHGEN

SEQ ID NO: 41131 - protein, 395 aa, Arabidopsis thaliana
  peptide (1)..(395): Ceres Seq. ID no. 12395269
  misc_feature (164)..(236): Pfam Name: RNA recognition motif. (a.k.a. RRM, RBD, or RNP domain) Pfam Description: RNA recognition motif. (a.k.a. RRM, RBD, or RNP
  misc_feature (1)..(391): Homolog of NCBI NO: 25386576 NR Description: probable RNA binding protein [imported] -
  misc_feature (1)..(391): Homolog of NCBI NO: 15594035 NR Description: nucleic acid binding protein [Nicotiana tabacum]
  misc_feature (1)..(382): Homolog of NCBI NO: 40804404 NR Description: DNA-binding protein [Lycopersicon esculentum]
  misc_feature (1)..(391): Homolog of NCBI NO: 7489112 NR Description: DNA binding protein ACBF - common tobacco
  misc_feature (1)..(391): Homolog of NCBI NO: 9663769 NR Description: RNA Binding Protein 47 [Nicotiana plumbaginifolia]
  misc_feature (1)..(391): Homolog of NCBI NO: 7489196 NR Description: RNA binding protein homolog - common tobacco
  misc_feature (1)..(391): Homolog of NCBI NO: 15222783 NR Description: RNA binding protein 47 (RBP47), putative; protein
  misc_feature (4)..(395): Homolog of NCBI NO: 21618243 NR Description: nuclear acid binding protein, putative
  misc_feature (1)..(395): Homolog of NCBI NO: 15230291 NR Description: RNA binding protein 47 (RBP47), putative
  misc_feature (1)..(357): Homolog of NCBI NO: 9294614 NR Description: DNA/RNA binding protein-like [Arabidopsis
MAAMQYPPAAAMMMMQQQQMLMYPHQYVPYNQGPYQQHHPQLHQYGSYQQHQHQQHKAIDRGSGDDVKTLWVGDLLHWMDETYLHSCFSHTGEVSSVKVIRNKLTSQSEGYGFVEFLSRAAAEEVLQNYSGSVMPNSDQPFRINWASFSTGEKRAVENGPDLSVFVGDLSPDVTDVLLHETFSDRYPSVKSAKVVIDSNTGRSKGYGFVRFGDENERSRALTEMNGAYCSNRQMRVGIATPKRAIANQQQHSSQAVILAGGHGSNGSMGYGSQSDGESTNATIFVGGIDPDVIDEDLRQPFSQFGEVVSVKIPVGKGCGFVQFADRKSAEDAIESLNGTVIGKNTVRLSWGRSPNKQWRGDSGQQWNGGYSRGHGYNNGGGYANHHDSNNYHGEN

SEQ ID NO: 41132 - protein, 392 aa, Arabidopsis thaliana
  peptide (1)..(392): Ceres Seq. ID no. 12395270
  misc_feature (161)..(233): Pfam Name: RNA recognition motif. (a.k.a. RRM, RBD, or RNP domain) Pfam Description: RNA recognition motif. (a.k.a. RRM, RBD, or RNP
  misc_feature (1)..(388): Homolog of NCBI NO: 25386576 NR Description: probable RNA binding protein [imported] -
  misc_feature (1)..(388): Homolog of NCBI NO: 15594035 NR Description: nucleic acid binding protein [Nicotiana tabacum]
  misc_feature (1)..(379): Homolog of NCBI NO: 40804404 NR Description: DNA-binding protein [Lycopersicon esculentum]
  misc_feature (1)..(388): Homolog of NCBI NO: 7489112 NR Description: DNA binding protein ACBF - common tobacco
  misc_feature (1)..(388): Homolog of NCBI NO: 9663769 NR Description: RNA Binding Protein 47 [Nicotiana plumbaginifolia]
  misc_feature (1)..(388): Homolog of NCBI NO: 7489196 NR Description: RNA binding protein homolog - common tobacco
  misc_feature (1)..(388): Homolog of NCBI NO: 15222783 NR Description: RNA binding protein 47 (RBP47), putative; protein
  misc_feature (1)..(392): Homolog of NCBI NO: 21618243 NR Description: nuclear acid binding protein, putative
  misc_feature (1)..(392): Homolog of NCBI NO: 15230291 NR Description: RNA binding protein 47 (RBP47), putative
  misc_feature (1)..(354): Homolog of NCBI NO: 9294614 NR Description: DNA/RNA binding protein-like [Arabidopsis
MQYPPAAAMMMMQQQQMLMYPHQYVPYNQGPYQQHHPQLHQYGSYQQHQHQQHKAIDRGSGDDVKTLWVGDLLHWMDETYLHSCFSHTGEVSSVKVIRNKLTSQSEGYGFVEFLSRAAAEEVLQNYSGSVMPNSDQPFRINWASFSTGEKRAVENGPDLSVFVGDLSPDVTDVLLHETFSDRYPSVKSAKVVIDSNTGRSKGYGFVRFGDENERSRALTEMNGAYCSNRQMRVGIATPKRAIANQQQHSSQAVILAGGHGSNGSMGYGSQSDGESTNATIFVGGIDPDVIDEDLRQPFSQFGEVVSVKIPVGKGCGFVQFADRKSAEDAIESLNGTVIGKNTVRLSWGRSPNKQWRGDSGQQWNGGYSRGHGYNNGGGYANHHDSNNYHGEN

SEQ ID NO: 41133 - DNA, 1416 bp, Arabidopsis thaliana
  misc_feature (1)..(1416): Ceres Seq. ID no. 12482142
  misc_feature: MA Experiment ID: 108434 Result: Down-regulated in Transcription
  misc_feature: MA Experiment 108434 PARAMETER Experiment Name: At_Root_Tips_cDNA_P Parameter: Tissue Value: Root Tips
  misc_feature: MA Experiment ID: 108595 Result: Up-regulated in Transcription
  misc_feature: MA Experiment 108595 PARAMETER Experiment Name: At_Ler-pi_Ovule_cDNA_P Parameter: Plant Line Value: null
  misc_feature: MA Experiment ID: 20000171 Result: Up-regulated in Transcription
  misc_feature: MA Experiment 20000171 PARAMETER Experiment Name: At_42deg_Heat_P Parameter: Age (day) Value: 14
  misc_feature: MA Experiment 20000171 PARAMETER Experiment Name: At_42deg_Heat_P Parameter: Organism Value: A. thaliana
  misc_feature: MA Experiment 20000171 PARAMETER Experiment Name: At_42deg_Heat_P Parameter: Plant Line Value: WS
  misc_feature: MA Experiment 20000171 PARAMETER Experiment Name: At_42deg_Heat_P Parameter: Temperature (deg C) Value: 42 vs. 22
  misc_feature: MA Experiment 20000171 PARAMETER Experiment Name: At_42deg_Heat_P Parameter: Timepoint (hr) Value: 1
  misc_feature: MA Experiment 20000171 PARAMETER Experiment Name: At_42deg_Heat_P Parameter: Tissue Value: Aerial
  misc_feature: MA Experiment ID: 20000179 Result: Up-regulated in Transcription
  misc_feature: MA Experiment 20000179 PARAMETER Experiment Name: At_Germinating_Seeds_P Parameter: Age (hr) Value: 6 vs. 0
  misc_feature: MA Experiment 20000179 PARAMETER Experiment Name: At_Germinating_Seeds_P Parameter: Tissue Value: Germinating Seeds
  misc_feature: MA Experiment ID: 20000495 Result: Up-regulated in Transcription
  misc_feature: MA Experiment 20000495 PARAMETER Experiment Name: At_Guard_Cells_P Parameter: Harvest Date Value: 8/2/2002
  misc_feature: MA Experiment 20000495 PARAMETER Experiment Name: At_Guard_Cells_P Parameter: Organism Value: A. thaliana
  misc_feature: MA Experiment 20000495 PARAMETER Experiment Name: At_Guard_Cells_P Parameter: Tissue Value: Guard Cells vs. Leaves
  misc_feature: MA Experiment ID: 20001450 Result: Up-regulated in Transcription
  misc_feature: MA Experiment 20001450 PARAMETER Experiment Name: At_Far-red-induction_P Parameter: Age (day) Value: 7
  misc_feature: MA Experiment 20001450 PARAMETER Experiment Name: At_Far-red-induction_P Parameter: Light Value: Far-red vs. White
  misc_feature: MA Experiment 20001450 PARAMETER Experiment Name: At_Far-red-induction_P Parameter: Organism Value: A. thaliana
  misc_feature: MA Experiment 20001450 PARAMETER Experiment Name: At_Far-red-induction_P Parameter: Plant Line Value: Columbia
  misc_feature: MA Experiment 20001450 PARAMETER Experiment Name: At_Far-red-induction_P Parameter: Timepoint (hr) Value: 8
  misc_feature: MA Experiment 20001450 PARAMETER Experiment Name: At_Far-red-induction_P Parameter: Tissue Value: Whole Plant
  misc_feature: MA Experiment ID: 20001451 Result: Up-regulated in Transcription
  misc_feature: MA Experiment 20001451 PARAMETER Experiment Name: At_Far-red-induction_P Parameter: Age (day) Value: 7
  misc_feature: MA Experiment 20001451 PARAMETER Experiment Name: At_Far-red-induction_P Parameter: Light Value: Far-red vs. White
  misc_feature: MA Experiment 20001451 PARAMETER Experiment Name: At_Far-red-induction_P Parameter: Organism Value: A. thaliana
  misc_feature: MA Experiment 20001451 PARAMETER Experiment Name: At_Far-red-induction_P Parameter: Plant Line Value: Columbia
  misc_feature: MA Experiment 20001451 PARAMETER Experiment Name: At_Far-red-induction_P Parameter: Timepoint (hr) Value: 24
  misc_feature: MA Experiment 20001451 PARAMETER Experiment Name: At_Far-red-induction_P Parameter: Tissue Value: Whole Plant
tcttttgattctcatcatctctgcattttctgaattggctcagacataatttcttcggtgacttccatggctccgcctgtctctgatgattccctacagcctcgagatgtttgtgttgtgggagtggcgcgaacgcctataggggacttccttggctccctctcgtctttgactgctacaagacttgggtccatagccatccaagccgcacttaagagagcacatgttgatccggcccttgtggaagaggtcttctttggcaatgtcttaactgccaatcttgggcaagcaccagcaagacaggctgcacttggtgctgggattccctattctgtgatctgcaccactatcaacaaagtttgtgctgcaggaatgaaatctgtaatgctagcgtctcaaagtatccagctcggcttgaatgatattgttgttgctggtgggatggagagcatgtcaaacgtacctaagtacctcccggacgcaagaaggggttctcgattaggtcatgatactgttgttgatggtatgatgaaagatggactttgggatgtctataatgactttggaatgggagtttgtggagaaatatgcgctgaccagtaccgtattacaagagaagaacaggatgcttatgctatccagagctttgagcgtggtattgctgcgcaaaacactcagttgttcgcttgggaaattgttccggtcgaagtttccactggaagagggaggccttcagttgttattgacaaggatgaaggattggggaagtttgatgcagccaagttaaaaaagcttagaccaagtttcaaggaggatgggggatcagtcactgctggaaatgcatcaagcataagtgatggtgcggcagcgttagtgctagtgagtggagagaaggctcttgagcttggactgcatgttatcgctaagattagaggatacgctgatgctgctcaggcaccagagttattcacaaccacgccagctcttgctattcctaaagctataaagcgggctggtttggatgcatctcaagtggattattatgaaataaacgaagcattttctgtggtagctctagccaatcagaaactactgggattagatcctgaacggctcaatgcgcatggaggggctgtttcactgggacatccattgggctgtagcggtgctcgtatcttggtcacattattgggggtgttgagagcaaagaagggaaagtatggagtggcatcaatatgcaacggaggaggaggagcatcagcacttgtccttgagttcatgtcggagaagacaatcggatattcggcactctgaagctaagagctgttgttttataacgcaaagcttatgtatatggttcatgtgtgtgtcacaagactgtaactttgtacttgagagagatgcaataaaagtgtg

SEQ ID NO: 41134 - protein, 415 aa, Arabidopsis thaliana; identical to SEQ ID NO: 38067
  peptide (1)..(415): Ceres Seq. ID no. 12482143
  misc_feature (12)..(275): Pfam Name: Thiolase, N-terminal domain Pfam Description: Thiolase, N-terminal domain
  misc_feature (14)..(403): Homolog of NCBI NO: 11257345 NR Description: probable acetyl-CoA C-acetyltransferase (EC
  misc_feature (14)..(403): Homolog of NCBI NO: 19113478 NR Description: acetyl-coa acetyltransferase (EC 2.3.1.9)
  misc_feature (6)..(403): Homolog of NCBI NO: 7433657 NR Description: acetyl-CoA C-acetyltransferase (EC 2.3.1.9),
  misc_feature (1)..(415): Homolog of NCBI NO: 34894172 NR Description: putative acetoacyl-CoA-thiolase
  misc_feature (14)..(405): Homolog of NCBI NO: 30695409 NR Description: acetyl-CoA C-acetyltransferase
  misc_feature (6)..(405): Homolog of NCBI NO: 30695411 NR Description: acetyl-CoA C-acetyltransferase
  misc_feature (6)..(405): Homolog of NCBI NO: 8777413 NR Description: acetyl-CoA C-acetyltransferase [Arabidopsis
  misc_feature (1)..(415): Homolog of NCBI NO: 16417944 NR Description: acetyl Co-A acetyltransferase [Hevea brasiliensis]
  misc_feature (1)..(405): Homolog of NCBI NO: 30695277 NR Description: acetyl-CoA C-acetyltransferase
  misc_feature (1)..(415): Homolog of NCBI NO: 15238793 NR Description: acetoacyl-CoA-thiolase

SEQ ID NO: 41135 - protein, 313 aa, Arabidopsis thaliana; identical to SEQ ID NO: 38068
  peptide (1)..(313): Ceres Seq. ID no. 12482144
  misc_feature (1)..(173): Pfam Name: Thiolase, N-terminal domain Pfam Description: Thiolase, N-terminal domain
  misc_feature (1)..(301): Homolog of NCBI NO: 11257345 NR Description: probable acetyl-CoA C-acetyltransferase (EC
  misc_feature (1)..(301): Homolog of NCBI NO: 19113478 NR Description: acetyl-coa acetyltransferase (EC 2.3.1.9)
  misc_feature (1)..(301): Homolog of NCBI NO: 7433657 NR Description: acetyl-CoA C-acetyltransferase (EC 2.3.1.9),
  misc_feature (1)..(313): Homolog of NCBI NO: 34894172 NR Description: putative acetoacyl-CoA-thiolase
  misc_feature (1)..(303): Homolog of NCBI NO: 30695409 NR Description: acetyl-CoA C-acetyltransferase
  misc_feature (1)..(303): Homolog of NCBI NO: 30695411 NR Description: acetyl-CoA C-acetyltransferase
  misc_feature (1)..(303): Homolog of NCBI NO: 8777413 NR Description: acetyl-CoA C-acetyltransferase [Arabidopsis
  misc_feature (1)..(313): Homolog of NCBI NO: 16417944 NR Description: acetyl Co-A acetyltransferase [Hevea brasiliensis]
  misc_feature (1)..(303): Homolog of NCBI NO: 30695277 NR Description: acetyl-CoA C-acetyltransferase
  misc_feature (1)..(313): Homolog of NCBI NO: 15238793 NR Description: acetoacyl-CoA-thiolase

SEQ ID NO: 41136 - protein, 309 aa, Arabidopsis thaliana
  peptide (1)..(309): Ceres Seq. ID no. 12482145
  misc_feature (1)..(169): Pfam Name: Thiolase, N-terminal domain Pfam Description: Thiolase, N-terminal domain
  misc_feature (1)..(297): Homolog of NCBI NO: 11257345 NR Description: probable acetyl-CoA C-acetyltransferase (EC
  misc_feature (1)..(297): Homolog of NCBI NO: 19113478 NR Description: acetyl-coa acetyltransferase (EC 2.3.1.9)
  misc_feature (1)..(297): Homolog of NCBI NO: 7433657 NR Description: acetyl-CoA C-acetyltransferase (EC 2.3.1.9),
  misc_feature (1)..(309): Homolog of NCBI NO: 34894172 NR Description: putative acetoacyl-CoA-thiolase
  misc_feature (1)..(299): Homolog of NCBI NO: 30695409 NR Description: acetyl-CoA C-acetyltransferase
  misc_feature (1)..(299): Homolog of NCBI NO: 30695411 NR Description: acetyl-CoA C-acetyltransferase
  misc_feature (1)..(299): Homolog of NCBI NO: 8777413 NR Description: acetyl-CoA C-acetyltransferase [Arabidopsis
  misc_feature (1)..(309): Homolog of NCBI NO: 16417944 NR Description: acetyl Co-A acetyltransferase [Hevea brasiliensis]
  misc_feature (1)..(299): Homolog of NCBI NO: 30695277 NR Description: acetyl-CoA C-acetyltransferase
  misc_feature (1)..(309): Homolog of NCBI NO: 15238793 NR Description: acetoacyl-CoA-thiolase
MLASQSIQLGLNDIVVAGGMESMSNVPKYLPDARRGSRLGHDTVVDGMMKDGLWDVYNDFGMGVCGEICADQYRITREEQDAYAIQSFERGIAAQNTQLFAWEIVPVEVSTGRGRPSVVIDKDEGLGKFDAAKLKKLRPSFKEDGGSVTAGNASSISDGAAALVLVSGEKALELGLHVIAKIRGYADAAQAPELFTTTPALAIPKAIKRAGLDASQVDYYEINEAFSVVALANQKLLGLDPERLNAHGGAVSLGHPLGCSGARILVTLLGVLRAKKGKYGVASICNGGGGASALVLEFMSEKTIGYSAL

SEQ ID NO: 41137 - DNA, 3623 bp, Arabidopsis thaliana
  misc_feature (1)..(3623): Ceres Seq. ID no. 13489161
  misc_feature: MA Experiment ID: 108434 Result: Up-regulated in Transcription
  misc_feature: MA Experiment 108434 PARAMETER Experiment Name: At_Root_Tips_cDNA_P Parameter: Tissue Value: Root Tips
  misc_feature: MA Experiment ID: 108461 Result: Down-regulated in Transcription
  misc_feature: MA Experiment 108461 PARAMETER Experiment Name: At_Germinating_Seeds_cDNA_P Parameter: Age (day) Value: 1 vs. 0
  misc_feature: MA Experiment 108461 PARAMETER Experiment Name: At_Germinating_Seeds_cDNA_P Parameter: Tissue Value: Germinating Seeds
  misc_feature: MA Experiment ID: 108462 Result: Down-regulated in Transcription
  misc_feature: MA Experiment 108462 PARAMETER Experiment Name: At_Germinating_Seeds_cDNA_P Parameter: Age (day) Value: 2 vs. 0
  misc_feature: MA Experiment 108462 PARAMETER Experiment Name: At_Germinating_Seeds_cDNA_P Parameter: Tissue Value: Germinating Seeds
  misc_feature: MA Experiment ID: 108463 Result: Down-regulated in Transcription
  misc_feature: MA Experiment 108463 PARAMETER Experiment Name: At_Germinating_Seeds_cDNA_P Parameter: Age (day) Value: 3 vs. 0
  misc_feature: MA Experiment 108463 PARAMETER Experiment Name: At_Germinating_Seeds_cDNA_P Parameter: Tissue Value: Germinating Seeds
  misc_feature: MA Experiment ID: 108464 Result: Down-regulated in Transcription
  misc_feature: MA Experiment 108464 PARAMETER Experiment Name: At_Germinating_Seeds_cDNA_P Parameter: Age (day) Value: 4 vs. 0
  misc_feature: MA Experiment 108464 PARAMETER Experiment Name: At_Germinating_Seeds_cDNA_P Parameter: Tissue Value: Germinating Seeds
  misc_feature: MA Experiment ID: 20000180 Result: Down-regulated in Transcription
  misc_feature: MA Experiment 20000180 PARAMETER Experiment Name: At_Germinating_Seeds_P Parameter: Age (hr) Value: 24 vs. 0
  misc_feature: MA Experiment 20000180 PARAMETER Experiment Name: At_Germinating_Seeds_P Parameter: Tissue Value: Germinating Seeds
  misc_feature: MA Experiment ID: 20001558 Result: Up-regulated in Transcription
  misc_feature: MA Experiment 20001558 PARAMETER Experiment Name: At_Drought_Soil_Dry_P Parameter: Age (day) Value: 27
  misc_feature: MA Experiment 20001558 PARAMETER Experiment Name: At_Drought_Soil_Dry_P Parameter: Organism Value: A. thaliana
  misc_feature: MA Experiment 20001558 PARAMETER Experiment Name: At_Drought_Soil_Dry_P Parameter: Plant Line Value: WS
  misc_feature: MA Experiment 20001558 PARAMETER Experiment Name: At_Drought_Soil_Dry_P Parameter: Post Timepoint (hr) Value: 6
  misc_feature: MA Experiment 20001558 PARAMETER Experiment Name: At_Drought_Soil_Dry_P Parameter: Post-Treatment Value: Re-Water vs. No Drought
  misc_feature: MA Experiment 20001558 PARAMETER Experiment Name: At_Drought_Soil_Dry_P Parameter: Timepoint (day) Value: 13
  misc_feature: MA Experiment 20001558 PARAMETER Experiment Name: At_Drought_Soil_Dry_P Parameter: Treatment Value: Drought vs. No Drought
atgggtttgaatctgaatccaatattgagacaagaactggctaatcttgacaaagacacagagagtcgtaaatcagcaatgaaagctcttaaatcttatgtgaaggacttggattcaaaggctattcctggttttctagctcaagttttcgagactaaagaaaccaactctttgtccggtgaatacacgatttcgctttatgaaatccttgctcgtgttcatggacctaacattgtgcctcagattgatacaatcatgtccactattgtcaagactttggcttctagtgctggttctttccctcttcaacaagcgtgttcgaaagttattccggcgattgctcgatatgggatcgatccgactactacagaagacaagaaacgagttataatccactctttgtgtaagcctcttacggattctctattggcctctcaagagagccttacttcaggggctgctttgtgtttgaaggctcttgtggatagtgacaattggcggtttgcttcggatgagatggtgaacagggtttgtcaaaatgtggtagttgcgttggactcaaactccaaccaaacacatcttcaaatgggtttggttatgtcacttgccaagcataatcctttgattgttgaagcttatgcaaggttgctgatacacacggggttgcgaattctaggatttggagtatctgaaggaaactcgcagaaacgattatcagcagtccaaatgttgaacttccttatgaagtgcttggatccgagaagcatatactcggaagttgagttgataataaaagaaatggagaggtgtcaatctgaccaaatggcttatgttagaggagctgcttatgaagcaatgatgacttcaaaaagaatagcggcagagctcgagtcgaagatggagaaaggttgtcgttctgttactggttcgaatttcagtcgaagaaactgttcgtccattgttcctgattactccttatcacctgaatcacagactctaggctcttttagcgggtatgattctccggttgagtcctcgcctatttctcatacttcttgtaactctgaatttgatcggaggagtgtgaaccgcaaactttggagacgtgatgagaatggaggagtggttgatatctctttaaaggatggtcttttctcccgtgtaactaaaggaagcaccactgtctctgattcacctcttgtaccgtatgatacttgtgaaaatggagatgaatttgaagggtttctaatggaaagtttgagaaacaccactcctagtcctcagagacagcgttcacgtcgcatcaatgctgaagatttcaacatcttcagcactccacggaagctaatcagctctcttcaatatcctgatgatgttgatttagatcattcagacatccaaagtccaatactgagaggcgagagagagaaaaccataggatctcgcaagaatcctaaactcagaaagcaatttccaaccatggtggaaacaatgtcatcaactatcacagttagtgaagacacagctcaaacacagatgataaccggtaagaagaagaagaagaagatgagctatgccaaactcgttattgcgatatcttttgttgtggtggctctcttcgcaactgtgatattgatgaaccggttcaaggttgataattttttccggtttaatcaaaccggttcgagcaatttattagcttcgagaaaaggaacaatttattcactcgttaagggttttgcgcacatccgcctcatgatgacaaactccgattccgaccactgtactccggcgaaaacctcaatttctggggatggattagaaaaagagagcgactttaagaagcaactgaactctgagatagatccacaagcttcttcctcgcaaaacgatgcaataactatggaagatggagccgtctctgtaaacaatagggatctgcaagagataaaggaatcatccttctctaaaggaagtgagcaatatcgagttgatggagcccttgaagaaagtttgaattttgaggagaaggaacaagaatctgaagctcagagactattggaagcagagaagagaagattgctggctgaaatcgaacttgggtcaatctttaggaagagtgttgatgtggatacgttgcctaagatcgaagagacgatggataatgatgttgataagattgaattggttgatcatactgcgttggttgatgttgttcatcatcctaagagaccagggactgctcaaaatgagaaggatacacctagaaagcttaagaaaattggagataagagaaatgttattgaggggagtggagtagaaaacaatgggaagcagtttaggagattgtacactaggaaacaattggagtcaatgaggtttgcccacattgtgaatcagaagaacctgtggagtgagatgtattctaggattctacctgaggtggtgactgagtatgaaagtttagtttatgtgaagaattacaagagttcaaagtctaatcgtgttcgtgggcgaacggagagtggcaatgaagaaaatttggggactgaagaaggaacggaggaccctgaagactacactgacgataatgatgattacaatagcattttgagacctgcgtttgaagtagatggagaacctgattttagtactggaccaccagaagatgggcttgaatatttaagacgagtcaggtgggaggctaagggaattccgaatgtaagagtagccaagatagatgaaagcacgtacataaagaaagagcaaagtgtttatatgccactaattcctgaaatccccaaatgtccagagtacctgttacccatgaaggaatgggaggactcgttgcttttggactttgtacaccttcgccagactctaacacaaagtgccaacagctgtgaggatgagataatatcaagtcagtgtgtagaagatttgcttgtggagatgttcaataagcatctccacacagaggaggatgagtcttttggtgaggtggtaacagacatacaaggaatggactcggtgacgcgggtatcaaagctgaaaaagcgtatatgtttggttgagaaggagagcggtttacagagtagcgattgcaaatgggtagtagcgttgtgtgcatcattggagactcctttggatgccgatacttgtgcttgtctaaggggtcttctgaggaagtgtgctagtgttcgtgcagagacatcattagaggttggagatgaagaagttatcaccatggcaaatatgctcatcaccatcgccggcagatactttggccaaatgggacagtaataagtgaagaagagagtggacatgacatgcccttacttttctctcatatgtgcttttgaatcttacatgagctttaatgccattttttgtagtgtcccctttgttatgtcatctgtgatgttcggaatcatcgtatttgtgcgaagtaagctctttttttttgggatcttgttgaggttattgagatcttcacaacttccgtggatcggctagatagagtcttcttatcataccgagttctatcattgtcattgttgaaggaaattacaagaactacgttgctgtagtggtttcaatttgttacaattcagtttaagtgc

SEQ ID NO: 41138 - protein, 1100 aa, Arabidopsis thaliana
  peptide (1)..(1100): Ceres Seq. ID no. 13489162
  misc_feature (871)..(1099): Pfam Name: Survival motor neuron (SMN) interacting protein Pfam Description: Survival motor neuron (SMN) interacting protein
  misc_feature (668)..(728): Homolog of NCBI NO: 15227950 NR Description: hypothetical protein [Arabidopsis thaliana]
  misc_feature (1016)..(1076): Homolog of NCBI NO: 15227950 NR Description: hypothetical protein [Arabidopsis thaliana]
  misc_feature (637)..(938): Homolog of NCBI NO: 15227950 NR Description: hypothetical protein [Arabidopsis thaliana]
  misc_feature (1)..(320): Homolog of NCBI NO: 15229201 NR Description: expressed protein [Arabidopsis thaliana]
  misc_feature (844)..(1099): Homolog of NCBI NO: 25405723 NR Description: hypothetical protein F20D21.20 [imported] -
  misc_feature (586)..(1100): Homolog of NCBI NO: 18404909 NR Description: expressed protein [Arabidopsis thaliana]
  misc_feature (1)..(546): Homolog of NCBI NO: 22330247 NR Description: hypothetical protein [Arabidopsis thaliana]
MGLNLNPILRQELANLDKDTESRKSAMKALKSYVKDLDSKAIPGFLAQVFETKETNSLSGEYTISLYEILARVHGPNIVPQIDTIMSTIVKTLASSAGSFPLQQACSKVIPAIARYGIDPTTTEDKKRVIIHSLCKPLTDSLLASQESLTSGAALCLKALVDSDNWRFASDEMVNRVCQNVVVALDSNSNQTHLQMGLVMSLAKHNPLIVEAYARLLIHTGLRILGFGVSEGNSQKRLSAVQMLNFLMKCLDPRSIYSEVELIIKEMERCQSDQMAYVRGAAYEAMMTSKRIAAELESKMEKGCRSVTGSNFSRRNCSSIVPDYSLSPESQTLGSFSGYDSPVESSPISHTSCNSEFDRRSVNRKLWRRDENGGVVDISLKDGLFSRVTKGSTTVSDSPLVPYDTCENGDEFEGFLMESLRNTTPSPQRQRSRRINAEDFNIFSTPRKLISSLQYPDDVDLDHSDIQSPILRGEREKTIGSRKNPKLRKQFPTMVETMSSTITVSEDTAQTQMITGKKKKKKMSYAKLVIAISFVVVALFATVILMNRFKVDNFFRFNQTGSSNLLASRKGTIYSLVKGFAHIRLMMTNSDSDHCTPAKTSISGDGLEKESDFKKQLNSEIDPQASSSQNDAITMEDGAVSVNNRDLQEIKESSFSKGSEQYRVDGALEESLNFEEKEQESEAQRLLEAEKRRLLAEIELGSIFRKSVDVDTLPKIEETMDNDVDKIELVDHTALVDVVHHPKRPGTAQNEKDTPRKLKKIGDKRNVIEGSGVENNGKQFRRLYTRKQLESMRFAHIVNQKNLWSEMYSRILPEVVTEYESLVYVKNYKSSKSNRVRGRTESGNEENLGTEEGTEDPEDYTDDNDDYNSILRPAFEVDGEPDFSTGPPEDGLEYLRRVRWEAKGIPNVRVAKIDESTYIKKEQSVYMPLIPEIPKCPEYLLPMKEWEDSLLLDFVHLRQTLTQSANSCEDEIISSQCVEDLLVEMFNKHLHTEEDESFGEVVTDIQGMDSVTRVSKLKKRICLVEKESGLQSSDCKWVVALCASLETPLDADTCACLRGLLRKCASVRAETSLEVGDEEVITMANMLITIAGRYFGQMGQ
